United States Patent Application Publication US 2024/0084332 A1 - sequence listing, part 6

SEQ ID NO: 22804 - protein, 376 aa, unknown
  TnpB Polypeptide
MKTFEFKLKPTKKQEAALLAVLIGSRRLYNECLEELIDHYKETGKYLHIYEQDKRHGKAQHPDLPAVVVDTTLKRVHRSFDNFFRGLREGRKVGFPRFKGAHRWDTFSFRDAGNHLDGNRFKTPKICGGSIRAIVHRPLEGVFKFARIVKRPSGWYVQCVCETEPNPMPENDRAIGLDMGITYLLADSEGHFVENPKCLKASLKRLAKAQRVLARRKKGSRRRNKARKNVARIHEKIVNQRKDALHKASRYYVDRYQVIAIEDLQIGNMVRNHCLAMAISDASWGQLRWDLTYKAEGAGRVLIAVAPQYTSQKCSRCGEYVPKALSVRTHVCPHCGYIADRDTNAARNILSKARTGSSVDNVGSSSPSVDREATPF

SEQ ID NO: 22805 - protein, 400 aa, unknown
  TnpB Polypeptide
VSLGDEGSLTLTVKVRVRAEPETFRELLSLMYRYREALNHAIRVVVENEALTLGKAHRLLYDILKDRYGLPSKIAIDCYREAIAIAKSWLNNPDRGNMPRAKTLRVWLTHKYSYRVNGNYVELLGGYRLEIIGWDRRYDNYPSGDARLLFKDGKLVLEVSKHIPKPRKYTPRGVLAIDVNEKYIVFGNSLFEYRFKTPIERALHYKQLAERLERKYSSTRYNAWLRRRGVRRRVSYYHAKARRIVEDWVKKTSHKIATLARQHQYTVAREDLTGLIESLRKLPREHKVSLLILSYRKISEWIDWQCRKHGVPSTAVDPMDTSTKCPRCRSKMGENGYRVFKCPRCGFEANRDTVAVLNIEIKASYKTGGSLTTPTAPHMTDVAPNRCGGPVSPLKGTLAL

SEQ ID NO: 22806 - protein, 421 aa, Moorea sp.
MIILEFKAYGKKHQYYAIDEAIRTVKFIRNSCIRLWMDNKGTGKYDLSKYCKVLAKQFPFAKELNSTARQAAAERAWSSIRQSRRYANARFYDNCKKKVPGKKGFPKFQKNCRSVEYKQSGWKLSPDKKSFAKRRLCRILFSDKKGIGKLKLKGTWDLWHFDKKQIKRVRIVRRAYGYYVQFCISVDINEELKPADANVGLDVGLKYFYTDSRGNVEPNPRFYRTVEKRLKFYQRRVSRKKKGSANRRKAINKLGRTHLKISRQREEHAKRLARCVIRSRSVGFAESNDLVAYEDLRVKNLVKNHCLAKSINDAGWYQFRKWLEHFGEKFGRVTVPVNPAYTSQNCSQCGEVVKKSLSTRTHVCKCGCQLDRDHNAAINILQRALGTVGHTGTWIIDPNAYGDLASTLLGSDQVEQVESTK

SEQ ID NO: 22807 - protein, 395 aa, Clostridiales sp.
MAEKNYYSMTTKRFTLRTAHNGWLSATRKFYNDVLYFYYKLFLEHPEFYSLTNQKAMRALECLSIVGRDKKPVANPLPWEGVPLYFRRAAINSALAAGKSYLSREEQTCPSQEFSSGITLYKGMYKDLDSHSIRVKVWNGEKWCWIHGRLSGSEIPADASCLSPRLVFREKQIELHVPIRQSVSNRGTLKQRIGKELRICAVQFTNGDSIAVCCVMNRDYTVEAVKFFRGGTAYMNRCQRILDKIEKSQKASPKETDKDANKKYWKKLKDIHEDISHQISRKIVNFSKENNADIVILPKYDSAYSKYVMAAVGKWSPLYVSYSIRRQLQYKAWQEGIFVLDSSVSDIGRVCAKCGAPVQRKGELFFCENGHQGNRWVNSACNLGKKAYESLEKHI

SEQ ID NO: 22808 - protein, 430 aa, unknown
  TnpB Polypeptide
MEYAHRYRACPPKHIADALEHHLNIHRQAYNYTRYEYNNCQHEPTVANGAFKHHKRLPDWKDEYPIFKDVHSKALQKTVTRFYQNLSNLAEKKKAGYKVGKLKWKKPRDYQSITYSQSGFELKNTSGPDTNTATLNLTKIGDIPIRYHRPLPDHAEIKEVTVKKHTTSEWYVSFSLDIDEAHLPDKTPADELEGDNCVGIDLGILSYVHTSDGLSLEQLDVEADYERLGKAQHVLDRRECGSENWEKQRERVANIQRRIRRKILDYQHKITSWLTTEYDAVFVEDLDVKPMLEDSNNARNKQDAAWARFIKLLEYKADLNGCYVEKVEPAGTTKECSECGASTDKPVWVREHSCPSCGFELDRDWNASLNVLQRGFELLGERLGLEQSEVQRLKETGAFAGSVQQEQIPAETVVETGSPLVRENGKPLPR

SEQ ID NO: 22809 - protein, 387 aa, unknown
  TnpB Polypeptide
MRKTFLYRIYPTKAQATRLRQMLDECRWTYNQLLAQRKVYWEEAGLLVGLYDQHAYLPLLKEERPSLTNVHSQVLQNVAVRIDLAFQAFFRRVKAGAEPGYPRFRGVGRYDSLTYPQYGNGAKLNGRQLQLSKVGNVAVVLHRPLEGTPKTVTIKRSSTGKWYATISCAWEPTPLPPNERAVGIDVGLTHFATLSDGEEIANPRFFRQEERALAKVQRAHAKLEKGSPARRKHRPAVARVHERTRWRRQNHAHQHSRRIINAQQVIAVEDIDASRLVHNHCLAKSIYDAAWTEFRDYLAYKAAWAGRQYIAVNPAYTSQDCHRCGHRQKMPLAERMFHCPCCGLVLDRDHNAALNILARGLAGIGSQSVAATPLQRLWSNHSSTTSL

SEQ ID NO: 22810 - protein, 466 aa, unknown
  TnpB Polypeptide
VVFFPIGLPQLRAEVTADLPHGVLAAAEHVRVEHAPPVLRHEDQMDVERRNHVPATAVLRRDCQRPMACSGVMQVRYRYRLYPAPGQQQALARVFGCARVVYNDCLRLRDACHAAGEKISDTEVQRRVITLAKLTPERVWLGEVASVALVQACQDARRAYRNWFDSLSGTRKGRQVGHPVFRRKYQRQSIRLTRNGFSLRGRKLYVAKVGDIRVEWSRDLPSAPSSVTVIREPDGRYYASFVVEREAIPLPACDREVGIDLGLASLAVTSDGEVIANPRFLRAKERRLARAQRALSRRQKGSANRAKARHRVAVMHRTVRETRLDHAHKIALRLARDNQAVYAEDLCVSGLARTRLAKSVYDAGWSQLLRLIEEKAAQYGRTFARIGRFEPTSQMCSACGVKDGPKPLSVREWACAACGTAHDRDVNAAKNILAAGRADKSNACGADVRPPLVAAGAETGTHRSAA

SEQ ID NO: 22811 - protein, 548 aa, Escherichia sp.
  misc_feature (132)..(215): Xaa can be any naturally occurring amino acid
  misc_feature (452)..(535): Xaa can be any naturally occurring amino acid
VKRLQAFKFQLRPGGQQEREMRRFAGACRFVFNRALARQNENHEVGNKYIPYGKMAFWLVEWKNATETQWLKDAPSQPLQQSLKDLERAYKNFFQNRAAFPRFKKRGQNDVFRYPQGVKLDQENSRIFLPKXXXXXXXXXXXXXXXXXXXXXXXXXXXXXXXXXXXXXXXXXXXXXXXXXXXXXXXXXXXXXXXXXXXXXXXXXXXXXXXXXXXXKFQLRPGGQQEREMRRFAGACRFVFNRALARQNENHEAGNKYIPYGKMASWLVEWKNATETQWLKDSPSQPLQQSLKDLERAYKNFFRKRAAFPRFKKRGQNDAFRYPQGVKLDQENSRIFLPKLGWMRYRNSRQVTGVVKNVTVSQSCGKWYISIQTESEVSTPAHPSASMVGLDAGVAKLATLSDGTVFEPVNSFQKNQKKLARLQRQLSRKVKFSNNWQKQKRKIQRLHSCIAXXXXXXXXXXXXXXXXXXXXXXXXXXXXXXXXXXXXXXXXXXXXXXXXXXXXXXXXXXXXXXXXXXXXXXXXXXXXXXXXXXXXFTKSQRPSAKTTQ

SEQ ID NO: 22812 - protein, 450 aa, unknown
  TnpB Polypeptide
MSYQGEIKMQIISSYGVELRKQNIPIRQTLEIYRSAVSYLIGIYVQVWEELAEIPDAKRRFNAAEHLVHTTKKNHACFDFDIRFPKMPSYLRRSAIQHALGTVSSYKTRLDLWEKTDGKSGKPKLVYENHAMPVFYRDVMYREGAEGKDEAYLKLYDGHDWKWSCVRLDHTDMEYLRKYWSGKKASAPTLEKRHRKYFLRFSYTEEVTLTKTPVKEQIICSVDLGINTDAVCTIMRADGTVLGRRFIDHPSEKDRMYRTLGRIRRFQREHGSAQTQGRWAYTKRLNTELGKKIAGAIVRYAEENHADVIVFEYLEMQGKISGKKKQKLHLWRKRDIQKCCEHQAHRKGMRVSRICAWNTSRLAYDGSGAVTRDWENHSLCTFQTGKRYNCDLSASYNIGARYFIRELLKPLPATERSLLEAKVPPVKRRTSCVYADLRKLHSEMELLKAA

SEQ ID NO: 22813 - protein, 288 aa, Lactobacillus sp.
WKSKKRSRKTFRTDRAQIVNGKLRLDKPHGTRVWYDIKMAEPPRWQGEIKQVCIVQDADGYYASLSIEATVMVEKRTIRRVTAVDVNVGKFDYKTPSGYAIQSTLLASLPALYARITHYQKQLAHKRTTNPKHFNSMTYRSTRTKLKRNYQRVERIQMDLLNKFTTKLVVDNDLIGIEDLDNQHMRMNRRLAKNLHRSMFGKFKIMMQYKADWNGSTLILADPMFPSTQRCSRCGHIKTGEEKLTLHGNVKYHTGHDDYICYGCGARMRRDENAVDNLIDYAKSKVQG

SEQ ID NO: 22814 - protein, 220 aa, Oscillatoriales sp.
LVKGLNFRATEPIQKTEFATQLVRDKKRWFACIPIREEARTKELDKVIALDPGVRTFLTGYDGDSFQEFGKADIGRIQRLCSHLDKLMGRASKAGRRQKRRMLKAASKLRIRIRDLVDECHKQVVNYLTSQYKVILLPRFETSQMVVKSKRKLRTKTARQMLTWGHYRFECHLKQSAKKRGVVVIDKCPNCGHEHDRDWGGARNIMIRALRDGYESSLYQ

SEQ ID NO: 22815 - protein, 418 aa, unknown
  TnpB Polypeptide
MLSHKGYVYCLKPSAEQQILLSQHFGHVRFVKNWAIALKSRYYKMYGKSLSRRELQDQLVKKKQKSAFAWLNDVNSQSLLAALMDVDSAFKRFFTKEAGYPKFASKYDAWQSFSCPQHVRLEGGQVHLPKLGLMDLVLHRQTPQDGKIKNCVIKRSPTGKYQISLLIERNVNEVICVPVSKEQSLGIDLGIKTFIMGSDGSAIANPKFLSKQLPRLKIEQRKFARMQKGSNNRAKQKKLVAKIHEDVANARHHFLHQQSYRLAVKNHATTVMMETLMIKNMVRNRKLARHISDCSWGMFENALEYKLAENGKNLIKINTFLPSTKQCRMCKTKNSQITLKDRVFVCRNCHHTEDRDLHAAINIRDFGYEQHTRSLGTCETVKRSPDAISVGADESAKGSNVIGMGRLEEAPARFAYAN

SEQ ID NO: 22816 - protein, 374 aa, unknown
  TnpB Polypeptide
VILTYRYRLLPLESQHRALQRLCAAQRELYNAALEERIDCYRKTGKTRTYIDQYKALTQCRHELPDMGELPANLQRWTLKRLEDAFQGFFRRLKARNGKDGFPRFRGTGRWDAFGFAEFSGIRFDGKRLHFAGMPGGLKLHLHRPLPDDAKIRSCVFRRDGRGWFVSLNIAIKAAAKRALASAIGVDLGLNVFAFCSDNLEIPNPRIAQRAEKEMRRRQRALSRCTRGSHRRHKVRAQVARVHRKITNTRNTWLHRESAILVKRVDVIVVEDLKVSNMVRHSTLARSIVDASWSRFVSMLDYKVEKTGGHLVRVDPRNTSQKCSGCGELVPKLLTVRTHACPSCGLIIDRDHNASLNILRAGIGAGALNVIGWR

SEQ ID NO: 22817 - protein, 225 aa, unknown
  TnpB Polypeptide
MRKRMQEAGQTTFNDVFRDKEQRFVHDQLHTVSRRVVEWIQRFDSPVIVFEDLEDIRDDIEYGTRMNRRLHSLPFAKLRDFITYKAAWQGIPSDDVDPEYTSQQCPLCGHTEQANRHKKRFKCRECEHQDHADRGAGISVAQKWLRTQADRNVPALNTLPQVRKWELRRQASGPVDGPTVTHHTVEGHQTDGVSGVSDQSTGRSSGVVRKTQSSVMTRDEVSRTT

SEQ ID NO: 22818 - protein, 225 aa, Symploca sp.
NEIGLDVGIESFYTDSNGSTEPNPRFLRKAESDIKQVQRRIYKKKKGSTRRRLARVRYSRKHLRISRQRNEHAKRVARNVCKSNDLVAYEDLRVSNMLKNHTLAKSIADASWYQFRQWIEYFANKFGKEAVAVPPQYTSQECSQCKRVVKKSLSTRTHICQCACTLHRDTNAAINILHKAKSRGGHPQSNAKGVATSTLVGVTQKRASRYDELRIPAPLGRGVSI

SEQ ID NO: 22819 - protein, 382 aa, Escherichia sp.
MRRFAGACRFVFNRALALQNENHEAGNKYIPYGKMASWLVEWKNATETQWLKDSPSQPLQQSLKDLERAYKNFFRKRAAFPRFKKRGQNDAFRYPQGVKLDQENSRIFLPKLGWMRYRNSRQVTGVVKNVTVSQSCGKWYISIQTESEVSTPVHPSASMIGLDAGVAKLATLSDGTVFGPVNSFQKNQKTLARLQRQLSRKVKFSNNWQKQKRKIQRLHSRIANIRRDYLHKVTTTVSKNHAMIVIEDLKVSNMSKSAAGTVSQPGRNVRAKSGLNRSILDQGWYEMRRQLEYKQLWSGGQVLAVPPAYTSQRCACCGHTAKENRLSQSQFRCQVCGYTANADVNGARNILAAGHAVLACGEMVQSGRSLKQEPTEMIQATA

SEQ ID NO: 22820 - protein, 396 aa, unknown
  TnpB Polypeptide
LQSRAIKTVRQKLQASGELIQLLDEFRRMVNVCIMIGNEHDVSSRRTPSSLAYPHLSREMPGYYRLGAISMAASILHNYRKARKKHALTRFPHAKKLMLTSCYGFKIVSDCLRLPVRPRRYVYFKLNGHTLQVLSGLNVRSVSLTPNAVSLSYSKETAEIEPEGYVGVDRNLDNVATASTDRTAQTFDLSQATRIKSNYRMVKSQFKRNDTRIRTRVFSKYGEKQRNRVQPLLHNVSKKIVDDAKTKRNGIVMEKLTGMRRLYRKGNSQSRNYRARMNSWSYGELQRQIEYKARWEGVRVIYVPARDTSKRCSICGYKTLESTQRRLWCPHCGAILDRDENAARNLAAGGLRFSPNGPPGEAMVEEREPENATLILKVDGGKLSQQTNPSISSTET

SEQ ID NO: 22821 - protein, 413 aa, Symploca sp.
MLVFEAKLEGENEQYERLNEAIRTARFVRNSCLRYWMDNKGVGRYDLSAYCKVLAQEFPWANKLNSMARQASAERAWSSIARFYDNCKKKVKNKGFPRFKKHRTHGSVEYKTCGWKLSEDRRTITFTDGFKAGSFKLWGTRDLHFYQLSQIKRVRVVHRADGYYVQFCLNVERVSKREPTGKTIGLDVGLNHFYTNSDGQTIENPRHLRKSEKALKRLSKRFSRTQKDSKNRAKARNRLSRKHLKVSRQRKDFAVKLARCVVESNDLVAYEDLQVRNMVRNRKLSKSISDAAWSAFRDWLEYFGKVFGVVTVAVPPHYTSQSCSNCGKVIKKSLSQRTHRCHHCGFVLDRDSNAAINILELGLRTVGHTGTLNVSEDIDLCIGGETPQCKPSRGKRKPKERSLESPTIFGTPN

SEQ ID NO: 22822 - protein, 513 aa, Bacillus sp.
VGGEWAVLRLVFLAPFWYDKEKERTFGVMKRMADIKRYTTMQIWVKKGYRMHSYFNEMCTNSKNLYNTTNFYIRQVYTGLTQTKALQPLQIEVLEAIKKHLPHMNKTQLLAYEKKRSKEETKPLDQQKDIKCNLFTEPSNEKPYVNYHFLDGFFKAAVQPDYRSLPTQSSQGVMKTVFQNWKSFYASLREYKAHPGKFKSKPKIPGYSRGKEKEISFSNQDCVIKENRYVKFPKTKERLNIGKMGFSEGKLKQIRVIPKHGHYVVEMVFEIPSQVKMRESKNRIMGIDLGIDNLATIVTTTGRRPVLVKGKNIKSVNQRFNQLKAYYVGILRQGKHPREGSFTSQRLEKIHQKRFKQIKDLFHKASHQMIKIALEEDVDTIVIGQNKDWKQNLDLGKRNNQSFTTIPHSLLIKMMTYKAERHGIHVLLTEESYTSKASFLDNDLLPVFGQNDVKRSFSGKRMKRGLYRSKNGTLLNADVNGAANIIRKVFANSFIEPSSPAASFMQPQTFVLK

SEQ ID NO: 22823 - protein, 363 aa, unknown
  TnpB Polypeptide
MQKGIKFRAYPNKDQQNLINQTLGCCRLIYNKGLAMRNVAYKNGSKVGYSQTSAMLTELKKTSDFAFLKEVDSIALQQSLRDLDRGFVNFFQKRAAHPTFKSKHNNHQSYRTVNQGDNIRIVDKYIKLPKLGYVKIKQSMEVGKINNVTIERTPSGKYFVVLNVDFEPELQADKAGSIGIDVGIKDFYSDSNGNVVHNPKYLEKSMRKLAREQRKLSRKQKGSINRNKQRIKVALIHEKVTNQRNDFLQKQSTMLVRENQTICIEDLNVKGMIRNHKLAKSIASASWSKFFTMLEYKAMWYGNDVIKVPTMYPSSQTCSCCGYKNPLVKNLAIRNWECPECHTKHNRDTNASINILNKGLEVA

SEQ ID NO: 22824 - protein, 388 aa, unknown
  TnpB Polypeptide
  misc_feature (322)..(358): Xaa can be any naturally occurring amino acid
MVKAIKVMLIPNNVQKTKLFQYAGASRFAYNWALAREIENYEKGGKFISDAELRKEFTKLRHSDEYAWLLNISNNVTKQAIKDACTAYKNFFRGLQKFPRFKSKKRSMPKFYQDNVKIRFSNTHVKFEGFSSSRKANKQKMNWVRLAEHGRIPTDAKYMNPRISFDGLNWWISVCVEFPDCREILNDDGVGIDLGIKDLAICSDGTKYKNINKSQKVKKLEKQKRRLQRSISRSYEKNKKGESYCKTNNVIKKEKLLLKRDHRLTNIRKNYLNQTISEIINRKPRFICIEDLNVSGMMKNRHLSKAVQEQGFFWFRKQLEYXXXXXXXXXXXXXXXXXXXXXXXXXXXXXXXXXXXXXRVYRCECGNMIDRDFQASINLKTYGEKFAS

SEQ ID NO: 22825 - protein, 501 aa, unknown
  TnpB Polypeptide
MRPSRPARPGHGPRQHGRVVQRHLETRMGRRTPLVLDQAHGQVSRRSRVLVERPRAGRRTAPVRPVFWPCRAAALERACRVSATIVRGWRASLYPTQEQSRLLALYSNHARGLWNKLLGEVVRRYGADQTFLWRADLQRFVVAWKRQPETAWVAELPAHAALDVCARLDGALSRMVRDRRAGRRCGFPRFRKKQWGEGMVYFVNQSTRLEAARRCVRLPKLGHVRLRGSSVPTGKLLSSRAVRDGDRWTLSAQFECPRPAPLPATRLRLGVDAGLTSLATIYDGTGFEHVMPPKPLRKAAKRLRRAQRRVARRQKGSTRRRAAVKRVAGIHRRVRHVRADHMHKLTHRLTAKAGALTIETLDVRAMSRGLRLGKSVADAAIGTMLRQVAYKADWRGRVLTRADRWHPSTKLCCRCGARHAMPLSQRVMRCACGNVMDRDENSAVNLYNYGTPRNCAEPQGASPATRVETGCQAAGASPLPVPVAETRMLALMGQGNDHECQ

SEQ ID NO: 22826 - protein, 406 aa, unknown
  TnpB Polypeptide
MLVKGVAFRLDADLPSEAKFLLEDFRLAVNNAIRAGLQARVTSRNALARIAYKDFRQEHPMMYAQHLVSAFGVAGGVLKNCRRNVRKGITYKIPYVKCLMMKAENQAYKLDRESGTIDLPIRAGCHVKLKLVVSQYHRKFLDDATLSLGSLTLLPNRVIVAFRKGAPAPYTPESVLSLDTNERSLDGVFVDDDSGASISVKADFPDVAIAQQMHHDRRRRLQKKKAYDRRTSRNLCRREGKREHNRVEYWLHQIANAVLSFGEKEKSAIVLENLTGIRFKRSKDMNRRLSLWPRRKLHQIIEHKAQWKGIPVVKVDPRNSSRKCPICGRIQDSRMGAEFVCECGWHMDRHINASINLLQTAISNGMAGGLRFDPGAFQHDVMMILYEPEMAARSEPNGTSCIGVMT

SEQ ID NO: 22827 - protein, 264 aa, Coprothermobacter sp.
LNCCCALVIFLISRLRSAKPISSSGVLVRKPSGYYLHVTCYIPREDSVRKHIGEAVGIDFGVNKKLTLSNGLQIRFELHETKRLKRLQRDISRCKNGSSNREKLRAKLRKEYEKINNRRKDVQNKVLAYLKQYKVVVYQDDFIKGWEALFGRQIHASGIGGLKSRLRNSLETPIEVARYERTTQECFQCGKVHRLSLSERMMECECGWESDRDVNAALVILRKGLGLEPKQAVGLDRPELKPLERETAARILGSNPYICVSFTQ

SEQ ID NO: 22828 - protein, 462 aa, Cylindrospermum sp.
MTFRLYPNTQIEKKMRYHRKLHKDLFNAAVNNRFTQYQKFNHKVDYFEQQNCLPAFKEVWTEYKEINSQALQATLKRVDFAFERWFKGLGKGPRFKSICHYSGWTYPAKSGYSVESNGENGYLNLSKIGRIQMRGQAKYWGKPTTCTIVYRNGKWYASITVDVLDQVLRPEILPTGAIGIDLGCDSALSITDGENHQQIKAPKFLRKAEHQIKKASFEKRRKRAPNRNKKIKSSRRYKKAQAKVSKLTRKVANKRQDWVHQVAAEILSSNSFVATEKLEVKNMTSKAKKATQCGLGGFPHEQLRQEGKRKKQKAGLNKSILDVGFGLLRSTIKYKVEQIGGLFVEVPTRQVKPSQTCPQCGHQHKKTLDIRTHKCDTCGYVQDRDIAAAEVMLYWAKGTLPGLGTSLVDAEPSSSTSSTKARKQAGSMKQLGAMKRQKSQSNFVTNDLGDVETPISGEARLG

SEQ ID NO: 22829 - protein, 469 aa, unknown
  TnpB Polypeptide
MYRTIKEIVHLENIERKYEIDELCKNYQSDSNYIYSRFSGIRSLNILNFRTIREILKEENDSGSLKNIKLQGHYFQRCLNSTIGNIKTIWNITIKDVKKKIQNKNLTDIEKYFSMIILKNKNILYEILVENIQYKDLIKLKEFNKYKKLHSNVKIRYKYIKAIICRYIRKCKANIPRKRYPNSLKIDNTLYSLNLTKIKIQGLLKGKRIELVRSSDKVYSNEATLKINEKRQIEIHFLKKVKSKIIKNNKIIGVDKGYTDLFHSSTGMNNKYGIGFRRKIINKIEKDTIKQSNRNYYWSLYYKYLKNNNLYKAQNILKYNLGYIKRNNFMYKFKEYKKSLINNAINSMIKIENPGTIIIEDLSWVSKKKKYINKKLRNELSKWDKGYIRGRLEFKCYEKSIKIIEVNPAYTSQICHKCNKFGIRKGETFTCKCGNYDANYNAAINIKNRINYKNITKYTSAVKVKQIFS

SEQ ID NO: 22830 - protein, 250 aa, Spirulina sp.
MPISLLNLSQAFQHFFVGRAQYPNFKSKHRRQSIQFPQNVLLVSDAAIKFPGSLGVVVAKIHRPIEGTLKTVTVSRYPDGKYFASLLVEDGTAKPELSSTGKVIGLDLGLTDFAIASDGSKFPHPRPLNKYERNLKRKQRKLARRKKGSQNRHKARLKVAKVHSKIARVREDFHHKLSRKIVNENQAIVVEDLAVKNRVKNHNLAQAISDVGWGQFCTMLKYKQSLKVRCTWRLGDSSPLPTSAQTGCYR

SEQ ID NO: 22831 - protein, 393 aa, Spirulina sp.
MPQVTTTLKLKFLDLNQVKADLFAQTTAECTALANRLLKMPLTERRKLTTAKVVTALSSALANQVIRNATSKSAKKVKQYRLMLPEVNKQNWKVAKVGDTYSLSFPTIKGVKRVPLEIAHPHHAAVLDRLLVRDEALEKGSLKLAKRRGQWYALCSITQDVPEVKSVHRVGCDRGQNNVAVVATPEGKSIFFKGGEVKHRRRRFQTLRTELQKAGKKRAIKKLNNKESRWMREVNHAISKAIARFADYHNADVVMEDLSGCRGTMRQSKQQRADAGNNRHRWAYYDLQLKTAYKMELLGRQLILRPAPYTSQSDSRNGILGKRSGHTFTGFDGWQANSDWNAARNIAKWDGFACPLGLYVPGDGVFDSPQDSGSPSASGRAEMQMGNSVNTQR

SEQ ID NO: 22832 - protein, 397 aa, Spirulina sp.
MIVLEFKARVKPDQATAIDDAIRTSQFVRNKAVRYWMDSQKVGKYDLSKLCKDLAGEFPFAKKLNSMARQASAERAWSSISRFYEHGKKGIKPVGFPKFKKHSRSVEYKTSGWKLLGPKRIKFTDGFGIGELRLIGTYDLARYDESLIKRVRLVRRADGYYVQFCIQVNVQVQSEPSQKAVGLDLGLRYFIAASDGTVVETPQFYRQAEKRLNRANRQKSRKYRKGAKPQSRNYHKARNRYARKHLRVSRQRNEWAKSIAYCVIQSNDLVAYVGEACTKCIDLNVKGLVRNRHLAKSISDAGWSTFRRWLEYFGRKYGKVTVAVPPHYTSQDCSSCGKRVHKALSVRTHRCPHCGYEADRDVNAAINILRLGLTTVGHTGSYTLGEIGPLAGLEQSC

SEQ ID NO: 22833 - protein, 381 aa, Lachnospiraceae sp.
MANKAIKYRIYPTSEQKVMFAKTFGCCRKVYNLMLADKIESYQVSGKFIAVTPAKYKKDYPFLKEVDSLALANTQLNLQSAFKNRFDKSRKKKNGFPKFKSAKHSRRAYTTNNQHGTVAITDNSIRLPKIGLVKAVIHRKPNDEWLIKAATISQESDEKYYASVLFEFISPANTYVPDITKAIGIDYASDGLYVDNNGNKGTNHKYYRESHNKLAKAQRRLSRMQGSKKNEAKSNNYLKQLRKVNKIHRHIANQRLDNLHKVSTEIANQYDVVCVESLNMQSMANRGFGNGKATLDNGYGLFLSMLKYKLSDRNKYLVKVDKWFPSSQICHHCGESHPEMKDLRIRIMNCDCGLTMSRDQNAAINILKEGLRILNKTFEVA

SEQ ID NO: 22834 - protein, 475 aa, Glycomyces sp.
MTDPTVKKSFKFRLRPNRHQRRALAAMLRDHCELYNAALEERCSAWSKAGVSIQYGDQSAQLKDLRRADPEGQGRWSFSSQQATLRRLNRAFEGFFRRVRQGGAPGYPRFKSVWRFDSVTWPSNGDGCKWVNGDEAGDRITRVRLHGVGTVRVHRHRPVEGRIKTITAKREGSAWFAVLTCEVPQSPEAEKSGEATGIDLGLTHFATTAQGDHIAPLRALEVNAERLAEAQRELARFQRPAKRSDRSARHRRAALKVAKAHRKIVNQRRDFAHKTARALVDSFDVIAVEHLNIAGLSRSPKPIPDPERPGSFLPSGKSAKSILNRRIQDAAWGQFVEILTAKAAWAGREVIKVNPAYTSQTCPACGHIDAANRDGQRFDCTACGHTDHADRVGAVNIATRAGLALGGRGRPRTPEAQRLTPQGGVTRSQRFIGMPQSGPVSGNGSAPPVRGVGPTAPGFLSLPQLKLKLRLRSPT

SEQ ID NO: 22835 - protein, 421 aa, Actinomadura sp.
MRTAYKCRAYPNAEQAALLARTFGCVRLVWNRALAERQRAYRSEGRATSYKAADAALTAWKREADLAFLNEVSSVPLQQTLRHQHAAFANFFAGRARYPRFKRRTARQSAHYTRSAFRMRSGELTLAKSDAPLRFVWSFENVEVAALNPTMVVVSREPDGRWYVSFAVDTDAPEPLPETGHAIGVDFGLKDLMVTSDGVRIANPRTLERKVRHLARYQRRMARCRKGGSNRRKAQAKVARAHRKVRNARRDHLHRASTGMIRRADTIVIEDLAVSSMVKNRRLARSISDAGWGELRRQLEYKAERHGRRLVVIDRWYPSSKTCSTCGHVLGELGLSTRRWTCPHCRSWHDRDLNAAKNILAAGLVVAGDGPGEVCGADVRRQGPSLPQSAVKQKPTVARATGLPSRQRGEGRQSPSSMPKR

SEQ ID NO: 22836 - protein, 443 aa, unknown
  TnpB Polypeptide
MSRTYIIANYFCEHLDEYAFACKNLYNSTLYEYRQRFFNHEPLLSAYDMFDVMSTFDSPLPAKVKQQVIMQVAKNIKSFYANKNAKLPKYLDSRTGRANIILTNQAISRIKFDKENKISFNFQNEMFEYDITNLKNKLQLTFADIKQVRVVYKFKKYQVILVVNEKQKQKTSGSKIMAVDLGMDRIMSVVYGTSKVLFDGKQLKRINHRFNRSLAKLQSERDLLKNQWIKLQCQLEKMDYDAVFYYELSMEFNFNEEKYKKLIRKQSHITNRLKKLEKIIARTYENRNNRLKYCLHWLSRRLIELCVSNGIGKIVIGYNKEWKQDINLGKRTNRNFVQIPHKTLIDYIQYKAAEYGIVVKLQEESYTSKCSFLDHEPIKKHAEYAGKRIHRGLFQSKYGKQIHADINAAYNIAKKAGYDFCLCPSSLCSWPVLKRIDFGNKVS

SEQ ID NO: 22837 - protein, 430 aa, unknown
  TnpB Polypeptide
VDVVVVVSHQPWILVGMQLRYRYRLVPTVEQRQALARAFGCARVVYNDALRLREDTHMAGRPFISDGEVLRLVTTLAKRTPERAWLAEVSAVVLQQSVADLHRAYRNYFGALAEAKAERAKGNRKAKLRVRKPRFKSKRGEQAVRFTANSRFRILVNGRLSLPKVGEVAVRWSRPLPAPPSSVTVTLDRSGRYHASFVVEVARNPLPAVEHEVGVDLGLHVLATLSDGTTVANPRWLRQAERALRRAQRSLSRRRLGSTNWHKARRKVARLHARVVDARRDLHHQLSTRLIRENQAVYLEDLDVAALGRSTIGRSVADAGWGQFTAMLAYKADLYGRTVVRIDRWYPSSRQCSECGAKTGPTGCAGLKVRTWTCSACAAAHDRDVNAARNILAAGRAVTACGGNVRPGLALAVAATPLGTEAGTPPGTAA

SEQ ID NO: 22838 - protein, 236 aa, Nocardiopsis sp.
VSVAREARRFSGGVYDLGLHVVWCSKYRRPVLSGRVAQRLEELIRSKADERGWQVIAVDLSAFPTRVKAQNRTRKHRAAQARVNGFHAKVRRQRVDHHHKAALDLIRSFDAIAHERLNIAGMTKKSAPRPDPERQGAFLPNGAAAKAGLDKSIHEAGWGVFLGILARKAESAGRGLVPVDPRNTSRCPRVPCGHTGADNRPTQEKLRCVRCGYTEHADRAGAVDVGIRAGLVLPVA

SEQ ID NO: 22839 - protein, 380 aa, Roseiflexus sp.
MLKTFVYRLYPSKPQARRLDSTLETCRRWYNQCLAERRDAYQQRGETAGKFAQLAKVKEYKALNPHAKGIHSHVLQVVVSDLDKAFQAFFRRVKAGETPGYPRFRGRNRFDSFGFKEYGNGFKADGRRLRLSGIGRVAVRWNRPLEGQIKTVRIWRRAGKWYACFACETEATPLPATGREIGVDVGIASLITTSEGAKEPHPGWYRAAQRMLRVRQRCVARQKKGSASRRKAVLALQRQHERIANARKDYLKKLAHRLITQYDRIALEDLRITNMVRNRRMAKSILDAGWGCFVRRLTSKAAEAGRVVLLVDPRNTSKTCSRCGHIFATLSLSDRRIDCGCRLSLDRDHNAAVNILKRAGQARWGVSGSLDSLPQEAAPL

SEQ ID NO: 22840 - protein, 380 aa, Roseiflexus sp.
MRKAFVYRLYPSKPQERRLEFTRETCRRFYNDCLAERKTAYEERGETIRKSAQLRRVKERKATNPDAKDVHSHILQIVVDDLDKAFQAFFRRVKTGEKPGYPRFKGRNRWKGFGLKEYGNGFKIDGRRLRITGIGRIAVRWHRPLEGRIKTLRIVKRAGKWYAAFSCITNEVPAPPAQRDVGIDVGVACLLTTSDGEKVDNPRWHRVEQRKLRVLQRRVARRKKGGGNRKKAVLALQRQHERIANRRKDFLNKLVHNLITRYDRIALEDLRITNMVRNPRLAKSILDASWGCLIRRLMSKAASAGRLVLLVDPRNTSQDCSQCGRLVAKDLSVRVHQCPHCGVVLDRDHNAAINILKRAGQVLWGISSSPGGLPQEAAGF

SEQ ID NO: 22841 - protein, 418 aa, Halobacteriales sp.
MHYAYRFRLKPTSEQHELLDYHRDTCRQLYNHTLTEFTEIPDSAGTLNQRVRQVRDQLTDLKDWWDELNDLYSTVAQAAVMRIEDSIKALSELKERGYNVGSLNWKAPKEFRSFTYVQSGFEFDKKNGQTVLSLSKLADIPIECHRDIPDDETVKEVTLKKEPTGEWYASFAVDDKAEPAKPSLSDINADNIVGIDVGVLKYAYDTDGTAVGSLNLSEERNRLEREQRNLSRKDHGSNNWEKQRQRVAECHQQLKRKRRDFLHKLSAYYAREYDLVAVEDLDVKEMLESPRNSRNTASAAWNTFTNLLEYKCKREGTHLVEVDPDGTTKECASCGVKTDKPLWVREHSCPACGFKADRDANAAWNILSRGLSQLGVGHSEGTPVETALPTGTAVVPAKRVVEAGSPTLKKRAASAASE

SEQ ID NO: 22842 - protein, 273 aa, unknown
  TnpB Polypeptide
MMQTLKVKLEPTPEQVQAIRETMHQFNAACNFVADKAFELHTANKIELQKVVYYPIREQFNLSAQMAIRAISKTCEAYKRDKSIKPTFDPDGSVVYDQRFMSWKGLDLVSLLTIEGRIKVPVVICEYHKPRLNRIRGQADLIFERGEFYLCVVVEVPESPKIEPIGVIGVDLGIKNIAVDSTGEEFSGDGIENVRSKIDNLKADLQSCGTDSAKRHLKKLSGREARFRRDVNHCISKKLIAKAKRHLFRDRPRRSSGYPGEYDGFEGSETQTA

SEQ ID NO: 22843 - protein, 404 aa, Anabaena sp.
VFNLTYEFKLKPTHAQAQIFEDWLEINRRVYNYALAERKDWYLSRSCQINACSLKHEYIIPADTSRPTYASQCKALTAAKKEFPELKKVQSQVLQQTLKRLEVAFVAMWERNHGFPRFKKMGRMRSFVFPQMQGERLKPGMVNLPVIGWVKLRQSRGIPDGGVVKQARVVKRASGWYVMLIVQWNVSVPSPMPHGEAVGIDVGLTSFIATSNGLTVKRPKFFVDAERKLKLLQQRVSRKRKGSNNWYKAQKKVAKLHEYVANYRKDWHSKLSHQICNDAGMLFVEDLNLVGLSCGMLGKHCLDAGFGQFFNILEQTCFKRGVYFQKVDSRKTSQICPNCGVETGKKDLSERTHACSNCGYITDRDVAAAQVVLIKGLAAVGHTVKMLAEGKFVGIPVKQESPNF

SEQ ID NO: 22844 - protein, 416 aa, Anabaena sp.
MEQVLTLVCKLNPSKKQAEEIELVLKAWSNACNYANKKVKPQITSKTTIQNMVYHELRALFGLSANLAVRACARVGANRKTAKLKDKPVKTIAPTSADYDARIFSFREKDWTVSLTLMNGREHIKIDAGNYQRGKLKGRKPTSAQLCKHRDGNYYIHIQIKDDSPTPIKSNKVIGVDFGRRDIAVTSNGDKWDGKKINDVRDKFSRVRASLQHTATKGTRSTRRRARQILKRLSGKERRFQQWLNHNISKSIIQSALKNNAAVAIEDLTGIRERTNQKPRNKTERRRSNSWSFFQLRSFLEYKGVQFGVEIIAVPPAWTSLTCHQCLHIGMRSDKRFKCINEACCWSGDADFNGAKNIATIGAVFVSHSVAGVSPVKGSGEPTRVNQPGGSNCLCCELSTDSSGLLKSLRSPLAGA

SEQ ID NO: 22845 - protein, 523 aa, Rhodovastum sp.
MSRTFCAIIRDGRADSVLAPFGELMGKAIRAAFKEIHILQRPAGDVQKELMAEFGLTRRHLYGARTDAAQAANAWKGTCDFRATQLRDAIEATEERIAALGRRAEKAKTERKRKALLEAQILKKKRLDVLKGCLASLLLEIKEGVPRVCFGGRKLLRDGDVWAWRDRRNSRIFVPGAKHDNAAGNQSIQWDGENLLVRMPDSLGGHVETLRGVTFRYGQEQLRAVLERNRDFETRAALTWLLFKDGAGRWHAHVTVDEPAAELVTDARNGVVAVDVNVDHFAVTLVDYWGNPVGRLTLPFPVAGTDEGKAEAMIGDAVRALSLLARKRHYGIAIEDLEFSKKKAGLREYGAAHARRLSGFAYRKFAEFTEARCKRDGVDLVKVNPAFTSVIGRWKYAKCRGMSAHHAAALCIGRKALGHGERLVSMDGTALDSPARMSPRAERRRWRGVRRLSREGAHLPVRTAWSGTGTAGKGVPKGTATATTRKARPARTGCRSAGTVQPQVGVAVALASDLSRPSVMFDT

SEQ ID NO: 22846 - protein, 395 aa, unknown
  TnpB Polypeptide
MSVIYNKKIEITFKKNDICILDNQSKICNWLYNYLLEICIKDYMENNNSLKLLEGRSLRNYATALKKEYPFLKTVYSAPLKECAYRIKRAYIKSFTSSAGFPTFRSWKRKWFSLVFDEPFKGWEVKDDGDIVSISLGKIPNMPLEQGKRNPSVLGKLKSPMILELNEKFKTFSLVKKDNKFYGIFTIEKQLPIVHHPQTKWVAINLETQHFFVSLDYKGDILKFKEISLVKYWDNQIKSIRLKRDMCKTKYKKCTLNGIKYTVHSPRWNKLNHTINIAKNTKQEQLKTIFFQISLHLYKNYDLVIITDYNSSIKPVGLFRRTLKWVSQKQQKYFIINPHPKESYTDIETAKNIAYEIKNITEYKDDLYSPIKSFNKIIIGEASFNKGINFYSKDE

SEQ ID NO: 22847 - protein, 397 aa, Bacteroidetes sp.
MYLTRKFHIEGTQQLERLSRASAELWNDTCKWYWRTARRQDHWLSKTAMRQWHCKGHDVLPSQTAQEVAEQFYEAVGSWHKGDRKGNPPKRCDKTYNVLRWTYQGVMLRDDGVLRLSTKRGEDSILIDWPVDTEPRTVEIGKRPGGFVVRAQYEAEPIDRTTGNKVAGIDLGEKHLAAVFTGDRGAFTISGGELRALRHYQNKLKAKLDAKIGRKEPGSNRWKKLVRSKQKQLDHIKGKITDLLHKLSRKVVEMLLERRVSAIAIGDTRGIRDRIDFGSQMNQRLHQWAYGEFARMIEYKAKLAGVTVEKIDEAYTSQKCPQCGYRQKPSGRDYTCSECGFHGHRDVVGAANIRRKYVGEHSNESTRLPGVMASPSGVRFHPHLSCNSRSRRKTLGI

SEQ ID NO: 22848 - protein, 433 aa, Streptomyces sp.
MARFRMYPTGEQERQMLLHCAHARYVWNLAVEQHAHWRKGRRSAPGFAEQCRQLTEARRDNEWLGAGNADVQQQALKDFAQAKNARFTSGFGEPTWRRKHLHEGFRVIGTDRVPEHGADGSPKLNAKTGRQVMGRSVVVQKLNRRWAQVKVPGCGWVRFRLSARGKGAKLPDAKTFRVTYRNGQWHAAFAVVPEPVPAPGTGGTVGIDRGVIVTAALSDGRRLNCPQLTVRERAQIRKHQRRAARAPKGSEAKAAGHAKAAKLKAREANRRKDWCEKTSTMLARTYDLIRFEKLNIKNMTRSAKGTVEQPGKNVAQKSGLNRSILAQGWGLLRQRTGHKAPGRVEDVPAPYTSLRCSACGWIDKNSRKSQAEFVCSSCGFTCNADTNASHNVAAGQGGIPRPRQTAGAGGTTPPTRSKNVREPQPKPVEIPLF

SEQ ID NO: 22849 - protein, 328 aa, Streptomyces sp.
VIVMQLRYSFRVYPDATQQGALVRAFGCARVVFNDAVRAREDARRAGQPFPTAGDLSRKLITEAKRTAGRSWLGEVSAVVLQQSLRDAETAYRNFFASLKGVRQGPRLGAPRLRSRRDARQSIRFTANARWSITAGGRLNLPKIGAVKVKWSRPLPTAPSSVTVVKDAAGRFFASFVIDTDPAADVTRMPDTDRTIGIDLGLTHFAVLSDGTKIDSPRFLRRAEKKLKKAHKELSRKQKGSKNRAKARLKVARAHAKVADARREFHHQLSTQLICENLRDRRGGPGSESAGTYPAGQVRSRRGLVVIRAHAGVQGAAVRPDAGEDRPV

SEQ ID NO: 22850 - protein, 410 aa, Streptomyces sp.
VIVMQLRYSFRVYPDATQQGALVRAFGCARVVFNDAVRAREDARRAGQPFPTAGDLSRKLVTEAKRTAGRSWLGEVSAVVLQQSLRDAETAYRNFFASLKGVRKGPQLGAPRFKSRRDARQSIRFTANARWSITAGGRLSLPKIGAVKVKWSRPLPTAPSSVTVVKDAAGRFFASFVIDTEPAADADRMPDTDRTIGIDLGLTHFAVLSDGTKIDSPRFLRRAEKKLKKAQRELSRKQKGSKNRAKARLKVARAHAKVADARREFHHQLSTQLICENQGIAVEDLAVKALARTRLAKSVHDAGWSSFVHMLEYKAQRYGRTLVKIGRFEPTSQTCSACGAVDGPKPLNVREWTCTACGAVHDRDHNAAINVKTAAGLAVSACGAPVRPESVLAQREETGSHGFPTEPRAA

SEQ ID NO: 22851 - protein, 410 aa, Streptomyces sp.
VIVMQLRYSFRLYPDPGRQTALAKAFGCARVVFNDAVRAREDARRAGRPFPKAGELSTRLITEAKRTVERSWLGEVSAVVLQQSLRDAEAAYKNFFASVKGARKGPKLGAPRFKSRRDARQSIRFTANARWNITDSGRLSLPKIGAVNVKWSRTLPATPTSVTVVKDGAGRFFASFVIDTDPAADANRMPESDQSVGIDLGLTHFAVLSTGEKIDSPRFLRRAEKKLKKVQKSLSRKQKGSNNRKKARLKVARAHTKVTDARKEFHHQLSTRLISENQGIAVESLSVAGLARTRLAKSVHDAGWTAFVNMLEYKAQRYGRTLIKIGRYEPTSQVCSTCGVKDGPKPLNIREWTCTACGTLHDRDHNAAINVKTAAGLAVTACGAPVGPEPVLAQREETGSHGLPTGNRAA

SEQ ID NO: 22852 - protein, 385 aa, Streptomyces sp.
MKLVVQVKLLPTPEQASALEATLHACNRAATWTAQVAFERGIKDRNGLQQLVYADVKATFGLSAQPAVRAIKKVVDAYASLAAAVKAGRLGPPTSQRHRRAISGPIGFRPEAAQPFDDRCLSWQYDARIVSIWTVDGRMKGIKYTGVTDQLKTLTSFRKGETDLVRRGGKWQLIATCDLPDPEVYEPVDWIGVDRGIVNLATTSDGTNHQGRRLSRYRRWQARKRTELQKKQTRSATRRLARRSKKEHRHATHMNHKISKEIVSVAQRTGRGIAVEVLDGIRDRVRLRRDQRDTLSSWPFHQLGQHLKYKAQQAGVPFLEVDPRHTSQRCPRCGHTDKANRLDRDHFCCRRCGLAGPADHVAGVNVRSRARSAWAFVTMPVPSPA

SEQ ID NO: 22853 - protein, 382 aa, Lechevalieria sp.
VKLVVQVRLSPSAEQASALAETLHACNAAANQVSRVAFERNVFSRNDLQKLVYAELRSSGLGAQAAVRTVKKVVDAYTATRARSGTGKLRGPSRARSEDKPIRFREGAAQPFDDRMLSWQHDAETVSIWTIAGRLKKVRFVGHPEQLKTLIAFRQGETDLVLRDGKLLLIATCDVPEPPAFEPADWLGVDRGIVNLATTSDGTNFQGRRLRRYRRWQTRKRAELQAKRTKSATRRLRRRARRERRHVTQVNHTIAKELVAVAQRTGRGIALEDLSGIRDRVRPRRDQRATHSSWPFRQLGTFIEYKAKRAGVPMITVDARHTSQMCPRCGHTARNNRSDRDHFCCRRCGLAGPADHVAGINVRNRARSAWVLVNVPEPVIGR

SEQ ID NO: 22854 - protein, 444 aa, Paenibacillus sp.
VKNKIIIPAAICFMDVSICLASWAWGAPREQIFRFNLYYSPISLDPALSNDSTSEEVITGVFEGLVRTGRNGEIEPAMAKSWTVSQDGRTYTFKLRGDAVWKWIGRTELQAALKNQFPLHSQSLQAVCHKYLFARDGAKQARKQGLHTKYPYKKKKHFNTKWVDQAFKIKGNTIYLSLGIQSGKRQQPIKITIPGLPDADIKEIELVYDRKLMISMSYDDGQAAAENQGNQTAGIDLGEIHSITATTTENKSIIITGRKVRSIHRLRNKKLAEIQKLMSKCHKGSRQWKKYNRAKKYILSKSERQLNDAIHKTTRQFVEWCRENEVKEAIVGQVEGVQRNTKKRKRKIVTQKLSNWSFGKLQKQLAYKLEAQGASMKTIDESYTSQQCPCCGKRKKTSSRNYNCSCGYTEHRDVHGSRGILSKYLHGDIRYLGETKEIKYLRIA

SEQ ID NO: 22855 - protein, 366 aa, unknown
  TnpB Polypeptide
MGDPITLHKMYKYRLFRADKKDRKLRHKLFVASTVWNHFIALQRRYHRLMGKYISLNAMNKHVLLAKGRPRFRKAKNYASFTFPQSGYQFVSFNQNEVKDDEKYTRARASLKIEGVTYRFVQHRPMLGEIKTLTVKRDSVGRLWLFFSVEETMSIPETRTGKSGGFDFGLKTFLTDDEGRAYTSPQFFAQGIEKTRKLHRQLSRKVEGSHRRKRARRTLPKHSADVANKRRDHHFQLAHRLCDEYAILYFEDLNLAGMKALWGRKVSDLGFASFVSILEWVALKRGKSVVKIGRFTPTTKTCSGCGQRYDLTLRDRVLAYDCGLTIDRDHNAAINIKHGGASLCYRSDDKTKIRLRSRIEGRSPRL

SEQ ID NO: 22856 - protein, 392 aa, unknown
  TnpB Polypeptide
MLVLEAKLKGKQSQYNLIDEAIRTALFVRNKALRHWMDNKGVGKNDLQKLCAVLAKEFGFADKLNSMARQASADRAWLAIKRFYDNCKAKKPGKKGFPRFKKRGHSVEYKTSGWQLSADKRYITFSDGFNIGRLKLVGTRDLSFYSIKQIKRVRIIKRADGYYCQFCVDIERKEQHQHSGNQVGIDLGLEFFYTDSEGRTVENPRLLRKSEKALKRKQRKVSKSKKGSSNRRKAVKKLAKKHLKVSRQRKDFVVKTAKALVQSNDLVVYEDLQVKNMVKNDHLAKSISDASWSLFTDWVDYYAKVFDTWAIAVAPHYTSQDCSVCGTRVKKSLSTRTHKCHSCPTVLHRDHNAAIRILDKGLKSTVGRTESKACGQNDLYLGGETPLDKSAG

SEQ ID NO: 22857 - protein, 520 aa, unknown
  TnpB Polypeptide
MSGVTRTFSLRPYVCFDKGTGVGLDLHSVLEEVRLNAELCASEAFKHVTVENLGKLSEHDGLKPAVAGLRMGMRFSVTGRSTGRSRFERMVQEYAVSQLRSWRERQRACMRQADTYVSIGYKHTVRQSKPSSLKPRLALSVTDRQYQAVRLAGSSVELDMVVNGRWVTFRFKAPSRFLEEGVRIIAPTVTVDEKDRVVFNWYVELPVERAEFSSRYVIGVDVGITNHTTAVVRDITTGQIVEASFMNRRVRSLENKFKRTKTQIAALYRKGRVGEVEVHRRALSNRRKELAVLIGQEIADMSWKYGNALVAVEDLSHMVNTMKYRRWVRGLIIKRITDMVESNGGRVMTVNPSYTSRKCHQCDTMLDMTDYYHPVCVTCRVSWDRDENAAANIAEKLKDKERHKKACQTRKKHASKKRHRNSKGSLHQLKHPLKKTNPTPKAPQNQPKNRNNHTTHHTQRVIHNREGVFPALCAAGWSLHHSNASVPTVASTPEGRCSDNKPHDYSTHRATLTGSVHTKE

SEQ ID NO: 22858 - protein, 387 aa, unknown
  TnpB Polypeptide
MRKLLKSFKTEINPSEEQKVKIHKTIGTCRFIYNFYLAHNKELYDNGEKFMSSNRFRVWLNNEYLSEHPEYSWIKEAYSKAVTQSVNNGQTAFTRFFNHESAFPKFKKKGRSDVKMYFVKNNPKDCRCERHRINIPSLGWVRIKEKGYIPTTKDGYVVKSGTVSMKADRYYVSVLVEISDNKIADDFNAGIGIDLGLKDFAIVSNGKTYKNINKSARLKKLEKQLIREQRCLSRKYENLKKGEVTQRANIQKQKRKVQKLHYKIDNIRTDYINKTIAEIVKTKPSYITIEDLNVKGMMKNRHLSKAVASQKFYEFRTKLQIKCNENGIELRVVDRWYPSSKTCHCCGAVKKDLKLSDRIFKCSCGYVEDRDLNAALNLRDAITYEVA

SEQ ID NO: 22859 - protein, 365 aa, unknown
  TnpB Polypeptide
MKAYKYRIYPTKGQERVLNALLEECRWLYNKTLEIRKNAWEEEQRQVDWYETKRMIPVYKNTARPTLGKVYSQVLQNVTERVDLAFKAFFRRVKQGETPGFPRFKGRGRYDSMTYAQSGFKIEGNYLDLSKVGRLWMILHRPVEGKVKTCTIHRSSTGKWYVCFACDVESEILPASDKVVGIDLGLTHFATLSTDEKIDNPRFFRKEEKALAKVQRRLSKEEKGTPERARRRRPVARVHERIRWKRQDFTHKLSRRLVNEFGTIVFEDLNVKRMILNHCLAKSIADASWSQLVEFTSNKAEGAGRKVILVNPRNTTKICSKCGILTDKSLANRIHQCICGLNICRDLNAAYNILRLGLQSVGSNP

SEQ ID NO: 22860 - protein, 269 aa, Streptomyces sp.
MAAPLDIRWSRPLPHGAEPTTVTVSRDPAGRWFVSLLCEDTLAPAPATTAAVGIDAGITSLVTLSTGETISNPRHERRDRARLARAQRELSRKAKGSNNRAKARVKAARVHARIADRRRDFLHKLSTRLVRENQTVVIEDLTVRNLLKNGTLARAISDAAWTDLRMMLEYKCAWYGRELVVIDRWFPSSKLCGPCGTVAAKMPLNVREWTCGCGAMHDRDVNAARNILAAGLAASACGDGVRPQRESSRTGRSSVKQETQRATAGTPRL

SEQ ID NO: 22861 - protein, 528 aa, unknown
  TnpB Polypeptide
MDLNGTLLDSATILSQLVTEVQGISAYATFIARNDTELEAGLARATAIQAATAGRQAGVTMPEFLAADKKDKNGEPVKDKKTGVPIKSKTGRSRKEWLVRHNAVTAFRSWQERVKAVNGESTKHVSQGWKRTMDATPPSYGEDFINLGVTDRSYAVIENDPFVDGEIVLKMVVQGAWYRLIFPFDNTRFPGGKVTLPVIKIEDNQPVFIFTVATDNPVVQFSGDYVLGVDVGINNYVTVAVINSSTGRIVYETTLSQRVHSLWNSVRASERQVRPLRKKARKILYDRPARRAALEEAQLHREAASRKKRELAILAAQEIAYLSHFFDNAVVAVEDLSWVRNTMQTGRWNRGELVKWLTHYVEQNGGWVVSVNAANTSQVCHKCGSSVTHPEHRVSDCPKHGKMDRVVNAAANIAARAVKKVATAREKRGNNSKLQPQAPLKTPVARRSLKYPGQDRTKNTSTPKRKKKGVKTPFSPARVQQISTPVTTTPVVTAMTTVLADCHTYGVAGTSAAIKQGAITKNRLCSPI

SEQ ID NO: 22862 - protein, 438 aa, unknown
  TnpB Polypeptide
MIKRKFTTVTQLHEKNNQDIIDYFESARGTYAQAQRKTFYAIRNSPDFNKSTYNTHLQKTYGVLKRTANSIIADAQGQLNALKELMAYEQKQLTLKIKVLEANIHVLEVRKSALKTGSPVCLGKYRNLKRKLVAQKSKLNKLKQKSANLSYQIESGRYKICFGSKKLLQTDYQAFIDRRDAHMSFIGSKSEASGNQILHLRFNPRNNQFELRLRKDIGGFKNAKDKYVYGRVYFNHHKKWIKEALRNHSSPLSYKIIKKRGRFYLYCTFEIQMDKSDFQTRATHGTIGLDFNKGFVTIAETNLYGHLTDTQLLPYRFKAGSKTTTDLEAIATVAVKRALASGKDICVENLDFRGKRASTQSKTGRKYNEMLHSLAYRQFVDKIEQRAYRYAVSVRRVNPAWTSWLAKQLYCPVMKLNTHVGAAYVIARRGQGYKDSVK

SEQ ID NO: 22863 - protein, 301 aa, unknown
  TnpB Polypeptide
LSFNYQTFGKKRGANGELFLCPKGINLPIPTKVDNPKQVRIIPSHNNFIIEVVYEAEENAPKSTSKYAGIDLGVDNFATITFSTQNQPLIIKGLELKSINQGYNRLISKAQELLPAPLKTSKPIHRLWSRRSWILKTKIHQMTAFLATLFDEMQIEKVFIGKNNNWKQNLPFGKKVKQRFAYLPYETFIEQLQYKCKLRGITVIVQEESYTSKASFLDGDDIPVYGEVENPQFSGRRVKRGLYKAGNGRLINADVNGSYNIMRKGLANNLQPLQMSNPLIHPRVVKGIGEEPNDKLVQLYM

SEQ ID NO: 22864 - protein, 423 aa, unknown
  TnpB Polypeptide
MQLTERHLIKPNHELYKTLDDLTFKAKNLYNHGLYLYRQSYFAHKENPDVPILTWAKIDNLLRKQGHSDVCALPSKVANAVLKNLGENISSFWKLVRLKREGGLAQKPRLPHYLHKTDGRYPLSFNYQTFGAKRGANNELFLCPKGINLPIPTKVDNPKQVRIVPSHNNFVIEVIYDVKESAPKSTSKYAGIDLGVDNFATITFSTQNNPLIIKGLELKSINQGYNRLIGKAQSLLPDSLKTSKPIHRLWSRRSWILRTRIHQMTAFLATLFDEMEIEKVFIGKNKNWKQGLPFGKKVKQRFAYLPYETFIEQLQYKCQLRGITVIAQEESYTSKASFLDGDNIPVYGEVENPQFSGHRIKRGLYRAGNGRLINADVNGSYNILRKGLANNQLSFNVDNPIIHPRVVKGIGEEPNDKLVQLYM

SEQ ID NO: 22865 - protein, 517 aa, unknown
  TnpB Polypeptide
MAKNQTYKAFLARPSHVMDLNGVLLDSTSIMAELAAEVQNISAYATYVVRNDTKLADELAQAGGVQPAEAGRRAGVRMPDFLVTGKSGKSRKEALLQHRVVTEYRSWQERIEAVNGESSKHVTQGWKRTMNASPPSYGEDYVNLGAVNKQYAAIENNPFVDGEIVLKLVIKGNWYRLIFPFNSTRFPEGKVTLPVIKVEGDQPVFIFTVATDNPVVQLSGDYAIGVDVGINNYVTVVVRKSGTGKIAYKTTLSQRVHSLWNSVRASERQVRALRKKAKPIVYDRQGKMAALDEAHLHREAASRKKRELAILAAQEIADLSHQYDNAVVAVEDLGWVHNTMQNGRWNRGELVKWLTHYVSQNGGWVVAVNAANTSQVCHECGSKVTHPEHKVSLCPKCGAKDRDVNAAMNIAARAVPKVNTARNTRAKNRKLQKKTSLKTPTARNALKHPGGSRNKNYPTPKRKKRRSSKGVKLPLRPASVNTTTVLADWDTYGVAETNTAALNQGNTAYECRECNLN

SEQ ID NO: 22866 - protein, 301 aa, unknown
  TnpB Polypeptide
MLISYKYRVYPDATREARLHEALDTCRRLYNKLLVECNTARENGSSLTMQETQARIVTLKEENPFLKDVYSKVLQMVNYTLWSNLRALSESKRRGRKIGKLRFKSATRYRTLNYNQSGFKIDREHSTITFSKIGTIPFTLHRPYTGEVKGVLITRSGDNWYVIIQAEQEVSEPKKEGRSVGIDVGLDSFAVDSNGAVIENPRFYEHSRDRIKKLQQSVARKQRFSQNWKKAKGKLEKAYDHVTNQKKDFLHKLSRRYVDTYKTICVGDLQRRRSNICCLGISSYRAISDTITLSVPTASVR

SEQ ID NO: 22867 - protein, 382 aa, unknown
  TnpB Polypeptide
MITYNTKLIGDTTELKELLEHQKFVFNFASKEQFGESKIVPKILHSKIYHNIRKQYPEITSQVIIRALNECISSYRSVKSNKHKIKSPIEKKKLSMRLDKRLYSIPNKSSIRITTANKRQTFEFVIYPRLKELLERYSYQDPLIYEDNGSIYICLSFENKQPQQKPRLAIGVDLGIRRSAATSEGKLIIDKNFNKRKRRLRYQKDILKSKGTKSSRRKLRYSLRHKEYNQNKDQTHLIANEILKTEADIICLENLKSIKRKKNKYQNKHSISQIPLYELRRVITYKAQNQGKTVLLVCPYNTSKTDSVTGKVEGERRGCRFYSRVNGMIYDADINAAINIAKLSKHPTSQTNRLTYGQVSVNRPNEYKSPLLGAVQAPIPLG

SEQ ID NO: 22868 - protein, 386 aa, unknown
  TnpB Polypeptide
MISYNTKLLTDCQEDMDALKSLLENHRIVFNIASKEQFTEKKNSIVILHSKVYHPTRKQFPEINSQVVIKAEQECLASYRSAKSNKHKLKTPIEKKNLSMRLDKRLYSFPIEKSIKITTSNGKKIFKFQLYPKLVELLTKYKYSDPLIYENNGAIFISLPFENKPKEQIKQKLALGVDLGIRRVAACSDGRIIIDKKFNKEKRKLRHLKDCLKSKNTKSARKKLRYSLKQKEKNKNKNQTHLIANEILKTNCDTIVLENLKGIKAKKHKFQNKHSIAQVPLFELRRILTYKAENTGKTVTLVSPAYTSQIDSFSGIKEGVRRGCRFYAKSGIVYDADLNASRNIGNRSKLPVSYGNILDGQALVNVPNECKPLRKLGVFQAPMPLG

SEQ ID NO: 22869 - protein, 218 aa, unknown
  TnpB Polypeptide
VGIDVGLNSYAVLSNGTIINNPRLYRKSEKRLTHLQRWMSRKERGSRNWVKAKTRVARHHKRIGNRRSDFLHKASRKIADAYETVYVEDLKIGNMVRNRCLAKSISDAGWGRFIRMIAYKEEGTGGQLIQVNPRGTTQECSQCGKRVKKSLSDRIHECPFCGLVMDRDQNSALNILARGREIRREPPEFRPVEEKATTPYTLVQVYPVKQEASKLVGR

SEQ ID NO: 22870 - protein, 413 aa, Streptomyces sp.
MRPTVGQAIVLGEMLRDHCSLYNGALQERRDAYRHSSKASIRYGQQSAQLKDIRGFDPERQGRWSFSSQQATLRRLDKAFQAFFRRVKAGDKPGCPRFRGVNWFDTVDFPKDGDGCRWDSTPHDPVTRVRFQGVGHVKVNQHRPVVGKVKTVSVKREGRKWYVVLTAERSQPEPLPATGSVVGIDLGIASFLTTSNGEHVANPRHARKADAKLAAAQKALSRYPRRKAKNRTKNHQRAVERVAALHGKVRRRRLDHAHKTANGLIRENDFIAHEDLKIRNMSMTPAPKPDPDKPGAFLSNRAAAKAGLNRSIADAGWGVFLTILHAKAESAGREVIAVDPRNTSRECPECGHTAKGNRLTQEKFHCVSCGHQAHADEVGATNVLRAGLVRRNARQAQREATPSTGWRSHSEAA

SEQ ID NO: 22871 - protein, 227 aa, Gammaproteobacteria sp.
LKRGSLLAIPVGTNYSITGQIRLILRGGQVEIHYTIDNTDERTCGTLELGIDKGYTEALVDSEGEFYGKGLGTILSKESDSLKKKYQKRNKIKTVLDQVEQKNPKKAKRIRKNNLGRKKLNRRKKKHQAKVKSIIFTAVNRVVDVASTIVCEDLTKTFKSKNLGKNTNRRLSGWVKGLMASAIDIVASRRGSRVVQVNAAYTSQTCSQCGCLGNRTGDTVPPGAGWL

SEQ ID NO: 22872 - protein, 437 aa, Streptococcus sp.
MSIYKNFEYRVYPTDEQKKWFEEHFEVNRFLYNHLLSMSIKKYNTEVDERFLRLIKDIDFYSEKIQQWTQIDYEKLYKKAKKGVKIYSKNEFSKLITKAVNNPDFPWVNKSYDGRAMREVATSVDTAYKNFFKGKDFPRFKKKYSVRTLRFPVSKQGEWYSIRFESDKILVLPKKIKLRIVQHRPFEGEVIAATIKKAQSGKWFVTILSRVDPPTQLIKTGDIIALNRGVREYMIGYDSNHKLINYAPFVKDPTLISKINKLHKKLSQKYKSAKQESRSLRDSKNYQKNKESLARLYEKLKFQKEYYLQQLSRKIIEDYDLIILESLSIKELASSNIGEKVKSGERIVQRRFSKKIMGMSHYRLETLLKEKAELYGKRVVMLPKGFNSNGVCSECGTIFEESIPLNNKEFICPNCNIKITRGENSVKNILREGMKYL

SEQ ID NO: 22873 - protein, 647 aa, unknown
  TnpB Polypeptide
MAGVVGLVHATWLSSLEVLRGVIVGRQGGDQSTRAVKMQLTSSLSDDTLIPEILDQVDRFNSITFHGAKVLMLIVGQCLNQGTPLPAFNDTFIRQVFASCSVDAHGNETLVTNPVIQNARTAYRNVQAHGFQFTSKSHLTQAITLEARSYYVCLANHVVTNVERRLVRMLKHKMRFDLPIVVRKAYRTDLLAKHLYKKMQEGARTLAQCGIQQIQDLDGYLKDEDQPRPAQATHQVFAQIVLDMAQIVGNQSLDPSVIGQGHNWVQYFRLLRRLLQTVEQIGPTRRNRLRLFDLVPLYGTGTRHMAVDTDALYNLLRQAGHRLVQGLNKTTFGMDNLNHWRALFDFSKIPTFSGLIQTDGYSVSFVCKKTRRPDYRKRDWEPVPFWWLYTMKVVGLDPGRKDLFTTVGSVDGNPEAVVKCSTGRYREMAGFTRSQTTVKRWKENRERLMNGPSVFHCELDLKDNLSRTANMQGLLNHCRASGRVYSTLHDFYGSMRMRRLKFQNYRGKKRAMAALCKEIVGRNSGQFQKDVIVAFGGAQFSSSSRGYAPAPVKALYRELKKWCRVRLVGEYNTSAYCSADIPGIFGSKPCHTKFQRNQPNFFVKHCRHPACGMYWQRDVNAARNIRWVFRQMCRLGTKVHPLPFRRA

SEQ ID NO: 22874 - protein, 219 aa, Chthonomonas sp.
  misc_feature (98)..(98): Xaa can be any naturally occurring amino acid
  misc_feature (109)..(109): Xaa can be any naturally occurring amino acid
  misc_feature (119)..(126): Xaa can be any naturally occurring amino acid
  misc_feature (162)..(162): Xaa can be any naturally occurring amino acid
  misc_feature (189)..(189): Xaa can be any naturally occurring amino acid
  misc_feature (199)..(200): Xaa can be any naturally occurring amino acid
LRKWFMSIQTAYAPLGRLKRPEVALRTAQQAMSRKEKFSNNGKKAKARVSKIHSRIANGRRDLLQKLSTAIRKNHAMVCIEDLQGRKMSKLAAGTADXPGSNVRAKSGXNKSLLDQGGXXXXXXXXAAPVGHVSADNRQTQAKFACVECGFEGNAEVVGAVXILSCGMRLLRDAGQDTGDASPGRPQGXWGVSPAVLVXXTLMGSEAGTQGSDSGEYHT

SEQ ID NO: 22875 - protein, 287 aa, Chthonomonas sp.
MTASPSPRTRSVSTAAAFASPILAGCACASRCALLGGSCRPRSHMWPTSGSSASPWTRLTILTCPKPRAKARCVDLGVSALATLSTGEVISGPKPHKALMGRLRRLSRSLSRKPKGSVNRAKAKAKQAKLHARIAAIRQDALHKLTTSLTRRFHPIAMENLNVCGMLKNRHLARSIADMGFFELRRQLEYKAAMRGGQVVVADRFYASSKTCSVCGHKLETLPLSVREWTCPECGVIHDRDVNAAINLKNMAVSSTVSACGEEGSDPTRKRRVKPASVKQEVSFVPV

SEQ ID NO: 22876 - protein, 258 aa, unknown
  TnpB Polypeptide
LKFEASKVVKHKDGDYYYLPVSQELSAKKIEEASTFMGVDLGINFLAVASTTDKKCKFFAVGEIKNKRNVYKNMRLRLQSKGALSAKRMVKHLASKEKCLITDVNHCIFKAIVKFAVENGVSVIGLEDLIGIRDRTNNNLRKKQKCFHNNWAFYQLQQFIEYEAKSSEIIKGYVNYEYTSKACCRCNCISKNNRSGVKFLCKVCGFELNADLNGARNIEYRTRDTMYILDSQGCLSATNADNMIRFIRDIHACYFTSR

SEQ ID NO: 22877 - protein, 258 aa, unknown; identical to SEQ ID NO: 22876
  TnpB Polypeptide

SEQ ID NO: 22878 - protein, 470 aa, Pleurocapsa sp.
MALRRYTFRLYPNKTQERELFAARRLHGYLYNACIAHRRFEWKKNQKTVDYFQQQNCLPAFKKEWVEFAYLHSQALQSTVKRVDLAHNSFLKGLRGLPKFKAIRNYSGWTYSSRSGWKAKTNGKHGVVTLNDLGITLKMRGQAKSWCTPTTLTIVYKPSKKQWFASFTCNVSVEQAKFGSLSDLKYESIVAFDLGTATAITCFDGKKFEEVSNPRFTKNTEKKVKQESKKLRRKRAPNRKKSIKASNRWKKARRQVSKLQRKVANQRADWQHKITSDIASRHDIGVTEKLNTKGLTRKARQGSKRKKRESAVLGVSPMSNFRKKQKAGLNKSILSVGFGTLNQMIAYKIEAKGGLLLRLNTRRVKPSQRCPKCGTVHKDWANLSNRYHICDSCNFEIERDRGSVLVMYNVATNQQQGCGTHLSDSGCLSSTSLTSKRKHTGSMKQLGQMKRQKSQRNSKVHGKPHRLALG

SEQ ID NO: 22879 - protein, 543 aa, Streptomyces sp.
VVGGLRELAASFVVPGPSGVAIRDRLKHLTPQDEMVLRAVGAHQGALASGDLKARCVDALEHSAQTWAARKRELTGVSSSRIAGAITKATHDQWALARRCQAAHIQKLEAGIKTLRHRLSLPIGEKGTKRAAGGYRSKGEWFRKSRRLAALEARHAAAVADWQTGRVRVVRGGKRLLNTRHHLTEAQLTEAQWRERWEAGRWFLAADGESGKRFGNETIRVTLDGEVSIRLPALLAHLANARHGRYVLTARIAFAHRGAEWADRITANRAVAYRIHLDTERGRWYLTASWQRPAIQTIPLETARARGMIGVDTNADHFAAYRLDRHGSPVGNPHRFGYDLSGTADHRDAQIRHALTRLINWAKRAGVTTLGIEDLDFTPEKTREKHGRRKRFRQLISGIPTGKLKARLVSMAAEHGLSIVAVDPAYTSLWGAQHWQKPLATPRRTLSRHDAAGIAIGRRALGHPVRRRTAPPPRDQSDRVGHRTVQAAPGDRGREGTRPPTTDRAHEGPSPSGMRKREPSASKTVRDAPSAQQWVQDSLMHTG

SEQ ID NO: 22880 - protein, 352 aa, Actinoplanes sp.
MTRCPVCSCGITTGSTRTPASAPRWHRHSGAPGWFSTTGFALGRPPESAARHTYPTAHCRSRSSRRPRRPSSDHGWARYFASFVVQTTEDEKMPTVASEVGIDLGLTHYVVLSDGTKVTAPKFLRRTAHKLKRLQQSLSRKSPGSNRRKKAVIKVAKAHAKVADTRRDWQHKLSTTIIRDNQAVYVEDLCIAGLGRTWLAKSVHDAGWASFTAMLEYKAARYGRVFARVDRFLPSTRMCSDCGRVGDKMALNVRAWQCPCGSHHDRDVNAARNVLAAGQADNSNDRGAQVRPGLVRAPRDETVTSLSAVRSTRSSEAIAVPQNGEDVNGRNPCGTSDHRTRTCDAGGVGSTS

SEQ ID NO: 22881 - protein, 414 aa, Actinoplanes sp.
VLLVQLRYNFRVYPTPGQQIDLARAFGCARVVFNDGLHLRRQASEAGEKYVSDGELSRRIITEAKATPQRAWLGEVSAVVLQQALADLNTAYRNFFNSLAGKRQGRKIGSPRFRSRKDNRQAIRFTKNSKFKVLGNGRLRLPKIGDLPVRWSRSLPSDPSSVTIIKDAAGRYFASFVVAIGEDETSPAVDAEIGIDLGLTHFAVMSDGTKIAAPRFLRRAARKLKRLQRALARKTKGSNRRKKAVVQVARAHARVANTRRDWQHKLSTTLIRENQAVYVEDLCVAGLCRTRLAKSVRDAGWASFTAMLQYKAERYGRTFVRIDRWFPSTRMCSACGRINDKMALNVREWDCPCGSHHDRDVNAAINILAAGQADRLNDRGAHVRPGLVPAARRETVTHPDAARSTRSVEGISVR

SEQ ID NO: 22882 - protein, 402 aa, Escherichia sp.
VKQLQAFKFQLRPGGQQECEMRRFAGACRFVFNRALARQNENHEAGNKYIPYGKMASWLVEWKNATETQWLKDSPSQPLQQSLKDLERAYKNFFRKRAAFPRFKKRGQNDAFRYPQGVKLDQENSRIFLPKLGWMRYRNSRQVTGVVKNVTVSQSCGKWYISIQTESEVSTPVHPSASMVGLDAGVAKLATLSDGTVFEPVNSFQKNQKKLARLQRQLSRKVKFSNNWQKQKRKIQRLHSCIANIRRDYLHKVTTAVSKNHAMIVIEDLKVSNMSKSAAGTVSQPGRNVRAKSGLNRSILDQGWYEMRRQLAYKQLWRGGQVLAVPPAYTSQRCAYCGHTAKENRLSQSKFRCQVCGYTANADVNGARNILAAGHAVLACGEMVQSGRPLKQEPTEMIQATA

SEQ ID NO: 22883 - protein, 547 aa, unknown
  TnpB Polypeptide
MPKARKKKNSSFQTTITKSVFLYGRPNKEKLAVLRQMQNSYTALINRDIELLEKNPDIVLQLVKNDKKDPQMRKLEKAIRPEGINSAFCQNAFDAAVVQVSGHLNNIRLDLLPEGMGIFAQSKVLFAMSVMGCSKQKMEETMRQIEGTFYEDCTKTLHEMSEKEFSDQQLEFQERYASKSLEYRVPKLRFVSVPLDSRLMKIEQSTDTKMPYVIIITNPLKTRQRITIPIDTSSHFLHKIQNNKMAGTVLMQVRKGNLRIGWSYDSTRQQPATTNCIGVDTGISDCFHTSDGRAIGSMSPVIDFYHEEVEPAFAELASLRNKKRKIKHFLRKHDLPEDVRRSLIKKMDHLERMIQTAKAPYRKKRCYYALLDHEIKKSVTTYVDSISKDTLTTIEKLDIKEFNNSRKVNGMFSTFARGKLQRKLMEVLNQKGCDFFEVEPDFTSQVCPVCSNLNAENRHSKGFCCTSCGYQDDADHVGAVNIRNRAGDKEILELCKEHQYSHKNLQNAIRIVYEKRHIAYEEKKQHLHESRRDPVTSYMMLQDLICD

SEQ ID NO: 22884 - protein, 444 aa, unknown
  TnpB Polypeptide
MKLLSHEKESSIMQLTEQHIIDRTDPRFAVIDQAAFASKNLYNAALYLVRQCYIFEGKYLNYHQTNKLMQSHEAYKALPAKVSQQILMQVDHDWDSFFKARDVYQEDPSKFTGRPKVPKYKHKTEGRNLLIYTLQALKGGQNKKRKGALQQGIIQPCMLAIEVQTQQNTIDQVRIVPRKGCYVVEIVYTQEEQQAPVNPAYYAGIDLGMNNLVALTSNKPGFKSAIVNGRPVKSINQFYNKRKAELQRMLRRKGRTARMERITNKRNRRIDHYMHTVSHQIVDLLVKESIGTLCIGKNDAWKQEANMGKRTNQNFVQIPHARFIAMLTYKARLVGITVKVTEESYTSKASLLDLDPLPVYDPKNNGDEKHTFSGKRIKRGLYRTQDGRTINADINGSGNIIRKVAPDAFSQAKGVEDGKAVLASLVVHPVRLVVTPSRTQKGKS

SEQ ID NO: 22885 - protein, 382 aa, unknown
  TnpB Polypeptide
MKIVRGYKTELDLNNAQRTACLKHAGAARYAYNWGLRRYQEEYAAGNRTPNAKSLHREINLLKQTDIPWAYEVSKCAFQEALRDLENAFKHFFRKCKLKKMGLWKKKCGYPRFKTKKKGIGSFRLTGAIHVTDRYVQLPRLGKLRIKEKGKKQYIPTSGVKILSATVSEQAGRWFVSVQVEEEVANPVPATGQVIGVDLGIKTLATCSDGREIENPKALRSNLKKLKRLGRSHSRKVKGGKNRKKAARKLARMHARIAYIRSDALHKATAQIVAKTKPDTERPACIGIEDLNVSGMLKNRKLSRAIADVGMYEFRRQLEYKSKQAGSTINVVSRWYPSSKTCSSCGWVDQNQTLNDRIFICQECGLVIGRDLNAALNLAVSA

SEQ ID NO: 22886 - protein, 387 aa, unknown
  TnpB Polypeptide
LALSAINQKKSKININDLRTKFTNNSKIKEDNLYPYLLETPKHIRDGAINDLVGAFTSNFKKQKLDPSFRFEMKYRSKKQEQSIVIEANSGAYLDPEQRLFHMYPAFLEGSIKYYIRCRDRRKTLIPSIEYDCRLTLDTRGHYYLNIPCLESTSDNQTGRAKHVWGALDPGVRTFQTIYSPEYGCAYKIGTGDRSRIYRLCLALDGLISLRDKKFSRRTDQKGKINHQSIRRKIKNLRMKIKHVVDEVHWKTVHFLLTHFQNILIPSFNVQDMVLKKNRKISCKTVRQMLGWSHYKFRQRLMSSAKRVNQSAPVWTRRNVYVVGEEYTTQACGYCLCLNKHVGSRKQYCCQKCQIKIDRDLNGARNIFIMNVRYEGERMVLKRRQPC

SEQ ID NO: 22887 - protein, 375 aa, unknown
  TnpB Polypeptide
MRKTTITIKLKIMPDESETLSLNKTMEVYRRACNYVSEYIFGNHDLSQGSLNRALYHDLRAKFSLKSQMTQSVIRTVIARYKTILETQRKWIKAVFRKPQYDLVWNRDYSLVSNCFSVNTLDGRLKLRYHADNFKQYFDKDKYSFGTAALVCKKGKYYLHIPVSFEIQDEDLSKISNVIGVDRGINFIVATYDSKRKSKFISGRFIKQKRTAYKAVRQQLQQVKTASSRRRLKTIGQRENRWMQNVNHCVSKALVESSPENTLFVLEDLSGIRAATEKVRRKDRYITVSWAFYDLEQKLAYKAALHNCSVIKVDPAYTSQTCPVCGHTEKANRNKRMHLFICKNCAYTSNDDRIGAMNLYRKGIEYLVPDTVTAE

SEQ ID NO: 22888 - protein, 419 aa, Natronomonas sp.
MNYNYRYRLKPTESQCEALDYHRDTCRQLYNHALHRFNQIPESMGTVTQRVRKIRDELPDLKDWWDDLTDVYSKVLQPTVMRIAHNVNALGKLKEQGYKVGQLRWKSPREFRSFTYNQSGFELDKKSGQTVLSLSKLADIPIKLHRPLPGDATVKQVTLKKEKTGEWFAIFGIEMDVEPPAKPPLDDIDAEEMIGIDVGILKYAHDTDGTAVESLDLSEERDRLQREQRKLSHKEYESNNWEKQRRRVVDCHLQIKRKRRDFLHKLSNYYAREYDLVAVEDLNVKEMVESLRNSRNTASAAWNTFTSMLEHKCEREGTHFVEVEPEGTTKECANCGVETEKPLWVREHSCPACGFEADRDANAAWNILLRGLTELGVGDSEATPVETALPAETAVVPAKRVLEAGSPTLSERVSASRVG

SEQ ID NO: 22889 - protein, 382 aa, unknown
  TnpB Polypeptide
MFRTYKFRLYPDKEQIELINKTFGSSRYVYNYYLDKMKNNGYVSAYTNIKDYTSILQYNASFLQETDSNIIIKSLFRLDNAYKKLFTKTGGYPKFKSKYNKNSYNTTAVYRNYKDKEYCNIELDLTNKQIKLPKLNWVKIRGYRNTNNINGKIKSATISREPNGKYYVSVLYEMYDKVPEITPRTIVGIDLGIKKLLTLSDGITYDNNKYIDKYEKKIKRKQRELARKEKGSNNYYKCKKELTTLYSKLANARKYYIHKITKKITDEYDIITCEKLKTKEMIVKGKDNKLSSKINDATFSEIIRQLLYKAKYKGKEFYQIDTYYPSSQICSRCDNQDKRYKDLTKREYKCTKCNQELDRDLNASINIMFEGLKLYMENYARI

SEQ ID NO: 22890 - protein, 635 aa, unknown
  TnpB Polypeptide
MALRTYTTGLSLKHFPQNERRSVKRRLAAIVLQLSDENTKHCQKHAHEVVNYLIDQDIDNHCVMDPVAEVNGGKGKYGVNELMKKIGNAKNHLHSGYHQLLTSCKGYIDRVNKVREIFEFMNDNQKEFISWILWQRSTYANRVFAKKWNVKFWYVDNLMRGVHNSYFGNIKNNLPCFVRDPSEKEFIDAIDVILSGFNNDLTNREKAFVNKLKKLKKLKTIGLTGPMDPMELSFIPTGWKHLKMWVDNLDLHRSWMPVFRSILSQVYLLDYKGMINKIKTAKVTELLRIPFQKDERKNNKNNKNNKNTKNNKDKKNYKNKLSYQMVSGPKYVIRRENNTKSLDLMRKQGYFVLQFKFLEDKWKDAIAVRVKPSRKMRVIIYKEITLRSMVVHTPRSNDVDIQLIFEGDTENFISTDHLKKKISVNKVDTIGIDINRRGEYAVVSNLDVELPDEIVEQSRRWNVVLDKISHLQYLQDKTDNSWRKSIYGFQIGDLHNRKKNLRKDYHLRLANWVGLQMVSSGADKLVIEDLDIRTYGTRGALAKAIESMADDTSLYAREVLAVRKFTGKYIELVKTSAYNSSRIHVDCGGRLKRDYSRNQYDIAPCSECGKMVNTHKNAAIYLVSTLSGPQNPDIL

SEQ ID NO: 22891 - protein, 376 aa, unknown
  TnpB Polypeptide
VIKSIKIRLSPTKEQEELMFQSVGIARFAYNWGLSKWEEMYKEGLKPSKAKIRKEFNNSIRKNDDFKWLYNVSGQITAQAFADLEDAYKNFFDGLAQRPKFKNKKKSKKSFYVRYDAIKFSNNRVNIEKIGKVKYSSNYKIPKLDKYTNPRCHFDGKYWYLTFGFEHGESQASLNEDLSIGIDLGISHLAIVNHLDKPIKNINKSKEVRRLKKKLKRLQRQVSRKYEMNKKGSKFVKTNNIIKLEKQIKLVHRRLNNIRNNHIHQATSKIIKLNPYRVVMEDLNVSGMMKNKHLAKKIAEQKFYEFKRQMKYKCEFNKIEFFEADRWYPSSKACSCCKNIKKDLKLSDRTYTCNECGLVIDRDKNASINLGNYKLA

SEQ ID NO: 22892 - protein, 361 aa, Burkholderiales sp.
MPVISKTLKIRIKDKHAALLREMAYSVNLVWNYINELSERSIRERQKFLSAFDIHAYTTGASKELGLHSHTVQCIAKEYVTRRIQFKKRKLNWRVSNPKSPKRSLGWIPINTAAASYKNGQIYHHGHYFSVWDSYGLSAYKFRTASFNEDSRGRWYFNVVVEVPELCGPQLPVSSSVAIDLGLKTCATTSEGQKIVGRFYRGLEAKLGIAQRAKKKKRVRAIHAKIGNQRKDMHHKFSTQLVKSHAAIFVGDVASAKLVKTKMAKSTLDAGWSSLKTMLEYKSHQAGIVFEEVNEAYTTQTCSCCGHIGHNSPRGRAGLGIREWVCDACNTVHDRDVNAAKNILALGHERLAGGIIAPSGR

SEQ ID NO: 22893 - protein, 305 aa, Moorea sp.
MYALKRELKVNHKQSGFLAGCAGFSRFVYNYGLSIMMSSWDFDGVKASDAKRLTAIKKIFTNVTKKNPDFAWCNQYSSRIYQNSLRDLKKAFSRWRDPKLCSGIPQFKKKRHQCSFTVDDGHGKRLVKAGKFIRIPTLGTFRIKEAIPFNCGSQTFTIAREAGKWFVSFKIEACPLPSMKHTHKKVGVDLGVKCFATLSDHTKIETPSSIKKAKIKLSKLQWRNRKKVLGNGQTKQKPSKNAHKYYQKLRQQHQHIANSREDFLQKETTRLAQTYQEIKIEDLNVSGMLANHKLAEAISLLGFYR

SEQ ID NO: 22894 - protein, 411 aa, unknown
  TnpB Polypeptide
MVELALTMKVKLTTNKHESEALNCLCDNYTSCCNEVSDWIGEHHTLSQRKINEAVYHPLRDKYGLLAQMTQSSIRRVIASYKAIHSRMERRNGENLKRKRTAYYSTRPKYSSAGVDLLWNRDYSYSSMTGMFSLPVMDGRIKVKAQWKGIPDEYRTARFGTARLISKRGKWYLHIPIALQVPDPTSSPKTIVGVDLGIRMLATSYDGETTVFQHGGEVKSKRGKYKRLRQQLQKRGTRSARRRLKTIGDRENRWMTDVNHQASKALVNHYDRDTMFVLEDLTGIRNATEQVKVKDRYVQVSWSFHQFRQMVEYKAKRNGQKVVFVDPAYTSQTCSQCGYVAKENRESQAVFICKKCSYKTNADVNAAKNILKRGLDTLAVTSENLWGADGTPVEQGHKTNGNAARESVAVS

SEQ ID NO: 22895 - protein, 413 aa, unknown
  TnpB Polypeptide
VSETVTKTLQATLATPTTGKEHRLQRLLDTYREALHDAFDAGANTMSAVNDIVTPYDLPYQAKDALKSYVPKLRKTYNAEELDDEHPLRLVNRAATFDYSDERLYGFVWQVPQPGRGTNFWIPLRINPEQEALWFDLLNDEATAGELRLQKHRASWELHVTVEYSVDEPTNSDKHNETYIGFDVGESALITGCALKRDVPRKPMLVSGSRARHLRKEMFTTLRRLQKRDAAEWRIDERFDHYQNALTDIVEKASRQAVKYARQFDNPVIVLEDLSYIRERLDYGKWMNRRLHAWAFARLQGRIEDKATEAGIRVEYVNAAYTSQTCHACGRLGRRDQQAEFVCPHDDCHVSEFQADINAAANIASRVNPWGESVRWEPGRNDTPRDGSGCDTAIVQRETSEKSSQMTLTAYSD

SEQ ID NO: 22896 - protein, 344 aa, Cyanobacteria sp.
LNCLNFVPITHYQRFYTNCKKAIPGKKGYPKFKKNCRSVEYKTSGWKLSEDRRSINFIDKKGIGKLKLKGTWDLHYYQLDQIKRVRLVRRADGYYVQFLVNAENKVDVELTGKNIGLDVGLKNFYTDSNGHTEPNPKFYRTGEKRLKFRHRRVSRKKKGSANRHIAINRLGRVHLKISGALTRTLRDWQREEHAKSMARCVIQSNDLVAYEDLRIKNLVKNHCLAKSINDAGWYQFRKWLEHFGEKFGRVTIAVNPAYTSQECSSCGATVKKSLSMRTHICKCGFVLDRDWNAAINILKLALSTTGHVGTWVIDLNASGDSTSTLAGAILLEQAESANEESSPL

SEQ ID NO: 22897 - protein, 370 aa, unknown
  TnpB Polypeptide
MKGFKIKLHPTKEQVKQLHMNFGASRFAYNWALEKQKSNYENGGKFISNGELRKLFTQFKKEEGNEWLHDVINNTTKQAIKDLCNAYKKFFKGLSKHPRFKNKKKSKQSFYHDTAKIKFTETHVKLEKLGLVKLAERNRVPLDCKYFNPRISFDGINYWISVSCDVNDNQVTSKNKTEPIGIDLGLKALAICSNGTTIKKPNITREKKKLKRLQKRVSKQYDLLIKKKIDKKSNRLMKLEKQILKQYQRINNKLNDNIHQFTSRITSLNPSHIVIEDLNVSGMLKNKHLSERVKESKFYEIRRQLEYKCRRKEIQLIIADRWFPSSKLCSCCGHKKDKLSLSERVYTCDECGIEIDRDFNASLNLMKLAL

SEQ ID NO: 22898 - protein, 432 aa, unknown
  TnpB Polypeptide
MPLQYGCQQVLINPDNQLKAILEYVCSIANSLTNCGIYYSRQIYFKTGKFPSKADLHKQIGTIQRNKHYQALYSDTAQQILTTVAESFKSYIGLLKGITKGTVKQKPKLPNYRKSGGLALATFTGRSIKFKDGRLRFPMGSISKVWFGIDAFYLPMPSNLDFKAIREIRILPRNRQFYAEFVYQVSFISADVDQTKVLGIDYGLDNWLTCVSNARSSFIVDGLHLKSINQWYNKSVANIKEGKPQSFWSNRLAAITEKRNRTMRDAVNKAARIVIKYCLDNRIGAVVFGWNEAQKDGSNMGKKNNQKFVQIPTAKLKDRIAQLCEQHSIDFIETEESYTSKTSFLDGDFLPTIGAKPDGWESSGTRITRGQFRTSTGIKINADCNGAVNIIRKVAAIFKFDLSGVGRGALSAPKKVLLWTLQKSPRINAGEA

SEQ ID NO: 22899 - protein, 363 aa, Bacillus sp.
MAFKFRIYPNKDQATLINKTIGCSRFVFNHFLSLWNTHFEETGKGLTYASCSKELPPLKKQHEWLKEVDSISLQSTVKNLSDAYQRFFKKQNKKPRFKSKKNPTQSYTTKFTNGNIVVQDKHIKLPKLGLVKYANSRGVQGRILSATVRRKPSGNYFVSLLTEVEIQSLPKVEKVIGIDLGIKDLAVCSDETVLDNPKYLSVYEKQLARWQRVLSHRKKGGSNWNKARMKVARLHEKMTNTRSDYLQKMSTSLIRENQTIGIEDLSVSVMIRNHPLAKAIADVSWSTFTNMLEYKAKWYGRKVQKVSRTFASSQLCSVCGYKNPKTKNLSVRTWTCPSCQTEHDRDQNASKNIEKEARRLLSV

SEQ ID NO: 22900 - protein, 372 aa, unknown
  TnpB Polypeptide
MEYSYRFRIYPSIAQAQQIRRTFGCCRFVWNHYLSQRIEAYRETGKSLTRFMQDKNLTSLKKQEETIWLREVDATALQSSLRDLDIAYRNFFRRVKKREKPGYPKFKSKKNHRQSYKSKCVGNNIKVLEGAVQLPKLGKVKCQVSKHVEGRILSATVSQTPSGKYFVALCCTDVDMEPLPSTGAAVGIDMGLKALAITSDGVEYPNHKHLSKSQKELTKLQRKLSRKTKGSNRWDKAKQKVARLYERITNQRKDTLHKLSTKLIRENDIICIENLAVKNMVKNHNLARAIADASWGEFRRQLTYKAKWYGRKLVVIDRFYPSSQICSACGAKWPGTKDLSVREWTCPKCSTVHDRDVNAAKNILAEGLRMLA

SEQ ID NO: 22901 - protein, 357 aa, unknown
  TnpB Polypeptide
MEDLVMKLVKTVQCKLQVDAKQAETLRETLRRFADACNDILCIAQENRTTNKVKLQHLCYRTIKEKYNLRANLVIRAIARVAEAAGNKRKPSKPKKFKPPSMSLDQRTFSFNEKCWEVSISTVAGRMKFPLAIGNFQRELLIGQKPTSATLCYNKRTKAFSVNIVVNREVPLPPQNGNVIGVDRGIYNLATTSNGLKFSGRQVMHVRRRYARLHQALQAKGMKGAKHTLKRLSGKERRFMADLNHRIAKAIVNPCTPGDVIVIEDLRYIREQIRVAKEQCLLRHSWAFGQLGRFIEYKAAERGIAVVYVDPHHTSQRCPKCRFVSKGNRNGHIFRCISCGFRGHADIVAATSIRQAY

SEQ ID NO: 22902 - protein, 418 aa, unknown
  TnpB Polypeptide
MTDKLVRTVCLKLHPDKPHLLDELRKNFRETWNQYINHIKELGTTNRQRLEEKKVEHNLLENTRQCARDKARESVKSFFEIKKFDDEATFPSPKDEPMTAKLNYRDGYVFRGDLSVRISVRAGDRVYSEVSGSQKDMRYIEKALNGEYSFGTAEVVKKSGEYYLHVHIESEDTPTVQDQEESTYIGIDINEGNIVATAINTGGEVLRTLMLDYSPLKKIKHKHFIIRKRLRDNDKNLKGFDKERHRTNNFVHKISRIIVEFAKEFNDPILCLEDLAHIRKEIRYSKKMNRRLHSWNFAKLGKYIKYKARWDGIFVQEIDPEHTSQMCPVCGDIEKKNKNGRRFECHRCGHQDHRDRNASLNIGLKGMKNFLGNVPSLKNFPSFRKVRWMASGLVNRPTEDIIQMSCLSSGSPSALPSG

SEQ ID NO: 22903 - protein, 369 aa, unknown
  TnpB Polypeptide
MKTRRTVRIKLHRLTNIKEELLEREYREFQKAVNGEDSQLYSATKQQAKRVERQNNPKNEQPIRLRNDLIKVEKQDTEISRYWIKIPVYNPEKGNGKSIWCPAIIPCKDEEDVEECEFGDSELVKEDGEWFVHLVIKKEIEIEAICPDCPSSFSDVIAVDMGVRWIATSVALEDRETNFYGEEVREIREHFKQLRKKIGKKKVRKGRQVIKRIGDKESRKVEDRLHKISRKIVEDAKERDAIIAIGDLSGIREQEDKGRRFNDKLHRFPFDKLKRFIEYKAGWEGIRVVEVDERDTSKTCNWCGSEDTRRIGQGKFVCKECGLEDNADKNGALNIGKRALGKSIKRPLSEAGALLAVPRTPAEKGDATC

SEQ ID NO: 22904 - protein, 315 aa, unknown
  TnpB Polypeptide
MEKMLNYIQLTNNRLKRYYDKIKEDKEYPISLRKDLIDIQRCESSVCDYFVNVPSAQRHGGINVPVKTGREIKDSWELYESKLFRKNDKFYLNLTFEIEVSEVDEYNGVLGIDLGLRNPVVGAASVAPSSQSKVFFEGEEIKGIQTNYYYLRRQSDTDKQWGQREYNKVRNKLHKLTTKIARYAKENKLIVVVGDLKGIQDQDKGREMNRKLHRFPHHTFRRMLGYKCKERGVRYIEVNEAYTSQRCYKCGEKGDRCKGIFKCGGSELNSDVNGAMNICKRALGKPEIRSMLRVGGSCGRALQLSWTSSSEENPS

SEQ ID NO: 22905 - protein, 394 aa, unknown
  TnpB Polypeptide
MNVPNYLKKTVKVKLDVDEDDKDKLLGTFRQFNRSCNKVVEAGWNKSGDKNYNKMELHEETYRDIKDELDLTANLVCSARNRAAEAIKKVVQGWSNGKKASKPQFDKYSSILYDKRSATIKDRYCTLSTVDGRIEAEYVIGEYQKKHLDDKNYEFRSCTLNYERDKDEFYLHITIRKPVLYRNEGNVLGVDLGMKNIAVTSTGKFLGEDMRWQKNHFFRVKKGLQGKGTQSAMRTLKDMAGRENRYTENKLHNISRELVEEAEKHNCKTIAFEDLKEIRDKDEKFNSRLERQLHSWGFEKLQKFTEYKAKEKGVEVVRVKSEYTSQTCSKCGHTEKSNRNGSQFKCKECGYEVNADYNAAKNIGTRALPSDKSSDGLSHGQLALKSGTLNPTAA

SEQ ID NO: 22906 - protein, 391 aa, unknown
  TnpB Polypeptide
MKRTNRFNIVWDDSEDARDLALGCSTLWNKLTHKRRQSFFDEDKEFDWSSDELYDDFKGWVGSATAQQIIRKNNSAWKSFFSLLDEWKDNKEEVDKPSPVGYWKDRDEDEKELKILIRNDCYSIGDGTVKLPFGVKGEVVGQPHWEGKQGRLEIIYDRLEDCWRAYQSVEVEPRHQPSGQKTAYVDLGVIYPVTAYIEGEETTVAYNGRPLLSKWWLYNKQIENTQSTLKEENDRYSSERLERMFRKRKRVFKDRIRKIMHDFVERCYQAGVDTIVAGDLNGIRDNVNYNKKSNSMIHNFWSHKYLVDRLRWTAENYGMELKLIDERGTSSKCPRCGSEAKVRRGRLYKCKECGIEAHRDAVGALNIGLAEGCNIPSEVINRAMTRPEVVS

SEQ ID NO: 22907 - protein, 358 aa, unknown
  TnpB Polypeptide
VKAEKTIVCRVVEPNKGKLDAIRREYDKVQRYIRGEDVDIYSATVQAMDKYTDWKHLKDDKEYPWYLRNDTFSVEKAENTTEFDYWAKIPVKDVYGGITVPVKPHEEIKEEYNVKDSKIVRKGYGFELHLSVSKEVEPVKTYDGAVGVDMGLNKLAVSVLLPDRQTRCYGTYIGDIQAKYYFLRRNCSDGYVRRKWDNKDSNKIDDICHQISRKIVDTAKEKNLLIVLGELDDLQEQDKGRKMNRKLHNFPHWKLRDYIKYKAKWEGIEVIEVGEAYTSQRCSRCGEIGDRHKGRFRCDNCGLEVDSDKNGAHNIARRGIGKFEKASSDVRGVVTTPEATTVDPASATQVGEVGGNLC

SEQ ID NO: 22908 - protein, 399 aa, unknown
  TnpB Polypeptide
MRRTVKIKLSLNQNQQKLLQETIKQFKQACQRVVDYGWNRNGLKTYQKNKLHKATYSEIREKTDLPANLVIRARDRASETIKACVKKIKNGEKASKPTFKSDSIVYDKRTLTVWLEEERCSIATTNGRIKADFVLPNEYNDYYDKYLNNGWKITQSTIEKHSYEDDEPFYLHLGLEKEIQKNQSVNPTIMGIDLGIENLAVTSTGRFYSGTELFSRRERYEEVRGKLQAKGTRSAHLTIKQMSGRENRFACDTLHRISKKIVEEAISKDVDVIAMEELEKIRQKISNNKKFQTWAFKKLQEYIEYKANERGIEVKFVDPKYTSQRCSRCGTTLKQNRINQHFECKDCGYRVDSDYNAAKNIGFKTILDGQMSQSRMGNGQLALKSGVLKPNGNYYSYPN

SEQ ID NO: 22909 - protein, 445 aa, unknown
  TnpB Polypeptide
MKKSLRQNLRGLTKQEYEILKKMSHKSKDLYNETLYEVRQYFFNNGEYLSYYDAYERLKGESENYRVLPSQMAQQTMKHVDKAFKSFFNLIKKKREGKYDAEAHPPNYLEKDGHFSLIYPNQSFQVKENHIRIGVPKNFREKYGYTKKEIQIDFTYEKLKQSHIDIKQLHIIPRAKAQYFEYRIIYEEEKKPVETKEGTWLSIDLGLDNLATCVDHLGRSFILDGRLLKSYNKWWNKEVDKLQSIKDKQGIEGNTRRINKLFRDRNNYVHDYLNKATKAIVNYCKENKIEKVFCGDGKGWKRGINLGGSNNEKFVQISFDKFKQKLKHKLEFYDIEFELVDESYTSKCSFFDSESIEHHEEYVGSRVERGLFKTSDGVLINADVNGALNIAKKGLKEIDMGKPETSGVGSSGVVDTPRRIRKPFRLGYGSNISESLIQTSPEPPT

SEQ ID NO: 22910 - protein, 399 aa, unknown
  TnpB Polypeptide
MKITKAYKTELDPTNKQITHFVGSCGMAHFVYNWALDYWIKEHERGEKRTGWMGLHKLLVKEKQENLTWMYDYSSWVSVYAIKQCDEAYQNFFRRVKQGQKPGFPKFKSKKRSKMTYTVNGGVVQITETAIRLPKVGWIRLKEHGYIPVKPDKICYATISEKNGRWYASITVNETISDQPEPENVIGVDLGIKTLAVTSDGIYYENPKALYKAEKKLKRLDRRLSRREKGSNNRKKAKLQRAKAYEKVMRIRRHVLNEITTELAKNKSAIVIEDLNVSGMMQNHHLARAISDVSFSEFRRQLEYKCKWYGSELVVIDRWFPSTKTCSNCGAIQDMKLSDRVYKCDCGLVMDRDLNAAINIRNYYTAKHAGIDACGEIIRPQNIGAVSLKQEVGNEVVYV

SEQ ID NO: 22911 - protein, 405 aa, Micromonospora sp.
VLTGRRYLLAFTPEQAAYAETVGAICRTVWNTALEQRREYRRRGAFVGYNEQARQMAEAKRDPHCTWLADAPSHTLQQTLRDLERACKTHGTWKVRWRSKARTAPSFRFPDPQHIAVRRLNRRWGEERLPKFGPVRFRWSQPLGGAVRNATVSRDGDRWYISFCVEDGLAEAAPNGKPPIGVDRGVAVAIATSDGGLDDRAFVTPGEAARLRRLQQRLSRSLRVHGRNHGSNRRDNVRAEIGRLNARIRHRRADFVTQEAVQLVRDHGLVAVERLRIKNMTASARGTVEQPGRNVRQKAGLNRAILSKGWGGFLLKLEHAARYHGAKIEKVNPAYTSQTCNACKHVAPESRESQAVFRCVACGHQDHADVNAPKNILAAGLAVTGRGDLAVGRSAKRQPPAGLAA

SEQ ID NO: 22912 - protein, 424 aa, Natronolimnobius sp.
MKRVNTFRVAPQSDEDEELLRRLLDASASLWNELNYERRQNYFADDDSSVWDTDEYRGRYNGIVGSATVQQLTRKNSEAWRSFFSLKESGDCANPPGYWGNEEDGRTLRTYIRCNQYTLEWGKRSRLEIPVGQDLKEEYGLGYHDRLRLEVRGNPKWDGKQGRLEITYDETSDTYRAFQPVTVPDSRQDSPLADETAALDVGANNIVACSVSTGSQYLYEGRDLFERFRETTTEIGRLQSKLPEGRYSSNRIRRLYRQRTRRRDHAMNAVARDLVERLYDEGVATVYVGDLTDVLESNWSVRANAKTHNFWAFRAFINRLACVCEEYGIVIEARTEAWTSQECPDCGEREGTVRHEDTLTCPCGFEGHADLTASETFLKRETSGEVGPMARPARFKWDDHSWSASSCACPNEQRANPQVASVGR

SEQ ID NO: 22913 - protein, 301 aa, unknown
  TnpB Polypeptide
MAHPAPKSDTETATVFNLGFKTKIENPTIAQRIYFAKACGVARFAYNWALEQWQKQYELHKADPEKNPAPSEAALRRQLNAIKPVEFPWMLEVTKCAPQHAIMNLGKAFKNFFRDPENFRFPQFKKKFHHDSFTISNDQIKIEGSRIRIPNLGWVRMCEPLRFKDAKVLSVTISRGADDWYVSISCELTSLTHLKPAKNQGRVGVDLGILKMAVLSDGHVFEAPMPLKHALARLKILQEIMSRAKRGSRNRQKLRVRIARLHRRIANIRSHAIHKLTAFLPEFPRENYSHPRRALISGVGT

SEQ ID NO: 22914 - protein, 392 aa, unknown
  TnpB Polypeptide
MKQKRAYRYRCYPNATQKNILARTFGATRYVYNWALRLRTDAYYKRQERVYYKETSARLTQLKRQPETLWLNEISSVPPQQALRHLDTAFRTFFDGRTAYPSFKRKHGHQSAEYTVSGFRFADGKLTLAKMDRPISIRWSRPLPKGAKPSTVTVSRDSAGRYFVSLLVTDDIHPLPLADTVVGIDLGITSLVTLSTGEKVGNPRYLTTDATRHRKAKQALSRKQKGSKGREKARVHLARVEARIGDRRRDFTHKLTTRLVRENQTICCESLRVKNMVKNHALAKHISDAGWGELVRQLEYKAAWYGRTFVAIDRWYPSSKRCSHCGHVIASLPLDIRHWDCPECGSRHDRDVNAAINVAAVGQTVSAGGEAVRPGRRKSDRHASGKPESHAL

SEQ ID NO: 22915 - protein, 261 aa, unknown
  TnpB Polypeptide
MFTAAKEIDSLTVIERDGKLIGRVALTLEVPEPQGVLPVGIDLNETNALVAVDADGRQLFVSGKVVKVANTKTRKTRGRLQRKLATRKAERRDTRSVRRVLKRLGRKQRNRTTTFCKTTAKTLIQWVPDNAVVVLEDLNMPQPSKKAKQRKGVRRRMSQWQFGQMRAAIEGKAAERGIAVALINPAYTSQDCSRCGLRGVRRKHSFVCPHCGHAEHADKNAARNIRDRFTSLRRSAGQSMPAEARSPHGDAGKPPALAGGR

SEQ ID NO: 22916 - protein, 187 aa, Ruminococcaceae sp.
INDGRKIPNINKSQEIRRLNKKLKRLQRKLSRKYEKQKEGGVNRYKKTKNIIKLECLIRKVHKKIKDIRTNYLHQETAKLVKAKPEFVCMENLNIKGMVKNHKLAKSIQEQTFSEFRRIIEYKCKWNNIRFIVADKYYPSSKTCSECGYILDKLSLSTRKWICPECGVIHDRDVNAAINLMKYGKSA

SEQ ID NO: 22917 - protein, 558 aa, unknown
  TnpB Polypeptide
MITLQTRLQIENKEDLEKLYNLMRRYCSAYRYAYNRLLEKKKETDIRKEIQNLFNINSQYAQSAIWEAKALIRSCKERGQNPKKVIFGGRLLFEKLSKKHLTGKRRRKLKEKWKEKRQKVLYTVGGKYKKGNANLRLIKNDDNWYLRINVGKKEWIYAKIIRKVKREKDKWIDFIWNLEIAENSEGSYAERYFPYTVRVLSKNGKLYAHISYEEKVPEEFKIIKENGIIGIDVNASPFHLALATSSKDGNLLNYKKISLHELINANKNKRKYLEWLIAHKVINYALENNKAIAIEKLEGLKNEKRGSGRAKFRKRLQQFCYRNILEKTKTLSKREGIEIIEVNPLYTSVIGKLKYSPIYNIDKDTSAAFVIARRALGFKEEIPENYKNLLKDEDFLSYAIAELENKVKELKKKKEKEGNKYKRNAIKTELKKLKNELNLLKKHLENLKSGKCKPATQQPVNLGKKQVRGKLSSLLKSWQVLSAAITVPYLEKFLQVNSTCRDFSPLKPILITGDWVRAVNRLAPDSGQGQNFYKFGKQLNIFEKLKIFELSRGGSLKN

SEQ ID NO: 22918 - protein, 215 aa, unknown
  TnpB Polypeptide
LFEEFREVTEQIAYYQSLLEDQRKTSKRIDRLYRKRTNRRNHAQDDLVRDLVERLYEEGVSTLYVGDIKGVLSTHWSARVNEKTHNFWAYRRFIDRLGDVCEEYGISVEGASEAWTSQDCPECGEREETIRHEDSLACVCGFEGHADLVASESFLRRQTVEIRPMARPVYLKWNNHDWREHHSPPSLVETTANEEYTDQSTALGGKVASVEAQDD

SEQ ID NO: 22919 - protein, 236 aa, unknown
  TnpB Polypeptide
MEEIYKSKTNVGIDVGIKSLAVLSDGKVINNPRFLIKSENKLKKLHKKLSRTKKGSKNRFKAKILLSRQYVKVTNQRNDFLHKESRKIANEYSKIAVEDLKIKNMVKNHKLAKHINDASWNSFIQMLSYKAVDCGGQLIKVDPRNTSKICSNCDNIQEMPLSERIFKCLKCGFTCDRDLNASINHYDRAGLVRISTPVGDTVRPELFFKKENFGKENGKNIKARVNETGTIFRNGT

SEQ ID NO: 22920 - protein, 371 aa, unknown
  TnpB Polypeptide
MRKTFEYRLLPTHKQESLLNQMLEECRWVFNETLACRKDAWEQRQESISLYQTNSLLPQWKQERPSLTMVYSQVLQDAQERVDLAFKAFFRRVKAGEKPGYPRFRGKGRYDSLTYPQFGFSLEDNSVKAAKVGNIKAIVHRPLESKMKTLTLRRHSTGKWYACCSCEVEPEPLPKIDKAVGIDVGLINFATLSTGEKIANPCFFRIDEKELAKAQRKLSKMEKGTPERKHRRKAVSHIHERIANRRKDFVHKLSRSLVNTFDIIAFEKLNGKAMLRNHCLAKSIADAAWFQLVSFTAYKAECANRSVVLVDSRNTSKRCSRCGTLVDKDLSVRIHSCPVCGLVLDRDLNASINILGLGLQSLGLVPRSPAL

SEQ ID NO: 22921 - protein, 515 aa, unknown
  TnpB Polypeptide
MSSVARTISLSPFVCCEKKTGIGLDFHTVLEEVRNDATLCATEALKHITHENLEKVSEYDGLKPAEAGRQMGIKLDSGKPVTGRSRFERMVCEYAVSQLRSWRERRKASIGQSNKYVSTGFKRTTNSNKPDYLKPRLTLSTTDKSYHTVRVEGSIVELDMVVNKRWVTFKFKVPERIREPGVRIIAPTISIDDRNRVMFNWHFELPTELAEFSSKYVVGVDVGLANHTTAVVRDVTTGRVVESSFMNRRVRSLENKIQRAKTQITALYRQNRSDEIEPHRRALSNRRKELAILVGQEIAELSWEYDNALVVVEDLSFVTNTMKNGRWVRGMIVDRITDMVESNGGRVMTVNPAYTSKKCHRCGTMLDITDYHTPTCSVCRVGWDRDENAAANIAGKLKDKHKKACTTRKRHSSKARRRNSKDTTRPLKHPLRKTGPTRKAPQNRPKPNNSHCVHHKHAEIKKREEVYPILCAAGWSSTKPVGVSVPAVASSNGCSDKKPHDYPTGRHRSGDLCTS

SEQ ID NO: 22922 - protein, 395 aa, unknown
  TnpB Polypeptide
MQLVQQIQFKRSKILDEITFLSKNLFNVATYTVRQRLFEDRHWIRYNELWKLLRTHESYKKLQETCGSHPPQQVLKQIDRNFKSFFKAIKVWKSERLRFRGRPKLPKYKRKNGHNLVYFTSLQCRLKNGYVFLTRKMENLGFPKIKTRLEKVKGVRIVPFGDRYNIELIYDYEPKDLHLNENNALGIDLGLNNVVTASDNIGNKPLIIKGGVVKSINQFYNKQLSKYKSMAKKYNNTDVTGRILRFHRKRNNKMRDFFHKTSRKVVNYCISNNIGTIVIGYNEGWKQEIAIGKRNNQNFVSVPFLKLVRQVEYKSEMVGIKVVKVSEEYTSQTCSSCGVVRKSNRVHRGLYACKNCGAVLNADVNVSRNILRKEVPKSFGIGDRGCLNHPVVLKV

SEQ ID NO: 22923 - protein, 363 aa, unknown
  TnpB Polypeptide
MELRKTVRVKLGGLTLTKEAILVREYEAWLRRLRMGSTAEGPLYAATTQQADRLRKGLGHRFNRAGNYPMVLRRDCYRLEKARHTTHSGWWLKVPVSAVRGGLWLPVEMAPSYAALLAEPDVSFREAKLIHRRDHWSVHIVVDRSVPIPSLEGHPNILAVDMGERNPATAVLIAPGTTMKPLYLGREVRGVRRHHAWLRKRLQEKRAFRAIQDQKNRESRRVGAILHPAIKRLVGVAKENRATIVLGDFSGGHRNTHKGRRFNRIVNSMPFGRIRRMVLDKAEWAGVPVVLVDEAYTSQECHRCHNLGKRDRQAEFRCLSGLCGWRGNADMNGALNIGDRWERPRVLVGLGGADSTRPMNPAG

SEQ ID NO: 22924 - protein, 368 aa, unknown
  TnpB Polypeptide
MELIRTYKYRLYPNKSQSYLLDEMLAQHRYAYNRALGLRIMAYKEFGISLSAFDQCKLLKGMRKKKTPLLPAHSFQNTLKRLDKSYRSFFRRVRSGQEKAGFPRFKSYYRFKSFVFVYNIGAKIVDTGTKHKLKIQHIGLINLKWSRDLPNGANPKVLIIKRSSSGKWYVCVQFKFEKDVPIREKRTVGIDVGLSHLVATSDGIFFDSPKHYKESQKKLRILQRRVSRRKKDGNRRRKAVKILAKQHEYVANQRLDFAHKITRQLVNNYSYIALEDLPLDFMAKNKYLAKTMHDVAIGKFRELLCYKAEEAGSMVVFVNSKNTSQMCSNCGTIVKKGLSVKKHKCSHCGYIQDRDVNAAINIKNLAFG

SEQ ID NO: 22925 - protein, 348 aa, unknown
  TnpB Polypeptide
MPSKEQALILKAMSENYIQTINNLVDEMVNVKQTTKKTSKDVQVDLPSAVKNQAIKDAKSIFIKVSKKKFSIVPLLKKLVCVWNNQNFSFDSTSISMPLYIDGKVKKVPIRALMKDENNRIQKALTENKLGTLRITQKKKKWIAQIALTSEPVFKNGTKIMGVDLGIKVPAVAVTSDDKISFFGNGRMNKFKKRKFRSTRKNLGKRKKIAAIKSLNDKEQRYMKDQDHKISRSIVNFAIEHKFSVIRLEQLANIRQTARTSRKNEKNLHIWSFYRLAQYIEYKANLSGIQVEFVNPFYTSQTCPSCSERNKAKDRTYKCNCGFKKHRDIVGAMNIRYAPVVDGNSQSA

SEQ ID NO: 22926 - protein, 420 aa, unknown
  TnpB Polypeptide
VRNLKNTEKQFGVQKEILKVRTKKEYLALRKLSQLSKNMYNVGLYSVRQHFFETKKYFPYKENYHACKSNENYKLMGSAAAQQTLKKVEENFKSFFGVLKVKGQGARIPRYLEKDAHFELSYPQFKLQKDGTFYIPVSPAFKREYGTINVRFPSNLAPSEIAEIRILPKYNAHYFEIEYVYKKQVEQQKLNKDEALSLDLGIDNFIAGIDTLGNTFLVSGKRVKSLNQWYNKEIKRLQSMKDKQNIAHLTNRQVCLLRKRNNVLRDFLNKTTHYVIKHCLANGIGKLVVGLNRGWKQNINIGKKNNQKFVQIPHSKFIKKVENMCKRHRIELIVQEESYTSKASFLDNDELPVYNKNSKEKPVFSGKRAFRGLYKTSRSILVNADLNGAANILRKCNHTSELSDKVARGLLAVPMRIKLV

SEQ ID NO: 22927 - protein, 340 aa, Hapalosiphonaceae sp.
MLVLEAKLKGKQNQYNSIDEAIRTALFIRNKALRHWIDNKDVGKNDLQKLCSILAKEFDFANKLNSMARQASADRAWLAIARFYEGLPRTKNRQASEKDNSLGQLNKPDTSLPVFRGDNANDNCKKKKPGKKGFPRFKKRGHSVEYKTSGWKLSNDKKCIIFSDGFNIGKLKLIGTRDLSFYSIKQIKRVRIVKRADGYYCQFCVDIERTELHQHDGKQVGIDVGLEFFYTDSEGRTVENPRLLRKAEKSLKRKQRRASKCKKGSSNRAHAVKKLAKKHLKVSRQRKDFAVKTARTLVQSNDLVVYEDLQVKNMVKNHHLAKSISDASWLGRAIAPQGIS

SEQ ID NO: 22928 - protein, 207 aa, Hapalosiphonaceae sp.
NCKKKKPGKKGFPRFKKRGHSVEYKTSGWKLSNDKKCIIFSDGFNIGKLKLIGTRDLSFYSIKQIKRVRIVKRADGYYCQFCVDIERTELHQHDGKQVGIDVGLEFFYTDSEGRTVENPRLLRKAEKSLKRKQRRASKCKKGSSNRAHAVKKLAKKHLKVSRQRKDFAVKTARTLVQSNDLVVYEDLQVKNMVKNHHLAKSISDASW

SEQ ID NO: 22929 - protein, 372 aa, unknown
  TnpB Polypeptide
MNKTFKYRLLPTKKQKRILQEQLNECRWLYNHFLEERKNAWEKEKKSVTRFDQYNSLPNLKKENPSLNNVYSQVLQDVADRINKSFQNFFRRVKQGEKSGYPRFKGYNRYDSFTYKQAGFGWKIETDQLCFSKIGSVKVKFHRPIVGALKTCILRKKADEWYACISVDYQPKPLPKSERAVGIDVGLENFATFSSKEKIANPRFFKSEEKALVKAQRKFSKWPKGSSERQKAKKVVTRIYERISNKRHNFIHQESRKIINLFGIICIEKLNIKNMMKNHYLAKSIADVAWNQFAQVLTFKAEEAGRQFIAVDPRDTSQICSQCGTVVRKKLSTRWHKCPVCGIRLHRDLNASRNILALGLQSLGLVSRNPRL

SEQ ID NO: 22930 - protein, 441 aa, unknown
  TnpB Polypeptide
MRQVLTAKLKLATTPAQHESLRATQLAYRDALNATSRYSFDHGKISNPRKLHKAMYGALRGTFGLPSQLACSVCRQVGATYKSLWTRCKQNAAQRQAGLTKKRYKGLDQAPRYVAPTLTYTEGRDYGFKTGQTVSLGTLCGRIVVPYTGYDKHTALLHHGARIGAAKLWYDARRKQFYLLVSLVLEITEPAPASQQAVVGVDVGMRYLAVTATPTGQQHFFSGRAARHRADHYARKRKQLQAKDTRSAQRRLRQLNGRERRFRLDVNHSIAQAIVTTHPQAVIGLEALSHIRERTNRHHCPQASTKQRRANRRQSSWSFASLQAMISYKATLSGSVAIKVDAEYTSQACPRCGQTGKQNRPHDGLGFACTGCDYRLHADLVGARNVALRTLLVRQDWISTGCLSTSPDTLTDEAKAARLQRYSELRWRSSVNMPSAKADGG

SEQ ID NO: 22931 - protein, 405 aa, unknown
  TnpB Polypeptide
MQKVITGTIHQGDFEALKQIMRDQRSCTRYAYQRIHKDGLSKANDIVKACKPLYMAKLNQRYIQDAVLRAKSIPKEHAIFGGRKLWNKLLKGLITKTEWHDARDNELYSRGDVTKSGNPNIRVIKAGHGYTLRVGLPGARQFLSFVLYIPAKFQDEFDLNSECYDVRIKHKAGKFYVFIGLTVPDVQPYFRFQSGAIGIDTNPDGLAVVEIGHDGNLLEHKYLHADRLLFSRFQKRKNDIEELAKQVVDYSVAKEKGLVIEDLKFNNKPSECRKFNRMRHNFIYASLLQAIERRAIKNRVEVNKINPAFTSIAGILKYQEQYSLNRHTAAALVIARRGLGIMEQIRVRLEPGENEKLNLAGRGFKIALTAKAYSYFKHLYKVVEIKVPGLTAPCLSPGIGNYGTG

SEQ ID NO: 22932 - protein, 383 aa, unknown
  TnpB Polypeptide
METKTVIKGYKYRIYPTKEQEIQISKTFGCCRFVYNQLLAKKIELYKNEQKSLSKTDCNNYCNQFLKKQEEYIWLKEVDKFALTNSIYNLDSAYQNFFREIKKGNKNQGFPKFKSKKNNYQSYRTNFTNDNIKVDYKNNKIQLPKLKWVKCKLHKEFKGKILFATISKVPSGKYFVSFNVEVEHIVLSKNDYAIGIDLGIKDLLITSDGEVIDNEKITYKHEKKLAKLQRRLNKKKKGSKNRNKQRIKVARLHEKITNIRKDSLHQTSKQIIDENKVVICEDLNIKGMVKNHNLAKSIHDCGWGELTRQLKYKIDWNNKIYYEVNRYFPSSQLCNKCGYRNNDTKNLGVRFWICPECNTEHDRDKNAAINILNQGLRDLGLVS

SEQ ID NO: 22933 - protein, 372 aa, unknown
  TnpB Polypeptide
VKIIFKTYKYRIYPNKQQIELINKTIGCTRFVFNYYLAKRIELYKTEQKSLTYNQCSSDLTNIKRKFKWLKEVDSISLQQTLKDLDQAYQNFFRRVKQGGKPGFPKFKSKKNNKQSFRSQCVHNNIRIENNHIKFPKLGLVKFANSKQFDGQIKSATISKTSANKYFISILVKTEINQLPKVNKSIGIDLGIKDFAITSDGIVYKNPKFLRNLEHKLKFQQRKLSKMKLKSNKWYKQKLKVAKIYEKITNKRKDFLQKLSFQLINENQVICLEDLQVSNMLKNHNLSKAISEVSWSEFRRMLEYKANWYGRIISVVDRYFPSSQLCSDCGYQNKDVKNLGLREWICPNCGEIHNRDINAAINIRNEGLRLLA

SEQ ID NO: 22934 - protein, 557 aa, Escherichia sp.
  misc_feature (215)..(345): Xaa can be any naturally occurring amino acid
MHQENTMLPRRISVSLFIDQSIIWPMKRLQAFKFQLRPGGQQEREMRRFAGACRFVFNRALALQNENHEAGNKYIPYGKMASWLVEWKNATETQWLKDSPSQPLQQSLKGLERAYKNFFQKRAAFPRFKKRGQNDAFRYPQGVKLDQENSRIFLPKLGWMRYRNSRQVTGVVKNVTVSQSCGKWYISIQTESEVSTPVHPSASMIGLDAGVAKLXXXXXXXXXXXXXXXXXXXXXXXXXXXXXXXXXXXXXXXXXXXXXXXXXXXXXXXXXXXXXXXXXXXXXXXXXXXXXXXXXXXXXXXXXXXXXXXXXXXXXXXXXXXXXXXXXXXXXXXXXXXXXXXXXXXTLSDGTVFEPVNSFQKNQKTLARLQRQLSRKVKFSNNWQKQKRKIQRLHSCIANIRRDYLHKVTTTVSKNHAMIVIEDLKVSNMSKSAAGTVSLPGRNVRAKSGLNRSILDQGWYEIRRQLAYKQLWRGGQVLAVPPAYTSQRCVCCGHTAKENRLSQSKFRCQVCGYTANADVNGARNILAAGHAVLACGEMVQSGRSLKQEPTEMIQATA

SEQ ID NO: 22935 - protein, 465 aa, Chloroflexi sp.
MGLEPYWNEACKGINSQLWLPTAIDSHSSALTLSNGLLSATVDNSWFLAKLLTATQPTNFATICRQSSSSLLPECTASVHTVTKSRKIRLYPTAPPRAIFRRWFGAARFVYNRTLDYLKTLSGPRPPWTEIATQIILPNLPEWAEDIPFQIKKMAVKEACQAYSGAKMKYRRTGQISELGYKSRKSPRQTCYIPKSAVTQHGIYHTLSGKLDFAEPLPAKFLDCELSWQQGRWFLCVPFQTTVPIGENQARIVALDPGVRTFITFFSAEMAGVIGYHDFGQLVRLCAHLDDLISRRSQSRNKKQRYRMKKAENRLRWRIKDLRDELHAKTARFLVDNFDIILIPTFDTSQMVTRAGRKLHSKSVRALLTWAHSTFKERLKVIAAQTGKLVIEVNEAYTSKTCSWSGEIVNVWSSEYIRGSDGIQMHRDVNGARGIFLRALAELPLLESLQQALVNHANPSLAFSS

SEQ ID NO: 22936 - protein, 446 aa, unknown
  TnpB Polypeptide
MKLTGDLTALDDSITIYREALHFVIPIVNTHWDEMKDFEYGNQRMVYAEKLIHSTKVNHALYLFDVEFPKFPSYLRRAVLNRAIGIVSSYRSNLANWEEKKVELEERGEKIPQPPRLGTRHFDYPAYYKQNLFRNFNPVTKTIDLKVFKNGDWVYETYTLKTSDCTYYQKNLANKKQNVPVIKKKGRRFYVAFSYEESVPLIAEENIEKICAIDLGLGTDATCCIMGVDGTVYARRFIYFSEEHDRLDTQLGRIKRNQRRGNKKNTRLWKRVSGISQGIADKTAHAIFEFGNAHGVDSFVLEFLDFKGKQAVKRAHFWRYKRIFSVLGMKAHRHGLRISKVCAYNTSRLAFDGSGTVKRGWKISKETPYSIIQFASGKIYNADLNAAYNIGARYWIRHHLKPISETKRLVLEAKVPQVTKRSTCTLSHLISLRSELIALNAKRTQA

SEQ ID NO: 22937 - protein, 477 aa, unknown
  TnpB Polypeptide
MVKKEKTEVRHTVVKLNVKNDEFKSYLENMAFASNNLTNVVIYHCRQWFFYTQNLYYIKNDIKDVKFHQYDSEKIDELRHYMYIYNQQLLQRNKKPIDFVKFGLDAYFLHYYFKSIKQADYNCEALSSQTSQQITSKVAQTFKAFKKSLFDYFKHKEKYKAKPELPRYKKKESMSGFYFTNQVCTIKNNQIKFPKTKLTLPFTYDYKGRHIRTEVIRKYNDFELKLVFEQDPKPKLKETDVVTSIDLGVNNLVAITTNKGQSLLVKDKSLKSINQLANKEIARIQSAQTTLKPNSKTISSKQLMKVYQKRHRRMEHFMYCTASIVLNFCLENNVSKLVIGKNKGWKEDVSFKKEDKQNFIQIPFNNLISKIKEKLSCYGIEVLEQEESYTSKASALDFDQLPVYNGKSVSVPFSGRRAKRGLYETKEGVLINADLNGSLNIMRKAFPEIKFETRDLEYLQNPRIVKNIMNSQRVTMG

SEQ ID NO: 22938 - protein, 412 aa, unknown
  TnpB Polypeptide
MRSQKLRLKLTKEQEQLAWWYSKVSRNYWNLLVDIDKRNNKGEFDEILKRNGNKTYHSKFYDREVYKLSQMDYLNLAKFVVAQNYEGDSEAWSWYYQPNQSFIYKFLARELVKIRKQNKGKLNFRSINKIQPNFNVTCCVSTNKKRPSRIYLKDNGKLQIPTIGDVRFGSVKEGYNLSCKKQVATISFDGKYWYLSYTEDVDTKVTDLPEYTDGVGIDLGIKTLATVSDGTSVPNIKTFRRVRILNKRLKRLQRKVSRKYRINKCNKHHKTKNIIKLERQMKLIHRSLKNIRINHIRKFVSDLVKKQPQFIAIEDLNVKGMMKNKHLAKDIANCSFYTIKEQLIRKATERHIVVRLVNRFYPSSKTCSNCGHYKQDLKLSQRVYHCDNCQEKIDRDFNASLNIATTDNYVLA

SEQ ID NO: 22939 - protein, 465 aa, Escherichia sp.
  misc_feature (192)..(195): Xaa can be any naturally occurring amino acid
VKRLQAFKFQLRPGGQQEREMRRFAGACRFVFNRALALQNENHEAGNKYIPYGKMASWLVEWKNATETQWLKDAPSQPLQQSLKDLERAYKNFFQKRAAFPRFKKRGQNDAFRYPQGVKLDQENSRIFLPKLGWMRYRNSRQVTGVVKNVTVSQSCGKWYISIQTESEVSTPVHPSASMVGLDAGVAKLATXXXXGWMRYRNSRQVAGVVKNVTVSQSCGKWYISVQTESEVSTPVHPSASMVGLDAGVAKLATLSDGTVFEPVNSFQKNQKKLARLQRQLSRKVKFSNNWQKQKRKIQRLHSCIANIRRDYLHKVTTAVSKNHAMIVIEDLKVSNMSKSAAGTVSQPGRNVRAKSGLNRSILDQGWYEMRRQLEYKQLWRGGQVLAVPPAYTSQRCACCGHTAKENRLSQSQFRCQVCGYTANADVNGARNILAAGHAVLACGEMVQSGRSLKQEPTEMIQATA

SEQ ID NO: 22940 - protein, 522 aa, unknown
  TnpB Polypeptide
LERKLFKRLYAGGAPDRGRIAAAKREWIARFGLSARQFNGMRLNLEGKIEAWRESRKQERERVKEALAKLDRRLGRLRATRASLTQRIAACKLSPKASIQPLVDRRWRIAFQIHQKQRRRDALQCRLRALEAALAGPPAICFGGRRLFCQQFRLQANGFRTHAEWLRAWRGRRSAQFYAVGSKGEVRGNGECQFHPARAHLRLRLPHALERRLGKRQEIPVDFYREADLLASLERGRAISYRFVRREEGHWVVQATTLREPTPFVSRAETGMVGADFNVDHVAVAELDRSGNLVGHRKLPLDLRGLGADQAKALIGEAAADLVIQAREAGKPLAIEALDFRRKKAALRELGRDRARTLSGFAFAQFQERVQSRCEREGVELHRVNPAFTSVIGFAKFGGYRISPHVAAAMAIARRAAGLGERLSARTASPRLGEALQKRLREIAQGRRPGEHVWKAWRALTPWLRRAMGLPRSAQGGGVSHPGRDWSQPVISRPSGGQGHRTPAIPAAGMAAPSAGRTKGQT

SEQ ID NO: 22941 - protein, 347 aa, unknown
  TnpB Polypeptide
MQLTYHYRVKSYGGFLNGLARKVNFVWNYCNDVQRQAVKAHRKWLGEFDLNHLTAGSSEGLGLNSNSIQAIARQYVQSRTQRKKPWLKWRSRKSLGWVPIKSASLKYRNGDFIFMGHVFRVFLDRPLPAEAKILFGSNFSQDSQGRWFLNVKVGLPTPTSREGDSPVGVDLGLKDFAAFSDGTKIANPRILSKYARKLAVAQRANKRKQVRKIHQKIKAVRKDFHHKLSNNVTKKYNHIFVGDVSSSKLSKTIIAKSVLDVGWSNFRSMLRYKSIRNGAIYTEVMENFTTQTCHVCGSKTGPKGLAGLNKREWVCDCGARHDRDVNSAINILKRGLKHQALNEGAEP

SEQ ID NO: 22942 - protein, 350 aa, unknown
  TnpB Polypeptide
MILVYRYRVKSLNGLLSQQARAVNFVWNYCNDRQKDALRFGRKWLTGFDLNRLTSGAGKDLRLHSGTVNAVCEQYAKSRSQKRRPFLRYRGRKSLGWVPLKGRNLEETPNGFRFHSRQFKVFKSRDLPAGARIKDGTNFAQDARGHWFLNVCIEVADVVAREPVRGVGIDLGLNNFATLSTGESIANPRHKRKLEPMLAKAQRARKKRQTTRIHASIANARRDFLHKTALGIVRRFDYIAVGNVSSARLARTNMAKSVLDAGWSSFRHMLAYKAMRHGATYEEVNESFSSQVCSSCGSLPPERPKGLADLGIRRWLCSACGSDHDRDVNAALNLLARSGHRAPGEGISAR

SEQ ID NO: 22943 - protein, 405 aa, unknown
  TnpB Polypeptide
MRLTEKHQIHKKHKLYSICDELCFNSKNLYNAALYEFRQSYIDKNRKELTWIDINKLFVQQKQVDYKRIPAKVANAVLKKLGNNITSFKGLLKAKKEGTIKNKVRLPKYLHKTQGRFVVEFNNQTIDKERDKDGYLVLCSKSLKLTIPTKKEEVKQVRIVPKLNHYVIEVVYEVQEEELRTGVVIGAIDLGLNNIATVVTKDKKEPLIVSGKKLKSINQYYNKNISESKSKLPREVYTSKNIEKLWTKRANKIDYETHKISKYIVELMDERKVSKLIIGNNGGWKQGINLGKRNNQNFVYIPYKKIIDQIIYKCQMKGIKVIVREESYTSKASFLDYDYIPTINEDDEVKDFSGKRIKRGLYRTNKGKKINADVNGAYNIMAKEDLNYINTKREELSFSPKLVRL

SEQ ID NO: 22944 - protein, 380 aa, Prevotella sp.
MISQKYKLYRTDKTKHLDKMLREGAFVWNHTLALQKRYYKLYHKYASVVDMQKHLAKRFKFARLHSQTVQEIIQRLDVAYKRFFNHISKRPPKFKRASDFCSIVFKQGGYSLNGNVLTVNKIKKRYKFSLSRIYEGKIKRLTIKRNHLGEYFIVMCIDREVEKYGKTHDGASVGIDFGLKKYMTLSNGVEIDNPQFLKSDLGELRRKSRNLSKCAKGSNNSKRKRFELDRLYNDVSNKRCDFQWKLAHQLCRQYDNIFIEDLNLTGMSRCWGRKMSDLAHGEFVLKLEYVASKYGCTVHKIDRFYPSSRLCMCGYKNDTLTLKDRVWTCPECGAVHQRDLLAANNILRQGIAELGSGSKSSKHQRGRSHVSHPRISSLQG

SEQ ID NO: 22945 - protein, 369 aa, unknown
  TnpB Polypeptide
MLKTYKYRIHPTKKQITTMNQWLSECRWLYNHFLEERKNSWEQENKSLNYYSQAVSIVKLKQERPELNNIHSQVLQNVAVRVDLAFKAFFRRVKAGEKPGYPRFKGKDRYDSFTFPQTGFKIVNDRIQLSKIGSIKVKFHRPIIGTLKTCTIRKQAGKWYICFACEYQSVPLPVSNKAVGIDVGLESFATLSTKEKIANPRFFKTDQKALAKAQRKLSKQERGTPERKKVKKVVIRIHERISNRRHNFIHQEARKIVNKFGIICIEKLNVKDMMNNHTKTFGNKLNKSIADVAWSQFAQQLFFKAEDAGRKVIAVEPRGTSQICSQCGTIVKKDLSTRWHKCPVCGLSIHRDENSSLNILRLGMQSLGL

SEQ ID NO: 22946 - protein, 420 aa, Oscillatoriales sp.
MLTLTYEYKAIPTDEQIQLIERTLDVCRKVWNFALRERKDWYNSRKCPINACSITSEYMIPADAPYPNYYVQANALTQAKTVFPELATVNAQVLQQVLRKLETAFVDMKRKGMGFPRFKKRDAMRSFVYPQMGKSQFLKGNQIKLPQLGWMGYIKSREIPDGFVVKQARIVRKASGYFLMLTLESAVSVPDTVPTGYPVGIDLGLDKFAATSEGALIERPKFLNSLQRELTLLQRRLKHKKLGSGNRRQLNQKIARLHQHIADTRKDWHFKLAHKLCDGAGMLFVEDIDFRAWAKGMLGKHTLDAGFGQFVSILEWVCWKRGVYFGKVNKDFTSQVCPQCDTHTGKKELKDRIHSCPECGYITHRDVAAAQVIRNRGISGVGRILDEIACGDGLTGTGNSLVKNQRSRKKSGEAQLKPAS

SEQ ID NO: 22947 - protein, 349 aa, Halonotius sp.
MVTVTVTAKFHNPSLSRRKEWQHAARLYRDTKQFCIDGWENGDFGKSVTTASIDNDLYSAIQNQAIREAKSDHSEDGDVRYRESQPFAVNNQNWEIDTTENGTVVVGLPCISQWWYTPIEVYDDISDDVQRLVDGDADKSRLQVYRRGDNWYCTFNMEYDADTSGETPIGVDIGERHILAVTAYGENESMLVSGGEAKYVRRKYRSLRESLQQAGALRARNRVGDKEQRRITDLNHNLSRRLITFAEQFENPVLRMEDLEGIRENSSWSGVHSWHFHQLQQFITYKAERAGIRVEKVDPYDTSQRCSECGSMGTRDGDHFSCSECGRGRHADLNASENIAQREGEPCTA

SEQ ID NO: 22948 - protein, 383 aa, unknown
  TnpB Polypeptide
MTATTTKTLEATLAPPTAHKECKLCDLLDTYRAGLHEAFTAGCETMTATSDVVTPYDLPYQAKAALCNYVPQLHDTYDAQELDDKHSVRLTNQAAEFDHSPERDYEFTWWVPQPGRGTNFWIPLRISPAQEGLWHNLVADESEASAGQLRLQRHRTSWTLHVTVEFPVERPDYEPTDEDVTPVGFDIGEAHLLAGCACERGTPTDPLLITGGRARHLRKEMFTTLKRLQERDAAEWRIDERFDHYQNALTDSIEKASRQAVEYASRFEKPVVVLEDLSDIREDLDYGGWMNRRLHAWAFARLQGRIEDKAHEAGIPVAYVEPAHTSQTCHECNHVGYRNGDEFRCTNDECWVTEYHADINAVARLRLAGSQKSAISGHGGQHR

SEQ ID NO: 22949 - protein, 478 aa, Promicromonosporaceae sp.
VSRHTTFQFTADPSAEQARGLARHEGAARFAFNQGLRLHLNARRAAKNAVDDPAVPVPWSGFDLINAFNAWKKTEDAGRRFVVDAHGTAEVDVTGLAWRSEVSAQVFEEAVVDLGKALKAWTDSRRGKRAGRAVGHPRFKKKNHERGSFRLRNKTSRTKAGVRATIRVGQNGPRSVTLPGIGAIKVHDDTRRLRRMLAQGRARILFATVTRRGGRWRISLNVEAADLHPAARHPARGDGDHTGWVGVDRGLHAPVVAALADGTQTLRIDAAPRALRAAQPATRRLQKAVSRKVKGSTNRRAAVKRLARHHERVRARRHHFLHQVSNLLVKTHDRLVIEDLNITGMLTNHHLAAAISDAAWGQLARQITYKMAWRGGQLLTADRWFPSSKTCSGCGQPKDDLTLADRTYQCPACGLVIDRDLNAAVNLATWGEQHHLSQVLDPEARGQVTNAHRREGSGRRTRVDETSPDDVGTLTHAA

SEQ ID NO: 22950 - protein, 477 aa, unknown
  TnpB Polypeptide
MKRTVKIKANCSNNKDEILLIGTIQRNIKNYVWSRYSGIGSLLKQSGWTIRDELIQKNLLSNKISKTLSRVAIEKSASTIKTNWTVTKKEVKKAIFQNENLTKEDRRYLFLCLKHTPTLYNILNYKKVDYQTDYLKDLKVNVHRLNNLLRRYIRRYKTKAHTNKANVILTSNLYKFNPNNNEFSFTGKKKHSLIVITLIGNVPKLKGTLELVKNQKSNQYYLHVPLDRIISKKNITNESETLGLDVGITDLITLSNGSVYGANSAELFYTLSDNLVNKNRSRLFSYKRDLEQRILEEQDDAKKSLLELKLKNLNENNLGSKKRISKISKYKSRIVSHINCELNKMVKEEDIQEIVREDLNWSSKKSKKKNKRNVSRKQQNRFSTWTKGVLLERLSIKLAEKEITETIVNPAYTSQVCCKCNHLGNRKGKEFKCSNCNLSIDADFNASINIKKRKFISEINIDTPYKEVKKYYENLSV

SEQ ID NO: 22951 - protein, 398 aa, unknown
  TnpB Polypeptide
VKRAYKFRAYPTGQQEGRAVRLLADHCDLYNAALQERREAWRMCKVSIRYGDQSAQLQEIRTDDPNGHGGHSFTAQQQTLRRLNAAFAAFFKRVEAARRARARGEQAPNPGYPRFKPYKRFNQVLFVAGDGAKWEPADGGRWAHATFQAVGRIKVNQHRAVNGRVKTLQLKREYRRWYVVVVAEEVAEPLLATGRVAGVGVGVARFLTTSDGEIVANPRFLDKARTRIADLERRKARAKLGSGNRRRLRRQLARQWRQVSNQRRDFHHKTARALVNAYDTIALEDLRVANMTRSAKGTVEAPGRNVAQKSGLNRSILDAGWGQFASILTAKAESAGRRVVLVNPAYTSVDCHACGARCARPRQDTVVCPVCGEHDADVNGARNIATRAGLGSGQALVA

SEQ ID NO: 22952 - protein, 349 aa, Variovorax sp.
MLIVYRYRVKSLTGLLSKQARAVNFVFNYCNDRQKDALRFGRRWLTGFDLNKLTTGSSKELGVHCGTVNAVCEQYAKSRSQKKRAFLRYRSHKKSLGWVPMKGRDVKETPCGLHFHGREFKVFKSRPLPAGAKIKDGTNFAQDARGNWFLNVCIEVPEGQVRAIRNGVGIDLGLKDFATLSNGEKIGNPRHLRRLEETLASAQRAGKKRLATNVHAKIVNSRRDFLHKLSTRMVREFDYIAVGDVSSARLARTTMAKSVLDASWSSLRQMLAYKAIAHGASYEEVNEAWSTQTCNACGVVAGPKGRAGLNERNWTCGCGAEQDRDVNAARNILLRGSGHGTPAEGIPIL

SEQ ID NO: 22953 - protein, 429 aa, Variovorax sp.
LIMQDIKAYRFQMRTRPKVEAQLRRFAGMGRWVWCRALAEQRARHARGEKYAGYAQMCTWLTDWRNDPKTGWLADGPVHPQQQVLRRLDEAYKRFFATVKAGGGRAGPPRFKRYGEEPGIRFPDPKQFVLDAANGRLKLPKLGWVRLRMSQPLDGVVRNVSVTREGERWFVSLQVESKEVAPALDVAPTLGIDLGLAKFAALSDETSVEPLKALERQQRRLARYQRAVARKKKGSTNRRKAVVRLGNLYRRIARQRSDWLHKLTTELADRHAVIALEDLRIASMSASARGTVEAPGKNVRAKAGLNRGILDAAWGEFARQLAYKVQWRGGRVILVNPAYTSRTCRCCGHERAENRKTQAVFSCAACGHTENADVHAAKNILAAGRATWLSERQGARSHACGGDVSRKAAARPPRAAPAKQEPTEAKALA

SEQ ID NO: 22954 - protein, 350 aa, Variovorax sp.
MLLVYRYRVKSLNGLLNKQARAANFVWNFCNDTHKHALKWGKRWPSGFDLNKLTAGSSKELGLHAGTINAICEQYAKSRSAKKRPFLRYRGRRSLGWVPLKGRDIRKTPNGFHFHGREFRVFKSRDLPAGTKIRDGTNFSRDARGNWFLNITVEVAEADARQINAGVGIDLGLKDFATLSTGEKIVNPKHLRRLESKLAMAQRAKKKRQTTHIHARIANARRDFLHKTALGIVRRFDYIAVGNVNAAGLAKTSMAKSVLDAGWSSFRNMLGYKAIAHGAVFEEVNEAFSSQVCSSCGALPDSRPKGIADLGIRAWVCSSCGCEHDRDVNAAVNLLLRSGHRAPVEGIPGL

SEQ ID NO: 22955 - protein, 282 aa, Variovorax sp.
VSVWPVTTISPPLRARAAAKASLSAHCNAGVSAVSDLGLAKFAALSDETSVEPLQALSRQQRRLARYQRAVARKKKGSANRRKAVARLGNLHRKIARQRSDWLHKLTTDLADRHAVIALEDLRIVNMTASARGTAQARGRNVRAKAGLNRGILDAAWGEFARQLVYKVQWRGGRVILVNPAYTSRTCRCCGHESAENRKSQANFACVACGHTENADVHAAKNVLAAGRAAWLSERQGALGDACGGDVSREAAERPSRAAPAKQEPTEAKALAGAHLRPTPAQ

SEQ ID NO: 22956 - protein, 489 aa, Variovorax sp.
MTSGVRFSSPLSVQDPLNGHLRQWIGHQRFMRNAKTRERNAAYLEGRHHEDSQKYAHLVTEETAFLSDVPSQILRNGAVRFYAGLQRFRAGLGGAPKIKRRHGRQSVLITKELFRFLPMPVTGRSDREGWVIELGTKANPVGRLSFHAHRAWSLPNQIIISVEPSGRWFVSFSYEGEAIEVDRKGAARDLSAADHIRTAEELLYEIQGLPDLEDRVWAGDRGVHTPLAGSDGKTWDFSDVHKARLARAESGKRKYQKRMARAQKVKGADGKSRVSQGYLKLKRKAAKKAEYGRNVRQEFAHQTSHALVASNAEVFAFEDLKIKNMTAAPAPKLDAEGRWARNGSAAKAGLNAAILRSAWGSVQRFTTYKAKKRNKLVYKLPPAYSSQTCSRCGHRDAGNRKGQLFACLSCGHQADADVNAARVLKLWTIEKVRSGDLPAEEQRRKKRVAFARKRTRALEKEHLEVTSDQERTGHLEAGASNGSAFHAVA

SEQ ID NO: 22957 - protein, 315 aa, Lysinibacillus sp.
LKEVDSIALQSSLKNLADSYTRFFKKQNQAPRFKSKKNPVQSYTTKQTNGNIAVDGNYIKLPKLGLVRFAKSREVEGRIVNATIRRNPSGKYFVSILAETDVQPLEKTGSSAGMDVGLKDFSILSTGTVYKNPKFFRSLEKKLAKAQRILFRRKEMALQQKKPLEEARNYQKQKVKVACIHEKITHARTDYLQKISTDIIKNHDVIGIEDLQVSNMLKNHKLAKAISEASWSQFRTILEYKAKWYGKQVVAVSKRFASSQRCSACEHKNKDVKHLHLREWNCPSCGTHHDRDRNAGQNLKNEAIRLLTVGTTGIA

SEQ ID NO: 22958 - protein, 207 aa, Moorea sp.
FIHPGRDIDRRDKRLKSVSVASLTMGKGGKLHKGFCSKTYQKCQRINNQIGHIVSKRIVQIAEEFNSEVIVFEDLKGWKPKGGRKRSNLRQRFHGWLKGKIRDFTEMKWAELGGKVIEVVAAYTSRLAYDGSGKVKRDSKNYALATFPSAKRFNADLNGAYNIGARGVFKLTHRNGSEGLSSKSPGRPPRSWACLCECDSLARNLPP

SEQ ID NO: 22959 - protein, 450 aa, Succinivibrio sp.
MLIELNTKFLIMKTRTDPKLIYIAHKIELKANNKFRTYCRKAFGVRRLSYNWGINKLKENIHNGIQGPVIALKKEFNAIKREQYPYVMEVSKYASAQAFVNLGQAVSKFSEDREKKFVKFRFPKLKKRKKFGGSFYIGGDHVQIITGAQISKNLKNDSKKQYLKVPNFGPVQMRENLRLNGHICSVTISQNGNKIFAAFKIGITQEEYQRTHKIRDCEGTYLGIDLGLKNLITTNDGLIIDAPKNLRKNEKRIAHLQRKLDKKKHPRKKEDKKIFSKNFYKVSAELRKLHALVANKRNDYNQKISTVLASFYQYIAIESINLKGLLKNHCIAKSISDASFGKLKKLIKDKITHQGGTVVEADQFYPSSKTCSACGYIKNDLTLEDRTYICPKCGLKIDRDKNAAINLLHLISKQIIGLAEPKFKPADLEKVEKALSNNLIPHSRVDSGTK

SEQ ID NO: 22960 - protein, 394 aa, Calothrix sp.
VLVLEYKVKAKKLQYLAIEEAIKITQFIRNKCLRHWMDAPREAKIDRFALNKYSTVLRNEFNFAANLNSRAAQASADRAWVAISRFYRNCKNKISGKKGYPIFQKNNRSVEYKTSGWKLNPTKRRINFRDDTGIGDLKLLGKWDIQTYPVESIKRVRLVRRADGYYCQFCIDVEVKEIQPLTGNEIGLDVGLESFYTDSNGYHEPNPRFLRKAELSLKHAKRRIRKKKKGSSGRKRAGAIFARKHLRISRQRNEHAKRIARNVCKSNDLVAYENLPVRNLLKNHCLAKSIADVSWSNFRRWLEYFASKFGRTAIAVAPHYTSQKCSNCGVIVKKSLSTRTHVCSCGCRLHRDQNAAINILNLARQASLGHRQSNAVGVGVTTLLGESLKEQTLT

SEQ ID NO: 22961 - protein, 358 aa, Bacillus sp.
LSQTITIKIKLLPTKEQATILNAMSKEYISTINTLVTEMVAEKKSTRKSSKDISSFLPSAVKNQAIKDAKSVFEKVKKSKYSIIPVLKRPVCVWNNQNYTFDFSHIHLPLMMDGKAKKMPVRALFDDRNNRNVDLLNHKLGTLRITQKSGKWMAQISVTIPVVEGTGTKIMGVDIGLKVPAVAVTDDGKVRFFGKGRQNKYRKRKYRSIRKVLGKKKKLHAIRKLNDKEQRWMKDQDHKVSRAMINFAIQNKISVIRLENLANIRKTTRTSRKNEKNLHTWSFYRLSQFIEYKAKLVGMKVEYVNPAYTSQTCPKCTKKNKAQGRKYKCDCGFEKHRDLVGAMNIRYAPVMDGNSPSA

SEQ ID NO: 22962 - protein, 387 aa, unknown
  TnpB Polypeptide
MRKLLKSFKTEINPTEEQKAKIRKTIGTCRYIYNFYLAHNKELHNKGEKFMSSNQFRVWLNNEYLPKHPECFWIKEAYSKAVTQAVNNGQAAFTRFFKHQSSFPRFKKKNRSDVKMYFVKNNPKDCRCQRHRINIPSLGWVRIKEKGYIPTTKDGYVIKSGHVSIKAGRYYVSALVEIPNNKIANSFNEGIGIDLGIKDFAIVSNGKTYKNINRSVRLKKLGKQLIREQKNLSRKYENLKKGESTQKANIQKQRLKVQKLHHKIDNIRTDHINKTIAEIVKTKPSYITIEDLNISGMMKNKHLSKAVASQKFYEFRIKLQAKCNENGIELRVVDRWYPSSKTCHCCGAIKKDLKLSDRIFKCDCGYTEDRDFNAALNLRDATTYEIA

SEQ ID NO: 22963 - protein, 536 aa, unknown
  TnpB Polypeptide
VSTEDAEVLRRVGDYLGRLAGRDLTSRCRLGSGPDRRADRKRALTADSSSRWAGAITRTSNDQWERAYANLRDTRVGLRRGIKKTRARLAVPVGQARGRGQVQGYHSQAERFQKQRHVQHLQARLAEVEARIAQGRVSVCRGSRRLAKLHHAVAGDAVVGDGEHGKHGSVTTTQAQWRARWQAQRRFLTADGEADKAWGNETIRVHPDQRWLELRLPTPLAYLSNTPGRAATYRLGCPVAFTHRASEWAAQAACGAVRYDLFFDPARGRWYADASWRLPARQVPSLEELRQDRTLAVDLNAGHLDGWVLDPSGNPVGEPATIALDLDGLPASTRDGRLRAAVATIVQLARANGCRSMVVENLDFADARHTGRETLGRGARGKAFRRIVAGIPTRQFRELLVGMAANAGLWVVAVDPGWTSKWGRRYWQRPLQQSTNRSATVTGHHAAAVVIGRRGLGLAARRRPGVTRLHRRMGKGELPARPGNQTLGREGPGPPGGQRAAAPPRKTRQAERIRLGDQVAQDRSEPPGQDPLLLTF

SEQ ID NO: 22964 - protein, 483 aa, unknown
  TnpB Polypeptide
VSEVQGISGYATFVIRNDMKLGDELSQVTATQPTTAGRRAGVIMPDFLVTGKSGRSRKEFLVQYNVVTSYRSWQERVKAVNGESDKYVSQGWKRTTNASAPTYGEDYINLGAVDKQYAVIENSPFIDGEIVLKMVIQGMWYRLFFRFDAARFPEGKVTLPLIKVENNQPVFIFSVVTDTPIVQFSGDYVVGVDLGINNYATVVVRNSKTEKIVYQSTLSQRVHSLWNSVRASERQVKQLRKKAKSILYDRQAKMSALDEAQLHREAASRKKRELTILAAQEIAYLSHLWGNAVVAVEDLSWVANTMQNGRWNRGELVKWVTHYVTQNGGWVVAVNSANTSRICHLCGSKVTHPVHKVSLCLEHGEMDRDVNAAANIAARAVSGVTKARKTRAKNPKLQKKQAPLKTPHTRASLKYPGRDRTKNKPTLKRKKRRISKGVILPSSPARVNMDTVLADQDASGRLGDQYGGYQTGLYNLQMQVIQS

SEQ ID NO: 22965 - protein, 393 aa, unknown
  TnpB Polypeptide
MNASAPAYGEAYINLGTVDRNYAFIENNPVVDGEIVLKMVIQGQWYRLIFGFDNTRFPEGKVALPLVKVENNQPIFIFSVVTDNPVVQFSGDWVIGVDVGINDYATIVVRSTNTGQVVRETTLSQRVHSLWNSVKASEKQVRFLKKKASRLLYQRQARMSALDEAQLHREAALRKKRELAILAAQEIADLSHQWGNAVVAVEDLSWVANTMQNGRWNRGAFIQWLTHYVSQNGGWVVSVNPANTSQACHICGSKVTHPTHKVSVCPAHGEMGRDINAAANIANRATPKVAKARKTRTKNRRLQPQQPIKTPPTRISLRHPGRDRTKNNPTPKRKNHRPTPKEVNLPISPARVQAARLETRVLADCGAYGAAETNTAAIKQGYTTYKCRLHSLI

SEQ ID NO: 22966 - protein, 363 aa, unknown
  TnpB Polypeptide
MLNPVYEAPIYPKRPNERWEDYMLIQITPKGSKHTVVTLPIIKIENNQPVFIFSVVTDNPIAQFSGDYVVGVDVGVRNYATVVVRNSKTGQIVYQSTLSPRVHSLWNSVKASERQVRALWKKSDLLIYQRQARMSTLDEARLHREAASRKKRELAILAAQEIAYLSHFWDNAVVAVEDLSWISNTMQNGRWNRGELINWVTHYISQNGGWVISVNSANTSQVCHLCGSTVTHPVHKVSLCPEHGILDRDVNAAANIAARAVPRVEKARKTRAKNRKVRPQAPRKTPVARASLKYPGRDRTKNKPTLKRKKRPISKGVNLPSRPARVNMDTVLADCGAYGAAGTSQAALKQGNIAYDCRLYNLN

SEQ ID NO: 22967 - protein, 335 aa, unknown
  TnpB Polypeptide
MMLADKIAYYEETGETLNNTPAQYKKDFPWLKEVDSLALANVQLNLQKAYKNFFQSGAGFPKFKKKRHRQSYKTNNQKGSIALENGAIKLPKAGWVRVKAHRDIEGVIKSATVSMTATGKYYVSILCESEMLPLPKTGSNVGIDLGISDFAILSTGEKVGNQRFLNQLSKKLSKEQRTLSRRALAAKKDGRKLTDSKNYQKQRLKVAKIHEKIANKRQDFLHKVSTEIVKNHDIICIEDLTSRNLMKNHKLAKAIGDASWSKFVRMLGYKADWYEKQVSKISRWYPSSQMCSDCGYADGKKPLHVREWTCGNCGSHHDRDINASINILNEGLRLA

SEQ ID NO: 22968 - protein, 525 aa, unknown
  TnpB Polypeptide
LAKNKTYKAFTARPSYILDLNGELLDSTTVLSKLASEVQGISAYATFVVRNDMRLGSALALVTVTQPAVAGRRAGVTMPRFFVEDEDGKPIAGKSGRSRKEALIQHRVVTSFRSWQESVKAVNGVSAKYVSQGWKRTVSASPPPYGEDYVNLGAVNKQYAAIENDPFATGEIVLKMVIQGIWYRLFFRFDSMRFPEGKVTLPIIKVENNKPVFIFTVVTDNPIVQFSGDYVVGVDVGINNYATVVVRNTKTEKIVYQSTLSQRAHSLWNSIRASERQVKQLRKKADKLLYQRQARMSALDEAHFHREAASRKKRELAILAAQEIAYLSHFWGNAVVAVEDLSWINNTMQNGRWNRGELAQWLTYYAAQNGGWVVSVNSANTSQQCHKCGSRVSHPTHKVSLCPEHGILDRDVNAAMNIASRAVPKVEKARKTRAKNRKLQPQAPLKTPVVRASLKYPGRDRTKNKPTPKRKKKRVSKGVNLSLRPARVIMTTVLADQDASGVLGTSTAALKQGNIAYNCRLYSLN

SEQ ID NO: 22969 - protein, 519 aa, unknown
  TnpB Polypeptide
MSGVTRAFSLRPFVCFDRVTGVGLDLHTVLEEVRLDAVLCASEAMRHITVNNLGKVAEHDGLKPAVAGLRMGMRLSAPGRGTGRSRFERMVCEYAVSQLRSWWERQRACMRQADKYVSVGYKHTVRMGKPSYLKPRLALSVTDRQYHVVRQAGSSVELDMVVNGRWVTFRFKNPGRFFESGVRIIAPTITVDEKDRVVFTWYVELPVERVEFSSRYVIGVDVGITNHTTAVVRDITTGEVVEASFMNRRVRSLENKIKRTKTQITALYRKGRVEKVEAHRKALSNRRKELAILIGQEIADMSWEYGNALVAVEDLSRIKNTMKNGRWVRGLIVQRITDMVESNGGRVMTVNPAYTSRKCHQCDTTLDMTDYHHPVCVTCRVSWDRDENAAANIAEKLKDKERHKKACQTRKKHASKKRRRNSKGSLRPLKHPLKKTGPTPKSPQNRVKPNNSHCVHHKHVVIKKRGGGVYPVLCAAGWSLLNNNASVPAVASTLTGRCSDNQPHDYSTGSHRLNDLYLP

SEQ ID NO: 22970 - protein, 434 aa, unknown
  TnpB Polypeptide
LGLHILGNDTRCGITCDTQYIIVVMSIKRYRYRAYPKKGQEQLVAALFGCVRVVYNDALAYSKEQYKDTGKKPSSGDLSARLTRLKQAPGKAWLKEVSAVPLQQSLRDLDRAYTNFFASVTGRRKGPKVGAPRFRRRSHRQAARFTSQVFKVRETTHGVGFVKLPKIGEVRFSLSRALPSPPTSLTLIQEADGKYYVSFVVETTPTPAPEPTAYAVGVDMGLKDLAIAVNSNGETTVFPNIRPLRQAKKKLARLQKQLSKKKKGSNRYTRQRLRVAKAHTKVRNVRVHHLHHVANQIVNENQVITLETLSITGLARTRLGKSVLDASWGHLNRLIAEKAAEYGRTLIRVDRFAPTTQTCSICGTPNGRKPLRIREWSCTSCQHRVDRDRNAAVNIMLAAGLAESLNEHCGDNVRRLLANAVIVDAVNPPRVAAA

SEQ ID NO: 22971 - protein, 478 aa, unknown
  TnpB Polypeptide
MSQKVRIDGVKHAGASVFLGVDHCGNPRWTRNPERIMAWLCDGWRARFNQRREQRPHNIPVKDEAGEVVDWVKEPLGGPDVADLLSDKEARLQCSWMAGIPAPILSSTDRIEGTEWSAGLKRKKTAGGRVPGFKSRHRNLGFVCWRNASKTGNAIFHKTGRKSGVVVITGMNPTRWVKPGEKAHWRIAIHVRVGQSIRPYTGIHVDWTHKSLVFTDMPLPLPRVGNGMVGLDRGCAHALASSDGTFMDMPKPSKAELKRLKYLQRRMARQDRTNEARGGRTAKFASKRRQKTLSQFNALQGRIVRRRNDWIEKTTTRLAQENILVAMEDLDVRAMTRKPKPKPDPAKPGQYLHNGAKAKAGLDRSILSNCWGRVMIRLQDKMDANGGRLVVVPAAYTSQTCHQCGHVAKGNRESQAVFHCVECGYMANADVNAAENILGRALNKTGGGTASDVEGRVGGPMKRQPPQRRSEVLSESGR

SEQ ID NO: 22972 - protein, 404 aa, unknown
  TnpB Polypeptide
VNKAFKYRLYPTRKQRDALQFTLDRNRELYNAALEERREASRMSHMSLSYNDQSAQLPAIKEIRPEYNEIYSQILQDTLKRVDKAFKAFFKRCEEGKTPGFPRFQGYDRYDSFTYPQIEKLKGNPTVRIENGKVLLPKIGPVKVKQHRLLEGKVKTATIKREGDSWYVIVVCEIEACQRLPSTDLAVGIDMGLKHFMTDSNGDVVDNPSFFRKSHGRLKKLQQRLSKKKKKSNRRKKAVKSVAKAHKKVRNQRQDFHHKEARILVDTFETIIFEDLSMHQMVRRPKAKQDADGKYVPNGAAAKGGLNKSILDAGWGSFIELVKHKAEWAGVTVSEVDPKKTSQICSACQKEGEHKDLSVRTHVCEHCGVVLDRDHNAAVNILDRGLGRSLREPVATGTFRGTSA

SEQ ID NO: 22973 - protein, 459 aa, unknown
  TnpB Polypeptide
MRKEKQAMPVAEGWKLYQTLQAVEVSGPASYAVRYQTRLPVPGKQKKKNASRKDPSVEYQYQAYRFRGYPDKAQADEMAGFIGCCRFLWNRMLADRRDFYRVMGTVLKNTPADYKDIPELSWLNGCDSLALCNVQLNLERAFSEWLSGEKGKPRFKKKGLASASYKTNAQGNSIRLEDGKLKLPKVTGMVRLAMHRKVREGGTLKNVTVTQEPDGKWYFSLVYAYEKKEPLPECFCKREEEIRAVGLDMSLPELYRDSSGDLPSYEVNGVTVSFRKVYRKLEKRIAREQRRLSKMEKDSANYRRQCRKVAKLHAKAKHQRCDFLHQIAARLAAAYDIIGVEDLDMAAIRRSLRFGKSVSDNGWGNFLIYLEEACRKHGTLLIRVNRWFPSSKTCSVCGHVHRELALSDRTYACPECGSAMDRDENAAVNIREEALRIFHGYLDGEKTETLPEGYVFQTA

SEQ ID NO: 22974 - protein, 249 aa, unknown
  TnpB Polypeptide
VKIKQHRKPADNWRIKSATVSMNRSNEYYISILFEYEDVPVRPASKQSSLAIGLDYKSDGLYADSNGKIGSNHRYFRESYKQLARAQRKLSRRVGSAKKERKSHNYMKQLARVNRIHRHIANQRLDNLHKISAMLAKQYDIVCVEDLNMKSLSNKGFGNGKSTMDNGYGMFLVILEYKLKRKGGYLVKISRWYPSSQLCSVCGKKHPEMKIAKGSPKQEYLICDCGNCMQRDLNAAKNILNEGLRILNS

SEQ ID NO: 22975 - protein, 404 aa, unknown
  TnpB Polypeptide
MLVKGVVFYLDSGLPAEAKFLLEDFRLAVNNTIRAGLQARVTSRNALVRVAYKDFREQHPRMYAKHLVSAFEVAGSVLKNHRRRVRKGVTCRIPYVKRLMMKAENQAYKLDRKSGVIDLPIRAGCHIELRLVVSQYHRKYLDDMALSLGSLTILPDRVVVAFRKDAPKPYSPGSVISLDTNERSLDGLFVESDVAKAVKADFPEVAIIQQRHHDRRKRLQKKKAHDRRTSRNLCRRDGAREHRRIDYRLHQVANSVLKFAEERNSAIVLEDLKGFKSKRSKELNRRLSMWPRRKLHQIIEYKARWRGIPVFKVDPRDSSRTCPICGRIQDSRMGAEFKCECGWHLDKHVNASISLLQTAISKGMAGGLWLNPGAFQHDVMMILYEPAMAARSEPNGTSGVAGVT

SEQ ID NO: 22976 - protein, 281 aa, Okeania sp.
MIVYEFKVKGKTQQYQAIDEAIRTGQFVRNCCLRFWIDNIGISRKELYRYNTELRAMYPFVKDLNSHACQASVERCWSAIARFFDNCEKNIPGKKGYPQFKKRSRSIEYKTSGWKLLNPKHIEFTDKKGIGRLKLIGTWDLAFYPVEKIKRVRLVRRADGYYAQFCISVEVKVETQPTKKNVGLDVGLKEFYTDSDGKTEPCPRFYRKSEKRMKFCQRRVSPKHKGSANSFKAINKLGRVHLKISRQREEHAKRLARCVVHSNDVVAYVDAERRAEGRFED

SEQ ID NO: 22977 - protein, 494 aa, Rhizobiales sp.
LQTISIPYRCCDESAAFLRELRRVFSAAVRTAYANAVSNGVTLKQKDLRNLVKQRFAGGAVDAWILHCATLEGMDLRRARPEGGMIFGTRAGLERRRKGLITHSEWREMRLRPLCSRGDKQYKGNRHFRLAADGRTCSVKMYGREVLLSLPQMTGNAGEALRQAAALAAAGKINLTFRLDGEKLHVTLDPDQLPNHPQRRRPIRPLPGRALGIDLNPNWIGLAVASNCSDASKMEDTQLLEHVLLKLDLAIDASPETVRETLAAVCDRAISLARKHRCGVITLEKGLGKLRSSGKSRSLNRVLNYWARTVFVQMLTRRARLAGIEVLEVWAGYSSTIGNLAFDAPDACASATEIARRGIARLAGIKDVLPALEVGCVSRLWKNGKVPAELGSWQEVHRTIKAAKIGYRRPHPDVPIGARGSDVHGTEMFCGYAVVRLGRRHRPGLMFCVASVKPDAVLRTSAMWTCRQTIRFHTVIRIANIAPHLGYVASLPVN

SEQ ID NO: 22978 - protein, 351 aa, unknown
  TnpB Polypeptide
MQDGTYLKGSDLRDRALLRGSYRALDAKHQQRADHINDVLPSASLDCVHQHVIGNYKAAMANKHNIDGAFVMKKKDDIMMFKVTSHGWSITDDTVSILPSCIGLKKCRRVFSESDFSLMHMLSERPTVTISIINHRIYVDVPLNQAVPTNLSSHIVAFDPGLRSFIVTANSAGTIEDLGKEIVSIANRTARRIYKRPKPVIPEDASKRLMKKLQRQIDAIDRLKAKTDRRIDDIQTKLAKMMALRYRVVISSNISLYLARSQKGLNRLIQRFVNHCNFIKRLKNACERYGSDYVETKEYYTSQCCSQCCSGKYKPEKRKSYTCPEGCPDIDRDVNGARNILMRFMAMTGSF

SEQ ID NO: 22979 - protein, 376 aa, unknown
  TnpB Polypeptide
MKIIRSAKCSLKFSTAKKQLQLNSVLAEYGKVVNIFIDHFWLLEKLPSKTDLLKDIVDIPLQQTWLSARLRKVAAREAIDLILSVKAKKKGKKSKPKHRGQKMSVSCTIAELQLTKDAHNFDAWLHVASVGNKVILDLPVKFHKQYNKWNNLGKRVNAYIIFKTHIQFCFEIETGKKKDGINNLGIDTGINALASCSNSNQYGTDIKENIARIKRCKQGSAGQKKARRALRQRIDEIAKQLIYTENPDLIVVEQLKNLGKKTKDKRLLSKNIRRSIGIWNWRYWLSRLEQQCEENRVSFRSVSPYNTSITCSNCNHVDRMNRQSQECFVCQSCGHTGNADINASKNILRRFITGKYGSGCKLENKDNLPMGKFVQV

SEQ ID NO: 22980 - protein, 386 aa, unknown
  TnpB Polypeptide
MDRTLRLPLYPTTEQTECLLETMRQFTQSLNLVCAAGWRLKEGNAYTLHKLTYRDCKALCPKLVSDLHVQARQKAAEAVKSALALARKGKKVNRPQSTLCPPRYNVNSFSLDWQKGLANLATVAGRQKVTFAISAYALALIGSRVATADLVYRKGRFALHVVLKLDDVAFSDSGQALGVDLGVTRPAVTSDGRLHGKRRWREVSKRRFRLKRKLQSNGSKSAKCHLRRLAGREQRFRRDCDHILSKSILDGITAGTTVVVENLTNIRARVKATRGEAKRRLHSWSFAQLRSFLGYKAEALGCRVAGIDPRHTSQRCAACGHIYRGNRPSQSRFVCRSCGHRANADINAARSIRDKHLVGWSSPSDAALSEAVSSQTRNCQVQPLSV

SEQ ID NO: 22981 - protein, 434 aa, Microcystis sp.
MVENCYMLVVEAKLKNGTLEQYHRLDEAIKTSQFVRNSCVRYWMDHKGTTRNNLQKLCSVLANNKETPWVNKLNSQARQSAADRAWQSISKFYQNCHANIPEKKGFPRFKKHSRSVEYKLTGYKLSDDRRKIRFTDGFKAGEFDLWCSQKTLVYYSEQQIRRVRVVRRADGYYCQFLIDVERQEYHKPTGQITGIDLGLKEFYTDAQGNTVENPRYLRKSEKRLQKAQRRLSKKFRKGKKQSKNYHKQRVKVARLHLKVSRQRKDKAIKEALALVQSNDLVVYEALKVRNLVKNRKLAKSISDASWYQFTQWLNYFAKIYQIVCVAVPPHFTSQDCSVCGTRVQKTLSTRTHQCPNCQTVIDRDHNAAINILKKGLKYLGNHLNGTVGQTETDPNALGESDLWILNGDIENLSCLVEQGISDSDLERIPRHSVA

SEQ ID NO: 22982 - protein, 235 aa, Enterococcaceae sp.
MKTKKSIWQSYTTNNQQHTIYFEEDQIKLPKLKTLVPVKKHREIKGKIKSATISAKNNEEFYISILCLEEITPLPKQQASIAVVYDPQQLVKANQPVPITCEHAIQTKQKLTRAERKLQVKATAVKRKKILLTQARNYQKLKGKVARLYRFHCCQKREFIDQVSYHLVKQYDTIYLEQIAEDTVLKAGHYSISDWHQFVRKIQYKAQWYGKELRFVTLDTQDQQKLERLSGEMSS

SEQ ID NO: 22983 - protein, 413 aa, unknown
  TnpB Polypeptide
MQRLQAFKYELMPTSDQTRAMHRFAGSCRFVYNKALALQKENHAAGKKFIGYVAMAKHLTGWRNGTETPWLKEAPCHPLQHALKDLERAYKNFFEKRADFPNFKRKNGGDAFRYPDAKQIKLDQDNDRIFLPKLGWLRYRNSRDVLGEVRNVTVSQSGGKWFASIQTQREVKQPLSTATTAIGIDVGVARFATMSDGSFIAPLNSFKKHQQRLARYQRRMSRKVKFSNNWKKAKARIQKIHTGIANARKDFLHKTTTTISQNHALVCIEDLQVRNMTKSSKGTVEQPGKKVSQKSGLNRAILDQGWGEFRRQLGYKVTWNGGMLLAVPPYHTSQTCPACGHVSKDNRQTQASFLCVDCGHENHADVVGAINVLRAGHAQLACGESAQSGRSMKQEPTEATRKSSRGAVGIPVL

SEQ ID NO: 22984 - protein, 427 aa, unknown
  TnpB Polypeptide
MKLTFVYPVYPTKTQEHTLLLWFDHLCELQNSARHDRLVAYETEGVFVSLSDQQTLLTAAREKYDDFRAVPQDFQNHTLRRTDKAFAAFRKRCKNGGAKKGYPRHKRRVRSLTWSLRKYTKVVRKKTKASNKQTIRVRENPIIETNFRHNRLKVPKLGEVKIRMHRPLQGDPKEVTIVKKASGWYAHISCEIPDTLKVEPTDAVAVDVGTTHYLTTSEGEKEDNPRWYCQAEGLLRKHSRDLSRKKKGSNRRKKQQHKLALYHERTANKRKDFIGKLAYKLYHHQKNNVLVAEGLGIANMVQNKHLSKSISDASWGIFFKWCADIAERDGLHFYQVDPKNTSQTCSCCGQKSQKKLSLAIRTFDCSFCGTSLDRDHNAAINILLRAACVHRGERWVTNLYEARNTNKAPDEGLQNATQLLLFSSPSL

SEQ ID NO: 22985 - protein, 430 aa, unknown
  TnpB Polypeptide
MRLTFKYPVYPTKTQAQTLLVWLDHLCELQNSARHDRLVAYEAEGHFVTLNEQQALLKAAREKYDDFRAVPQDFQNHTLRRTDKAFAAFRKRCKENAHKKGYPRHKKRVRSLTWSLRKYTKVVGKKTKDADKQTIRARENPIIETQFRHNRLKVPKLGEVKIRMHRPLQGDPKEVTIVKKASGWYAHISCELSDTPKVEPTDAIAVDMGTTHYLTTSEGEKEENPRWYRQAEGLLRKHSKDLSRKKKGSHRWQKQKHKLSLDHERTTNKRKDFIGKLVYKLYHHKENKVLVAEDLDVSNMVKNKHLSKSISDASWGIFFKWCADIAERDGLHFHQVDPKNTSQICSACGKKSPKKLSLAIRTFDCSFCDMFLDRDHNAALNILFRAACALRGERWVTTLDETRNKNEARDEGLQNATQLLLFDAMTSPSL

SEQ ID NO: 22986 - protein, 386 aa, unknown
  TnpB Polypeptide
MKAYQFRLYPNKEQEEKLTKTFDLCRFTYNKLLEQLNKEEKINRSEIQHSIIGLKEKYPELNNVYSKTLQYECYRLFSNLKSLSKLKKKGNKVGRLRFKGKKWFKTIQFNQSGYRLIKTNKRKNRLHLSKIGEIKIMCHRKTKGNIKQITIKRTTDKWHAITITDEKYKIKKGKKQIGIDLGIMNFLTDSENNKIDNPLFMNKSLDKLKYHQRNLSNKKKGSRNRIKTRNLLAKTYEKINNQKHDFFHKTTTKLISSSSLIAIEKLNIRQMMQTSYNARNMFDSSWNKFTSMLKLKAGSAGVSIIEVDPRNTTKECSSCGNKQDMPLYKRTYICNCGNNMDRDHNSAVNILNKALGLGRAFVEKSAPAHHEQAGSMKQEAISSTFG

SEQ ID NO: 22987 - protein, 474 aa, Fusobacterium sp.
  misc_feature (352)..(424): Xaa can be any naturally occurring amino acid
MYLTLKQQVKHLSKKEFKNLKYLCHIAKNLKNQAIYNVRQHYFNNKKYLSYNENYKMLKNSENYKKLNSNMAQQILKEVDESFKSFFALLKLAKKGQYNGEIKLPNYLDKDGFTTLVIGFVRLKDDMLIVPYSNSFKKTHQEVKVKLPSVLKNKKIKEIRIIPKQHSRYFEIQYIYKVEEIQRELNKENVLGIDLGIDNLCTCVTNTGASFIIDGRKLKSINQYYNKINAKLQSIKDKQKIERTTLRQKRITRKRNNRINDYLSKAARTIVNYCLNNDIGKLVLGYNEDFQRKSNIGSINNQNFVNIPYGKLRDKLIYLCKLYGIEFKLQEESYTSKASFFDGDEIPIYDKXXXXXXXXXXXXXXXXXXXXXXXXXXXXXXXXXXXXXXXXXXXXXXXXXXXXXXXXXXXXXXXXXXXXXXXXXKRGLYQTSTGKLINADCNGALNILRKSKVVDLSVLYNRGELNTPKRIRVV

SEQ ID NO: 22988 - protein, 656 aa, Fusobacterium sp.
  misc_feature (337)..(652): Xaa can be any naturally occurring amino acid
MANYVLTLALETELWQEHILEKRLNIARMIYNACLYEILKRHKKMINSSEYKEISNLDKKEQSKRYKELDKKYSISKFELNKYVKPMTQKFKKNIGSQMGQELAERAFATYEKFKYGKAKKVYFKSYGNFYSVREKGNITGLRFFKEDCCISWLGLKIPVIIKNNDKYAQSCFLDKLLYCRLLKKVVNGKNKYYVQITFEGTPPKKHKVGGENEVGIDIGTSTIAIVSDNKVELKILAKNIEINEKEKIRLQRKLDRQRRANNPNKYNKDGTINIENKEKWKKSKSYVKTKLKLSNLQRKIAEKRKQSHNILANSILEIGTIVKVENMNFKALQRRXXXXXXXXXXXXXXXXXXXXXXXXXXXXXXXXXXXXXXXXXXXXXXXXXXXXXXXXXXXXXXXXXXXXXXXXXXXXXXXXXXXXXXXXXXXXXXXXXXXXXXXXXXXXXXXXXXXXXXXXXXXXXXXXXXXXXXXXXXXXXXXXXXXXXXXXXXXXXXXXXXXXXXXXXXXXXXXXXXXXXXXXXXXXXXXXXXXXXXXXXXXXXXXXXXXXXXXXXXXXXXXXXXXXXXXXXXXXXXXXXXXXXXXXXXXXXXXXXXXXXXXXXXXXXXXXXXXXXXXXXXXXXXXXXXXXXXXXXXXXXXXXXXXXXXXXXXXXPLKS

SEQ ID NO: 22989 - protein, 352 aa, Fusobacterium sp.
  misc_feature (352)..(352): Xaa can be any naturally occurring amino acid
MYLTLKQQVKHLSKKEFKNLKYLCHIAKNLKNQAIYNVRQHYFNNKKYLSYNENYKMLKNSENYKKLNSNMAQQILKEVDESFKSFFALLKLAKKGQYNGEIKLPNYLDKDGFTTLVIGFVRLKDDMLIVPYSNSFKKTHQEVKVKLPSVLKNKKIKEIRIIPKQHSRYFEIQYIYKVEEIQRELNKENVLGIDLGIDNLCTCVTNTGASFIIDGRKLKSINQYYNKINAKLQSIKDKQKIERTTLRQKRITRKRNNRINDYLSKAARTIVNYCLNNDIGKLVLGYNEDFQRKSNIGSINNQNFVNIPYGKLRDKLIYLCKLYGIEFKLQEESYTSKASFFDGDEIPIYDKX

SEQ ID NO: 22990 - protein, 427 aa, Caldicellulosiruptor sp.
MKLTLSCKFKLWLSQEQKRKLIETAKTYTSAINFVLAENLKDKTTNVKKLHKLYYKTIRKKFSLPSQLAINVYRQVADIYQTLWAQYNNLLYREQNSNNNSGTAEEFWSKPPKRKTLTVNYTHGRTFSIKYDKNTDTFFVSISSIHGRIKNVRITGWKQHYNYLKHGEIGDPVLVYDKPSKEFYLHIPVTLEIDEKLHKEIAGIDVGERNIVTVVSTAGARYTIPLPDQVRRTKRHYHELRSQLMSKGTRSARRKLQKIGMSEKRFVSNFLHKLTKDLVRKHPAALFVMEDLSMIRTNRITYRGNDSEARRQAEQWPFAELQNKLEYKSILYNGICSVKVDPSYTSLSCPVCGHVSKDNRPGHGELFKCQRCGYEENADIVGATNIAIRYLVEVQQMNLRGLLVNQPNVPCLQKQVEQAPTSIGRSS

SEQ ID NO: 22991 - protein, 409 aa, unknown
  TnpB Polypeptide
MSRYRLLPTPAQEAVLRDHCGHARFTWNLAVEQHAHWRPGRAGAPGYLEQCRQLTAARAENPWLAAGSQTVQQQALRDFAQALTAFFDPGNPARRPTWRKAGRDEGFRIVGKRGRQWDMRRLSRNTGEVWVPKAGWVRFRWSRPVPPGVKSYRVTMDRAGRWHVAFAAIPEPVPAPGNGQAVGIDRGVAVSAALSTGDLLHVLRLTSRERQRIRRLERKLARAERGSNRRAQVKHAIARLRARQSDRRKDWAEKASTGIARRFDVIRVEDLQIGTMTRSARGTQDNPGRNVAAKAGLNREILASGWGLLVRRLQDKAPGRVEKVSPQYTSQRCSACGHVDGRSRESQARFACTACGFACHADVNAARNIAAGHAVTARGGVRAAGPANREPQLLASLTGRERLKSPPSG

SEQ ID NO: 22992 - protein, 373 aa, Paenibacillus sp.
MNNITKNEVSHMLIHQAYKYRIYPTPEQQQLIRRMFGCCRFVFNTFLDTWNQSYAETGKGLSYHACATKLPVLKAQYDWLKEVDSIALQSVARHVADSFDRFFKKQNQAPRFKSRKHPVQSYTTKFTNGNIAIDGSRLKLPKLGWMRFANSRKLEGRILTAAVRQNASGKFFVSLGCEVEKNPLPQVDAHTGIDLGLKEYAVSSNGERYANPRFYRQYEKKLALWQRRMARRTSGGSNWKKAKQHVARIHERIANKRNDFLHQLTTKLIRENQTISIEHLRVANMIQNPKLSKSIADASWGEWVRQLTYKALWYGRTLRIADTFEPTSQRCHVCGTIHSEVKNLAVREWTCNACGTLHDRDENAAHNIAQVAV

SEQ ID NO: 22993 - protein, 245 aa, unknown
  TnpB Polypeptide
MYLTIKQQLKLPKEEFDQLKYLCHIAKNLYNEALYLHRHYYIDNGMFLSYTDSYHILKNSPNYKILNSDISQQLLMDVEDIFKGYDKLLTVKYKGNKWVKKVTLPRYLPKDGYYRLCVGLIRLQPDYFMIPYSLSFIKKYPRIFIKTPPILKNKVIKEIRIVPKYNATKFEIHYIYEADYKNLQLNKSNALAIDFGVNNLCTCITNTGKSFIIDGKRLKSINQGYYKEFARLQQISNKQKKHKYD

SEQ ID NO: 22994 - protein, 333 aa, Acidimicrobiaceae sp.
VDAARALENFASSRNGKRDGPTVGFPHFQSKGKVTPTFRLRNRLSPAHSSSSQSIRFCDPSHLRLPKLGPVKICGPTRKVRRMMEAGRFHVYSATLKQRAGRWTVSLNGVASEFHQAVRSRSTRHLVPVGVDRGIASLCVTADANGASLETFEGVKILRESQRKLKAACRALARTTPGSHGRQQARIRLAKIHRKIANKRSHLVHQVSNSLVTQYQILVIEDLNVSGMMKNRRLSLAVSDAAMGELSRQITYKAKWHGVEVRVVDRYFPSSKTCSGCGVVKSELNLSIRSYCCLTCGLTIDRDLNAAINLARWKEVADVPTVKNFACFSSFET

SEQ ID NO: 22995 - protein, 362 aa, Bacillus sp.
MLKSYKYRIYPTKEQRLFFAKTFGCVRFIYNKMLTDRIHSYQESQKTMNKSIKYPTPAQYKSEFLFLKEVDSLALANAQINLNKAYAHFFRDKSVGFPKFKSKKNNYRSYTTNNQKGTVSIKNGYIKLPKLKTLIHIKQHRQFSGLIKSVTISQTPTNKYFASVLVKEKDHFLPKIDTKVGIDVGLKDFAILSNGTKYENPKWLRKAEKRLTFLQRSLSRKEKGSSNRNKIRLQLAKLHEKIVNQRNDFLHKISNEITNENQVIVIEDLKVKNMQKNHKLAKAISEVSWAKFRKYLDYKARWKGRDLIIAPKNYASSQLCSCCGYRNKKVKNLTLRKWTCPACHTHHDRDINASLNLLKLSM

SEQ ID NO: 22996 - protein, 324 aa, Symploca sp.
LEAKRVNFRLYPTKSQAKKLHYWHRMHKDLYNAALYNRKTQYRRFNHSVDYLEQQNCLPAFKQVHPEYKELGSHALQATLKRVDFAFNRFFKGLAKYPKFKSGRLYRGWTYPCSSGWKTHTTGDHGFLELSNLGEIRMRGRARTWGRPTTCTIVWKNHKWYASITVNCDPVRETSTGAIGLDFGCKTAVAMSNGTKVENPRFLAKTSEKVKQASKRLRRKRTPNRKKNILASKRWKQTQKQVSKLSSKVANQRDDWQHKVAAQIVSGNSLVATEELNLKGMTRKAKKGSKRKRQKAGLNRSLLDVGIGAFKQKVKYKVEEAGGV

SEQ ID NO: 22997 - protein, 491 aa, unknown
  TnpB Polypeptide
MSRCTCSASPFISTSCASKSAQTLSNMTLSRWIASPLNTFLRYFVTKTKWTCNANTQCLPCRISFYSSIDQEYNGVVLRLQAFKFELMPNGEQTRNLRQFAGSCRFVYNKALALNTERYKKKEKRLGYAKLCALLPNWKMEHEFLPDVPSQALQQSLKNLEQAYIRFFSDVKKGYRIAPDDRKLRQVLRSQGIPLAYPPTFKKKGQRESFRIPQGFEVDNQNGRVKVPKVGWMRYRKSQNVLGETKNITISESCGKWYVSIQTEREVETPQHPSTSAVGMDWGVVNFVTLSNGEVVDQCQPLKEFLPKLAKSQRRLAKKKKFSKNWRKAKARITKLHSRIANIRKDFVHKVSNDISKSHVVVCIEDLQVKNMSKRATKRVAQKSGLNRSVLDASPFELRRQLEYKTQWQGGLLVPVPPQNTSRKCPDCGHTSAENRKSQEKFDCVSCGFSANADWVGAVNIREAGLASLACSSASGDVSPSCQEPTEGIPA

SEQ ID NO: 22998 - protein, 369 aa, Psychrobacter sp.
MKTLKLRLKDKHSKPLNTISRAVNFVWNYVNELSFKHLQRTGKFFSAYDLAEYTKGSGEFLGLHSQTIQAISEIHAKSRKQFKKAKLKWRTNNPKSCRKSLGWIPFKKSAIKYIGTRQSGKKALKSTIQLSLANHQKLMIELFDSYNLSLYQINTLELVQDARGRWYACITVKNHPKKHTEHGTGQVGIDLGLKEAATTSSGDKLTVKQTQKWAAKLAVAQRANNKQRARAIHVKIKNTRQDLIHKFTTQLVKDNALIVVGDIKSKSFTSSSTNLAKSTYDAGWFELKRQLDYKCKHAGCRFDIVNESYTTQTCSSCRQIGDSSPKGRQDLGIREWTCEYGVTHDRDINAAKNILAVGLDRLAVGIPSL

SEQ ID NO: 22999 - protein, 654 aa, unknown
  TnpB Polypeptide
MEKAKEKPPEFFKSIKTSLKSILKHPEINTPKINDVVIKAHKIVIHTLQFLKLYMLHNYETNNHILPGIDKVLILNVMKVVCGEKHTNKGRISKKETLELVEKLKSFYTDHYKPYTQPEQLDYEYMSNVLSYLCEDIMTMYENNIQLHYVDYVERFVNVVWRKNMLIEKIRKIFPSKKERDARIRHLEKELRQIKNDLLNVDNSIAYTSKSYYHGWIIQQKMHILPIKDKFQKQSIYYDLKCKPMDYFPCMIAIMKQVENDEETISNAFPLRSSISPGYIRLDTITLVNMLLRKEQGNKCDYSNQGNTKKYEDKIWTFFFRTEKKVFRKNDFSFHHMISTDGVGVSILFIRDDLVGKRLPSARKCVSKELYIDELNDYSTLQDKKIVGVDPGKEDLIYCVDDASKDANVFRYSQNQRRKETKMKKYNNIILAMKTNKIKGKSVIEYETELSNYNRKTLQIDKFKTYINEKNRINNMLFGFYAKHLFRKLKFGRYINIKRNEQKMMSDFKKIYGNPENVVICIGDWEQRQQMKYKEPTLGIGMRSLLRKNKYNVFLVDEFRTSCKCSNCNGGVCEKFMVRENPRPNKDDMRLVHGLLRCKSGCGSWNRDRNGSSNIYKIAYQAIHNLERPTYLCRENKSNQVVLTNCYKQNIHKV

SEQ ID NO: 23000 - protein, 421 aa, unknown
  TnpB Polypeptide
MSAPAITRATVLRLYPNQQQASSLRRWQGGLRYVWNAALDCMFTSRDINGRWPTKAEIQTLIVGMKKMEGTEWISDIPAHALLTLADDLHKALLNWFNSLSGKRKGPKIARPRFRGKFARQFSVYMVNQNTSFGEGQVKLPKLGLVKYRGGDLPSGRLLSSRVYREADKWYMASIFECTAPEVNAAPVECVGIDMGLKTLATIYDGHSIREVPKLGALRKHEQRLKRYQRRMSRRVKGSNRRNRAKLAIARLHQRIANIRKDYAHKATSEIVASAQTIKVETLNVKGWAKNRSISKSTADASVGMFLKMLRYKAAWAGRSLVEVGQWEPTSKTCSDCGAREPGVVLGVSRWVCSACGAIHDRDHNAAKNIYAYGEERRNVTGNTVESAWTGGDQARAIPPVPQVETRILKRATRESNRALA

SEQ ID NO: 23001 - protein, 403 aa, unknown
  TnpB Polypeptide
MYQSIKARIYPTDEQTEKLSQFFGCARWWWNQALNQTTTTYKETGKGLSREGLNALLPYLKKEFPWLGECHSQVLQSVTLNLSKAFINFFEKRAQYPNFKSKHGKQSIQYPQGTKFVDDLIYLPKLGWIKINLHRQIQGQVKTVTISKNPSGQYFAAILTEQEGEYPAPSSEGTAIGIDLGITDFCITSTGSKYPNPRHIKKHERNLKRKQRKLSRKAKGSNTRNKSRKLVARVHQRISNSRQDFLHKLSHKLVNENQVIIVEDIAVKNMVKNHCLAKAISDCGWSSFVGMLNYKCERSGKILVKVDRFFPSSKTCSNCYQRVSSLPLDVRQWTCSNCGTNHDRDVNAALNIKAEGLRILSLGTSETAKGGEVRPSRGRKTSVRRSPVNLEAPTIPLYAVGGG

SEQ ID NO: 23002 - protein, 340 aa, unknown
  TnpB Polypeptide
MLLTYKVKHNRDLSVELVKARKIAEYAIEHRSRSSADVRHIGLKSAIANQILRKYSRNMALKSVRSVVLTVPAQSIRLIPETRTIYIACLKLDLDIRYLPQFEKVNQIELDHEFAFVTVTINEPPLQEVEHWIGIDLNSTGHIAVIGNPTTGKIQKFGKEAPHIHRKYSKMRRHLYIEGHSRIAKKKIQRKENRKTKDLNHKISRAIVNEAAQQACGIKMEKLSDIRQTARQSRSSRAPLHSWSFYQLQTMIEYKAKLLGVPVAYVAPQYTSQQCSRCGLLGTRNGKDFMCPHCGHVDHADANASFNIALRPSFEESDGRLHQDRDWCKGRIDTPQEAPS

SEQ ID NO: 23003 - protein, 507 aa, Nocardia sp.
MAFQIPEGWTAQAYRFALDPTATQERAIRSHCGAARFAYNHMLALVKAVIDQRSAERSYGVPDDEMTPALGWSLAALRRTWNRRKDTAAPWWSVNSKEAYNSGLNGLARGLDAWSASRKGARAGAAVGFPRFKSKHRVADSVRFTTGAIRVDHDRHHVTLPVLGTIHTHESTRKLARRIEAGTARILAATVKYDGRRWYCAFAVIVKAKRIMYRACRPPHPVVGVDVGVKDLLVVAAPDGTEIERIPAPKPLAAAHRKLRTLQRRAARQRGRWDPATGTRQDPSKRWLRTQTRIARIHARVANIRRHELHTVTTELVRNHNVIVVEDLNVAGMSRRGGAYKRGLNRAIGDGALGRIRTLLGYKTAWNNARLVTADRWFPSTQTCSRCQAKTKLALRDRTYYCRNGCPPIDRDTNAAINLARLGEPLSNGGVSRTGTGSSPAASDPAGDGCGAIHKTFPTDSAGKAGGIEASTPHSLQSVGVWGLPIRKERLPEMNRHTELTQVTGRA

SEQ ID NO: 23004 - protein, 206 aa, Nocardia sp.
MCAGGVQRWLACSTACLRRRAAIHQRLDVAVAGDHGREEDSRTCRLAEVLSVVLVQALGDLHAAYRNFFASTSGKRKGAKTLPPRFRSRKDGRQSIRFTRNGFRMRPNRRLYVAKVGELDVRWSRELPSDPSSVTITKDPSGRYFASFVVEVDQAVLPAATSEVGIDLGLATFAVLSDGKTIVSPRLLRRAERRLMKAQKAMSRKD

SEQ ID NO: 23005 - protein, 407 aa, unknown
  TnpB Polypeptide
MKAIRTEQINLPQSDNLSHLCHLSKNLFNEGNYIVRQELTQNGRWTRFNVLNEQLNKGISENYTLLPSQTANRILYTLDKSWKAFFKAIKDYAKNTGKYLGRPSLPQYKPKNGEHILIFTNQQVKIKDGYLLFPKMTGINPIKTRLGDDKKLKEVRIIPKGMRYICEIVYEKEVEPLDLNPDNVAGIDLGVRNIVTMANNIGEHPIVIKGGFVNSMNQYYNKKRAGIQSIYDLQGIKHGTKMNVLTDKRNRKMKDTMHKISRFVINYCIERNIGTLVIGHNDNWKQEAGLGRRNNQNFVSIPYYTLVNDLNYKGEEVGVRVIEQEEAHTSKCSFLDSESIEHHEEYAGKRIKRGIFQSAKGIRINADVQGALNIIKKAIPKAFSKENVDEIEGVGLHPLRCTIGGIA

SEQ ID NO: 23006 - protein, 404 aa, Cyanobacteria sp.
MLTLTYRYRIYPDLQQELQMLHWLETCRKVYNYALRERKDWINSRKCSVNACSLQSEYIIPADTPYPDYYRQKKALTEAKKTNPGLKAVHSQVLQDVIGRVDAAFAAMKQRGYGFPRFKKFGQFKSFLFPQIDNDAMTGNQIKLPKLGKIAINLHRPIPDGFRVKTARMIRKASGWYVALVIQADVFVPEPMPQGHALGIDVGLEYFLSTSDGEQVKRPRFFNQLHRKLKLLQRRLKTKQKGSSNRRKLMQKIGRVYEEIANCRGDFHFKLAHHLCDHAGMIFVEDIDFRIMAKGMLGKHTLDAGLGQFVNEVLPWVCWKRDVFYGKVDPNGTSQECPDCGAVVKKDLSVRVHHCGECKSIKPRDVASGQVIRNRGLSAAVGYAAKENVCGDGLAGGKALAKCL

SEQ ID NO: 23007 - protein, 380 aa, unknown
  TnpB Polypeptide
MRTYKYQIREHPQNMRLGNLLDELADVHNHFLALEKRYYRIYGKYAGRYRLQPHLTKLLNRTKRHWAWIPRDTLDAVIIRLHLAWEKFFDFLKKGKRGRRVGPPKFKKRSKYRSAKFPYAYKLQEGRVRISFRVWNPLSEKFNKYNKRYFLFHQHREWHGDVGYIQIGRDAAGTYWLYVVTDNTSKKVLSATGESVGIDFGMETYLTLSTGEKIQHPQPLKSNLNELRKLNKAVRRKVKGSNNWWRAIRQLARLYVKITNQRRDWHYKRATDLCRRFDHIVTETLNLEGMKRLWGRKVSDLAFYQFVEILKFQCIKHNREFFQVGQWTPTTKPCSDCGFHNESLSLSDRQWTCPDCGSHHDRDVNAAINILRGCLDPLVE

SEQ ID NO: 23008 - protein, 376 aa, Bacillus sp.
  misc_feature (283)..(368): Xaa can be any naturally occurring amino acid
MEVNQMIINRAFKFRIYPNQAQAILINKTIGCSRFVFNHFLSLWNHAYKETGKGLTYNTCSAKLPAMKKEFVWLKEVDSIAIQSSVRNLADAYTRFFKKQNSAPRFKSKKNNVQSYITKQTNENIAIVGNKIKLPKLGLVRFAKSREITGRIVNATVRRNPSDRYFVSLLVETEVQELPKTSSYIGMDVGLKEFAILSDGTTYKNPKFFRLLEEKLAKAQRVLSRRTKGSSRWNKQRVKVARIHEYISNARKDYLDKISTEIIKNHDVIGIEGLQVSNMLKNXXXXXXXXXXXXXXXXXXXXXXXXXXXXXXXXXXXXXXXXXXXXXXXXXXXXXXXXXXXXXXXXXXXXXXXXXXXXXXXXXXXXXXGILTQVSI

SEQ ID NO: 23009 - protein, 296 aa, unknown
  TnpB Polypeptide
VKKYKSFTLKQAGYKFLGGNRIKIGNRVFQYWNSREIEGAVKTVTIKRTPLGEMFLMVVVDSVNEPQIKVETGKTAGFDFGLKTFLTCSEGFSIESPLFLKQSLNAIKQASRQHSRKLKGSNNREQARLNLVRKHEDVANRRRDWFWKLAHQLTNQFDVLFFETLNLKGMQRLWGRKISDLAFREFMKILEWMAKKKGKLVAYIDRWFPSSKTCNHCGHVLESLELSVREWRCPSCQAVNGRDDNAAKNIKMVGISTIGLGDVRQALPAIPARVLNPTGFSRGGGSTVAEVFAALQ

SEQ ID NO: 23010 - protein, 402 aa, unknown
  TnpB Polypeptide
MKHAVKVRIYPTDEQKEALSKAFGCARWFWNNSLSETNQLYKETGKGLSQQGMNDRLPALKKEFEWLAEPYSQVLQSVSLNLSRAFINFFEGRASFPNFKSKQGKQTIQYPQNVKIADIGLKLPKLGVIKAKIHRVFDGKLKTVTVSLTPSGKYFASLLFDDGLLEVEKTIDGKAVGIDLGLTHFAITSDGSKFDNPRVLKKHSRNLKRKQQKLSRKVKGSNRRKKARRIVARVHEKIANVRKDFLHKLSRKMVNENQAICVENLAVKNMVKNHNLAKAISDASWSEFTRMLSYKAGQDGKIYQEVDRFFPSSKTCSVCLNRIGSLALEVRSWQCQNCGTKHDRDVNAAINIRDEGMRILALGTSASANGGKVSPKVGRRKSSVSKALPVEIGSPTFSARSA

SEQ ID NO: 23011 - protein, 457 aa, unknown
  TnpB Polypeptide
MKKKKVSVLTEDWKVYHALQSFPVMLPSAPEDIHLVVFPTVAKGKRKRNSSRKDDSVEYSYLAYRFLGLPDEVQAHELSCIMGSCRFLWNRMLADRRDLYRELGVTVKNTPADYKDIPELYWLKDCDSLALCNVQLNLESAYSDGLSGKAGMPRFKKKGVAVDSYKTNVVGNNIRLEDGKLRLPKITGYIRLKQHRKVRPGGILKNVTVIHEPDGKWYFSMVYAYEKQDVPLSIPEEDSIKAVGLDMSLPELYLDSNGDTPFYTLNGNKICFSKAYRKLEKKIGREQRRLSHMEKGSSNYRKQCRKVAKLHAKAKHQRNDFLHQMAVRLVREYDVIGIEDIDLAGMKKALRFGKSLSDNGWGNFIRILEEKCTRHGTLLIRVDRWYPSSKTCSSCGHVLTDLELSDRTYVCPVCWNILDRDVNAAINIREEALRILSEYVQHEKTEKLPDSYHYQTA

SEQ ID NO: 23012 - protein, 460 aa, unknown
  TnpB Polypeptide
VFACGSREVSECSNIPTLQGAALPKVNGLFELPTAYRVSYIKGNKVSQSIQTSAGNHRLQAEECGQYHNVDRFDLLRGALCNTIEHMDVQRTLTIRIADDPDLRATLAEFQGIQQRISHTCHNDGKPLSALALHRAVYEDVKGTISSQMTCTAIRIVAGAQANKKPAQRPFEFKRPVAPFLVGTRGRDACFCDDGTLPIWTVAGRKRIAYTVTDTFKATLAEAVEIDNMTMIERDGRLLSRVVVTLRVPDPQGVHPVGIVLTETNALVAVDPDGNPLFVSGRDSKVRNIRTRRTRRRLQEQLATRKAQRQDTRSLRCPLKRPGRKQRNRTRTFCQQTAARLVTWAPADSVLVFKRLTLPQTSRKLHVRKGIRRRLSQWQRRLMRQSVTNTAERHGLLVEDVNPAYTSQDCSRYGLRSIRKRHAFRCPHWGHEAHADMHAAVNIRLRSTALRLSGPLSTGP

SEQ ID NO: 23013 - protein, 402 aa, Escherichia sp.
  misc_feature (59)..(152): Xaa can be any naturally occurring amino acid
VKRLQAFKFQLRPGGQQECEMRRFAGACRFVFNRALARQNENHEAGNKYIPYGKMASWXXXXXXXXXXXXXXXXXXXXXXXXXXXXXXXXXXXXXXXXXXXXXXXXXXXXXXXXXXXXXXXXXXXXXXXXXXXXXXXXXXXXXXXXXXXXXXSQSCGKWYISIQTESEVSTPAHPSASMVGLDAGVAKLATLSDGTVFEPVNSFQKNQKTLARLQRQLSRKVKFSNNWQKQKRKIQRLHSCIANIRRDYLHKVTTAVSKNHAMIVIEDLKVSNMSKSAAGTVSQPGRNVRAKSGLNRSILDQGWYEMHRQLEYKQLWRGGQVLAVPPAYTSQRCAYCGHTAKENRLSQSKFRCQVCGYTANADVNGARNILAAGHAVLACGEMVQSGRPLKQEPTEMIQATA

SEQ ID NO: 23014 - protein, 230 aa, Frankia sp.
LRHQSRAYARSKPGSTGRHTHAATLARIHAHVAHQRRDGLHTLTTRLATNHDVVVVEDLHTAGMVRNRRLARAVADTGMGEIRRQLAYKTLWYGSRLVVADRWYPSSKTCSGCGWQNPHLRLSDRTFTCQSCALVMDRDTNAAVNLKNLVAASTSETENARGADRRTHPGGQVATKREPGTRISGPGRGCPAERRGGMTRYLASPCNGSSRSLTAAAAYSRAARTSARSR

SEQ ID NO: 23015 - protein, 217 aa, Proteobacteria sp.
VRDAAEPVGHLDLGIDLGLKSQIACSDDIIYSRENLTRTHATALAMAQRAHKKRRVKALQATMANIRKDWTHKATTAITRRGKLRVIGNVSSATLVKTPFATSTYDAAWGIVRRQLPYKARRLAGVCVDGNERCSSVTCSACGARSGPRGLSALGVRTWGGPCCGVMHERDVNAARNILAFRSGRATPSKGIPVLEGGEDVKRTSYALHHLPVAFYP

SEQ ID NO: 23016 - protein, 451 aa, unknown
  TnpB Polypeptide
VETNRLNPLKTVAIYPRMDIGPRFRLFPDGEQRESLNWVRDTMRQLRNHALYRLDNIPDDAGTVRQRVMMVRDELPDLKHWWTALDNVYSTVSQHTVEQIHHDITNLGKQKAKGFNVGELNWKKPREFKSFTYRQRGFELDKKSGPRDRGLLTLKKVRGETLDIPIKLHQDINPDDIKHVTVKREASGAWYAAFTIEQETPEKPEPDEIAADGTVGLDLGILNFVFDSDGRAINWLDFSTDRERLEREQRALSRKRYESRNWEKQRETVAQVHLDMRNKKRDYYHKLAHFYTTNYDAVFVEDFNIRDLFEGPANARNKQEVAWGDFKDILDYHGEKNACHVVEVPAYNTTKECHACGVEVEKPLWAREHSCPSCGFETDRDYNAALNVKRRGLQRLGLGQSEAASVETGPAVETDDTRFVEVSARSVVEAEIPHGENPGSPTLNEPAVAGK

SEQ ID NO: 23017 - protein, 426 aa, unknown
  TnpB Polypeptide
MEKVLTQRAKARKETKKRRSSMKINVVDFKVDESKLSFTKSNLIDSMFQQAKYLSNAMVASGDFFFFNTKVQEVPVSWEDTDGTKHTEIRSIEDLPAQCKQDIRVGFISNLKTLATLKERGYKVGKIDFRKEVKMLSFNQYHASWRFAEGVDLQKHSKNCIKLAGIGFIYCTGFDNKSIQDIREWGPAKLVRKPDGLHILCTGYETKRVKTAPKGSSVGIDMGLKDAIVLSTGEKINFKYNEDKKGLRKAHQRLSAKKLGSKNYIKQKKKRQKRFMKFKNRKADVTNKFVSGLQRKYETICIQDESLSQWQQKDHGKKIQQGVLGRIKSRLSQSNTTRVVNKWCPTTKLCPKCGCVNATNDVRDRTYVCDSCGFTDDRDVKSAKIIRILGLQKDFLKSLPAERREYTPVESLTSVTAFFETLYASQ

SEQ ID NO: 23018 - protein, 402 aa, unknown
  TnpB Polypeptide
MDEETTDVEMMTMCETHLISKSSPFYEEMDDLCFRSKNLYNASLYATRQKFFNSKEFQNYYENDKIFNSDEQKDYKALPAKVAQQVLKQVDLGFKSFFKASKSPKMKGKHIKIPHYKDKLNGRNMVVYTKQAISKKSLNDGIIHPSQTNIFIKTKQKNIVEFRIVPHSNGYQAIVIYKVPCKPKVESDSFAGIDPGVNNLVTVGFNNAKGFRVNGRPLKAINQHYNKRVAHYKSKLKGGKKTSKRIKAITNKRNNRVKDYLHKASKAVVNQLVSNNVSVVAIGHNKEWKQDTNMSKVNNQNFVQIPHSKLFQMISYKARLQGITVVEHEESYTSKCSFMDNETIGKHEVYLGKRIKRGLFRTAQGRLINADLNGALNILKKVIGEFQYSIQVCSTPLDLSIK

SEQ ID NO: 23019 - protein, 446 aa, unknown
  TnpB Polypeptide
MIRTSSHSLQFTNTGKMNEIHALREECIRVMGIYLDYIWSNRYEWDSKDGLTHYVMDIEKELYDHPQRMSTVWLEKQIGGVTTPLSARVRKCISNQLMGIIGASLEKQKKRKWVIDELIKAGQKPSKALSKKYKDNKPVKPNLLNANIELNSICIKIELPEHAEGFDKWVTLKCLGMFGKINIPIKMHRRALKFENNGYKLRTSILLGRKSIDLRWEKEEPLCRTEGITVGADQGKKDVMTFSNGHVTPKADSHNHTLDSILAKMTKRKKGTKAFKRASDHRENFINWSINMMNWDGIQRINLEKIYNINFRRNTSRVLRHWTNTLVRDKVLSRGQELGVQVTEQSSTYRSQRCSVCGTVKKSHRKGKAYSCSICGLRIDADLNAALNHEQELPDVPYELRRMNLNRKGFQWKPDGFFDLSGTSLQSVLVHESATHEQNVINDNIC

SEQ ID NO: 23020 - protein, 447 aa, unknown
  TnpB Polypeptide
MRQGAVRVRLDVNDAQAGMFLRAAGARRKAHNWAIDEIKVNTRQWAAEASYDIPKGERTRPLSYFTLAKRWTAAKPEVAPWFDAHSTWTFRYGIQAAAQAHAAFLKGQRRFPRIKSRKTDRHRFTVADGLRLEAGRVRLAKYGWVRVAAPCRAQADLRRLLRRGRARLLNITVSRHADGHWYATLCFEREIRVPAEQRTSPVGPTVGVDRGVKTSAVVATADRQVVAELAGIRALREARRRVAHLQRAVSRTQRGSSNRKRAVARLGRAHARVAAVRGNALHTFTARLARAHAVIVIEDLATANLLKNHHLAAAIADQGWGELARQLTYKSARHGGTVIVADRWFASSKTCSGCGWVRPKLSLSERTYVCSNLSCGLRADRDVNAAANLAAWGEAQLAGLSQVGDRHPDGPSEQSAVHACGGSNEPAATLAGASGEAGTSRPRIRVA

SEQ ID NO: 23021 - protein, 374 aa, unknown
  TnpB Polypeptide
LKTYRFRIYPSKRQETQMKEHLWIEKNLWNTLLEANQKRYDAEKKFLTKNEMQKVVKNTGLYSQVAQTLSHRLQNALWRMVKMRKQGKECGYPRFKDIDRMKSLNYPQAGFKLDRKLNVTPFGEISIKKHREIEGKIKTLTLKRESSSKWFATFCVEQKRKEPRINSGEKVGIDLGLMNFAVLSDGVVIKNPRHLRQHEETLAKLQRRLSKKKKGSKNRKRVKLKVARLHEKVSNTRADFLHKTSTRFVNDYSLIALEKLASSKMSEQNFGRQINDAGWNMFANMLSYKAEEAGCRVIFVDPKNTTQECSNCHEIVKKELSDRIHDCPFCGLVMDRDLNAAKNILIRATQGHCGSNACGDGVIAPSLKQEAHIV

SEQ ID NO: 23022 - protein, 402 aa, Escherichia sp.
VERLQAFKFQLRPGGQQEREMRRFAGACRFVFNRALARQNENHEAGNKYIPYGKMASWLVEWKNATETQWLKDSPSQPLQQSLKDLERAYKNFFQNRAAFPRFKKRGQNDAFRYPQGVKLDQENSRIFLPKIGWMRYRNSRQVTGVVKNVTVSQSCGKWYISIQTESEVSTPVHPSASMVGLDAGVAKLATLSDGTVFEPVNSFQKNQKTLARLQRQLSRRVKFSNNWQKQKRKIQRLHSRIANIRRDYLHKVTTTVSKNHAMIVIEDLKVSNMSKSAAGTVSQPGRNVRAKSGLNRSILDQGWYEMRRQLEYKQLWRGGQVLAVPPAYTSQRCACCGHTAKENRLSQSKFRCQVCGYTANADVNGARNILAAGHAVLACGEMVQSGRSLKQEPTEMIQATA

SEQ ID NO: 23023 - protein, 175 aa, unknown
  TnpB Polypeptide
MHKISTDIIRYCVDHRVGILVIGVNKLWKQNTNMGKKNNQKFVSIPHYRLRQMIEYKALRAGIDVVEQEESYTSKADVTASDFMPVYGKVKARPVFSGRRIERGMYLCRDGYCINADCNGAANILRKAVPDAWKGFKDFHFLATPASRGFHQLNPAGRNNSHKQHPDWKILSPAV

SEQ ID NO: 23024 - protein, 247 aa, unknown
  TnpB Polypeptide
VKIIKIKLKPTKSQAMELSRLSREYIHQDNLLVQKAVADSKFPKPISSKHIDSNIPSVVKNELIRYAKTKFKQFGNCTFKKPTVSWNNQNYTVEEKAIAFPMIVDGKVKKTKFKALIPSELFEKLSSLKLGALRVSKKGFHWIAQIAIENNPVECSGVETLGVDLGILCPTVGVVASTGKTKFFGNGRQNKYLRRKYKELRRTLGKSKKLNAIKKINDRESRIMRDINHKVSRSIVNFAVEKQLWNY

SEQ ID NO: 23025 - protein, 127 aa, Clostridium sp.
MKYPTPAQYKKEFEWLKEVDSLVLANEQLNLEKAYKNFFRDKSVGFPKFKSKKTNRFSYTTNNQKGTVFIENGYIKIPKLKSMIKIKQHRNFDGLIKNCTISKTPSNRYYISILVDIEIKLVGMVEI

SEQ ID NO: 23026 - protein, 377 aa, Synergistaceae sp.
MITYNFKLYSAKKNKHLNKKINLAGAIYNHLIALHRRYYRMFNKGISVTRIQLHITKLKKTKRYAFWNNLGSQAIQDIAQRIDRAYKLFFNNIKRGVRTSPPSFKKLRRYHSFTLKQAGYKILEGNGIVIMGRKYKYFKSREINGKVKVLTIKRDMLGDLWIYIVTEEEVQPKEARSGKSVGLDFGLKTFLTTSDGEKIESPMFMREASVKIKRQSRRLSKKKRGSKNRKKARLNLARTHRKIANQRKDFHFKLALDLTRRYVSIFVEDLNMKAMQRLWGRKISDLGHAQFLNTLNWQMYKNGCQGTKINRFYPSSKTCSACSHILAELPLSVRAWTCPECGAIHDRDINAAINIQRVGASTLKGEDVRPDSSGCLC

SEQ ID NO: 23027 - protein, 379 aa, Psychromonas sp.
VARKAYKFRFYPTPEQALLLAKSFGCKRFVWNNTLAWRNKAYKDDGESISQSQAEKRLVILKEEFPFLEEISSVLFQQALRDQAQGFKNFFEGRAQYPQFKKRNRRQSFRLTKAAFRLKEDELYIAKSKEPLNVVWSRALPSAPTSITISKDCAGRYFVSLLCEFEPKFKPISAKLTGFDLGLTHLLIDSDGNKYDNPRYTLKYQVKLAYLQRKYAKKKKGSMNREKFRLKIARLHAKIADCRTDNLHQLSTQLVNENQVICVESLAVKNMVKNRKLAKHIADASWGEFTRQLVYKGDWLGRSVIEIDQWLPSSKACSTTGCDFNHKKLPLNARHWTCPVCGAVHDRDVNAAINIKAAGLAVLACGVTGSGIRRTRSRV

SEQ ID NO: 23028 - protein, 392 aa, unknown
  TnpB Polypeptide
MATQTLTLKLPFLWLNATKAAAFARLQDLNTATANEILALPKEGRGALTTAHFTHVELGSAWMNQTIRNARAKTGVKRFTVAPLETNNQNWTLHKVGDTYSLGFGLVRGVKKRVPLEVYGAHATRALDALLDGTAKKGGLKLWRSRRGLWYALVSVTMDVPVAETSGQWIGVDRGQNHLAVASTPTGRPRFWTYGVVRQARRHYAAKRRRLQKAGKHKTISRLEHKEARLVRHVNHVISKELVQFAADQGCGIRLEELRGIRQTTRQRKDTKRQADTNRDYWPYFDLETKIVYKAALAGVPVETVPAAYTSKSCCHCGAIGPRERHSFRCPRCGYRGHADHNASRNVGRWVGASCPVVLERDASVMLASVPPGAVHDSPQAPYATDPVRGTV

SEQ ID NO: 23029 - protein, 384 aa, Lactobacillus sp.
MLKGIKIRLYPNKTQKDKLLQMFGNDRFVWNQMLGMAKQRYQNNPNSQFVNGYQMDALLKQLKQEYPFLKDSDSTSLQIVNHNLDQAFKMLFKHRGGYPRFKSRRTAKQSYTGKARISVIAKHYLKLPKLGIIKSSKTTRLANCKIKRYTVSLEPTGKYCLSLVVDGPNIQPLEKTGAVVGIDVGLADLAITSDGKKYDTFNANWLEKQATNWQSKFSKRKHKATVAVRQWNHNHKDIKEDVYGYQNWQKAKQIKARYQAKIANKRKDYLHKLTTNLVKQYDVIVIEDLKTKNLQKNHSLAKSIANASWYQFRTMLEYKCNWYGKQLVAVKPNYTSQICSTCGYCSGKKPLDVREWTCPQCGTHHDRDVNAAVNILRKGLKAIG

SEQ ID NO: 23030 - protein, 377 aa, unknown
  TnpB Polypeptide
MLVQRTVQIAIEDDPDLRKTLDAFTDVCNRISPAAWNFGKPLQSLALHKSVYSSVKGTISSQLTCTAIRITAGAYVSARKKGHKATHPFWWKSPRALFLIGKRSRDANLKPDGTMSIWTVAGRKKLQYSVPDYFRSTLTNAVEIDSMIVVPHENHLIGHVAITLDIPDADGIIPVGVDLNETNTIVAVDADGHGLFITGLSRRILNSRTRKTVSRLQKKLAQKKADGKNTRSVVRVIKRLQRKRSRRTTDFCHCATKKLVKWAPDNCVLVFEDLQFKQGVKGSRSLNRRLSAWPRGMMLAFATQKVAGKGIVEKVDPRYTSQMCSRCGLLGNRSRHAFSCPHCGFSLHSDINAAINIRNRFTALRDSGVLSATPETS

SEQ ID NO: 23031 - protein, 323 aa, Clostridia sp.
LNPRPPRFKQNGMVITYMQNAIVHVPGSSRVRLSLPKQLKGYLCQTYAICENYLYLENKVFQGTDVIKQIKIYPPDNKGKCQIILIYEIKDIRTKMDNGHYLSVDPGLHNLLTCYDSVGKSFILGRKYLEINQKYDKEIARLQHQWGRCQASKGITHPKPSRHLCRVYEKKKNCIHDYLHKVTRTVADYCEENDIHTVIIGDIKNIRRDKNLGKITNQKLHALPYVKIYDMLEYKLAMYGIVLKKQTEEYTSQCPPHAPKVSKRYAVKSNRVNRGLYKEGYQVYNADAVGAYNIMKKYIAISGVENEMSVTGLSSPQIIKVAV

SEQ ID NO: 23032 - protein, 412 aa, Bacterium sp.
VFRTYKYRLYPTRVQEKTLDFLLMQGRLIYNDALEQRLKVYRETGESVSYPQQWAHFRDLRHAHPDTLGRLNATSVQQILRRLDKAFKAFFRRLKAGEKPGFPRFKGCNRFNSLEYRYGDGCKLRFSGGRARFYVQNVGEIKVKYHRPLPEGAQIKHVILKRRNRRWYICLMLELPEPAVIKEHPGPAVGIDVGLHHLLALSNGETVDNPRWLRRSLAKLRVAQRRMARRLKGSRGWREAAYQVARLHERIAHQRRDFWHKFTRKLVDTYSLVVLEDLNLAFMTANSHLALSAHDAGLAEFRQLLAYKAESAGTRVVFVNPAFTSQLCSFCGAVVVKDLSVRVHECSFCGYTADRDVNAARNILSSVAVKSAWTGPPGVLGHGVAVPVQRASPGKLPALAGRVVTCAPFGVK

SEQ ID NO: 23033 - protein, 381 aa, Methanobrevibacter sp.
MNLVNKSYKYRIYPNKEQQDILDFNMDASRFVFNQVKAYYELYKQQAKELNLKPVYANRKLFNVILTNLKKQYSFLKEANSTALQKSYDNLIQAYRNVGRGNGWVKWKSKKNPVKSFRTINVKIIDNKLKLPKIKSLIKMKYSRKIKGDILTATITKENNNYFVSINVKNSPVKPKNKTNKSIGIDLGLKTLVTFSDGIKIDKIELNKIDNKIKRQAQILSNKIKYSNNWFKAKTKLNKLYTTKKNIINDFLHKITTKIISDYDNIYVGNVSSQLGLKNKNLARITADQHWYEFKRQLKYKSTWYDKTFAVVNEKYTSRTCSNCNYQHKDFNLNIREWICPVCKVSHDRDVNAAKNILTVGTTGIAFGKANNIVSGLGIHD

SEQ ID NO: 23034 - protein, 387 aa, Burkholderia sp.
MYKTLKIRIKDKHSKFLLSLSKEVNFVWNYINELSYEHIRRKGKFLSSYEISKFTTGSTKGKLGKDGLNILAQSIQAINDEYVSCRNQTKRIKLSWRRSNKDSSKYSLGWIPFPFQAIKIVNGQIRYGSHFLSMWDSYGLSQYKDKIKSGCFSEDSRGRWYVCLAIKIHDKDTQEKVQLRTQSIKSHISSLSLEEVKAHPKYVGIDPGLKTFATLSNGKKFDTKKNYRDFEEKLGKAQRAGKTDRVRAIHAKIKNKRNDELHKLSTQLVRDYEGIFIGDVNSSKLAKTWLAKSVLDKGWSMFRNMLEYKCEHAGMFYQKTNESFTTQTCSHCGSMSNSPKGRADLGIRVWSCNCGATLDRDVNSATNILAVGHGRLVEGISCCQKQE

SEQ ID NO: 23035 - protein, 431 aa, unknown
  TnpB Polypeptide
MDNVDNVDTMITMLTPTTSTSAIRTDRANTANTTITVRKAHKIRLHPTAEQEAYLRRACGTRRFIFNWGLAEWQRHYQAGEQPSALALKKLFNGLRGVEFPWTYDVTKCVVEGAFDDLGKAFANFFAKRAGYPQFKKKGRSQESFYLSNDKFTVGDQWVQVPVLGDFIVKQREAQGETVTKRAQLKRRLGKINLAEKLRFTVKTDKTSKILGATIRCEAGWWFLSVQVEVQIAQTPVEGPPIGIDLGFMRLATLSDDTRFENQKPLRHLLAQVRFLNQQLARRQKGSKNREKTKRKLSRLHFRIRCLREDLLHKIAHTITERYSFIGLETLNVRGMFQNRQHALSASDAAIGRLAHLIETKAQTHGTPVQRVGRFFPSTKRCHRCHHVREMAEDERTYVCFNPACGWVGDRDLNAALNILEEALRLSSLSA

SEQ ID NO: 23036 - protein, 356 aa, unknown
  TnpB Polypeptide
MLLVETSPAEKDLLLRTMERVNAGCNLVSGKKVGRFKLHKMVYRKLRDFGLSSQMSIGVIAKVAAAMKLRDYPKFYLHGAVPFDQRNISLRGDQLSISTIEGRRKLKVRIGEFQQNKIAGGVVRAGMKLCYKAGRFFLAVAVDTKDKEPVSGGVLGVDLGIVNLATDSEGRVYNDEKVEKKRVWYNELRGQLQSVGTKNSRRRLKKLGGRERRFKRDVNHRIAKQIVANAKGTSSMVAMEDLMGIRGRTTVRRAHRDRHGKWAFHELRKFVEYKSRLEGVRTIIVDPRNTSRTCPKCLWCEKANRKSRDLFQCRSCGWAAPADYVGALGIQREAAFNLPIAAPGAAAISLPSGRRS

SEQ ID NO: 23037 - protein, 247 aa, unknown
  TnpB Polypeptide
MKQLTKLQRLLPSEGSRQAYPGASKRPASCALRARKDHPRNSSRKIRPPSFRKRMKYQSFTLKQGGYSTTGNRVTIGKQQYRLIEGNIKTLTIKRDALGDIYFVIVTGAEHQVIQAATTEIAGMDFVLKDFLIASDGSKVAFPAPLQPSLKKLKKANRSLFGKKKGSHNRAARVHLKTALDLARKYKAIAIGDLNLTGMPVGQKGLRPWLCHLRLGPRAPGRHEWLLRGQDRSLVSQQQDLPPLWKH

SEQ ID NO: 23038 - protein, 389 aa, unknown
  TnpB Polypeptide
MPFLMRLAKTVVCKLRLTDEEKDKLARTIQAFRDACNYISKVAFERRVFNPVVLHHIVYRETRAKFGLPANLAVRARDRVAKACQGKCDRLLRFDKLSMDLDARLFRLIHKPDGIYASVSTVQKRVKPPLAIGDYQRGLLQGTKPTHAVLAYRRKNFYLHIVVDREVPEPEGNNPVGVDVGMNNLLVASNGFKVEGKPVLKKREHFRGLRFSLQAKGTKSAKRHLKRLSEREKRWANTTLHQVSRQFVNSLHDGDVVAIEDLNGIKDRVKLRKSQRVGLHSWAFRKLQSYIRYKALDRGIPVVDVDPRNTSKICPRCGSVDRNNRRSQALFRCINCGFQHNADWVASVNLAQRAGSLGTGCVVNQPIVGMNGFGHYDSPASPLSLDMGS

SEQ ID NO: 23039 - protein, 399 aa, unknown
  TnpB Polypeptide
MKRIYKYRLYPTNSQEENLNETLNTCRILYNNSLAERRDAWKNEHKSINYYEQKHNLVEAKKDNPYLPKVHSQVLQDVVLRLDKSFVNFFRRVKKGEKKVGYPRFKKYGRFKSFNYPQYGNGVELNNNGRLNLSKIGNIKMKLHREMPNDGVIKSCIIKKDVDKWYACFIVETERKTIKPAPIRTVVGIDMGLNDLITLSDGNKIKPPKYLRQSEDKIKKHQRRVSRKKKGSKNNRRSVIKLEKVHRKVRNQRLDFNHKLSRNLVNKFDLIAYEDLKIRNIVKNHYLAKSISDASWGTLNRLIVYKAEEAGKLSVEVNPNGTSQECHRCRKIHDMPLSKRTIECDCGNRMDRDINASINILKRGLIKIGWGTAESTHMETQPLHQNTQNVFDASRVVEV

SEQ ID NO: 23040 - protein, 386 aa, Actinomadura sp.
MKIVVPVKLVPDEAQASALERTLRTVNECANRVSAASFQAYRLKGSVKDLRSMAYGELKAHGLGAQAAQHVIKRVADAYTTLRTSVRAGNLGGAGSRRRRKAESKAIVFRPDAAHTYDDRCLSWNYGAQTVSIWTVDGRLKNVRFACSATVLKSLTLYRKGESDLVRRDGKWFLIATCEVPEAERYEPRDWIGVDRGITNLATTSDGDNYSGRRLDRYRRRLTRKRAEIQATGTRSARQLLRKRARRESRHATHTNHKISKTVVAVAQRTERGIALEELQGIRERVTVRRDQRARQSSWPFHQLGEFIAYKARRAGVPFIEVDPAYTSQRCPRCGHTERGNRRSRDHFQCRRCGLAGPADVVAGVNVRDRARSAWVFVNMPPPVPA

SEQ ID NO: 23041 - protein, 407 aa, unknown
  TnpB Polypeptide
MVMQATKGRLYGGGLGTVARIGGQCRAVWNLFVAESAERYKAEGKFVFYAEMSARLPKLIKEDPRLAGLPHRAAQMTVQKLDRALRDCAKSKGNARRGFPRFKKYADRSDAFSFVGREVRVEPGRIRLPKIGWLRVRGMTLPDGAAMKQVAVTQEPNGWHVSIQFDAPAKVYAEPTLPAVGIDAGLNHLATLSDGTRIAHPRLARKATKRLRRLNRERDRRRKGSVNRKRTVVRLGRTHRALGDARKDAMHKATRKLVDTYSGFAVEDLSLRGMIRTRMAGSLADAGLGEFVRTLHYKAEWAGRSWHVHGRFARSTGVCPDCGHVGERLALSVRSWACDSCGAVHDRDVAAARVILAGAVLPVGQEPAAAMPRKRGSAVRGGDRASARSSHGGPPSNVDDALVDEFA

SEQ ID NO: 23042 - protein, 407 aa, unknown; identical to SEQ ID NO: 23041
  TnpB Polypeptide

SEQ ID NO: 23043 - protein, 236 aa, Planktothrix sp.
  misc_feature (200)..(233): Xaa can be any naturally occurring amino acid
VRLIRRADGYYAQFCLNINVTDIQPKTGKEIGLDVGIESFYTDSNGHQEANPKFLRKAEQSIKQSQKQIYKKVKCSSGRQKARKVYAKKHLKVSRQRIEHAKRIARNVCTSNDVVVYEDLSVKNLVKNHCLAKSISDASWYLFRKWIEYFAAKFDKLAIPVAPHYTSQKCSNCGVIVKKSLSTRTHICNCGCELHRDTNXXXXXXXXXXXXXXXXXXXXXXXXXXXXXXXXXXLQT

SEQ ID NO: 23044 - protein, 410 aa, Natronomonas sp.
MHYNYKYRLDPPEALAETLLHHVDTCRQLYNHVLYKLNESDEIPARYKVQGTLPDLKSWWDDLGDVHSKVLQMVVKRVYDNLSTLKAKKENGRAVRMLKWKPPRDYQSFTYNQSGFKLKNTSGRPVLWLSKIGEIPIHLHRDIPENATIKQVTVKQEPTGEWFATFGINVDEATPEKPETPEKVVGIDVGILKYAHDTDGYAIESPDFSDERERLERAQRTLSRKQHGSANWEKQRRVVAERHVELKNKRRDFLHKLSNYYAREYDLVAVENLDAKGLVELPGNSRNRAGAAWGTFLRMLEYKCEREGTHFVAVTPRGTTKECASCGVSTDKPLWVREHSCPSCGFEMDRDANAAWNILSRGLEDVGVGYSESTPVETALPVDTVVSAKCVVEAGSPCLKEQPKAASRQG

SEQ ID NO: 23045 - protein, 446 aa, Natronomonas sp.
VIIEAFRMLEIHRTHRAKILNHNQVAEMLDRHGWSASKLWNVANYHSRQKWDDTGEIPDHSDLKDELKGHSKYKGLHSQSSQRVLEELAEAFNSWYKKRKSDNRANPPGYRKKNYYDDHGNRVHEEHPRSTVTWKQNGIKHDTNNNRVRLSKGANHKEHPKAWEYILVEYETRPGVTVENLQQVRAVYDKAKRRWELHLVCKDEIETPTAPGNETAGIDLGICNFAAVTYSTEQADLYPGNRLKQDGYYFPKEIAKCDDSGGEEATRLHAKWSERRTHFFHSLAKHIVQRCIENSVGRINIGKLAGVREDDNGESKNWGKHGNLDLHGWAFDRFTSILEYKAKVEGVEVVEVSERDTSKTCCVCGRKDESQRVERGLYVCEPCDAAFNADVNGAENIRLELKQSNSESAPDLGGDRSTGWLAQPEVYLHDLSRGFQPRTEVVDCKP

SEQ ID NO: 23046 - protein, 339 aa, Natronomonas sp.
VIIEAFRMLEIHRTHRAKILNHNQVAEMLDRHGWSASKLWNVANYHSRQEWDDTGEIPDRGDLKDELKGHSKYKGLHSQSSQRVLEELAEAFNSWYEKRKSDNRANPPGYRKKNYYDDHGNRVHEEHPRSTVTWKQNGIKHDTKNNRVRLSKGANHKEHPKAWEYILVEYETRPGVTVENLQQVRAVYDKSKGRWELHLVCKDEIETPTAPGNETAGIDLGICNFAAVTYSTEQADLYPGNRLKQDGYYFPKEIAKCDDSGGEEATRLHAKWSERRTHFFHSLAKHIVEKCIERGVGRINIGKLAGVREDDNGESKNWGRHGNLDLHGWAFDRFSNILE

SEQ ID NO: 23047 - protein, 459 aa, Natronomonas sp.
MKRVNEFEIRPRTPEQREALLELLDASAALWNELTYNRRQAFFDDNSVWNATNPSDRYKNVLGSATAQQIPRKNSEAWRSFFSLNEKYYSGKRDEKPSPPGYWGNEEDGRELRTYIRNDQYTLQWGDRSRLEIPVGKALKDEYAITGRLRLEACGDPKWDGEQGRLELVYDKTCDTFRALQPVTVPDSRRDSRKIEDFPEVENAQRFRNSPLASHEAALDVGANNLVACTTTTGQQYLYEGRELFAHFRDTTEEIAHYQSMLDNQRRTSKRIDSLYRQRTERRNHAQDALVRDLIERLHDEGVCRVYVGDLEDVLETHWKCVVNEKTHNFWAFSQFIDRLKCVCEEYGIEVVEKSEALTTQECPECGEREETHRNGDVFRCGACGFEGHADLKASRVFLDREAGGEVGPMARPVRLEWDNHEWRPATTAPPLRRANPKEDRTDRSTCREVGKVASVGSS

SEQ ID NO: 23048 - protein, 263 aa, Natronomonas sp.
RESTLRYDAVGDEFYIHISTRRTDGDDEVSEDTGHPDQTVLGIDLGVNSLAVSSTGTFWHGDDYHHWCREFEKRRGEMQQRGTQAAHNALLRLGKREKAWRKQYIHTVANEIITEAVEHDCDVIAFEDLSDIREGLPQAKCYHVWAFRRLFEYVSYKAPEQGVSVEQVAPNHTSQRCSRTDCGFTHPNNRQEEHFECRKCGYEVNADYNAAKNIGLRYARKRIHRLRSSPKSWNGDAQVDVRITGGTFTRAALVSQPERSAFW

SEQ ID NO: 23049 - protein, 450 aa, unknown
  TnpB Polypeptide
MLTGGEGELTVTVRMKVSPEPESQQAILDLMRRYRDALNYSIRAIIAGKALSLSKAHRLLYKDLRERYSLPSKIAQDCYREAIAIAKSWLKNPKRGAVPTAKGLSMWLTHELGYRVKGDHVELIGGYRLRIIGWDRRYDDFPNREARLVFRDGEFTLYITKQVPRPAKYAPKGVLAVDVNERQIIVGNSSVEQRMETPVERALRYRRLAERLQAKYSSSRYRAWLRRSGIRRRIRYFRRKARNIIDDWARKTAHIIVSLAKQCQLAVAREDLTGLVESLRKLPKGHRTALIALGYRRLAFWIDWQAEKNGVPLFVVDPAGTSTTCPRCGAELVEVGHRRLRCPRCGLEADRDSIAVLNIERRALGKMGGTLASPTAPQVTDVNPNRWGEPVNRPLGRGGGQLDKLYSTARYPDALVEGVPFKRFTREEAAEALSCAGLIISWVKGCSPCR

SEQ ID NO: 23050 - protein, 475 aa, Caldilineales sp.
MAEKVTRLLRSQGLNAAKYDWLARIAVLCGQVRVDAWQRCSGVSTVLQSPYDIRDAWMAEGYDWHGLPARLGKAALADALGDIAAAREAAKVPVKKVIRHRTRGDKAERERLYNLLKRNRWTEDPFLHRQMRKSWRGGRSHVTNQIVADAGSYTTKVWHRRAWVYLQGLERSQRIAIPLKGTCLPSGTLRILLRDHGQVEIHYAVDEAQVCSTRPCGNATVGVDKGYTEAYTDSDGTRHGEGLGDLLSAESDQRKVKGQRRNRLRDIEQKHEAKGNHRKADNIRRHNLGRNKWNQRKRRHNKRARNLLCQAAHAVVNKADTIACEDLSASMKSAKYRHKDTNRRLHGWVKGVMADTLTSISRRRGSALALVNPAYTSQIDSRTGLLQGHRRWDRFYCLDGVVLDADTNAACNILARLYDEEITLYTPYRDVRALLAERTRTAVGTAPPGLELRGPATAPPSTESELPASVPKGAD

SEQ ID NO: 23051 - protein, 347 aa, Chloroflexi sp.
VYNWSLARRIAHYKATGKSLSVTELCAEVAHLKRQPETEWLRGVDSQSLQQAIRDLDKAFGAFFARRAKFPRFRSKKRETPTFRIPQRVALVGDRLSIPKVGPVRLVLHRPLNGVVKSATFKQDATGAWYVTLVVHFELSDTPLPPPAAERVVGLDVGLKDLVVLSDGRRVPAPKHYRWAERKLRRLGRHLSRCQRGSKNREKARVKVARQHRRVANQRSDFIHKLSSRLVRDYDGGVIEDLNVKGLGKTNLAKSVHDAGWSMLRFQVAYKACWQRKHLAVIGRFFPSSRLCAACGCITSDLTLAEREWTCSCGVTHDRDLNAARNIRDEGLRLLLAEGCPESINAS

SEQ ID NO: 23052 - protein, 421 aa, Lactobacillus sp.
VKKHETMSKLAYHYGLKVRIYPSDEQKQIIKVNSDASRFIYNQMVGINQEIHQLKRVSLPIDTIQMRLAQLEKRRNARELTNHFSFLADPQIDSLTKANAIQNYQKAWQQFLKVHHAGVPKFHRKSAVWQYQTNCQYPGQTEAKLTNGTVRFVSTNQLIVPKLGKLRIRGSHKRLLKRLLDTRIGTVTIMKDASDRFYLAMQLASDWPFVVYEESQPGSVGIDLNIENFLTDSNGQVVANPRHYRNSRKRLAKEQRTLSRRARRAKREHRSLKTSQNYQKQRRLVAQLHDKVRTQRQHFLHQLSTTLIKSHDLVVAEELRSKNLLKNHALAMSISDVGWRTFLGMLTYKAALYGTTFMTVNPRNTTQTCSKCTFVMGTEGTKKLTLDQRKWQCPRCQTEHIRDWNAAQNILNKGLKKIKLA

SEQ ID NO: 23053 - protein, 355 aa, unknown
  TnpB Polypeptide
MQKNNEAWNAFFSLLKLRREGKLPPFMRRVSPPGYWKDKETGRRKLIIVIRQDRYEVDEQRHVLILKDFKMAIRFTGRLRWYGKQGRLEIHYDEARNAWYACIPVEVGVEEARTGRKSKHIVRGERRLIQIKSPKGNKAASIDLGINNLASVVVSDGTWILYKGIRAKEDYFYFMKRIAEVQSLRDTLRDKLLDNAIDELNHEMRRLYGKLMRRLLHLYRNLASHLVKTLHELGVSTIYLGYPFNIAQQKGNKFTVNMWSYRKLMEAIELKAQEYGMRVFIVIEYNTSKYCAYHGIEVERKPRGVVHCPMGHKLHSDLNGALNIMRRAIGKIPPVIKKPLSFIVEHNRVAPIKGR

SEQ ID NO: 23054 - protein, 453 aa, Prevotellaceae sp.
MISIAHRIELKPNNKQKTYFRKAFGCARLAYNWGLAEWKRMYEAGEKPSGREIRKRFNAIKKEQFPFVYEVTKCATDQPFANLQTAFDNFFRDWKQGKVSYPQFKKKRDNEGSFYIQSSEIRLSETNKNSKTFEKIPHNEKGKYQYISMPKHSWVKMAEHIRFNYSKINNVCISQSGGKFYASFSLEITEEEYLRTHPNIDLVDSNRKVGVDVGIKSALILSDGIAIDNPKPLKKNLRKIKRLSRQLSKRVHPKTKEERLQGVKKSNNYMKLAVKLAQAQGRVANIRRDFLHKVTTVLTTHYGEIAIEDLNVKGMTKNHRLAQAVSDVSFGELRRQIEYKAATNGVRVLKVDRFYPSSKTCSVCGAVKEDLTLRDRTYRCEKCGAVFDRDYNASRNLLGQLVNHKIGMDYPESTPADLTALLSRFSVNGIATSKVETGKQQKSNVKDAPAWIL

SEQ ID NO: 23055 - protein, 423 aa, unknown
  TnpB Polypeptide
MNPTPEQVEYLKRACGTRRFIYNWGREQWEKQYQAYKTEQETVPQEQRVMKPPNAFVLKKQFNEIREQEYPWTYDVTKCVVEGAFDDLKKAYDNFFAGRAEYPSYKKKGKSHESFYLSNDKFTGGRQWISIPGLGRFILDQRQTKKDRGKLLRKLGTVNLAEKLRFVEEGKATIPTKHRARRKQVLCESVKILGATVSCEAGHWYVSIQVEIRKQRPATPTAVVGVDVGLKQAAVVSDGRRLENQRPLARHLKKLGKLQRTLSRKQKTKDPETKRTLFSKNYEKQRLKVARKHQQIANIRRDVQHKFTTELARTCTVIGIEDLNILGMMANRKLARAVADAAMGQLLQFLKTKVENRGGDLFIASRWFPSSKRCSYCGHVKKRMPLKHRTYQCLVCGLLIDRDLNAALNLLWFATEQLRQLHA

SEQ ID NO: 23056 - protein, 331 aa, Soehngenia sp.
MIKAVKIRLLPTPEQEIIMNKTVGVARFTYNWGLSKWQEMYKEGLKPNAMKIKKIFNNTIKQDEEYNWLNEVSSQAISQAFHDLQDAFNDFFAGISRYPRFKTKKKSRHSFYVRNDRMNIKNDTVSIERVGRVKFTTNYKIPILKKYTNPRCHFDGKHWIFTFGFEQDENQVELNQDLSIGIDLGIKNLAVMSNIDTPIKNINKSSTVKKLEKRLKRLQRKCSRKYEMNKVGKKFIKSNNIIKLEQEIKLIYRRLTNIRTNHIHQATNMIVKQRPHKIVMEDLNISGMMKNKHLSKAIGQQKLKEFKRQIEYNEVPSLQRCVETASSFIDA

SEQ ID NO: 23057 - protein, 595 aa, Streptomyces sp.
VTAVGGLREIAAPFVVPGPCGVAIRDRLKQLTVDDEKVLRLVGDHLGSSASRDLKARCAAGPDHDGERWADRKRVLTGQSSSRWAGSITKASHDQWGLARRAQLAHIQGLEAGVRTVAHRLSLPVGEKGSKHAPGGYRSRREWHAKSRRLHVLEDRLQAARADWQASTVHVVRGGKHLLTTRHHLDTAGLTEQQWRARWQAGRRFLQADGESGKRYGNETIRVTPDGEVSIKLPAPLAYLAHAPHGRYVLTARVAFAHRGEQWRDRVAANRAVAYRVHEDTVRGRWYLTASWTIPPSSAVPLQAARVNGMVGVDTNADHLAAWRLDEHGNPVGEPLRFRYDLSGSADHRDAQVRHALIRPLHWAKRHRLAIAVEDLDFTTEKTREKHGRRKKFRRLISGMPTSKLRSRLVSMAAELGVPLVAVDPAYTSRWGAQHGKNPLTSTNRKPTRHDAASIAIGRRALGYPIRLGAPPRPLRHWGRTAPPHDDRSDRRGHRTVQARTGSQGREETRPRIPGPRTRSVSPDTERKRATRTSKTVRDVRSDQARVQDSLLLTDEERCRSSSRGARHGGTLATCRYLTEDEAYGAQWVFVRVLI

SEQ ID NO: 23058 - protein, 398 aa, Microbispora sp.
VQLRYNVRLYPTPGQRHALARAFGCARVVFNDALRARQDARENGLPYISDGDLSKRVITQAKKTPQRVWLGEVSAVVLQQALADLNTAYRNFFASITGKRKGPKVAPPRFRSRKDNRQAVRFTKNARFSITAGGKLRLPKIGDVPVRWSRSLPAEPSSVTVVKDAADRYFASFLVETSDEPLPESAAEVGIDLGLSHFAVTSDGRRVDNPRFLRRAERRLRKAQQDLSRKVKGSANRAKARARVARAHARVADARRDWAHKLSTALIRENQAVYVENLAVSSLGRTRLAKSVHDAGWSQFIGMLEYKAVRYGRHFAKIDRWFPSSKLCADCGTVTESMPLNVRSWECPCGAAHDRDVNAAKNILAAGRADRLNACGAQVRPGPAPAQREEAGSLRGAV

SEQ ID NO: 23059 - protein, 393 aa, unknown
  TnpB Polypeptide
MTPLIPVRLTCRFKDDGNGEIQLLKALCKVSQNILQYMVNVAWRYNVKTREQLHKLVYKELRKLYPSVPAILIPTLYEKALGTVRSARSNGGSKPVIKKPFAILHKRMYKLDLERSIIEVLGFKYPVNAGKHAEKFKDGWSPKEVVVCFKRNSVWFNVVFEKPVKLLKPKTVMGIDLNFKNLALTVLDLKGNVLYQDKIPFKGLIKALTHKVLQEKIKKKFNRSWRFIKGVRRAIRRHGFRQHSRCMAEIHLVANKIISIAEKFQAYLSLENLKDLRADNDLEEVHLWAYGKQQFILSYKALLKGLGSLPPVSAKRTSSKCPICGRRLKQKSYEELVCPKHGLMDRDLAASWNIAKKGLKKLLRCGVLGSTLNAPEADANPRSNEGEVKSSKT

SEQ ID NO: 23060 - protein, 355 aa, unknown
  TnpB Polypeptide
MEKVKPTIRGKLVFDSAEDKAFLLYAMRNFKDAVEYAHSLMRKGLKRNKIERILTSRILKNKWYSISAFKKARLYRDKPYLKLRRPQLFSVGGENENGNRNIRFDSTNMVRIKIPSTTGRHRWITAKTQFGKEQIPIVNELVNPSFPYSAGVSLKNNEFRLYVNVPLELYVEHMRKKSDAKIVGYIAGFDFNPDRINMVIIDSQGIIRDIQNEDFPEVTSPGFPKEKSETIRKEKLAKLVKYARNHGVKYYAVEKLSKPKPEGCRNAKRKISKMALKQFIQQIEVLVPKVNGVLVKVPPAYSSVSAKIIAEDLGIDIHTASAYIIALRGYKKIQKNKKQATADKLRPQEFCFLKN

SEQ ID NO: 23061 - protein, 417 aa, Caryophanon sp.
VNVVETVIEKQKKKRKTVKEKNKDLAIDGKKLKLYGLKLRAFPTLYQEDLMKKFAGANRFAYNFYLAERKEVYDNTGETLSGARFKQSLNVLKDHELFKWMKDMDKFALETGIEQVEAAFKNFFEKQNGFPRFKSKHTSRQSYTTKFTNNNIQLDVEKRQVKLPKIGWVKVRFSKKQWAHMETDVFARHIKRATVSLQSNGTIHIALTIEETIALPPTVDWSAVEEQHVLGIDLGLSHFYIDSNGVKIENPRHLKKYIDRLKKEQRKLSRMVKGSANYRKQQKKLAKYHMRVANCRKDFLHQQSRKLINENQVIALENLNVKGMVKNKRLAQSILDVGWSTFVTFLTYKAEWANKKIVSVGRFFASSKTCHGCGEKETGLTLSDRIWVCGACGAEHDRDQNAAINIKQEGIRILRHT

SEQ ID NO: 23062 - protein, 432 aa, unknown
  TnpB Polypeptide
VLRAERYRVCFDNPQQAALCAQIAGACRYVWNHMLADCQWRYRMWKMYRIGPKPSVSFFTLGHRFTVLRNDPAHAWLQAYPASVVRYALKYLADAYARSFDSADAGLPHFKSRHRTTPGFTIPQDVRMDGTRLHIPKVGWVRLSGSGQYLGCRPKQVRVLKEGTERHPKWYAHVFHEVPADRVRPPAPTGDLGVDRNVGQATDSNGHVYTLPDTSNLDANIRRKQRKADKARERSRRNGQPLSHRGRRICGQLNRLYRKRRCKRENVGHQHSRKLADRAHTVVVEDLHTKAMTQSAKGTVEEPGRNVKSNWGRLERNLAYKAGALVKVDPAYTSQTCAVCQHVDKANRKTQAVFKCTACGHTANADHNAAINILAKGVPLARLARGVGASARRGAFPSGTPTTREPDRPGPGGSASVPSVNPSVYPSEGGPP

SEQ ID NO: 23063 - protein, 366 aa, unknown
  TnpB Polypeptide
  misc_feature (24)..(24): Xaa can be any naturally occurring amino acid
  misc_feature (123)..(209): Xaa can be any naturally occurring amino acid
MKLTLKIKLLPTDEQANLLLDTMXANAVSNAISDVAWQEKIFNNFRLHHKVYHIYKATFSLSSQMLIRQIAKVADAYKLDKKVKRQFKPLGSIAYDSRIMTYKPNNIVSLWCIGGRQKINFVXXXXXXXXXXXXXXXXXXXXXXXXXXXXXXXXXXXXXXXXXXXXXXXXXXXXXXXXXXXXXXXXXXXXXXXXXXXXXXXXXXXXXXXLKRLSGKERTTSTIINHTISKQIVQLAKSECKGIAIEDLKGIRFSANKKGKKFRTRVSKWNFNQLRSFLTYKSLLNGVKLVVVPPAYTSKTCSNCFHIGNRQGKKFTCSNCNSVFDADENAAKNIALLGTSVNSPEKPSMLYCQVHSFLGLKPIPSL

SEQ ID NO: 23064 - protein, 398 aa, unknown
  TnpB Polypeptide
LLAKTFGCCRFVYNWALNLKITAYKERKETLGNVYLTNLMKSELKAEHEWLSEVNSQSLQSALRNLDTAYTNFFRNTKAVGFPRFKSRKNKQSFLCPQHCRVDFEKGTITIPKAKDIPAVLHRSFKGAVKTVTVSMTPSGKYFASVQVDTDIQELLALPTQRDTTLGIDLGIKSLAVCSDGRTFDNPKNLQRNLDRLKLLQKLLSRKQKGSANRNKARIRVARLQEHITNCRKDNLHKITHALTHESQVRTICMEDLNVKGMRRNHHLAQAVGDASFGMFLALLEYKCRWYGVNLIKIDRFAPSSKTCGQCGYIYRGLKLSERNWTCPECGTHHDRDFNAACNIKEFGLKALPTERGKVKPVDCPTVDERPRVLKSRGRKKQEKRGGIGISEAAKSLV

SEQ ID NO: 23065 - protein, 426 aa, Symploca sp.
MILTYCYRIKPSAEQEATMCYTLERLRRHWNYCLGQRLDCLRITRCQIDRCSLISEPIGEIPAQVNYYTQQSALKETKKLFPDYKNIWSESQQVNLQRLNKAWERWLIPDKSGKRGGRPRFKKVGELRSFVYPRVNCQRAGAHLKNGILKLSKIGEMPIIMHRPIPDGFTLHTCTIVQKADGWYCCFVIQDETVPEPMPLDEIHSAVGVDVGLKEFLTTSDGKTVPIQQTYRKTQSHLVRQQRKLARKKAGSKRAEKQKNFIARIHQRIGRIRENFHYNTAHKLVKQYDLIAVEDLNIRGLARTRLSKSILDAAWGKFINILEAVAVKRGVRIVAVNPHGTSQNCSNCGVKVPKTLSVRLHECHICGITLDRDENAAINILNRALSVSEAGRSPVGLILPARGGLVSGLPAKRELPSREWVQLSLF

SEQ ID NO: 23066 - protein, 230 aa, Caldanaerobacter sp.
VPSQTAQQTLRLLDRNWKSFFRAMEEWSKDKSKFNGQPKLPKYKKKNGRSVTIFTNQQCKIKDGYLTFPRTDLRLKTRITGNLRGVRIIPKGSIYVVEIVYEKEIAEVKRPPKRIGGIDLGLNNFVTLVNNIDIKPIVINGKVIKSINQYYNKKKAELMSYVGDRGTSNRIEKYYDPSRRIKRGLFRSDKGILINADVNSAYNIIKKVFPEAFAEGIEGVGLHPVRLNIA

SEQ ID NO: 23067 - protein, 420 aa, unknown
  TnpB Polypeptide
MIVLEFKAYGKLEQLTAVDEALRTVQFIRNKCLRFWIDGLGKSQYDLNKHCAVLAHEFPFADKLNSMARQASAERAWSAIARFYDNCKKKVQRLKGFPKFQKDNRSVEYKTSGWRLADNRKSITFTDKNGIGRLKMKGTRDLNFYQPDQIKRVRLVKRADGYYVQFCIQVDRVLGGFPCWSGDPTSAQQEVIEPTHRTIGLDVGLESFYTDSLGVKVNNPRFYRTGEKKIKRSQRLVSRKVKGSKNRRKARVKLARVHLKISRQRKDHAIKLARCVAASNDVIVYEDLRIKNMVKNHCLAKSINDAGWYQFRVWLEYFGKVFKRITIAVNPAYTSQECSSCGVVVKKSLSTRTHVCQCGCKLDRDHNAGINILNSGLATVGHTGSSVLDTGNASGDIPSTLVGANLRGQGASLREESPRL

SEQ ID NO: 23068 - protein, 357 aa, Streptomyces sp.
LARGAARAGRAGGPEDLFPGLAELLGRTGGAPEFKARFRTRMSIDIPQGRDLHVVRVHRRWGMVNIPKLGKVRFRWTRALPVGKHADKHHRITGARLVKDALGWHIAFRVTTVAPAPAAHPGLEVGIDAGITVPLALSDGESADHGPWLSKREEARLLHFEQCAARRKSHRKKGERTSRRLHRTYDQIARIRATAKRRRDDWQHKTTTALADTYGTVVVEALQITNMAKSAKGTVEQPGRQVAQKAGLNRSILGEAWGRTVELLSYKLAQRGGALAEVPAPGTSQECSRCHTVTPGSRRNQAEFVCNNPACGWEGNADLNAARTVLHRYRTGHALVPAAGRAVVRRAGHGVKPATAR

SEQ ID NO: 23069 - protein, 449 aa, Thermococcus sp.
MKRSITLKLQPSKEQEKTLKELVITSSKVWNRVNYLRRQEFFEGKPIDFLKTEKIVYEEFKTEIGSATVQQICRKNAESWRSFFSLLRNKRNGELPEWFKPRPPNYIKEGGLIVLRNDQYRIEGNKLILKGLGKFKRLEVQFKGRIHLKGKQGRLEITYDTIRRKWYAHISYTVEAKLYDEEWVGLPRGPLGNLSAGVDLGVNNIMAVYVENGESFLVNGRPLKSIAFYWRKRIAEYQSKINKSGAKKSKKLSRMYQKAKLQAKHYINTAVRQTVERLYQMGVSRIVIGYPKEIARNPEKGRKQNYLLSHVWRFNYIIKRLKEVSEEYGIQVMVVDEAFTSKTCPVCGKPHKGARFVRGLFRCPATGLIFNSDLVGAFNILKKAVKTITPNLSGLFAQGRGNGGKTVPEGSKTHFSLGLNETPQTFPSLARGLKLTPRRSRRGGGQPEL

SEQ ID NO: 23070 - protein, 431 aa, Thermococcus sp.
MKRTITVKLQPSKAQEEALKELAQISSKVWNRVNYLRRQEFFEGKPIEFNKTEKIVYEEFKSEIGSATVQQIARKNAEAWRSFFTLLRKKRNGELPNWLKPKPPNYIKDGGLIVLRNDQYKIEGNKLILKGLGKFERLEVQFKGRIHLKGKQGRLEITYDPIRRKWYAHISITVEKKLQGGEWVKLPRQPSGNLSAGIDLGVNNLMAVYVENGESFLVNGRPLKSIAFYWQKRIAEYQSRLNKSGAKKSRKLSRMHEKAKLRARHYINTAVRQTVERLYHLGVSRIVVGYPKEIARNPDKGRKQNYLLSHVWRFNYVIKRLREVAEEYGIEVIITDEAFTSKTCPVCGKPHEGARFVRGLFKCPRTGLVFNADLVGAFNILKRVAKTITPSLSALSGSRGNRGETLPEGLKARFSWGFNEAPQTFPPLARG

SEQ ID NO: 23071 - protein, 408 aa, Hadesarchaea sp.
MQVVKTVKIPVHYATTKEKLNKLNRLTARLTYCIHLLSELIERYDIRSRKALRAKVKEHGIRRRTDLNAAFIQQCEDKDLWMWKSYRRRHHIWARKVKRAQHKNDEKWLKKLMKREPSPPFHGKQSVRKISPRFDVRTGCVEFAEKSKLAPLWLKLSTLELRETICIPLNPARYHLKQLRAGKISDFEIVKRDGKFYAHISIVREVQARPVKSVRGIDLGINRAVATVLLPKGGEPLEELWADEERKKQIKKFNEVVAELQQGKKWAKLRRLRYKRTNIARYHDWLLANRVASNSDGCIVAIGRTDYKRRMFKGDGDKQLRKRVHRWAYARATRFITLKCAERGIHAVTIEEAWTSRICHRCGSTNTERPTQELFHCKDCNLKYDADLNSAHNIASRCRVDGLKAGMI

SEQ ID NO: 23072 - protein, 430 aa, Gammaproteobacteria sp.
LILAFSSGAKRSWINSFRFFKYVMTRQGCCAMLYVMTMIAYKFRFYPTSAQEQALCKMFGAARWAWNTCLAWRSAAYTLDGESVSGMSFSKELTWLKTLEPFSWLKEIPTVVYNQALRDQDKAFSAFFAKRARYPKFRRKGGPESIRFQLNQRTVMSNFRDGELLKLHGLGKIDVCWSRKMGGVPKMVTVRRDASGRYFVSMTVETVVDPLPQKTNAVGIDVGLKDIVVTSDGMKTGNPRHLRKAEKKLKRAQRQASRKVKGSNRRKKAVLKVAKLHAKVADTRADFLHKLSTGLIREYQIIAIEDLSIKGMARGRLSRSVADAGLGELRRLLTYKAEWYGRNLVVIDRWEPTSKVCSECGHKMDSMPLTVREWTCPECGSDHDRDVNAARNVLTAAMVGRTKGSAQSAKARGVEGSGAVPPVTARNQPR

SEQ ID NO: 23073 - protein, 441 aa, unknown
  TnpB Polypeptide
MKTVSSYGVEIKKQNIPLHQTLRIYRQAVSYLTKVYHEVWEGLSEIENTQKRFNEAEHLVHNTKKNVARFDFDQRFVKMPSYLRRAAIQHALGSVSSYKTRMKLWENGDLSGKPKLVYENHAMPVFYRDVMYKPSESGEDIAYLKLYDGYDWKWFRVSLLHTDMEYLRKHWSGVCAMAPVLEKKHQKYFLRFSYTEDVILTKHAVNEQIICSIDLGINTDAVCTIMRSDGTILGRTFIDFPSDKDRLYHVLGRIRRFQRKHGSGQIKRRWTYAKRLNMELSRKIANAIVTYAGKYQADVLVFEYLEIKGVISGKKRQQLHMWRKRDIQNICEHQAHRHGMRLARVCAYNTSRLAYDGSGMVERSKKNHSLCVFKNGKTYNCDLSASYNIGARYFIRELLKPFPETERSLLEAKVPSIKRRTSCVYADLRVLHDVLADSKSA

SEQ ID NO: 23074 - protein, 296 aa, Microcystis sp.
  misc_feature (21)..(54): Xaa can be any naturally occurring amino acid
MLRYRGKRVFLGSKSIAVRLXXXXXXXXXXXXXXXXXXXXXXXXXXXXXXXXXXTGIDLGLKEFYTDAQGNTVENPRYLRKSEKRLKKAQRRLSKKFRQGKKQSKNYHKQRVKVAKLNLKVSRQRKDKAIKDALALVQSNDLVVYEALKVRNLVKNRKLAKSISDASWYQFTQWLNYFAKIYRIVCVAVPPHFTTQDCSVCGTRVQKTLSTRTHQCPNCQTVLDRDHNAAINILKKGLQYLGNYLNGTVGQTETEPNALGESDLWVFSGDIENLSCLVEQGISNSDVERIPRHSVA

SEQ ID NO: 23075 - protein, 344 aa, Microcystis sp.
  misc_feature (116)..(149): Xaa can be any naturally occurring amino acid
MEKAYSFRFYPTPEQESLLRRTLGCVRLVYNKALHLRTQAWYEKQERVGYAQTSSMLTDWKKQEELDFLNEVSCVPLQQGLRHLQTAFTNFFAGRTKYPNFKKKHQGGSAEFTKSXXXXXXXXXXXXXXXXXXXXXXXXXXXXXXXXXXNPKHFKNHYRRLRKAQKSLSRKQKGSKNREKARIKVARIHAQITDSRKDHLHKLTTQLVRENQTIVVENLAVKNLVKNPKLSQAISDVSWGEITRQLAYKCRWYGRNYIEIDRWFPSSKRCSNCGYIAEKMPLNVREWDCPDCGTHHDRDINASKNILAAGLAVSVCRATIRPEQSKSGAAGAEPRKGKKQKPKS

SEQ ID NO: 23076 - protein, 208 aa, Nocardiopsis sp.
VFRDGVWFSHATCEVPGVEQYEPDGFVGVDLGIVDIAATSSGYRAAGRGFNRYRRRHQRLRTKLQKKGTRSAKRLLRKQRRKESRRARDIDHVVSKTIVTGAERTGRGIALEDLRGIRERVRLRRPQRVALHSWAFAQLARFIVYKAKRAGVPMVFVNPAYRSQTCAECDHAERANRVSQALFTCRDCGVVAHADRNASRNPPGWVAR

SEQ ID NO: 23077 - protein, 532 aa, Nocardiopsis sp.
VVSGPSGVAVRDRLTHLRPADEQVLRVVGAHLGSLASGDLATRCRQGRDHDADTWAARKRDVTVQSSSRWAGSITKATHDQWALARRGQAAHLDSLESGVRSLKRRLSLALGAKGSRHAPGGYRSRREWHAKARRLAVLEDRLAQVRQDFEAGIVHVVRGGKRLLNTRHHLDQAQLSEEQWRARWEAGRFFLQADGESGKRYGNETIRLTPDGRVSIRLPAPLEYLANAPHGRYVLSCRVAFAHRGAEWADRVEANRAVAYRIHLDVERGRWYITASWTRPKARTLPLVAACAQGVVGVDMNADHLAAYRLDPHGNPVGDPERFSFDLTGRAAHRDARVRHALTRLLHWTRRTGAQAIAIEDLDFATGKTREKHGRRKRFRQLISGMPIARLRARIVSMATVLGIAVVAVDPAYTSKWGARHWAEPLTSSKRTMTRHDAAAVAIGRRALGHPVRRRTVPPRHHRSDGGGPRTVQTEPGSLGCEGPGRPATGRAHDARARAGKERTRGTSASSTVRDARSASRWVQDPLLQTE

SEQ ID NO: 23078 - protein, 388 aa, Nocardiopsis sp.
VKLAVQVKVVPDAVQASALERTLPAVNHAATWVSAVSFERFGLKGGVRVLRRLCYGELKARGFGAQAAQHIIKRVADAYTTLRANIRNGNLGREGSKRRRKAESKPIAFRPHAAHTYDDRCLSWNYDAQTVSIWTLDGRIKNLRFACSPGALKQLAEHRRGESDLVKRDGKWFLVATIDIAEPQVFEPRDWIGVDRGIVNLATTSDGHNYQGRRLGRYRRWQARKRAELQAKRTRSAVQLLKRRARREARHAAHVNHKVSKTVVAVAERTGRGIALEQLQGIRERVTVSRDQRARLSSWPFHQLGAFIAYKARRSGVPYLEVDPAYTSQKCPVPWCGHTARNNRPTRDTFHCRRCGFAGPADVVAGINVRDRAGSAWVFVNRPDPAPV

SEQ ID NO: 23079 - protein, 438 aa, Nocardiopsis sp.
LYPTGAQEQVMLGHCAHARYAWNLALEVNATYRKGGVRREKPVRYAGMCRMLSEVRRTDTTGMDPETAAEFAWVASGNADIQQQALKDFDRALSNFLGGSHGYPTWRKKYRSEGFRVIGSGRVPAYTPDGELVLNAKGRQVHHRQVLVGKLNSKWAQVKVPGCGWVKFRLTRRQLPDAKSFRVTYRHGQWHVAFAVVPAPIPSPGNGEVVGIDRGVVVTAALSDGRTLNCPQLTGKERATVRKHERRAARAPKGSAQKRVEHARVARLKAREAARRKDWCEKTSTLLARTFDTIRFEDLQIKNMTRTARGTAEEPGRNVRAKAGLNRAILAQGWGLLRTRTGHKASGRVEDIPPKDTSLRCSECQWIDKNSRKNQATFVCTHCGFTCNADTNASNNVAAGQVERPAPRGVRAGGTTRRKSAVKNVREPQPRWVGIPLF

SEQ ID NO: 23080 - protein, 244 aa, Nocardiopsis sp.
MKLVVQVKLLPDAAQEAALWESLKLCNTAANHASRRAFETGVKAKAALQRPVYHEVKAMGLSAQPAIHCVRKVAGAYATLKANLKAGDYGDEGSKRRTRVEAAPVRFRKDAAQPFDDRCLSWRLDARTVSIWTVQGRRKGIAFVCSPEQAKMLSEYRQGESDLVRRGNFFYLYATCEVPEAEEYTPQGFVGVDLGIANIATTSDGTGGPRRPRLHLPGVFGVRPHCQEEPARPGHLQMHVVRLR

SEQ ID NO: 23081 - protein, 363 aa, Beggiatoa sp.
MIVLSHKIQIKNPTVKQEQYFRQACGIARFAYNWGLEEWRKQYEAGSNPTTFEIKKGFNAIKPIEFPWVFNVTKCAAEQAFANLGNAFKRFFKGLGKYPKFKKKGMHDSFYLSNDQFKVASNEIKIPKLGWVKLTESVRFSGKILSATVSRTADKWFVSIQVQMETSLRVSENQADAVGVDLGVKNLATLSNGETVHGRKPLKKLSRRLARLQRHLARCTKGSKRHFRLKLKISKLHYRIKAIRHDGLHQLTYRLCQGFQVICLEDLNVKGMMKNHRLAKAINDMGFFEFKRQVEYKATLFGNWVQEVDQWFPSSKTCSNCGNKKRDLRLSERVYHCDTCGYEVDRDLNAAINIEREGLRLLA

SEQ ID NO: 23082 - protein, 208 aa, Gemmatimonadetes sp.
LWLCVVAKAEGIKSFIAKNGKTAGFDFGLKTYLTASDTTRTQSPLFFSRNARQVKKANRNLSRKQKGSNNCHSARVNLARVHRRVASKRRDYHWQLAYHLCRQYDVMCFEKLNIKAIQQLWGRKINDLGFADFLTILKYVAQKTGKTVRQLDQWLPTSKTCSACGMLQENLELRERTFRCGCGLEIDRDLNAAINIHRWGRPPLAEAA

SEQ ID NO: 23083 - protein, 373 aa, Chroococcidiopsis sp.
MQRTIRIQLKPDVEATEVLSQAIEQYTWSFNAVCQLGWEKDLVSGVELHKATYYDHRALTGLPSQLVCAARVKATEALKSAKKLKKKGKTVSCPTSKRCPIRYDARSYTIWFDRCEVSILGIDGRVKLPFEVAEYYRQYLDWKHTSADLLQDRKGRWWLHVVMETETPRSITTPEVVGIDLGVTNPAVDSRGSKYGSDHWKGVEDRTFELRRRLQGKGTKSAKRHLKKLSGKQKRFRKDCDHVLSKRLVQSVSTGATLAFEDLTNIRGRAKVRKAQRRRLHSWSFAQFQAFVTYKAEAKGVKVGFTDPRYTSQKCSKCGHIERGNRPSQAEFRCKKCRYECHADYNAAVNIRENFLRAGATVNSPIVSAESLG

SEQ ID NO: 23084 - protein, 303 aa, Lactobacillus sp.
LGVSHNLHLAFQKLFKEHAGYPKFKSKRFTRPAYRSNAVNGNIALLDETHIRLPKVGIIKFRAGQLPTGKIKTATVVRSSTGEYDVLVVAEVEIASWHQTKALAGIDMGVADLAITSDGKRYATKRFDKALAKKKHYWEKRFARRRHQAEKEIAWDKDLKVVAPRRLSDFKNYLKAKVMVAKYSEKVVNQRRDYLQKISTELVSKYDVIKLEDLKTKGLLRHHHLARAIANQSWRELRLMLAYKAAWYGKQVVAVSPYKTSQRCSVCGYDDGKHELTIREWTCPRCHTHHDRDINAAINILAA

SEQ ID NO: 23085 - protein, 400 aa, Thermoprotei sp.
MPEGVYYRTLKARAEIIEGNINDLLWDLTVYKYALQKCIEALWELDKIPKKSQVHQLFYPMLRDHGFRAHVARNIYSTALALVKSAKENNGSKPVVKKMTARLDYQDAKVDMDSHVVKVILRDKWYTLKIIHKKDFIEKFKGLKWKEVHVKYCNGVLYVSIIFVIRYKPYVPRGAIGLDINLRQITTYDGSNVRRYRTRFIDALSKRARAEELQRKHPRRWRYNKRILSRVRALHRKARNIVLDWCRKSAKYIVLKAKKYGYAIALEDLTNLRENIVEKEGVFVWKLSMFTYRKLQEAIISKTIEHNVPVILVNPRNTSTTCPRCGTKLSYTYRLAICRKCNFKADRDKIGAINIWLRSLYVYAGEHGSTLSAPAVKDEARQSGRIKDEGMKIMIKSVQK

SEQ ID NO: 23086 - protein, 381 aa, unknown
  TnpB Polypeptide
MRKAFKYRIYPNKKQAQGLSMMVETHRHLYNRALAERKNAWEQEERSVSYQDQSAQLKEERLTNEYLQASNFSSCQATLRRLDRAFKAFFRRLKAGEKPGYPRFKGRYRFDTVEFPKYGDGCKIKDDRLYIQHIGLLKVKWHRELQGKIKTVSLKRESDSWHVVFSCELPDPEIEPSQLPATGIDLGLKAFLMTSEGEEVKPPKYYRKAQKSLRRAQRKVARRKKGSQRRRKAVLLLKKQHQHIANQRRNFHHQIASSLIKRHGMIAHEDLNVAGIGKTRLAKSTYDVGWSSFIAILSSKAEGAGCQVIAVPPHNTSQMCSACRKVPEIKKTLADRRHICPFCGYTADRDVNAAQNILWLGRSLLAVSTPVGVLAREAASL

SEQ ID NO: 23087 - protein, 223 aa, Dactylococcopsis sp.
VFLQKSESFVIDGRKVKSLNQNYNRRVSSLKKGKPQGYWDSELARITEKRNRQIRDAVNKAAKMVVNYCLNKDIGIIVFGWNKGQRQGLNIGHQNNQNFVQIPTAKLKNRIQQLAEENGIEFVETEESYTSKASFLDRDLLPKFGEKPERWQPSGKRVTRGCYKDSKGRIVNADAQAAANILRKVEIQLGLVLAKVSRAALSLPQRFYLWNSKRKARSIMALA

SEQ ID NO: 23088 - protein, 209 aa, Dactylococcopsis sp.
MYGCQQNRIKPSSDLIPILEHICHTANNLTNCGIYLARQIFFNEKRIIGKYEPEKALKQQINFKALYSQCSQQILRSVAESFKSYQGLREAFFEGTIDKHPKLPSYRDKGGMAVASYPKQALKLKSGQVRIPLGKTIKIWFGLGEFFVPFPSNLEWKSIKELRILPRNREFYVEWVYERPEVSTAVNSTEALGIDPGLDNWLTCVSTKE

SEQ ID NO: 23089 - protein, 166 aa, Dactylococcopsis sp.
MVVNYCLIKDIGIIVFGWNKGQRQGINIGHQNNQNFVQIPTAKLKNRIQQLAEENGIEFVETEESYTSKSSFLDRDLPPTFGEKPERWQPSGKRVTRGCYKDSTGRIVNADANAAANILRKVEIQLGISLVKVSRAALTLPSRLYIWNSKRKSGATRFLTRCEATS

SEQ ID NO: 23090 - protein, 489 aa, Dactylococcopsis sp.
MARKKTAKNQYTVTQVGYCVGGDTVKAREMARRAGRLRSDIWNKYGSLQAWGISHQKLYKAFQETNPPSFYKISQKQWQKTFERVIDDIHASQEAAKSIVIKKIYRKFRPEKDFHGKELEDTSFRKELLESLDTLEWMDYPLIHRWMRDAYHRGHTYVNNQICIGVDNGATIKRISRNLVKVTTQGEKIKSRKYEQLSLFFKVGRTTPKGLFQIIFDDFNNEVRLHYPKVLDKESSVKKGSCGLDKGYTEAFTDSNCLTYGEGIGKVMQTSVSKRHQRGKSRNKLYQIAKKKGNDKIFRSNLTKKRHNRREKRKKETLNTKIRAGINKFFDHYNHAITEDLSFVVKNKKQSKKVNRNLAEWCKGTLQKSLDEIATRRNCQVSVVNAAYTSQVDSRYGVLLGTRKGDQFFTFDGEVLSADGNAARNIEARLTDAKIPRYLKSIEVRKVLIKRTVSFLRERGYYLKDAINFGWFNSKHLKGITLEKAMALE

SEQ ID NO: 23091 - protein, 419 aa, Dactylococcopsis sp.
MLRATKVRIYPTKEQEQHLAKSFGCYRFLWNYSLNLTNETYKATGKGLNRFAIQKEIKKLKQEYEWLKEPYSQCLQLVALNLSRAFINFFEGRASFPNFKAKHRKQSITYPQNVSLVDNGLKFPKMGVVYVKIHKEIEGTIKSVTVSLNCQGHYYASILTEDGKEIPEQSGEGKAIGIDLGINHFAITSDGSKFENPKWLNKHEKNLKAKQKRLSRRQKGSSNRNKTRKQVARVHKKIADCRLDFHHKLSRRIVSENQVICVENLAVKNMVKNHNLAKAISQVGWGQFCTMLKYKAEWEGKVYQEIDRFFPSSKTCHVCLNQVRSLTLDVRNWQCEKCQTNHDRDINAAKNIKDEGLRILRVRNSGVSPECKTHSRQTSGTGVTASRLDVSRDSRGRKTSTVSHSIGEEAQSSVEDGFA

SEQ ID NO: 23092 - protein, 288 aa, Dactylococcopsis sp.
VEEKVATDLDYSQALGCDPGVNNLLTCVSTLGRSFIVDGHKIKGVNARYNKTVAKYKQGKSFDKFRQAQLPLRNTDFYWDEYLDELTHKRSCFMCDAVNKTARFIVNYCLNHRIGNIVFGWGQGVKTNCNLGSKNNQNFVQIPTARLKNRIKELAESVGINFTETEESYTSRSSFLDNDDLPVFGGEKPANWKASGKRVKRGLYQTRKGRLINADCNGAANILRKVSTQLGLTLAEVCRECLSVPKRYDVFSTLKKSYRKRFDCEIQSRFVATFGIHVFQNMENSTRD

SEQ ID NO: 23093 - protein, 418 aa, Dactylococcopsis sp.
MLTLNYQYRIYPDQSQEERLLEIMEVCRSAYNYALREIKDWCNSRKCSIDRCSLVSEYIIPVDAKFPSELTQLNQLPKAKKEFPNLKQVPSQVLQQTIKQLHRAWDFFRERGYGFPRFKKFGQFKSILFPQFKESPLLFPPYEGGLGGMWQINLPKIGKIRINVHRPIPDGFKVKQVRVIRKADRWYVSICIQLDVDVPDPQPHGHPLGVDIGLEKFLATSDGVLVKPPKFFKKMQSELKLLQRRLSRKQKRSKNYEKQRIKVARMHHKISNTRKDFHYKQAHALCDAGDMIFMEDLDYRITSQGMLGKEMLDGGFGQFRTITQQVCWKRGKYFDVVEARGSSQTCPNCGVHVKKDLSVRVHKCPECKYEADRDVAAASVLRNRGLNLVRRDSSERKQPATDGVSPQERSVGGLGNQS

SEQ ID NO: 23094 - protein, 461 aa, Dactylococcopsis sp.
MLVSYQFKLKPKLSQVAVMEQWLSMLRAHYNFCLRDRIESYEQVKSPKLGNYCDLDTEAECCPLTCSVSKNSNLGYPYKANGKKRNAYEQQSSELTNLKKTRPWYAEIHSTVLQQNLKRLEVAFKNFFEGRGYPRFKTKQKFKSFNYPPNQVQVKENKIYLPKIGWIRFFQSRHFPEGFALRSVTVRRKADGWYVSIRLENQDVPQCSPRTKEEINSVVGGDLGSNKLLALSNGEQIANPQFEKRLERTKTIRQRRASRKKRGSKNQKKAYQELARLDQKIVNQRTDYQWKIAHHLVGLADVIVLEDLNIQGMIKKCKPKPDEKGEYLKNGQSAKRALNRLIRDCAWGELKLKIQSVAEKFGCLVVEVNPKYTSQQCSACGHTDKQNRKGEKFACVECGYVQDADNQAAINIAKRGIEQLNLSLSKLLGVTQEVTANSEITEDTGNSEETSVSLETELELP

SEQ ID NO: 23095 - protein, 324 aa, Dactylococcopsis sp.
VKIETMKQVITAKLKLNLSTEQKTLLREVSLAYRDALNYVSQVAFDNNRTSSANKLQKLAYYDIRDHYNLPSQMACNVCRQVGATYRALWTKVKQNSQHRKRGKTKKRYKGLDKPPQFVSRTCNLNYGRDFSFVKEGISIITLQGRIKVSYSGYQKHLDLIKCGEAKAKGAKIHYSSSNKTYYLLVSLEIEKSDIQPTDIKRVSGVDVGQRYLAVETDTKNQASFYNGKSTIHRANHYQRRRKSLQRKGTRSAKRRLKKLSGRERRFRADINHQVSKKVAKSNSLIGLEDLTHIRERTNPRRKGKRASKKQKKANRKQTSWYAS

SEQ ID NO: 23096 - protein, 280 aa, Dactylococcopsis sp.
LSSNSFHPQIFGNKEQNPQNVEVREDCLKFPKLGEIKAVLHRPIKGSVKTVTISKNTCGEYYASILVEDGKEKPKPSSEGKAVGIDLGLNHYAITSDGNKFNNPRWMDKHEKNLKIKQQQLSRKQKGSHNRNKARHQVARVHKKVSNSREDFLHKLSRSLVDENQVICVENLAVKNMMKNHNLAKAISQVGWGQFCTMLKYKAEQDGKTYVEVDRFFPSSKTCNVCLNQVDSLPLDVRSWKCSNCGTEHDRDINAAKNIRDEGLRIIACGTRDDSLVRQG

SEQ ID NO: 23097 - protein, 421 aa, Dactylococcopsis sp.
MRVSYQYRLKPNKEQIAKIEKWLELLRCQYNYLLGQRFNWWETHRTAVNSCPLICHLPELSDRPTYFSQKQSLTQLKKDRPWYKEIQSQVLQDCVKRVDLSFQRWLRGDKKGKKSGKPRFKGKGRYRTILFPQVKADCVQDNHINLPKFGKIRFIKHRPIPEGFKVKTAQITRKADGYYLTLSLEDKNVPESTIDIVPTSENTLGIDMGLKDFLVTSEGEKVEIPQFYRKGRERLKKLQQKVSRRQKGSNRYLKAVKQLGKHHQKVARQRKDFHFNTIKLILSKGDVIAHEKLNIKGLARTRLSKSIYDAGWGTFLSRLAVKAENAGQLTIEVNPKNTSQNCSGCGEKVPKKLSERTHDCPHCGLTMCRDKNAAINIKNMAINIRNLAVGIPVSSKAQSRTEAKAGAAEKPHSYRIAIECG

SEQ ID NO: 23098 - protein, 244 aa, Dactylococcopsis sp.
VGKIRINVHRPIPEGFQVKQVRVIRKADRWYVSVCIQLDVNVPDPQPHGHALGVDIGLEKFLATSDGVLVKPPKFFKKMQSKLKLLQRRLSRKQKRSKNYEKQRIKVARMHHKISNTRKDFHYKQAHALCDAGDMIFLEDLDYRITAKGMLGKEMLDGGFGQFRTITQQVCWKRGKYFSVVDARGSSQTCPNCGVHVKKDLSVRVHNCPECSYEADRDVAAASVLKNRGIEKISTAGLVGKETA

SEQ ID NO: 23099 - protein, 250 aa, Dactylococcopsis sp.
VGLDYSQALGCDPGVNNLLTCVSTLGKSFIVDGHKIKGVNTKYNKTVAKYKQGNTDFYWDEYLDELTHKRSCFMRDAVNKTARFIINYCLNHRIGNIVFGWGQGIKTNCNLGSKNNQNFVQIPTARLKNRIKELAESVGIKFTETEESYTSRSSFLDNDCLPVFGGEKPANWKASGKRVKRGLYETRNGKLINADCNGAANILRKVSTQLGLGLAEVRRECLSVPKRYNVFSSLKKSYRKRGETYLQCVS

SEQ ID NO: 23100 - protein, 406 aa, unknown
  TnpB Polypeptide
MYLTRKFHIESTQQLERLSRSSADLWNSICTWYWRTVDRQDHWLSKTAMQRWHCKGHETLPSQTAQAVADQLYDAVGSWHDNDREGNPPKRCDKTHNVLRWKSQGVTLRDDGVLRLSTKRGEDSILINWPVDTEPRTVEVGKTSNGYVVRAQYDKEPVDRTTGDKVAGIDLGEKHLAGVATSEECFLINGGELRALRHYQNQLKAKLNAKIDRKERGSNRWKKLVKTKNQQLGHIDNKITDLLHKLSRKVVEMLLERRVSAIRIGDVRGIRDRINYGNQMNQRLHQWAYGEFARMIEYKAKLAGITAQKVDEAYTSQECPQCGHRQKPSGRGYVCSECSFHGHRDVVGAANIRRKYVGSDNEPTGSASRLPGVMASPSGVRFHPHLQCSSRSRRKTNGPTGPRQPV

SEQ ID NO: 23101 - protein, 404 aa, Microcoleus sp.
MQHQAVKVRLYPTTEQQEILSQHFGCSRWWWNHALNLCLETYKATGKGLTQVALNKFLPHLKKEKETEWLSECYSQVLQATELNLVTAYKNFFESRAKYPRFKAKKNRQSIQYPQSVKIVDSCFKFPGRVGIVKAKLHRPIEGKIKTVIVSMTPSGKYYASVLMESEGDNPAPSTDGKVAGIDLGLKDFAIVNDGIKTSKYPQPKNLAKHERNLKRKQQKLARKEKGSKPRTQARKLVARVHERVSNVRQDELHKLSRKLVDDNQVIVVENLHVKSMVRNHKLALAISDVGWGIFVNFLHYKLDREGKVLVEIDRWFPSSKLCSNCHYQVSEMPLDIRTWTCPSCCTHHDRDGNASINIRAEGIRMLSVLGTKPAADGGEVSPKQGRKSKLTQSPVKSEARAIA

SEQ ID NO: 23102 - protein, 328 aa, Streptomyces sp.
VIRAYKFLMRPTVGQTVALTAMLADHCSLYNGALQERRDAYRHVSKTSVKYGTQSAQLKEIRAFDPERQGRWSFSSQQVTLRRLDKAFAAFFRRVKSGETPGYPRFRGVNWFDTVEFPKDGDGCRWDSTPHDLVTRVRFQGVGHVKVHQHRAVIGRVKTVSVKREGRKWFVVLTAEQERPEPLPATSSSVGIDLGIANFLADSNGGFVPNPRHGRTNAAKLEAAQQTLSKFPRVRRDKRSANHRRAVEKVAKLHGKVRRQRLDHAHKTALALVREHGFIAHEDLKIRNMTKAPRRSTTPTIRASSCPTGPPRRPGSTARSLMPDGGCS

SEQ ID NO: 23103 - protein, 376 aa, Halococcus sp.
MNRNDDISSSFSEQNRLPDLKQWWTDLQQVNSKVLQKVVDRLYTARSNLKKKKDKGHDVGKLKWKGNGYYHSFEYNQSGFELKKTSGRDRLYLNKIGNVPVVAHRELPDDATMKGVVVKRETTGRWYASLQLETNESAPPKPDEPENVVGIDVGILKYAHDTDGHAVGSVDLSAEEERLEHEQRVLSRKEHGSNNHREQQQKVARRYADIKRKRRDFLHKLSTWYAKTYDLVAVEKLDAKGLLELPSNSHNRASAAWATFRKLLKWKCEREGTHFVAVEPAGTTKECARCGVSTDKPLWVREHSCPACGFEADRDENAAWNVLQRGLDKLNIGTGSAESTPAETVVPTATAFQLVAANHVAETGSPTLKREPSGER

SEQ ID NO: 23104 - protein, 362 aa, Vulcanisaeta sp.
MRAFRALLIKLPRDRCDVGYIERLMALANLAYRGFEVWEPDIPKTIQHHLYGFRNFKNSLIFGTSPKAWFARTWLPLKTRRVYADGAGEGDLNAPVVLDFVRGIIKIRLVCKPERDFVLELPMPGWVVERVNEGGDIKFAMIGLKDGEPYLALVAERVVKPYKPGDYKLVVDVNSWRYGIAWGLIHDGRIVSFRQERPDLGLLMTLYNEAVQLERKAGKLRRLNLDYAVLRKQAKARKRRLYAMTRDKAYFLAGKLVRKALRYGALLVIDDMTEESRRELLEEKLPRGVIKLLMANTRKFIKQLTTLAEWYGVPYEFKRLPSTICPICKHELTQLPGRTMACPNCGFKAPRDKVPMYWAMKG

SEQ ID NO: 23105 - protein, 360 aa, unknown
  TnpB Polypeptide
MKKTFQYRIKSNWLTYQKAEKWLSLCRQLYNDSLNERIIAYKENKKPISQYEQMKRLPQLKRVFPDFKQINSQTLQDVIQRLDKAYQGFFRRVKNKEKAGFPRFKGQNRYDSFTLKQTGWKLQDKYLEIKGVGRFKIFLSRLIEGDIKTITIRRDFTNQWFVSFSCKNVPQKLLSKTRKEIGIDVGCESFLTDSNGRKIDNPRFLKSSEDILVKRQQNLSQKTKGSNRRNKARLLVAKIHQKIFNQRKDFHFKTANKLVRENDKIYIERLKNWKTFKGLNKSMRDTAWFHFFNILSFKAAEAGKEVIKVSAENTSQMCSKCGQIIEKDLSVRIHRCPCGLEIDRDWNAALNILRLGQSLR

SEQ ID NO: 23106 - protein, 237 aa, unknown
  TnpB Polypeptide
LGIKDFIVQSDGKKFENIKVKRNNELKLAQLNRRLSRKKKDSNNRNKARIKLANFNEKLNNKKEYYLHCVANKLLNENQVIAIENLKVSNMMKNHNLARSIQELSLGRFKSILQYKSLWYDRSVVEIGILFPSSKICNECNYKNSSLKLKDREWACPQCGVIHDRDINAAINILNEGMRLHLLNNENKIKIGLSKSEFTSEENSSVDDPTSNGSLKSTYSKNQKDKIVKFVNVFYEG

SEQ ID NO: 23107 - protein, 453 aa, unknown
  TnpB Polypeptide
MSAWVDMLRSHYNWCLNDRIVQYNQQFIQGNYCNITTRGEASPLTCFVSKNGATGNPWKDSKSDKDGNTRNPRRSATDIQITALPELKKARPWYSGVDSTVLQQNVKRLDTAYKNFFEGRGFPKFKNRSNFTSFTCVMGVKIQANKIYLPKLGWMRFYNSRQIPNGFTIKACTVRKRQDGWHISLRIEDKSVPEYRVRPLEQVTKVIGCDLGITKLVHLSDGYQIKNPKISTAKKTKRILKVRQRRVSRKAKGSKKRQKAIKKVGRFHQKISNKRQSHQWKVANKIVSRNIDAIALEDLNISGMMRRCKVKTDEKTGRFLKNGQSRKKGLNRAISDAGWGDLILKIEYLAAKQGKVVIKVSPKYSSTECRSCGYIDKSNRDGEKFICVECGYHEHADIGAAKTIRDRALEIVRGDSAKLGVCHLNAQKISSRSKSKRDEFGNLSNKDIRAEMP

SEQ ID NO: 23108 - protein, 189 aa, unknown
  TnpB Polypeptide
MHATVKRKQKKLSRQRDKTTKSRRKAKLAVAKVHARIALCREDFRHKLSRKIVDENQIIVVENLAVKNMVKNHCLAKSISDAGWGMFCTMLKYKAEAFGKVYLEVGRFFPSSHLCSETLLSLPKMALSVREFNCPHCRKRHDRDINAAINIKNEGLRLLALGTSVIAIGGSVRPKQYGRKSTAALGCCL

SEQ ID NO: 23109 - protein, 255 aa, Streptomyces sp.
LTYPGVRRSNRPRSTSASSRPVRSSASQGDRSPGSVRWRAAAATNRSIQVEKEVAEVRRVHHQRVPHERRDRAALAKAQRRMAKKDKGSANRAKARRRIATIHARIADRRRDHLHKITTRLVRENQTLVIEDLTVRNMVRNRKLARAIRDAAWSEFRSMLEYKAQWCGREVIAVHRWFPSSRLCSACGTLQGKMPLNVRTWTCDCGTTHDRDVNAAINLLAAGRAVTACGAGVRPQRNSPGGQSAMKQEVSRREP

SEQ ID NO: 23110 - protein, 436 aa, unknown
  TnpB Polypeptide
MKRVKNETVVKAYSIPIQTDEIILEFIEEYHRMAKTALQEILNAEKFTKVERKQLRDKLLESWSYAAHYVDSAINQMLGLVNSYKRKLRKGKKTRKPKLRKKFIYVKSTLFTLKGSILRITIIPRKHYLKVNLANYSYILPFLKEVWSGRLKLGGLFLFPNKLVLNFVKTVEYFEPGDWMSIDINLTNVTALAGLTVYRFDTRELYHIHRVYELKRQKIQRISAWNKKLSGELLEKYSRRERNRTKDFLHKLANKIVEIARERRMGIILEDLNGIKERLNGSKGLNRKLSKWNARELQRLIEYKAKWFGVPIVYINPRNSSRVCPACGGRLIPQEGRLMKCSCGFIEDRDFIAVFNLRMWGVRGSPERVGGSAEGPMKTKPYGIMAVEKQRIGLKFHEITLTPRRENPHHVHNPVHLKCAARRKTSCEAFNTNCIS

SEQ ID NO: 23111 - protein, 383 aa, unknown
  TnpB Polypeptide
VKLRYNERIYPTAEQQRTLARFFGCARVVYNDGLRARQAAWNNSEPYISDVSLQKMVITAAKKTEERAWLKEAPSVALVQSLGDLHAAYRNFFASKRGLRQGPKIKPPKLKKKTGRQAIRLTRNGFTLRENGKLFIAKLGDIQVRWSRPLPSEPSSVTVIKDAAGRYFASFVVEAEDEPLPELDWEETDTGIDVGLSCYAVLRGRKIASPKFFRRQEKKLRHAQRKLARCQKGSNNRRKAKLAVAKIHAKIADKRRDFIEQETTRIVRESQAVYLEDLNVKGMGSAKGKRGKSVYDQSLGTFARALEAKCARYGRGFVKVDRWFPSTQLCSACNALTGPKGVAQLGVRRWVCACGAEHDRDENAEINLRAEGRRLLAAGPAER

SEQ ID NO: 23112 - protein, 368 aa, unknown
  TnpB Polypeptide
MDNEKVGKYDLNKYCAVLAAEFSFADELNSMARQAAAERAWAAIARFYGNCKKFVKGNIGFPKFKKHTRSVEYKTSGWKLSKNRKAITFSDKKAIGTLKLKGTYDLNYYDIKQIKRVRLVRRADGYYAQFAVDVKLRIETEPTGQAIGLDLGLKFFIADNKGNTEPCPQFYRSSERQLNRANRQKSKKFVKGAKPQSKNYHKARQRYARKHLRVSRQRKEYCKRVAYSVIQSNDLVAYEDLNVQGLVKNRHLAKSISDAGWSTFRQWLEYFGFKYGKVTIAVPPHNTSQNCSHCGQKVKKSLSTRTHVCPHCGFIEDRDVNAAINILRLALSTLGHSGNYAWGDLPSWAVGAIQSFNGESVNQESNAL

SEQ ID NO: 23113 - protein, 437 aa, Streptomyces sp.
VSGPGGRAGAAELSKALITRAKTMPERAWLSEVSAVVLQQALRDVERAYTNFFSSLKGARQGARVGAPRFKSKRDARQTIRFTANARWKITEAGRLLLPKIGQVRVKWSRTLPSVPSSVTVIRDAAGRFFASFVVETDPNADLARMPGADDLPSVGIDLGLTLPQALNSVRAGGTPIAVLSDGTKIDSPRFLRRAEKKLKKTQKELSRKQKGSRNREKARLRVARAHAQVVDARREFHHQLSTQLIRENQAVAVEDLAVKGLARSRLGKSVHDAGWASFLAMLEYKAQRYGRAFVKVGRFEPTSQVCSVCGIKDGPKPLHVREWTCTYCGARHDRDHNAAKNVKQAAGLAVTACRAQVRPEPKVPAQREEAGSHGIRSGAVPLCGTAPDRKAGILGLQPEEQVTSSSERERSMAPSRPTTSTARSPSSPDCTLYRSR

SEQ ID NO: 23114 - protein, 229 aa, unknown
  TnpB Polypeptide
VDLGINTDAVCTIMRSDGTVLGRKFINFPSEKDRMYRVLGRIRRFQREHSSVQAGGRWEYASRLNAELARKIAGAVSAYAEEHHSDVIVFEYLEMQGKIAGNKKQKLHLWRKRDIQKRCEHQAHRKGMRVSRICAWNTSRLAYDGSGAVLRDGKNHSLCSFSTGKRYHCDLSASYNIGARYFIRELLKPLPATERSLLEAKVPSVKRRTSCVYADLRELHLQMEILKAV

SEQ ID NO: 23115 - protein, 379 aa, unknown
  TnpB Polypeptide
MYRVYRFRLYPSRTQESLMRTHLWAAKRLWNNTLQLTKQLYVDFSKFPTRRTLAQLSKGSGLYSQVAQQVLVRLTLALKAVVRRKTAGGKAGFPRFKKSDRMKSLCYPQFGFQLVEKALRVTPFGEINIKRHRPIGGVIKSLSLKRESSGKWFAIFTVELPNVEFKSNGNPSVGIDVGLKSFATMSNGLKIKNPRLFESAQERLAVAQRQLSKKSRCGKNRGNAKRKVALIHEKVTNKRNDFLHKFSRKLVGEYGLIALEKLDVIGLIRKNFGKQISDVSWGKFSDMISYKAAEAGCQVVFVEPKGTTKQCSACGHFKEMPLAERTYVCGVCGLVEDRDLNAAKNVLAKATAGIAGSNACGVGSIISTAKQETRSEMTG

SEQ ID NO: 23116 - protein, 383 aa, unknown
  TnpB Polypeptide
MLTPNNKQNTLMFQSAGVKRWAFNWALGREQENYKLGGKFISDNDLRKELTQLKKTEEYSWLNNTSNNVTKQAIKDACIAYSRFFKGQAKFPKFKSKKKSSPKFYQDNCAIQFTATHVKFEGFSKSKKQNKQKLNWVRLAEQDRIPFGENVKYINPRISHDGLHWFISVGIEFEDNIETPHNIGIGIDLGLKDLAICSDEIIYNNINKTKKMKKLEKKKKRLQRQVSRKYENNKDGLKFKKTKNIIKLEKKIKQTQHKLNGVRDNYTHQTTSEIIKRKPSFISLEDLNVSGMMKNRHLSKAIQQQNFYEIRRQLQYKSNWNNTELRIVDRWYPSSKTCHDCGYINKDLVLSDREWICPSCNGLVNRDYNAALNLRDTEKYKLA

SEQ ID NO: 23117 - protein, 476 aa, unknown
  TnpB Polypeptide
MLENRADASKKNFTIETRLKWNPDVMAYFKSDIKKQSKLFRIVWKLVQTSGLKQSKLNTYLQNKNHIDKRTANTLIQSAKGRLSALKALKDTELADLRNKIGAIEKRIDELKVLVADDKELVKDNILKGYRLIKYRRNKQELWQKTQKLNRLRQKASKIERGLKEPVLPLCWGGKKAFKAQYNLGENGFKTHEAWRNWYRLKRDGQINFVGSIGEPQGNQNSQLNFDGGTGYFSLKVRKDLELMADANDKFFVLDKLEFKYQRDKLIETVKNDKTPLAARVLRRGNKWYLQIIFTWEAADIQTNRLYGAIGLDYNVGFIELSETDYYGNLVYQEHVGLEKHGSGNKAKSEIQEKVSAIVKQALNKKKPIAVEDLNFKKKKAGRLPGAGKRYNAILHAIDYSRYKDVLENAAFRNNVGLIYVDPAYTSKIGVKKYQEKKKLNRHQAASYVIARKGQGYIDKWQSNTKNKDSKKHKAL

SEQ ID NO: 23118 - protein, 478 aa, unknown
  TnpB Polypeptide
VDRSTYGEFPANLQELPDNGADDRFARGVKERDTESGGNEIPYSFPQKPGATATMSIKAYKYRIYANKSTTEKLQWVLDRCRELYNAGLQEHRDAYEMGVRRHPGYYDEETRRQLTREHAVGYYEQKRELVDIKELRPEYQDIASHMLQDVIMRLKRAYDDFFRRVQNGEQPGYPRFQGRNRYDSFCYPDGAGWKLEAKERPADKKGIIRVNLKLTKIGTVKLHLHRSMSGTIKTLTIKREGEHWYAVFTCEVGKPEPLPTSYEDVGIDLGVTHFAALSNGEFIDHPRYFRKAEKKLAKAQQTLSRKKRGSHRRKKAVQQVTKCHRKIANQRKDFQHKASHKLVNQYQVIVLEDLQVKNLTKAPAPKQDEETGKYLPNGASAKAGLNKSILDAGWSTFTQMVSVKAAWAGRTVVFVDPSKTSQICPNCGTIRKKTLDERWHSCDCGCEMDRDTASAKVILDLGHKALSVGTRPTSATA

SEQ ID NO: 23119 - protein, 391 aa, unknown
  TnpB Polypeptide
MTQRAYQYRFYPTPEQVHNLACTFGCCRFMYNWALQLRTIAYFQHGTRLYPNDLSQALTALKKQEGTAWLQEVSSVPLQQSLRHLDKAFVNFFEHRAEYPTYHKKHKKQSATYAATAFAWNRSRLTLAKQKESLAIVWSRPLPDGAKPSSVTVTKDKAGRYFISILIEEQIATLPMTDKTVGIDLGLKSFLITSDGETLANPKYYARSEKKLARLQRKHAKKKRGSKNREKARKKVANLHARIADTRKDFQQQVSTRLIRENQVICLETLAVKNMLNNHCVAKALADVGWSEFVRQLEYKAKWYGRTIVKIDRWYASSKTCSACDFVMEDMPLEVRAWACPECGVCHDRDVNAACNIKSEGLSAVNAYGGHVRRDRRKSGHAVPIEVGRSL

SEQ ID NO: 23120 - protein, 442 aa, Blautia sp.
MQTVSSYGVEVRKQNIPIRQTLELYRSAVSCLTEIYEQVWEELEEIPDAKRRFNAAEHLVHTTKKNSARFDFDLRFPKMPSYLRRAAIQHALGSVSSYKTRMDLWTKSGEKTGMPKLVYENHAMPVFYRDVMYREGAEGKEEAYLKLYDGHDWKWFCVRLNHTDMEYLRKNWSGKKASAPILEKRHHKYFLRFSYTEEITLTKTPVKEQIICSVDLGINTDAVCTIMRADGTVLGRKFIDHPSEKDRMYRTLGRIRKFQREHGSAQSRGRWAYTKRLNIELGKKIAGAIVRYAEENYADVIVFEYLEMQGKISGKKKQKLHLWRKRDIQKRCEHQAHRKGMRVSRVCAWNTSRLAYDGSGSVSRDLKNHSLCVFQTGKRYNCDLSASYNIGARYFIRELLKPLPATERSLLEAKVPPVKRRTSSVYADLRELHLQMETLKAA

SEQ ID NO: 23121 - protein, 595 aa, Oscillatoriales sp.
MSRREKLAKCCKSQRKLLETGSLPTKYQQSEPPPTNDARTLTAFSEQDTTELSPSTQESVATNNENTSNDKSATSKISTRKPKSLKTSGVDSTSKEKHCLPFWDKSCQEISQQLWLDTKTDSQGLVATSSNGSASKTIANSWFSVETSCLVNEKWLNISLPSSTSLVAESTPGVNTNLLSKKIRVYPETKLAAKWRTWIAASRWCYNQAIAILKTEKIGKYDLRKKIMDSAPIWVSEQPYNPRQMAVFQAFEAHKAAKKSKGIAKFRSRFDRSQTIRFQVSNWKSGTFYPQATKGLSFKVSEPIADVMEHEPTLSLINGQWFICYAVDTAKPLQNESSLAIALDPGVRTFLTGFDGSDILEVGKNDIGRIYRLARHLDKLMSRIGLHKGGQFKRLRYCLRKSATQIRIQIKNLVNELHKKAAKYLVTKYKIIFLPTFETQQMVKKGKRKLATKTARALVTLSHYRFKQMLKHQASKSGCIVVDVTEEYTSKTCSKCGHIHTKLGGSKKFKCPECGHTLDRDVNGAFNILLKALRDTSLTGELAAFTRLAIHSKFGLSPRFTGLNVSVNIGRKSKQNGFTGLSRGCLTQPLRVKIS

SEQ ID NO: 23122 - protein, 170 aa, Clostridiaceae sp.
  misc_feature (9)..(12): Xaa can be any naturally occurring amino acid
  misc_feature (109)..(112): Xaa can be any naturally occurring amino acid
MTRYITNYXXXXRCITNYCVKNDIHTVVIGDIKGIRKERNLGRKTNQKLHSLPYARIYMQLEYKLKMKGICLIRQEESYSSQCPPQSEKVSHIYAEKRNRKKAWHLHCXXXXAEKRNRKKRGIYIVDTVIYNADAVGAYNILRKYHAVSGKEIDMPVTGLSSTKTIKVAV

SEQ ID NO: 23123 - protein, 422 aa, Brevibacillus sp.
MFFSTYNSFHKLSNGSYVIVNSLSGAIDTIEPDVKKVLDQIKSKTQCDSNAELDNLLSYLFKRGYLFESREQEWEKLIKLRDEMNAQLQASSLGVVFSVCTTYMCNLRCPYCFQGHDIHKINHSLSQEEMDNMFFAIDRILETEKARGRFQNAQHTMLLYGGEPLLPTSKKTVHEVVRRGIEEYGFRSYAITNGTFLHEFLDFFEQYKSMWDFFQISIDGPKHIHDQRRVTAGGQGTFDKIVSNIDLALTRGFKIALRAKYKHLRKQLQMRQTASSRRRLKKIGQRENRWMTDVNHTVSKALVEGYGAKTLFVVEDLTGVRNATERVRVKNRYEYVSWAFYQLRQMIEYKALMHQSKVMAVDPRYTSQTCPKCGHTKKANRNKKMHVFCCKACHYTSNDDRIGAMNLQRKGIEYIVEVTTGA

SEQ ID NO: 23124 - protein, 368 aa, unknown
  TnpB Polypeptide
MNKAVKYRLYPTTEQKIMFVKTFGCCRKVYNLMLADKIACYKKTKSFGKQTPAMYKAEYPFLKEVDSLALANVQLNLQSALKNCFDKSRKRQNGFPKFKSAKHSRKSYTTNNQKGTVAIIDDRYIKLPKIGKIKAVIHRKPDADWTIKSATISQDSDGKFYVSILFEYEKAITPAIISDNAVGIDYKSDGLYMDSNGYCPFGHKYYRQNQEKLAQAQRKLKHMAIGSNNYKKQQCKIAKIQKHTSNQRLDFLHKESTKITNLYDIVCVETLDMKAMSNKAFGNGKATMDNGYGMFLNMLEYKLANRGKYFVKVDKWYPSSQLCSCCGKQKKLTLADRIYKCDCGLTINRDHNAAINIKNEGLRILKSA

SEQ ID NO: 23125 - protein, 528 aa, unknown
  TnpB Polypeptide
MRFIKFFMGGGDMECVRRAVAVEVESPPPELSAVEEPYRRIVEEVAAYVAERGRLEVERYKELYRRFRDKYPLPAQLIQQAMNQGVETGKSFLEAKRSGRVYKPRPEVRRVSIRFARESWSYKKVVGSAAPVKLALSLPGGRREVWIKPHRRFWLYWWRVLRKEAELASMLMLKRRRGRWYAVFIFDVAPRKEPPAEAVAFDVNENLVAVARVSLLSTVDAVARWNRQYINPAVYSIRTDFGRLAKRYETVRNAKLEELKRKYPFVGRDEDERRQNVADTREFRRFARRLRERGRKEGRVRQIASEVTKSPAVIITEELGKNPQEEMIGIEEKRVKKRELRHRVKQTPFRKILRAVEDKARETGSVVFYVSSFRNSKVCPIHFAKLEDGGDWHVLRCLHGHVVDRDAAAVLNMLWKITPEGVVKGVWWDVKEARKRLKKGIMPKDVAKKRNPLVPWPVAYAVWTSLKTLKASPQWPAVLARAAPMTPAQGADEGGTRAPPHGAPAPRGGGQLDHGRNWGRNGRNKTRS

SEQ ID NO: 23126 - protein, 410 aa, unknown
  TnpB Polypeptide
MSSGRITKAYVYRLYPTSPQTDRLTEMLAAHCEMYNAALQERCDAYRIRRVTVKATAQMAQLTAIRRARSDQAAWSFTSQQQTLRRLDKAFVAFFRRVKAGETPGYPRFRSARRFDSVDFRHGDGIKFDSSKSTPGHATLRVQGVGTVKVRMHRPLPDGARLGQVTVKRQGRRWYVVLPVEADAVRLPATGRTIGGDLGVKHLVTLSEPVLGLTDRDGHIEHPRHLRRAAGKLADAQRQLARKRRGSNRRRKAVARVAELHGKVQRARLDTAHKTARALVASADVLVFEDLRTANLVRRPKPIPDPAQPGRFLPNRAAQKSGLNKSILDAGWGVLISLVQSKAEEAARTVVLVNPAYTSRTCSGCGHVLASLTLADREHACSACGQVTDRDVNAAINILRAGTARLQASA

SEQ ID NO: 23127 - protein, 445 aa, unknown
  TnpB Polypeptide
MDMNAELMTKAERIKSTLRETKERRKTQRVFVYQLKLQNLSKRKIALLERAFLEAKWFYNWLVSDTDRLDMFVYKVREVEVKVGDHYEQRKLTVLGSQIKRAIADRIKNNLRSLGRLKKNGRSVGALKHKSFVNSIPLVQYGRTHKLDFERKRVRVQILGTFRVLGLHQIPKDAEIANAVLVRKPSGYYLHVTCYRSKDRCVSADKIGDAVGVDFGISSKLTLSNGIKIDFEIRESLRLKRLQRKLSRKRVGSKNRERVRFLLNKEHEKLERRRRDAQNKVLAFLNHYGKVVFQDDYVKGWSSLWGGFVHSSGIGGLKSRLRHSLETAIPVERMVTITRECFACGLRHDLSLSDRVIVCECGWECDRDVNAALVILRKGLRLSLDQAVGLGRSELTPLESETAARVLGSNPHIRVSFLDEGGSLLLGSRRRSSAIGRRNDVNYEL

SEQ ID NO: 23128 - protein, 330 aa, Exiguobacterium sp.
LLEDRIAIREEAKAGNGTRQKPATPASYKPLFPFLAEADSLALANAKLNLDTAFAKFFAGTGGFPVFKSRRRSRASYTTNNQHGTIRIENGKVRLPKIGFVKFTEHRSFEGVIRSATISVTKTSNSFISILVEQDDAPWIPAENKVGIDLGLEHFAVMTNDAMVSEKIENPRFLRQSEAKVKKVQRALLRKKIWNKNREKAKLLLAKKHEKIANQRKDFLHKLSRRIVDENQVIVVETLKSKDMMQNHKVAKSITDVSWYEFIRQLEYKSNFYGRTLIKADPWYASTQICSTCGVKGEKKTMDVREWTCACGAHHDRDINASINLLMLTN

SEQ ID NO: 23129 - protein, 374 aa, Enterococcus sp.
MKVLKAYKYRLYPTSVQEEFIKKTFSCVRLVYNLLLQERVQLYKELKENPDLKVKLPTPAQYKKEHPCLKEVDSLALSNAQVYLDRAFKKFYREKSVGFPKLKQKKDSVSSYTTNNQNGTVKIIDEKYLKVPKLKSLLKMKMHRPVIGKIKSVTISLTKSNKYFVSILCEEEIPIIEKTHSAIGITLGASEFAVLSNGNRIDNDKYTKEFEQRITREERKLQRRKEIAKVKGTDLSQQKNYQKQKLKVAKMREKLMNQRVDFLNKITTEIIRKYDLICIEDIHQADVYRNNKLYRGVSDVSWALFVSKLEYKASWYNKRLIKVSACGKCSEHSDNTQVSQMFTQDINEQKGLHDPETAASIQVLIKGLKETTRK

SEQ ID NO: 23130 - protein, 456 aa, Planococcus sp.
MAMNEQEGGIVMAADKKGRHIKGTKKQLPDGWITGAFRYAIFPTDEQKQCLEMAFGCERKVYNEYVAGLYDHLEAVGFSGGFLTYRVPNYTTITQRYDFLDRSTDSFVYNDAKIRFQAAIKKYNETYGTRPLHYKKSVQKKMKAGYVPSLQDVKGLPKFHSKKQGGFSYTTNQTNGNIRIEPRDGATFLRIPKFPEGIPVRLHRELPADGLVKKVTLKREGTRYLASISVDYPFEKAPLKETVLAANMTALDYSQSGLYVDSDGKKAGYPRFHELIGKRQRRLNKSLARMKERAMKDENGQPVYSKNYRQTVVHYQKTMAKAANQRNDFLHKRSHQITNDYDAIVVEDLDLTNLAQCLKLGKKLHDNGFGMFRGMLKYKAERKGKHYIVADRFFPSSKLCSACGHKKERLRLSERTYACESCHAELDRDHNAALNLKNYGIHALLDTGFLADPVSN

SEQ ID NO: 23131 - protein, 358 aa, Planococcus sp.
MPTLTMKLELMKPTRHKQAIYRQMTELNTRFANWLLGYEELARATSAHFRKFSDEKLPSAIVNQTIREVTSKKKNQKAKIFRRQWCVYNNQNFRIEHENGQYKVSFPTQEKRVGVPVVAKAHQLKRLELALSEGANIGTAMLHEKKGKWFVSVSFAFATPKPAETAKKMMGIDVGLDFLAVGSIGTHACFFSGREVAFHRRRHAARRKQLGKAKKLNAIRKSKGKEAQWMKEMNHLISRRLVDFAVANGVRTLRMEDLTGIRHSAKSKKEAGRNLHSWAHYQLQEFIAYKAAMAGIQVEYVKPDYTSQTCKCGHAEKANRKRHVFRCRTCGYQLHADLNAAINIAKAISGLSATKKAG

SEQ ID NO: 23132 - protein, 452 aa, Planococcus sp.
MGKGGGGMATDKNGNHIKGTKKQLPDGWVTGAFHFAVFPTDEQKPRLERAFGCERKVYNEYVAGLYAHLESIGFSGGFLAYNVPNYTTITSRFDFLDRSNDSFVYNDAKIRFQAAIKKYNETYAKRPLQYKKSVRKKMKTGDMPSLQDVKGLPKFHSRKQGKFSYTTNQTNGNIRIGEKGGATFLRIPKFPEGLRLNLHRALPSDGIIKKATIKREGTRYIVSISVDYPFEKAPLKTHVAAAAVTALDYSQSDLYIDSEGRKAEYPCFHKLIEKRQRRLNKSLARKKTHAPLDENGQPVYSKNYQRTVTNYQKTMAKAANQRKDFLHKKSDQITNDYDAIVVEDLDLTNLAQCLKLGKKLHDNGFGMFRTMLKYKAERKGKHYIVADRFFPSSKLCSACGTKKENLRLSERTYTCAHCQAMIDRDHNAALNLKNYGIRTLSDLGFLADPVSS

SEQ ID NO: 23133 - protein, 349 aa, Planococcus sp.
VYNDAKIRFQAAIKKYNETYGKRPLQYKKSVQKKMKAGYVPSLRDVKGLPKFHSKKQGGFSYTTNQTNGNIRIESRDGATFLRIPKFPEGIPVRLHRKLPADGLVKKVTLKREGTRYLASISVDYPFEKAPLKETVLAANMTALDYSQSGLYVDSDGKKAGYPRFHELIGKRQRRLNKSLARKKERAMKDENGQPVYSKNYRQTVVHYQKTMAKAANQRNDFLHKRSHQITNDYDAIVVEDLDLTNLAQCLKLGKKLHDNGFGMFRSMLKYKAERKGKHYIVADRFFPSSKLCSACGHKKERLRLSERTYACESCHAELDRDHNAALNLKNYGIHALLDTGFLADPVSN

SEQ ID NO: 23134 - protein, 454 aa, Planococcus sp.
MNEQEGGIVMAADKKGSHIKGTKKQLPDGWITGAFRYAIFPTDEQKQRLEMAFGCERKIYNEYVAGLVEHLTSIEFSGGFLTYKVPNYTTITNRFDFLDKSNDAFVYNDAKIRFQAAIKKYNETYGKRPLHYKKSVQKKMKAGYVPSLRDVKGLPKFHSKKQGGFSYTTNQTNGNIRIESRDGATFLRIPKFPEGIPVRLHRELPADGLIKKATIKREGDRYIVAISVDYPFEKLQLVEKVATSKITALDYSQSDLYMDSEGQKAEYPRFHELIGKRQRRLNKSLARMKERAMKDENGQPVYSKNYRQTVVHYQKTMAKAANQRNDFLHKRSHQITNDYDAIVVEDLDLSNLAQCLKLGKKLHDNGFGMFRNMLKYKAERKGKHYIVADRFFPSSKLCSACGTKKENLRLSERTYTCAHCQAVIDRDHNAALNLKNYGIRKLSNLGFLAAPVSS

SEQ ID NO: 23135 - protein, 315 aa, Planococcus sp.
MKAGYVPSLRDVKGLPKFHSKKQGRFSYTTNQTNGNIRIESRDGVTFLRIPKFPEGIPVRLHRELPADGLIKKATIKREGDRYIVAISVDYPFEKLQLVEKVATSKITALDYSQSDLYMDSEGQKAEYPRFHRLIEKRQRRQNKSLARKKERAPKDKDGNPIDSKNYQKALKNYQKTMAKAVNQRKDFLHKKSDQITNDYDAIVVEDLDLSNLAQCLKLGKKLHDNGFGMFRNMLKYKAERKGKHYIVADRFFPSSKLCSACGTKKENLRLSERTYTCAHCQAVIDRDHNAALNLKNYGVHTLSDLGFLAEPASV

SEQ ID NO: 23136 - protein, 452 aa, Planococcus sp.
MGKGGGGMATDKNGHHIKGTKKQLPGGWVTGAFRFAIFPTDEQKQRLEMAFGCERKIYNEYVAGLYEHLEAISFSGGFLAYKVPNYTTITQRYDFLDRSTDSFVYNDAKIRFQAAIKKYNETYGKRPLQYKKSVRQKMTDGYAPSLQDVEGLPKFHSKKQGRFSYTTNQTNGNIRIESRDGVTFLRIPKFAEGVSIRLHRALPADGLIKKATIKREGDRYIVAISVDYPFEKLQLVEKVATSKITALDYSQSDLYMDSEGQKAEYPRFHRLIEKRQRRQNKSLARKKERAPKDKDGNPIDSKNYQKALKNYQKTMAKAVNQRKDFLHKKSDQITNDYDAIVVEDLDLSNLAQCLKLGKKLHDNGFGMFRNMLKYKAERKGKHYIVADRFFPSSKLCSACGTKKENLRLSERTYACAHCQAMIDWDHNAALNLKNYGIRTLSDLGFLAAPVSS

SEQ ID NO: 23137 - protein, 445 aa, Planococcus sp.
VGDESASGKGCLSTRQLSDVYPSILSPLLENADDWLKFKIMAIMEVKIIQKGEVKTMVRHKAFKYRIYPTKTQEVLIAKTIGCSRFVFNHFLDKWNSAFKETGKGLSYENCSTQLTQLKKEIEWLKEVDSTSLQSALRNLDDSFKRFFKKQNKLPRFKSKKNAVQSYTTKHTNGNIAIVGNKLKLPKLGLVKLAKSQEIDGRIISATVSRKASGNYFVSVLAEVEIQPHAKTHSAIGVDVGLKDFAVLSNGTVYGNPKYLRRMEKKLAKEQKILSRRMRLALDRKQPLAEAKNYQKQKKKVARIHEKITNCRTDALHKISSEIVKNHDIIGIEDLQVSNMLKNRHLSKAISEVSWSTFRSMLEYKAEWYGKQVVVVAKNFASSQLCSACGHQHKDVKNLALREWECPSCKAHHDRDVNAGMNLRNEAIRLVTAGTAGDSLINFCP

SEQ ID NO: 23138 - protein, 378 aa, Planococcus sp.
MKKGEQFDHYGVKVRLQLNEDQLIQVKKTFVCRRFLYNHLLDKRSKAWGRRNESLNLKKQKEFLKNMKQAFPWLKEVDKFALENAVFDLDRAYQNFFEKRANYPVFKSKHKKQSYKTNQTNNNIVLSADFKQVKLPKLGWVACAGSENVLQRAKKQNHRISSATISEKAGVITCSLLFEKAKTQAAHPKTGQVGIDMGLTYLFIDSNGHKEPNPRYYGKAQKRLAKLQRKLASQQKSSHRYGKTKRKIAKLHVLIANQRKDLHHKLAKRITDDNQVVCVENLHIRGMVKNKRLAKHIQDAAWYQFRRFLTYKAERKGGQVLLVDRWTATSRVCSHCGKKKTLLNLNERKWICAACRTEHDRDINAAANILREGLKQIG

SEQ ID NO: 23139 - protein, 333 aa, Planococcus sp.
VNECVGRLHNGEKLSSANVTADLKSAIRNEAIRRARKAVADFKNGAAKKLPTFRSSLGISINNQNWNSVEKNGRWHIAFTSNTGKKALPVHESADVKTFFPFLTKDNREFRGTMALLRKGRDWYAAIPIQTSSDLQDKTIIEADCTSVGVDLGLRHVAVLSEPISGKRQFFSGKEIGYIRRHFRSLRRSLGQKKAPRAIERTGKKESRWMNDYNRKLANDIVDFARQFDSPLIKLEQLDAIRTTCRSQKRADRTIHSWAFYQLKQFIKERAAKFGIPVVDIDPYQTSQACFRCGHAEKANRQKEKFSCRQCGHTNHADLNAAANIAARTSLAV

SEQ ID NO: 23140 - protein, 370 aa, Halomonas sp.
MQTERAFKYRFYPTPEQEALLARTFGCVRFVWNAVLRYRTDAFYERQEKIGYNDASAFLTQLKKQPDTAFLAEVSSVPLQQCLRHQQSAFKNFLAKRAKYPRFKSKKQRQSATFASSAFSYRNGQITLAKCSEPLNIRWSRELPSAPSTVVVSKDRAGRHFISCLCKVETEALPITPKMVGIDLGLKDLLVTSDGTKVNNPRHTARYARKLARAQRQLSRKQKGSNNRAKAKQKVARCHAKIADTRLDHLHKLTRQIVNENQVICLESLAVKNMVRNRHLAKAISDAGWGELARQLHYKAEWAGRQCVQIDRWYPSSKRCHDCGYVLESLPLDVRTWGCPGCGAQGVDRDVNAARNILQAGTALLAGAGY

SEQ ID NO: 23141 - protein, 388 aa, Bacillus sp.
MFAYKVEIEPVKKQIGKIHQGIGVCRFLYNAYIKHNEEVYKRDGKFVSHMEFAKYVNHTLRADKPWINTCHSKARKKALANAETAFLKFFKGKAKYPKLKKKGKQDVKIYLPRNNEKDFVIERHRAKIPFLGWVRLKEKGFVPQGTDISSCTISQKGDRYFISFLVKSDRKETKQTLSKKGIGIDVGLKNFATISDGNVFGNINRSRKVRRLEVTLKRAQRSLSRKLESYKVRKKQNKIHPSEYGANIKKSIVRIQNLHRRLANIRWSYTKSVVNEVVKTKPLYITIEDINVRGMMQNKHLSRVIANQNFYRFKVWLEQACRKSNIELRMVDRFYPSSKLCSNCGTKKTKLSLSERTFVCEHCGTNLDRDYNASLNLENAAQYKVLVG

SEQ ID NO: 23142 - protein, 380 aa, unknown
  TnpB Polypeptide
MQATYRYHLYPTKSQKRLLEATVETCRRWYNTCLEERKSAWDERQESVGKYAQLRKVKDHRRDNPYAAQLHSHILQVTTCDLDKAFQAFFRRAKAGEKPGYPRFRGRDRFDSFGLKEYGNGFRLDGRRLKVTGIGRIAVRWHRPVRGEIKTLRIRRQAGVWYASFSCDAQPEFLPSTGAEVGIDVGIASLLTTSDGEHTENPRWYRSEQASLRVLQRRVARRKLGGTNRRKAVGAVIRQHEHVANCRTDFLKKLVYNLVSRYDRIAVEDLQIPNMVQNPHLAKSILDAGWGYFRKHLSFKAAWAGKTVAAVAPAYTSKTCSACGTTFESLTLAERWVRCDCGLSLDRDENAALNLLALGRSAWGVTWPIAASVPQEAAGL

SEQ ID NO: 23143 - protein, 402 aa, unknown
  TnpB Polypeptide
VKRLQAFKFQLRPGGQQEREMRRFAGACRFVFNRALARQNENHEAGNKYIPYGKMASWLVEWKNATETQWLKDSPSQPLQQSLKDLERAYKNFFRKRAAFPRFKKRGQNDAFRYPQGVKLDQENSRIFLPKLGWMRYRNSRQVTGVVKNVTVSQSCGKWYISIQTESEVSTPVHPSASMVGLDAGVAKLATLSDGTVFEPVNSFQKNQKTLARLQRQLSRKVKFSNNWQKQKRKIQRLHSCIANIRRDYLHKVTTAVSKNHAMIVIEDLKVSNMSKSAAGTVSQPGRNVRAKSGLNRPILDQGWYEMRRQLEYKQLWRGGQVLAVPPAYTSQRCACCGHTAKENRLSQSKFRCQVCGYTANADVNGARNILAAGHAVLACGEMVQSGRSLKQEPTEMIQATA

SEQ ID NO: 23144 - protein, 394 aa, Kribbella sp.
MSRFRMYPTPSQQAALLEQCGHARYLWNLALEQWSMWTRDKGATPGYLEQARQLTEARAMFGWLRAGSQTVQQQALRDFDQAVKNFYAGTHRRPTWRRAGLHEGFRIVGSQASRIVRLNRKWAAANVPKVGWVRFRLSRAVPDAKSYRVTRDRVGRWHLAFAVIPPPIPAPGTGEVVGVDRGITVSAALSTGELLSCPGLSARERERLKHLQRRLARCRRGSNRRRRVKAAIAKLSARAGDRRKDWVEKTSTDLARRFDVIRVEDLRIAQMTRRPRPKPDPDRPGRYLPNRRRAKAGLNRGILANGWGALVTCSEHKAAGRVEKVNPAYTSQTCSVCRHCVPENRESQAVFRCVACGHQANADVNIAAGRAVSARRETPVRVSPKREPQHATST

SEQ ID NO: 23145 - protein, 1129 aa, unknown
  TnpB Polypeptide
LVSLIDDRGRRLDLPDAKYLSGCSTQHDSAAEVKKCVGKEALRQVVIAPKTGLEAFIAKRVLPLLEEMSPLPPEQSEGRPRQSLDEWIASRSPVKVLDQLPNECLEEARRYTSDEETVQAFARFLQERGECAVNGPELPIKQANASLFDADGMDQPSGAFHFLEDGVDSTPKRGRTRFEAAARRGPGGEPLTTVVRTRKFGLRPLNNAPIIPPHGGMDPESSLFQQFQVLVNALIRAGDQLDDTMFKRDSLMAVKKPFLTAVWDTPIMQAYRQQHAQFSSRWYRCGAQFAYFIVRGHRQQTRLMRHLAGELQKLGDLEGLFNAAEFPQDPIMIAMKESFVPGVLEGLPEGYLSAVFVQNTLRRIRNLVHHAMKRDPTVTATVTTLVGGVRSAPHTLQVDLEQWLGAEGVLDGILRAYLARLSRQLTNRFKVVRGKGAKVHFGTAREDALIRQILDNAKLSLATVTREAWSKARQQWRDAHFSTLKHKSWDPHLLKTLIQVAIPKALGEFTPAHALNQLFRFRGRWFPLAKGDWAEWERYLRERITTEVEWRLIDCLKTACLPIIQTVLGDIQSPGCHLIQRPYFDKMTIPLALDERQLYADPLDFRNYLAQFVQTGDPARAVQEGLGLSPDESQRVLAVLPSSLQKRAWAGVEVGKAVELQLALVALHRAADLGRLPELVGQTKLTEKERTEVLGAFAAPSNREADGWLKAPLLEGVIEALLAFRRHPNTSLTPLIREFYRALFRNDPTRPKPHPRVEPRVAFQFLTKGQPSQFTLNTPDRFSDLFIEQQYTPLRGTLSKKRGGGLVLAIPFSISRPAQTPDTHQAQTTRVGGVDLGLKTWAVLSVWDAHRDTTTGQWVRDVDPLTKKPVKEHARFFIDQKQLEGLRHPRAVKPEGWVRGKAGSAGLKCNWKRRLAYLIREAQTCQVERDTYRNDAKQKGIPFRQKMAYFNRRRRWQDAWAKVQHLHAEIAKQVATRVIAACQSTGVTVLRVENLKWSRQKPKSETSPYLRRGQVHWFFSQIQSALFALGRHHGITVELVNPRYSSTRCSHCNHAPPTIEGRRAVRVGKVFSCSNPECNHHQKDGVWVPMVLDSDLNAARNLAFAPRSATQFHSPSASDAGCEEPVLSP

SEQ ID NO: 23146 - protein, 404 aa, unknown
  TnpB Polypeptide
MQKIQKAFKVTLQPTRNQKVLINKTIGCARFVYNRFLALRKELYSTEKKSLSYGGCSQALTQLKKEIEWLREVDKFALQNALKNLDTAYKNFFADLKKPKTKRRFGFPKLKKKHGFRQSYKTNLTNGNIQILKNYLKLPKLGWIRFHKSQEITGDIVNVTVTRTKTGKYIASILCETEINVHPHTTQSVGVDLGLKSYLVTSKNNIVDSPKYYRTQERKLRKANKKLSRSQKDSSNRVKAKIKLARVHEHIANQREDFLHKLSTRLIRDNAIICLEDLAVKNMVKNRKLSKSIMDAGWSMFVSMLEYKALWHDRVVQKISRFFPSSQTCNCCGHVNPEVKDLDIQEWTCPKCSANHLRDLNAAINIRNEGLRLVTAGASETLNAFGDGVRPEDIQATVDELGIA

SEQ ID NO: 23147 - protein, 398 aa, unknown
  TnpB Polypeptide
MKNMEQAFRYRVFPTAEQESLLRRTMGCVRLVYNRALAARMEAWYERQQKVDYLQTSALLTDWKKQEDLQFLNDVSCVPLQQGLRHLQKAFSNFFAKRAKYPRFKKKRSGGSAEFTRSAFRWKDGQVWLAKCTEALPIRWSRPLPEGCSPSTITVKLDASGRWFVSLLVDNLGIQPLPSVDKAVGIDAGITSLIATSDGLHTANPKHFNRKYKRLRQAQKALSRRQKGSQNREKARFEVARIQASISDARKDFLHKLTTQLVRENQTIAVEDLAIANMVKNQKFARSISDASWGELTRQLEYKAKWYGRSFVKIDRWFPSSKRCSECGHIVDKMPLKVREWTCPKCQVVHDRDINASKNILAAGLAVSVCGANISLDEHSLKEQLRKTRKGKKQKLKE

SEQ ID NO: 23148 - protein, 371 aa, unknown
  TnpB Polypeptide
MKQVLALKLDTNPEQYQALLETVETFNRACQYTAGIAIERGIFNKLALQPHVYGELRTRFGLSAQMAIRAIAKAVETCKRHPGISITFAAHGAMVYDERILTFKGTSEVLIRVLAGRILIPLLYGEYQAARMERIRGQADLVLKEGSFYLYACIEMPVAPPADTSNGILGVDLGIVNLATDSQGASYSGEKVKLVRRRMRRLRAVLQKKGTRSARKHLVRIRRKQSRFVRNTNHCIAKHLVQAALTAKKALALEDLTGILKQANGSSREMRWLLGNWAFNQLREFITYKAQAAGVPVVFVDPRDTSRTCCRCGYCDKFNRRSRSEFQCRQCGLTLDADLNAALNIEARAAQSDSLMCRSASLAGWAQTLLA

SEQ ID NO: 23149 - protein, 477 aa, unknown
  TnpB Polypeptide
MTIAAVIPTRAGARTTTTAVRIFPLHRITTEQRALLCAGQREAGAVYSACMQAHKIARQTHDPWPSYVDLHHLTKGRHPNLCAQSVQATCKAFDGTIKSTVANRKAGNTRIRYPWKERSFQPIRWPAQALQRTRDGTRFPLGGMGKHRRYVDLPIHLPRHAGACQVIWNHGQYELHVCVTQDVALEVPGNGRGCVDLGEIHAAALVTDTGTGLIVSGRGIRTIKQGRNRAIGELQKKQARCTRDSRQWMKYQRARDRINGKVERQVRDLRHKGSRLVIEQAKKEGVGELYIGNPDGVRRHKTGRHHNQRMSQWEYGTDMRYLKEKGARAGITVRTGPERSTSSTCPNPSCRHKQKVRGRRWVCRLCGGSWHRDLVGATNMFALAFGNASVVTVPERQNITYRRPGPVGLRQRGRAGNARRSRPDRGLRGTTIPTELITSAVGHPPLPGNARASRGRGPGARTMGVRDGHGSARAALA

SEQ ID NO: 23150 - protein, 275 aa, unknown
  TnpB Polypeptide
VSHGYYAQFCIDVERSELHEWSGRVVGIDVGLEYFYSDSDGNTLENPRFLRKSEKALKRAGRRVSRRKKGSKNRRKAINRMARKHLKVSRQRRDFAVKAALSLVRSADLIAYEDLQVQNLVKNHHLAKSISDVSWSLFLQWVEYFGKVHGIVVVAVPPQYTSQDCSKCGHRQKKTLSTRTHQCVKCGLKLHRDHNSAIEIKKKGLKTLGATSTVGLTGIHACEQNDLCLDEETHLSKPTQSLQEICRAIYGIPHYSCECEARSNLVGEDVKSFKL

SEQ ID NO: 23151 - protein, 237 aa, unknown
  TnpB Polypeptide
LKLALNYRDDTKYLQIQSNNIAAIDLGEIHSITSIDSNGNSLIITGRQLRSYQRFRNKELGKLQQRLSKCKKDSNNYKKYRKAIRKLMSKSNAKINNDMHKTSKLYLDYVILNNIKIVIIGDLTNFNINLGQRKSKKGQQQKLVQWQHGRLIHKLKEKLGRYGVNIEEISEAYTSQTCPNCGNKYKPTSRNYICNVCGFTMHRDLVGAYNILSKYINNGEIKKLDIDVKPIKYLRIS

SEQ ID NO: 23152 - protein, 391 aa, unknown
  TnpB Polypeptide
MLMEDKRKLLKSFKTEINSTVEQKIKIRKTIGTCRFIYNFYLAHNKKLHEDGEKFMSSSKFRVWLNNKYLPQHPEYLWIKEAYSKAVTQSVNNGQTAFTRFFNHESAFPNFKKKGKSDVKMYFVKNNPQDCCCERHRIKIPSLGWVRIKEKGYIPTTKDGYVIKSGSVSIKAGRYYVSALVEVSDNKAVDHFGEGIGIDLGLKDFAIVSNGKTYQNINKSARLKKLERQLIREQRCLSRKYEKLKEGESTQKNIQKQKLKVQRLHHRIDNIRTDYINKTIAEMVKTKPSYITIEDLNVKGMMKNRHLAKAVASQKFYEFRTKLKAKCNENGIELRVVDRWYPSSKICHCCGTIKKDLKLSDRIYRCDCGYIEDRDFNAALNLRDALTYEVA

SEQ ID NO: 23153 - protein, 319 aa, unknown
  TnpB Polypeptide
VRLAERNLGAQRAALRSRIKAVEARLPIPVGGRVGRARGYATPAERYGKQVRLQVLKTRLHRVDRQLGLGRVPVVRGGKRLLGTRRRLAEAGLDEGRWRKRWEAKRLFLTADGEKDKHLGNETIRWHPGEQWLDLKLPAALGHLANRPRGRYRLSCPVEFSYRGDEAAAQAESGAIRYDITFDPAKDRWYLDASWKTPQAPAVPLQELREHPVLAVDLNLGHLAAWAVTADGNARGGPVTVPLMLAGLPRSQRDGRVRAAISTLIRVARQHGCHAIAVENLDFGDARDQGRERAGRRPSRGRRGRRFRRAVAGLPTARW

SEQ ID NO: 23154 - protein, 321 aa, Streptacidiphilus sp.
VGQTQALAEMLRDHCSLYNGALQERRDAYRHASKTSVKYGMQSAQLKEIRAFDPERQGRWSFSSQQATLRRLDKAFAAFFRRVKSGETPGYPRFRGVNWFDTVDFPKDGDGCRWDSTPHDPVTRVRFQGIGHVKVNQHRAVVGKVKTVSVKREGRKWFVVLTAEQSRPEPLPATGAVVGIDMGIANFLADSGGEFVPNPRHARKAAAKLQAAQRALARFPRVRRDKRTGNHQRAVQRIADLHRKVRRQRLDHAHKTALTLVREHDFIAHEDLKIRNMVKAPAPKPDPDQPGTFPRNGAAAKAGLSLIFNRRPFVSRDEPRA

SEQ ID NO: 23155 - protein, 346 aa, Microcystis sp.
MSFSIRVPSLITPVHYITQTEEPNFFAGRTKYPNFKKKHQGGSAEFTKSAFKFKDKQIYLAKCTEPLPIRWSRQIPEACDPSTVTVRLHPSGRWHISIRFDDPTIKPLPVTDKAIGIDLGISSLVITSNGDKVSNPKHFKKRYRRLRKAQKSLSRKQKGSKNREKARIKVARIHAQITDNRKDHLHKLTTQLVRENQTIVVENLAVKNMVKNPKLSQAISDVSCPPLPPRPPRCRGGRGGGGWGGRQLAYKCRWYGRNYIEIDRWFPSSKRCSNCGYIAEKMPLNVREWDCPDCGTHHDRDINASKNILAAGLAVSVCRATIRPEQSKSVKAGAEPRKGKKQKPKS

SEQ ID NO: 23156 - protein, 348 aa, unknown
  TnpB Polypeptide
MVQYQLKLRVSKTQEKTVESWLPILGSVWNFAIRKMELNAKDRIYFSKQEFQNLLANHGEKLGIPSHRPQGVLCTAHDAGERCFKKQAGKPRLKGMRNKLTSIPFPDPIREPKGNRITLPSLGSVRFHKMELPEGKIKCGRMVKRASGWYLCLFIDAEPKSIERAVFGKIGIDAGFKNLLTTSDGEIIEPPRELEASEVRLAQAQRGHDKKLAARIQERIANQRRDRNHKLSRRLVAENILMAFSKDAIKGMARKFGKSVASSAHGQLRQMLSYKMPQSGGTYVEPDSKFSTKTCSECGSQSGPSGWAGLLVRQWECNVCGAQHDRDVNAAINTLNAAAGCAVEVAYV

SEQ ID NO: 23157 - protein, 389 aa, unknown
  TnpB Polypeptide
MINDSCIRTIKVDITHLLTAEQMDVIKTTISDAIIVSKIFTELGIEHRSTSYTTMHKYGYEMARERCPCMNTAILQQTAKVALFNIKSWNSNNRKHKWECKGSKTSGSYPLNKLSLARRGEQTTFSTSDKRIRIIHAIPKWFDERYPNKILQSGNISMMRDKVFIHYSYKVPIAEGVGEKVIGVDRGLYNLIATSDGLLVPTKRLHGIERKYAHTKATLQSKSTRSAKKRLKALSGREKRFRQDIDHCVSKQLAEREDVECYVLEDLTGLRSKRRGKKMNRWLHKWSTFRFQQFLEYKCKKNGIDVQHVMPDYTSQMCSMCGNIDKTSRVRNKYHCVECGHEEHADINASKNIRDRYLLALVGKSGCIQPPVCSDVSSGTIPHARHGGC

SEQ ID NO: 23158 - protein, 553 aa, unknown
  TnpB Polypeptide
MITLQCLLEFENRQDKETVLDLMRRFSSAMRYAYQRLLEGEKRKDLKKYLSKLFDINTRYSDDAVFLAQSTIALCEKRGQNPKKLMFGSRKLFEQLKRNHLTGKRRKELKTKWKESRQGNLYSRGDKSKQGNLNLRFEWISNELYLRINTGDRQYVYAKVIRDVKREKDKWIEFMFMLENAYKYGAWFPYSVRLKVKNGNVYAFISIEEKLPPITIKKDNGIIGIDVNAYPFHLALTFTSKDGNLEKYQRINLNELLESNSEKRQYLEWQIAHEIIKIVKEESKAIAIENLQKLPKGKRGDGFAKLRIRLQKWSYKRLLEKIEVLARRNGIEIIKVNPTYTSVIGKLKYAPQYNIDKDIAGAFVIARRGLGFIEKLPKNYKELLNDSDFLSYTIARIEDNITKLKQKLKEEKNEYKRNKIKSILAKLRKNLKKLQQHVSLLTSHVSRLESGKSKPATQQPGNRGKEQVRGLPTGRHKSWQVLSIALAFCCLEKSYRDFSPLKRVIISKDWIAVANRLVPIPGIGTMASPKYRLSGLEMPELAEYKYPDPNCIN

SEQ ID NO: 23159 - protein, 480 aa, Paenibacillus sp.
MSAQKSDYRTFQVWIKPGHPLFSFLDETCQQAKNLYNTATFFIRQVFTAKGQSTACQPLQRQVMDTLSAHLGAMNERRSAKNRDHPFVLPSPERPFLSYAFLDALFKVMNQPDYRALPAQSSQGILKVVFQNWASFFASMKAYRQRPERFTGRPKMPGYARSKGKEVVFSNQDCIIKEGKYLKLPRTKRRLNIGKLGGTNGKLRQVRVVPRHGQYVVELIFARPLNEPKPVADAASSAGCMAIDLGVNNLATLVTTTGAQPMLVKGGIVKAINQYYNKMKAHYLSILRQGKNPREGPHTSKRLERLHLQRYRRIKDLFHKVSHHLVRLAVQAGISTLVIGHNPGWKQGTAMGRRNNQSFCHLPHGLLIGMIRYKAAEQGITVILTEEAYTSKASFLDHDPLPCFDKAVTTCTFSGKRIHRGLYVSPLGRIHADVNGAANILRKVFPNVRAKRRDGIEELDGNQSVNVSTPQVLSILRTSG

SEQ ID NO: 23160 - protein, 533 aa, unknown
  TnpB Polypeptide
MDIASKYCKFFMSDNMTRLKYDELYRLAVSINEEKNRISELVCKDLFKYLNTKPFDFVTEMHARFKGVISSSFDTQMYRQVIDMYENKFKALQKKLTFEHVEYKGIEVYKRNCKGHKKGEFKKAVIVHRTTPLCSCMTYLARYGKDTTLEYINSQLERNDLKQSQVDFYRNIVEKCDKFGFDRLFKLALSKRERILKKYAEHPIVFRSLSFGGRSRKKYIISYNKNYQSVINAFISLSMPNRKTFDIPVKFSKDYHGRMSDYKKSSADYEYVLCFDERHKQVRINIVKDGTRYIPEVTENENVVGIDVNIKHNLFSLSNGKTYDYDRELVADYCKLKRHTDTLPVVGKKFQRKLDTLRNKIHKSNQQLISNVCRDLQNQGVRHIAMEDLDNGFGKSFVKEKNLNDINFNDVVRFLGISSLKQEFEHIARKYDIAVSTVHACYTSKMCPICGCIEDENRPNQETFECVECGHKHNADINASINIRNRVSVAVLRTKLLKQLDNGAYKPIPMSRDKVKDALLSYRSSELQGLPKI

SEQ ID NO: 23161 - protein, 402 aa, Shigella sp.
VKRLQAFKFQLRPGGQQEREMRRFAGACRFVFNRALARQNENHEAGNKYIPYGKMASWLVEWKNATETQWLKDAPSQPLQQSLKDLERAYKNFFQNRAAFPRFKKRGQNDVFRYPQGVKLDQENSRIFLPKLGWMRYRNSRQVTGVVKNVTVSQSCGKWYISIQTESEVSTPVHPSASMVGLDAGVAKLATLSDGTVFEPVNSFQKNQKKLARLQRQLSRKVKFSNNWQKQKRKIQRLHSCIANIRRDYLHKVTTTVSKNHAMIVIEDLKVSNMSKSAAGTVSQPGRNVRAKSGLNRSILDQGWYEMRRQLEYKQLWRGGQVLAVPPAYTSQRCACCGHTAKENRLSQSKFRCQVCGYTVNADVNGARNILAAGHAVLACGEMVQSGRSLKQEPTEMIQATA

SEQ ID NO: 23162 - protein, 374 aa, Methylobacter sp.
MKRTISIKLDPTTEQSALLDALQAEFARACNIVVGFSAPVKCSNRVALHHLCYYQVREQVPALGSQMVCNAIANVAQSYKSLVANEPKLRKEEWPVINFRQTASVHFDKRTYSFKNDTLSLFTLDGRIAVNYIFGKHQANLLNSGLTKEAELLKRKGQWYFNLVIDIPDAAPSTGNGSMGVDVGENNIAATSTGKVFGGGELRHKRDKFLAHRKRLQRNGSNSAKQLLKKISGKEVAHVKHVNHEISKAIVQEAIAANASEIRLEDLTNIRDNIKAGRRVRTRLHRWSFRQLQDFVAYKAQAVGIEIKYINPAYTSKSCSVCDAIGTRVKHKFSCKNCGHLSHSDVNAASNIAKFDRLFSPSRGVVSRPNVERF

SEQ ID NO: 23163 - protein, 423 aa, Haloterrigena sp.
MDDAPRRTIPIKLDVPRERRGDLHQTKTQFLHCANRTSEWAWRYDDYCVTSKSKAENALYSELREETDLTANLVQKGIRRAIEAVTSGVEKLKDGEKTSQPEFDSWSVVYDKRSATFNDDHATLSTPNGRITAEYVLPPKEEREETPFGRYYENDDWDASSATLQYDDREDTFYLHVTLKNPDYTVDGTEYQEASHDDDGAENGVVLGVDLNVTGAFAVTSTGEFIGSADYLTHKRAQCEQRRARLQQVGTRSAHLTIQSIGSKFSDWSLDWLHNRANNLIAEAQSADADGIIFENLDHIRENIANGSKFQQWAYAKFVELVEYKVESTELFVDFVNPAYTSQRCSHCGFTHEDNRDDKEFMCQDCGYDVNADYNAAKNIANRYCGYIHRGQKSRGGWAISQLALKSGMLNVNGEYTPAELLG

SEQ ID NO: 23164 - protein, 506 aa, unknown
  TnpB Polypeptide
LREPCVGAILVEHRDRLARCGCEYIEAALLSQGKSIIVADDTEEMADIWQDFAGVVNSMCARIHGRRGARNRARRQLRRWRPVKIRRACKTELKPNQTQTGLLVKSCGAARFAYNWGLARKQESFRLTGKSPSAIDLHRELNRLKQTTEYAWLYEVSKCVPQEALRDLDRAYANFFRRCELKRGGKHQGKAGFPRNKSKKRGLGSFRLAGAIHTEERRIKLPRLGWIRLKERGYLPAEGEGLHLLSATVSERAGRWFVSLQVEEPVPDSVHASCLVVGIDLGIKTLAVCSYAEGNYAHYENPKALYTGAKKLRRLQKRLSRQEKGSYRREATKKKIARQHYRVACVRSDAIHKATSEIVAKAKPHQMRPAVIGVEDLNVSGMIKNHRLAGAVADASMGEFRRQMEYKCAWYGIELVMVPRFEATSKPCSKCGWVKEDLKLADRVFVCGSCGHVADRDENASDNLRLLAASSAERINGRGGEVRPVESDWRTPEKRQSEEVAQNAIF

SEQ ID NO: 23165 - protein, 402 aa, Escherichia sp.
VKRLQAFKFQLRPSGQQEHEMRRFAGACRFVFNRALALQNENHEAGNKYIPYGKMASWLVEWKNATGTQWLKDSPSQPLQQSLKDLERAYKNFFQKRAAFPRFKKRGQNDAFRYPQGVKLDQENSRIFLPKLGWMRYRNSRQVTGVVKNVTVSQSCGKWYISIQTESEVSTPVHPSASMVGLDAGVAKLATLSDGTVFEPVNSFQKNQKTLARLQRQLSRKVEFSNNWQKQKRKIQRLHSRIANIRRDYLHKVTTTVSKNHAMIVIEDLKVSNMSKSAAGTVSQLGRNVRAKSGLNRSVLDQGWYEMRRQLEYKQLWRGGQVLAVPPAYTSQRCTCCGHTAKENRLSQSQFRCQVCGYTANADVNGARNILAAGHAVLACGGMVQSGRPLKQEPTEMIQATA

SEQ ID NO: 23166 - protein, 544 aa, Streptomyces sp.
VGGLLRELAAPFVVPGPSGVAIRTRLKHLPPADEEVLRLVGAHLGALASRDLKARCRDGLEHDAEAWAVRKRELTPQSSARWAGAITKATHDQWALVRRGQLAHIQSLEAGVRTLRHRLSLPVGEKGSKKAPGGYRSKREWHAKTRRLHVLEERLERARAEWQAGTVRVVRGGKRLARTRHHLPTARFTENQWRRRWQAARWFLQADGESGKRYGNETIRISPDGEVSLRLPTPLKDLANAPHGRYVLASRVRFAHRGQDWADRVEADRAVAYRIRYDPVRSRWYLTASWQLPVSPAIPLAAALADGAIGVDTNADHLAAWRLDIHGNPMGNPRRFFYDLSGPADHRDAQVRHALTRLLHWTKACGVKAIAVEDLDFTAEKTREKHGRRKRFRQLIAGLPTGRLRARLTSMAEQTGIAVIAVDPAYTSTWGAQHWRGPLTSKKRKTTRHDAAAVAIGRRAQGHPVRRRTAPPRAHRSDVHGHRTVQAGRHALGREETRPRIPGPRTRSVPPDRGVNAGDQNAQHRSGRSAEHESWQQDPLPLSL

SEQ ID NO: 23167 - protein, 216 aa, Burkholderia sp.
MSAVDRLLLPRIRIAGVIEMPDVQARPIRSGVGIDLGLKDFATLSTGEKLPNDRFGRRAADKLAKAQRARKHKRHIAKLHAKVANARADFQHKLALDLVRRFDYIAVGNVSAVKLAKTRMAKSVYDASWSSFRNKLRYKAIAHGATFEEVDESGSTQSCSACGSKDSTTRPKGIAGLRIREWACSGCGVVHDRDTNAALNILRCGRASPVVGILRL

SEQ ID NO: 23168 - protein, 579 aa, unknown
  TnpB Polypeptide
LGTRRGVNSNWLEKWVRSFYRMANIMARSRGTTISVKVPINWDAMTKRTRQRLRQIVGRDTRVIRALLGIIEQNENNLLTGRKKNKIHDGKLDELTLTAIKVRSGHGKRSTVPHDIKARFPRISTNELQECRQTAVSLYESYLALREKKGWNASRPTAVNTTRRIPRWVFIQRFKLEYTTSSVSRWWLGLRDSLDSVQEGRTIHDKLNIPLKVSPFHHNQLRRGEVKACQVFADRVGKWWVNIAVRVAIVEIPDTINPPAVLGIDLGIEKAACTSLVSPTKVRETRYFRQKDKVEIIRKYDRLVADLQRKATSQPNNAGVLRRLRQIRHKRENVACEYDRVLVRNLLNYIEELSEKYTVYVAIGRLKNIRNAARKGNFKGRGFRGMIHSWAFARITESLNHGLAQQGWSVSGKNTRFRVVPEAWTSIMCWKCGTKGTRPKQNYFLCPSCSHQTNADRNGAINIAGRLIMLTKLLHSVRGLGKWAISVQAGKRSRLKARKKKPSKGKSLLSKQELISSSGESAAVHFAQTSLFSFGDKTRESDNDPAVVKTVETLAVVGSDDSTQIQEKEARSSGGIPSQ

SEQ ID NO: 23169 - protein, 383 aa, Trichococcus sp.
MTLKGIKVKLYPTVAQQEAIENNFRLNRFLWNQLLGMQLARHENGGSFVTKFGMNYLIKVMKIEFPFLKEAESTSLLYTSADLADSYDRFFKKQNGFPKFKSRRRPKNSYKSNFVNGNIQVVDNHYLKLPKVGLVKANGLHRVKDKIKSVVIHKKADGTFEATLQVAFEATTFESTGKSVGIDLGIADLAIQSDGYKLPNKQFERSLAKQKRQWERKLARRRQQALVKIEQSKAQEIELELSDFKNVQKAKEQVARINKKIANQRNNYLQQYTTSLVKKYDLIVLEDLKTKNLLQNRQLARSIADAAWAKIKSMLAYKCEWYGKELVLVNPAYTSQTCSHCGENTGKKPLRIRTFDCPHCHTTGIDRDVNAAINILNKALAQR

SEQ ID NO: 23170 - protein, 468 aa, Uncultured sp.
MSNFIVVDSTEVRGSKFMVSKEAFDLESFLETYRDDLRITTYSVFNYLKDIISKYGPENVNINPQQIVIQNDDVEDSYYLGFDGNSYDFKFGVYNRDGELKKDGTPKNQWVDAKDLKESDTVTCKKITDTSIKDMLESVLPSTNNAWRSNLLAYYIKMLKSRIRGDKFNKHKLCDAMMNMNRPPQLRSETFHTKDGFKINTSNKTISVLTRDVDEKGKPVRTTFPYEFTTSNLNYDGKGGAGGNFTLTEKKNAKNNVIDVAEEKDCLKFIPEDPTKWYGIDCNVNADNWLTLYDLNEKKSFKWKRGPYAQRLIDKVKQLNKEIGNKDRANIKSKHRRPKRIQVVKLIPRKMDKYIASIFLPLVKKCKANGKGLAIDGANFGSKMGNYYQQNIQRVVPKLCRQMGVPCLEVPSRGTSKTCSACGKTVTPAQNKKFHETGVFDCPHCDNVMDEASNAAKNIALYASRKDN

SEQ ID NO: 23171 - protein, 422 aa, unknown
  TnpB Polypeptide
MLKGIKINLDLNNKQRTKLAKHAGTARHAYNKGLEYCNDLFKQKINTPSAIDLHKWLVANIKKEFPWYYDVSKCPPQQALRNLKVAFENFHKIQSKSGYSLYHYKMIDGVKKPVGLKGLPNFKKKGDKDKFYLEGKIFIKDNKIKLPVIGYIRISEDLKNKFDDVIIKNCVISRKADKWFVSFKYEVNPVFTEKKFNVVGVDLGISKLATLSDGVIYENLRPYLNAKNELRKLQKELSRRYKKKADNQSSNYKKTKLKISKIYARITYVRLDCLHKLTTYLAKNYETVVIEDLKVSEMTKNSLLASAILDGGFFEFKRQLLYKKQLYGGKLIIANTYYASSKLCSCCKNKNNDLKLSDRIYICNACGNEMDRDINASINLEKLINMAGSLTVNTFGDESPTTNVVQLVDELGIGHQMHYFIA

SEQ ID NO: 23172 - protein, 399 aa, unknown
  TnpB Polypeptide
MIKTINKAFQYRLYPTPEQEKILASCFGQARFVYNYFLRKRIDYYVANKGKEKQSLNYHDTAKMLTELKQQPDTIWLKESNSQSLQQSLRHLDNAYNNFFNNGFKFPNFKKKNRKQSFSVPQNFNIDIKTKQLHIPKLSPIKIVLCREIEGNMKSVTISKTPSGKYFASILCEIEKNIKFKKKGGEIGIDLGLKSFLVTSDNEKVEAPKCLRKSENKLKQLQRCLSHKVKGSNRRNKARIKVARIHEKISNQRNDFLHKLSHRLVSENQTIFAEDLHVKGIMANHHVAKFVADSGWSEFVRQLNYKSEWNGVCFEQIDRFFPSSKRHFSCGWINEALTLKDREWTCQGCGQVVNRDHNAAQNILLFGQKKVGQELSKLKRSGRGGAVRPLVELRISSIY

SEQ ID NO: 23173 - protein, 354 aa, Oligoflexia sp.
VKSEKQRLTYSYRIKNSKVANKLNQLAWATNFVWNYCNETSYNAIKQKRKFLSKYDFRPLTKGASKELPINSQTIQAISDEYVTRRKQFKKIKLKWRGRKSLGWIPFNGQTIKIVNDVITYDGIKIRFWKHRELLGTIKTGSFCQDSRGRWYVNFQCEVIDKRPHGERKIGIDLGLKDKAICSDGIKYDRENLTKKYEVRLAKYQRAHKKKQVKNLHAKIKNKRKDFSHKVSNEICSTSEIVIVGDISASKLAKTRMAKSVLDAGWSQLTTMLQYKAIRHGMVVKKVSEKWSTQTCSYCGVIPESAPKGISALGVRNWKCSECETSHDRDINAARNIFNFGAGRCAPTGSLSLQ

SEQ ID NO: 23174 - protein, 371 aa, unknown
  TnpB Polypeptide
MTKIRQKSYKFRLYPTEEQKVLFSKTFGCSRFIWNQMLADKIQYYKETGKSLKNTPAQYKKDYPWLKEVDSFALCNVQLNLQKAYKSFFQSNFGFPKFKSKKAYKQSYKTNNNHGNIELCDGKIKLPKVGWVRLKQHRKITGLIKGATISKTTTGKYFISILCETEIKPYHKTNSSIGIDLGLEHFAILSTGEKIENPRFLVSASKKLRREQKILSRRGLLAKQRGKSLNDCMNYQKQRLKVARLHERISNQRRDFLSKLSIRLIKNHDRICIEDLASKNLMRNHHIARAIGDASWAAFVRMLEYKAEWYEKQVSKISRWFPSSQICSDCGFNSGKKALHIREWTCEQCGAHHDRDLNASLNILHEGLKLI

SEQ ID NO: 23175 - protein, 364 aa, unknown
  TnpB Polypeptide
MKTLKLRTKDKHAKQLNILAGAVNFVWNYVNELSFKHLKRTGKFFSAYDLATYTKGASEYLNLHSQTLQAISEVHAKSRKQFKKAKLNWRTNNPKAKRRSLGWIPFKKTAIKHLATRQSGKKSLKSTIQLSLAKGKKLTIDLWDSYNLALYSINTLELVQDNRGHWYACITVKDFPKVKGGDGKVGVDLGCKDAATSSQGDKLTIKQTQKWAKKLTIAQRANHKKRVKAIHAKIKNTRQDLIHKFTTSLIKDNALIVVGKLQSSSFTSSKLAKSVYDAGWFEMKRQLDYKCKYAGCHYIEVNESYTTQTCSCCGSRQNSPKGRADLGIREWICECGVTHDRDINAAKNILAVGLDRLVEGIPSV

SEQ ID NO: 23176 - protein, 357 aa, unknown
  TnpB Polypeptide
VDRIDYLTSLGEKSSDLQAAYPYLEDDRIDAQAIANAIKNYRVAWRNFYKVPGTSIPKFHKKNSTKRYCTNAHYKKDATFITDGNVYLSDKRHIMLPKLGSVRFKGSSRIYRIFDRTCETRIGTIAISMDECGHYYASLQIGSVCPFHKLLQRTGKSLGVDVNLENFCMDSNGNIVPNPKFRKATQEKLCKEQRRLSRMATRAKKERRSLHDSRNYQKQRIKVAKLHKHAAVQNEAFQHLLSKAMIENQDVICVEKLSVRNMMKNHHLARAIADCSWSSFTAKLAYKAELYGRKFVKVPAAGTTQTCSDCGYVMSSQQKLTLADREWTCPCCGKHHIRDWNAAINIKNRGLAILQTS

SEQ ID NO: 23177 - protein, 423 aa, unknown
  TnpB Polypeptide
LALNNTENNRNKAKNQTSLLGLALPIYHILGIFFLRLPCKYDPVILHGLKSHVKYVRLVRRKRNGQNFFYAQLVCLGIPFQKPKNKVGNGIVGLDIGPSTIAMVGDESARLEQFASELEFPDKHLRKFQRRMERSRRANNPDNYNPNGTIKKGKKTWNNSQTYVKLRNAKANLERKLAAHRKSLHGQTVNSILSEGNIIKLEKLSYKAFQKIFGKSVGKRAPGMFVAHLKRKAESAGVKVVEFPTYNTRLSQTCQCGRVKKKKLSERVHQCECGIEAQRDLYSAFLARFVDPETNVLQVNQVLSAWESAELCLRAAWRTATINQPAIGGRLPSSFGRCPETERVAAEVSTKIPKSRDVVSASREPGKGYSAAQRSDGQNLMPDGMGSLSSYVPSFYPDGLAPSRASGPWQHRSSQLIGHRSQS

SEQ ID NO: 23178 - protein, 403 aa, Anabaena sp.
MIVLEFKVKGKTTQYAAIDEAIRTAQFVRNKCIRFWMDNRGVGQKELYRYNTVLRAEYPFVKALNSHACQVGVERAYSSIARFYDNCKKNIPGKKSYPKFKKNNRSVEYKTSGWKLSQTRKQITFTDKKGIGNLKLKGTWDLNFYPIDQIKRVRLVRRADGYYAQFLISVDNKIETQPTGKTIGLDVGLKEFYTDSNGHSEPNPRFYRIGEKRLKFYQRRVSRKKRASINRKKAVNRLGRVHLKISRQRIEHAKRVARCVIQSNDLVAYENLRIKNLVKNHCLAKSINDAGWYQFRKWLEYFGVKFGRITVAVNPAYTSQECSNCGAVVKKSLSTRTHVCECGFEMDRDWNAAINILKLALSTVGHTGTWILDPNALGDSTSTQVGEILSEQVGSVNKESPHF

SEQ ID NO: 23179 - protein, 500 aa, unknown
  TnpB Polypeptide
MKTKIKEETLPVKYRLRPNKKGKKYLNQCFGNTRFIYNWLLAFQNDYYEAVSKYSKEQNIDYLSSLPKDTEDQQKFYASEFKRLRDELILPYDKGVEILKSIRPQIDELEMERCLLKKVKDEKTKKMVEAVPKQANKMIAIVNAKRQIKFLREEIPWLKETASEPYYHTALNLDDAWKAFFDKRQSDTGKPSFKGRWAKQSCTFDGVKVDFENNAVTFPRLKKVPQKFRAHRVIDGEAKTATVERTTTGKFFITINFRQSVPFPEPPNKVTAEKTLGIDLGVGDNYLTKATGKSEDNGEIIDNPRFFKLMFNKKKRLDRSMSRKKQGGKNWLKAKNKCDKLSEKLANLRDNFQHQISHKITNDDSYSHIVMESLDIKQMSAKKQAIKNKDGSYAKNGQGLKRLQNRATLDASLGALKDKIKYKSHRRGKLFTQVDKYFPSTQLCHSCGYKNENLAVSTKKFKCGGCDMTLHRDVNSCKSLVKEGVRMLNPAPKNKKSKVK

SEQ ID NO: 23180 - protein, 360 aa, unknown
  TnpB Polypeptide
MGLKITRKQDEMLTRLLVQLCELYNMALQQRIDVWKSHRTSLTLYDQQKQLTELRAGIEEYAQSPLKVQRDPLRRLDRAFKDFFRRCKSGENPGFPRFRSPKRYNSFTVDCERSYYRKGELQIVKLGKFRAKTRCKIKGKLKEIHVKRCGQKWQAQIVCDIGPAPEKIAVRNAVGIDLGITSLVTLSDGTEISNPRWTKKEEKNLAEANRDLARKQKGSNNLKKSKERLRRVHQHIMGLRHSYLISVAKEIVSKYDLIVHEDLTIRNMARSNYAKQILDAAWGKLIRRLNCEAEYAGKWVIPVNPRGTTQRCSSCGEKVPKERRNRIHNCPNCGLVLGRDLNAALNILRLGEGLVATQNA

SEQ ID NO: 23181 - protein, 420 aa, Thaumarchaeota sp.
MKMLSAFKYRLYPKPEQEKRLDRSLFLLCNLYNNLKAEEIRRYREEHKSTSKTRFRRLALEARKEDGELQTAHSQVVQNVGDRIHRSFRNFFERRARFPRWKKPHRYNSLTYPQSGFRLDPRGLILSGVGCVRVFVHRPLLGNVRRLTVKREADGWYAIFVTEREGLEKRLLSGTPIERVRGADMGLLKFATFDDRTSAEYPEFLRRSEEKIRRIQRHLSRKHGGSKRRLELGRRLSRLHLHVKRQREDFQNKLVHRIFKESDVLILEKLNVSGMLKNHRLAKSISDASWGRFARRAVFKAAQLGKKTVFVDPWARPSSATAAWRGSRRASGRGSTSAPTAAKEYQETRTPLFSSRGLASWEEEEARPRRGLVTRRARASALPQGDGKPGQRSGKPTPSGVGGRHEQSASIPSFRSFGQS

SEQ ID NO: 23182 - protein, 433 aa, unknown
  TnpB Polypeptide
LLEGVKVALDPTPSQERRMLSHAGAARFAYNAGLVHVKEAIDAGEEQGWSPYSLRKWWNSVKDELAVGGDGETWWQENSKESYSYGLESLAKGLSNWSKSRKGDRKGRKVGFPKFKSKNKATPRFAYTTGCFGLVKGDPKALKLPRIGRVHCMENVAERVGDAKVLRMTTSQCAGRWYASLTVERDDKPVMKPPKGGAVGVDLGVKNLATLSDGTVVPNPRYLKKSERKLKKAQQALSRKTKGSNRRAKAKAKVARIHARVANQRLDAMHKLTTRLAETFSDISIEDLHVAGMVKNRHLAKSISDAAFGEFRRQLEYKATRSGARLHVVDRWYRSSKTCSKCGSVKAKLSLSERTYRCDSCGLTMDRDLNAAINIKVAGSAPETLNARGGGVRRTNVPLGNADPCEARTKQSPAGDVRLGAGLGNEDMQPSVN

SEQ ID NO: 23183 - protein, 449 aa, unknown
  TnpB Polypeptide
VLLSVTCWQVSGSGFGGDCQMCSYEAIKVRLDPTPRQERLMAGHAGAARFAYNAGLAHVKEVLDSGESADWSHYGLLRWWNANKDTLAVNPDTGVVWWSQNSKESYNMGLYGLARGLSNWSKSRKGQRKGRRVGFPRFKSKNTVAKFAYSTGFTAPKASDPYGLKLPRIGRVHCMENVYKRISGARLVRITVSRRAGRWYASLTVEREPAVTTVPKGGAVGVDLGVKNLATLSDGTVIPNPRALGARLRALRKAQQALSRKVMGSARREKAKGRVARLRARVADVRADAINKATTMIARSYNTVCIEDLNVAGMVKNHHLARSLSDAALGEFRRQLEYKTARSGAVLRVVDRWYPSSKTCSNCGVVKAKLSLAERTFNCDACGLSIDRDLNAAINIQVAGSAPETLNARGGDVKRTNSLLGNVVPCEARTKRVQKSAVRLGAGLGNEAM

SEQ ID NO: 23184 - protein, 372 aa, unknown
  TnpB Polypeptide
MLRAIKYELNPSKTQKVQIKQTCGCCRLVYNTMLDRKISAYKTSGVNISAFDLINQLPQLKSELPFLKDAPSQALQQAIRNLDTAYANFFRKGGSGFPKFKKKGVKDSFRIPVACTIDYDNWTVKVAKLGTIRIFKGHNKQIDGKIKSYTITHTSTDRYSISILYETDDRKKLDNGKSVGIDIGIKDFAVLSDGKVFENQKYLKHNLRKLRVLQRTASRRYQQGKKREEQSNNWKKAVKQVAKLHEHIAFQRQDYLHKVSNWISQNYSTVCVETLNVKGMQKNHHLAQSISDCGWGMFLSMLAYKCDNLVKIDQWFASSQTCSVCGHKEEKVKNLMVREWTCPECGTHHDRDLNAARNIEREGLSLCGHKVA

SEQ ID NO: 23185 - protein, 350 aa, unknown
  TnpB Polypeptide
MLLSKKTSIKVSREYANLIGHMCYAASKLWNVCNYERQHYKETGIEQHPDWYYQKKAHKEDLWYKQLPSQTAQEVCKLLDKAWKSFYALKRSGGIETPRPPRFKQESIPITYMQMGIVHERDTDRVRLSLPKTLKKYMEETYQIHENFLYLENKIFRGMDQIKQLRIYPPEKGNCKIIVVYEVSGQEELPQNGHELSIDLGLHNLMTCYDSGNGKTFILGRKYLALERYFHKEIARVQAQWYGQQSGKGVKHPVTSKHIRKLYKRKQDSVTDYLHKITRYLAEYCREQEITCVVTGDIRNIRREKDLGHRTNQKFHSLPYNRIYIMLEYKLKRYGIRFIKQPANKKSRLN

SEQ ID NO: 23186 - protein, 437 aa, unknown
  TnpB Polypeptide
MTEKKKKKRVYKDRTGLMTQSERHMISENHPLYEECARVCHLSKNLANATLYEQRQSFFAGSFLNYYAVNKDFTKSDNVAYRALPAKVSKQTQMIVQQMFNSFFALTKKVAEGEYDKPVRLPKYLPKDGYFVVQYEKGALSFKEDGYVSLSQTSIKVKTNCLKESITMVRVVPMGNHFVIEVLYDIKKPEIDETDFSRVAFVDPGMNNLMTVTSNVFSPLLYNGRPAKAVNQLYNKNRALLQSKLPYQRQIYQNALNMVLTPYQMGKSRALQAVTSKRYFRIHDMFHKITTHLVNHLVLNDVKVLIFGHNVGQKQDINLGHKTNQNFVGLPFTKLMMMLQYKCERVGIQFISTEESHTSKCSFLDKETVEHHDHYVGRRIKRGLFKTADGIRINADINGSLNIGRKYLIANDLYTDDLHDQLVSFMHNPKRITVSVC

SEQ ID NO: 23187 - protein, 398 aa, Prochloron sp.
MVMIVYEFKAKGNQNQYRAIDEAIRSSQFIQNKCLRYWMDNKGTSKYDLNKYCKVLAQQFTFINELNSQARQSAAERSWSGISRFYDNCKKQKAGKKGFPKFKKNSRSVEYKTTGWKLLDPKHIKFTDKKGIGKLKLIGTWDLAFYSEDQIKRVRLVKRADGYYVQFCIKVDIKVKTEPTNKTVGIDLGLKYFIADSNGDVVESPQFYRKAEKQINRANRNKSKKFCRGAKPQSNNYHKARNRYARKHLRVSRQRKEYCKRAAYCVIQSNDLVAYEDLNVKGLVKNRFLAKSISDAGWYEFRKWLEYFGRKYGKVTVAVAPHYTSQKCSNCGEIVKKSLSTRTHVCPHCGYTADRDVNAARNILQKGLTTVGQTESHTLGEIGSLATLDMSCVVKSCR

SEQ ID NO: 23188 - protein, 344 aa, unknown
  TnpB Polypeptide
LPRYGEKGGRHTIVFTNQDCVIYEIKGKPGFHEVKFPEIKKRLYIADMPLRGRLKQITVKPNHGNYIVSLVFDDEKETPVTRPPHRMVGIDLGVDNTAAVTNNLGLPCLLFKGGVLKSINQLYNKKMASIQSEQTKGTDKKFVMTKEAHNLCVWRNNRIEDTINKIGSSIIAWCCDNNVGTIVIGHNTHWKQNANMGKKNNQTFVQIPLYKLILNITYRAERCGIRVINREESYTSKASFLDNDVIPTYGKEDENHKFSGKRIKRGLYKAADETVINADLNGSANILRKEFPDAFASHQPDFDNVIVIRHPDLENAKSNRKKQLAEPKAISKSKTKRLKAKGKM

SEQ ID NO: 23189 - protein, 301 aa, Opitutaceae sp.
VRLRNTFNLGRGIPAGQLRSATVKFEASRWFVTLLMRLPLSLPASTPVASVGLDYGVKHTLASSARTVLPAPVATNKEAQRILFLEHRLARCVPGSHRYAVALAKLNTFRSRITRRIHDWRHKTTTDLSKNHGLIAAEALRAKNMTASAQGTVEAPGTRVAQKAGLNRALLEPGFGILMQQLAYKQAWRGHAFIQVDPAYTSQTCPRTGCGHVHQDNRPNRDTFRCVRCGYTDAADFAAAEIILRRGKQTFSAVRTAPALAAGPGRDCAPGASAPRGHRASHSRTKPSLRLSTQAKGIPAF

SEQ ID NO: 23190 - protein, 341 aa, Burkholderia sp.
VAQQRADTLAGRCARASIAAGAKGPRARLHEFFEKRAAFPRFKRKGSCDSFRFPDPKQVKLDQGNSRLFLPKLGYIRYRNSRPVLGEVRNVTVSQSGGKWFASIQTQREVDVPLPTATSAIGVDVGIARFATLSDGSHIAPLNSFKKHEKRLARYQRRMARKKKFSRNWKKAKARVQKLHTDIANARKDFLHKASATISKNHALVCIEDLQVLNMSKSARGTIEAPGKNVRAKAALNKAILDQGWGEFRRQLEYKMAWSGGMLLAVPAHNTSRTCPCCAHVAKENRKTQARFACVSCGYKNHADIVGAINILERGQRLLACADSSPEVRASWQEPAEATTW

SEQ ID NO: 23191 - protein, 369 aa, unknown
  TnpB Polypeptide
MLQTLMVRLDPSPKQHKLLLDTMHRFNEACNDVAETAFFMGKANKVELHKTVYYPIRERYGLSSQLTVRAISKVVEAYKRDKSIRPEFRPDGAIVYDPRILTWKGLEHVSLITLEGRQLIPARIGEYQKARMDRIKGQSDLLLVKNIFYLAAVVEVPEESPYDPVGVLGVDLGIKNLAVDSDGEIHSGEHINDVRTKSNSLKSRLQSVGTKSAKRHLKKLSGKMARFAKDVNHNISRRLITKAKDTRSLITIEDLEGIRSRVTVRKSQRCCINSWSFDQLRQFLSYKAIVAGVPLVLINPAYTSQEGPICHCISRSNRPTRDEFCCICCDFSGPADNVAATNIAARVVVNLPIVSRFFAQAQALPFRVG

SEQ ID NO: 23192 - protein, 395 aa, unknown
  TnpB Polypeptide
MTLSYKFLILPNKETTFKLVEALDTCRWLYNELLEKINISREEGRKLSTYETQNLIPNLKVENPKLNRVYSKVLQMVNYTLHSNIASLYALKKRGKKVGHLRYKGEGWYNTLNYNQSGFKVDQDHSRLHLSKIGDIKIKLHQKIKGCIKAVIIKREGKNWYAIVQADQEIAPLPETGKSVGIDVGLKAFAVDSDGNSTENPRYAEKSAKRLAIYQRRLARCKKGSNNRKKIKAKVSKIHKRINNQRDNFLHKLSRLYVNRYDNICIEDLDVLGLKEKGRNTGLHRSIHDAAWAKFAFMLSYKAQSAGRKLILVDPRNTTQRCSNCGSIVRKELSDRIHECPYCGFVADRDYNSSRNILIAGMEQPVEPIEPKPLHHISVMQVLVMKWEALSFRVG

SEQ ID NO: 23193 - protein, 349 aa, unknown
  TnpB Polypeptide
  misc_feature (313)..(316): Xaa can be any naturally occurring amino acid
  misc_feature (318)..(318): Xaa can be any naturally occurring amino acid
  misc_feature (324)..(331): Xaa can be any naturally occurring amino acid
  misc_feature (342)..(342): Xaa can be any naturally occurring amino acid
MIKALKVRLYPTEEQMVLLEKHFGANRFIWNHFLEARTKYYAESKSRGKAQGLNYFQTCKMLTEMKKEKEWLYEISSPTLQQTLRKLDNAFTSFFRKNTDYPKFRSKKDNQYFVVPQNGKIVGNRIVIPKFLEGIIFRDKFDFSKIKEIDQIVVTKDVERYYASIFYESDEIPEKAEAVVGIDVGVRHFITMSDGIQVEPLNAYRKMEKKLKREQKRLSRKKKGSKNRRKQIVKLERLHQKIRDSRTDFNHKVSSAIAKHYGIVVVEDLNIQGMERNRHLSGSIVDQGWYQFLSMLKYKMEWREAELIEIGRXXXXQXYAPDVXXXXXXXXCQIAHTVAMCXFFILIVT

SEQ ID NO: 23194 - protein, 515 aa, unknown
  TnpB Polypeptide
MSNEHQAENGCMMSSLLLGKQSQPSLFVTVEYLVPSNEMTLIDKWLTCANDTLTTTLSQMLPVASTSNGKDCFPYWNESVAEKSKKLWLPTKTDWLDLALTSLSGSLNITGATSWFSTILLSPLKLNWLPTSWLSSLSSPVVSTVSGNTVKRLQKIRIYPTSQQRQILRNWMGTARFVFNKTVEYLRQTGTKANWKLIKTGILNDLPKWAKDVPYQIKSIAIRDACLAVRQAKLKFKQTGQIQQVKFRSKKAQRDSIYIPKSAVQQQTVYRTLLGENLNPRELFPQIKYDCRLVYQQGEYYLCIPFDKAIKQAENQRQKLVALDPGVRTFMSFYSETLAGKLGEHDFGRIVRLCYYLDDLMSRMSQVKCRQRYQMWKAAGRIRQKIKNLVNELHYQTAVFFCKQFETILLPTFETQQMVSKLHSKTARSMLTWAHYRFKTVLKDVAEVYQSKVIDVNEAYTSKTCTVCGYVQSIGGRETWTCKSCGTDHDRDLNASRGIYLKYCVALGDTPSRQL

SEQ ID NO: 23195 - protein, 392 aa, Rhodococcus sp.
LVSVVAVTVRGVKQVVRVKLLADAQQLDAVLRTLAVCNDTATLVARIAHEKRVFRKRDLRAVTYATARGHGGLGAQVAQSVIRKVADSYTTLRANLRNGRYGPKGSRRRARVENTPIRFRPDAAQPFDDRCLSWQHDQDGRGGTVSIWTVDGRMKNLRFVGHPDQVAMLRDYRKGETDLVVQRDRKGNPTAYLIAVCDLPDPPVASGEHLNTPDGWIGVDLGIVNIAVASDRNLGDHLIDTYGDGAPDGPTGRGSTKDRRTRNRELRYTLQKKNTKSAKRLLRRRARKEARFAADVNHQISKKVVAEAERTGRGIALENLTGIRERVRFRGAPTGHALELGVRATRGLHFLQGRPGGGAGVVGGSGEHQPPLYPVWSYREEEPAPPGPVLLS

SEQ ID NO: 23196 - protein, 374 aa, Rhodococcus sp.
VGGELEGGVFVRCGESGGGVVELVDVPVGEAEGPPGRFPPVQGQEVGVVVPVQHRGVRARGRGSSACEAAADRDRPDARVHTETGPPRRRRHGADPVGDRVIAAGPVVRLVFRSGPAGRTRHADGGFSVGGGVDLGVKTLAVLSTGEMIENPKHLEHAQKKLRRLNRQAARRVGWDKRTGQQPSNRWLATQAQVARLHAYVADARRDGLHKLSTRLVRSHDVVVIEDLNVAGMLRNRSLARHIAGVGMGEVRRQTVYKAEWQGTALHIADRWYPSSKTCSACGEVKAKLSLKKRVFKCECRLRLDRDLNAARNLAALVQASSPSCGATVNEPDGTLRKARASRAAGIATGRLTPRVSQGRDREVSDQGTDFHVS

SEQ ID NO: 23197 - protein, 407 aa, Rhodococcus sp.
LAVRPVPNRGPCAIGQGLQLFPRMWNSLLFCGEISVGSVSPRSVGDCPHSRKHVRIGCVGWGQNSVAGSGGCRVSTLLQAYRFALDPTPDQESALRSHCGAQRFAYNWGLAVVKANLDQRAAERSYGIGGDDLTPAVDWSAYSLRKHWNQDKHLVAPWWAENSKETYSSGLANLATALSNWSKSRSGKRKGRRVGFPRFKGKRSALSCRFSTGAFGLTDSDRRHVRLPRIGIVRTHESTRKLARRIDAGTARIRSATVSFRRGRWFVSFSVEVRRAEPETRTVASPSVVGVDLGVKTLAVLSTGEMIENPKHLEHAQKKLRRLNRQAARRVGRDKRTNQQPSNRWLATQARVARLHSYVADARRDGLHKLSTRLVRTHDVVVLEDLNVAGMLRNRSLARHIAGGRDG

SEQ ID NO: 23198 - protein, 469 aa, Rhodococcus sp.
VAGRGGCLVNTVLQAYRFALDPTPTQEEALRSHCGAQRFTYNWGLAVVKANLDQRAAERSYGIADADLTAAVDWSAYSLRKHWNQIKNETAPWWAENSKEAYSSGMANLAAALSNWSTSRSRTRKGRRVGFPRFKGKRSALSCRFSTGAFGLADSDRRHVRLPRIGIVRTHESTRKLARRVDAGTARIRSATVSFRRGRWFVSFSVQVQRTSPAPVPRATAAPSVVGVDLGVKTLAVLSTGEMIENPKHLEHAQKKLRRLNRQAARRVGWDKRTGQQPSSRWLHTQDRVAKLLAYVADARRDGLHKLSTRLVRTHDVVVLEDLNVAGMLRTRSLARHIAGVGMGEVRRQSVYKAGWQGTTVHIADRWYPSSKTCSACGEVKAKLSLKKRVFKCDCGLRMDRDLNAARNLAALVQASSPSCGATVNEPDGTPRKARTVRAAGIATGRLTPRVSQGRGREVPAQGTDFHIP

SEQ ID NO: 23199 - protein, 418 aa, Rhodococcus sp.
LSRVVVGRCSTLLVQLRYNYRISPTPGQRQALSRAFGCARVVFNDALAARLSAFEQKLPYPKDGELSHKLITDAKKTEERAWLSEVSAVVLQQALADLNTAYRNFFSSITGTRKGPKVAQPRFRSRKHNRQAIRFTRNARFQVTGAGRLRLPKIGDVKVSWSRELPAEPSSVTIIKDASGRYFASFVVQTGDHETLPSTDTEVGIDLGLTSFAVTSDGKVIESPKFFRQAERRLKKAQQALSSKQKGSKNWEKARVEVARAHTRVADRRKDFHHKLSTQIIRENQAVCVENLSVKGLSRTRLAKSVHDAGWSSFVNMLEYVNMLEYKAQRHGRTFTRVDRWFPSTRMCSECGAVGEKKPLRVRVWTCPCGAVHDRDINAAKNLLAAGRAERLNACGADGRLRPAEAVSSEAGTHRGAA

SEQ ID NO: 23200 - protein, 460 aa, Rhodococcus sp.
VQNRYCWRSLRDQTPFEGVHQFRQLHSRRVLDKQMPVVVLAVELGQGCAEVGAHLRQDRFHCGQVLAGEDCAPMFGHEDHLRMQSENACRVSPLVVGCCRRWMFYSVRAASISVPRLSDARSTTPVGPGVRVCAGGHRGETHPAAGVACRRGIGGVGAGLQDARRAYRNWFDSMSGARKGRRIGAPRFRSRKDNRQSIRLTRNGFSIRPNGKLYVAKVGEVKVAWSRGLPSQPSSVTIIEDAAGRYFASFVVEVDDQPLPEAYAEVGIDLGLATFAVLSNGTVIASPKFFRQAERRLKKAQQALSRKQKGSKNRAKARVRVARAHTRVRDARLDFAHKHSTAIIRENQAVYVEELCVRGLARTRLAKSVHDAGWSMFTRMLEEKATRCGRTLVKVDRFFPSSQTCSVCGRVDGPKPLSVRSWRCPCGAVHDRDLNAARNILAAGRAERRNACQETVSLPT

SEQ ID NO: 23201 - protein, 443 aa, Rhodococcus sp.
VHEYLNGLSVRFGSGLRLVSVVTVTVRGMKQVVRVKLLADAQQLDAVVRTLAVCNDTATLVARIAHEKRVFRKRDLRAVTYATARGHGGLGAQVAQSVIRKVADSYTSLRANLRNGRYGAKGSRRRERVENTPIRFRPDAAQPFDDRCLSWGYDPGGRGGTVSIWTVDGRVKNLRFVGHPDQVAMLRQYRKGETDLVVQRDRRGTPTAYLIATCDVPDPPVASGDHLNTPDGWIGVDLGIVNIAVASDRTLGDHLIDTYGDGAPDGPAGRGSTKDRRTRNRELRHTLQKKSTKSAKRLLRRRARKEARFAADVNHQISKKVVAVAERTGRGIALEDLTGIRERVRLRKPQRATHSSWAFAQLGAFISYKAARVGVPVLSVDPANTSRRCIGCGHIDKKNRPHQERFCCLDCGFVEHADIVGSHNIAHRAAEDYRAQSTVPGAA

SEQ ID NO: 23202 - protein, 331 aa, Rhodococcus sp.
LLQAYRFALDPTPDQESALRSHCGAQRFAYNWGLAVVKANLDQRAAERSYGIGGDDLTPAVDWSAYSLRKHWNQDKHLVAPWWAENSKETYSSGLANLATALSNWSKSRSGKRKGRRVGFPRFKGKRSALSCRFSTGAFGLTDSDRRHVRLPRIGIVRTHESTRKLARRIDAGTARIRSATVSFRRGRWFVSFSVEVRRAEPETRTVASPSVVGVDLGVKTLAVLSTGEMIENPKHLEHAQKKLRRLNRQAARRVGRDKRTNQQPSNRWLATQARVARLHSYVADARRDGLHKLSTRLVRTHDVVVLEDLNVAGMLRNRSLARHIAGGRDG

SEQ ID NO: 23203 - protein, 408 aa, unknown
  TnpB Polypeptide
MEIIRGYKTELDPNNKQKSALKQHCGIARFAYNWGLKQRIDLYKNQGKSINAIEQHKQLNELKKSDFSWMYQCSKCAPQEALRNLDKAFKKFFDNIKKFKSGKKVDKVGFPKFKSKKKGLGSFRLTGAIKVDTGHIKLPVIGWVKLKEHNYLPVDNVHILSVTVSSRVDKWFVSLQVKESIQEPTETTSEIVGIDLGLNHLATCSNGVVFENPRALKNNEKKLKRLQREVSRKLRNSKNRLKAKLKLAKQHLKIFNIRKDVLHKITTSIVKTKPRVVVMETLNVKGMLRNHRLAKHIQDVSFGEFKRQMEYKCKQNRIGLQFVSQWFPSSKTCSNCGHIQDMPLSERIFKCDKCGLQIDRDMNASINLRDTVSSTGSACGDDVRLPLLEAVVCEAGIKHKSYSIDNFL

SEQ ID NO: 23204 - protein, 351 aa, unknown
  TnpB Polypeptide
MVQYQLKLRLSQAQKRKQREWLPTLGSIFNFGIRKIELNARDKIYFSANDFQNLLAGHSDKLGIPSHTIQSVLSLAHTSWQRCFKGLARKPRLKGFRRPLNSIPFPDPIKAPIGGKIQLPGLGKVRFHKQWMPEGKIKCARLVKRQSGDYLCLFIDAQPKSIERTGEASVGIDPGFKSLIALSTGEKIRHPQEFRSIEKRLGQAQRGHDRKLAARIQERVKNRRKDRNHKLSRRLVAENRTICFLQDNYRAVAKNFGNSVGDSGHAGLRLMLSYKSLLGGTKLIFPENRNSTKTCSTCGGLTGPSGLGGLAVREWTCGRCGARHERDVNAARNALIFGLGWSLETVHANSA

SEQ ID NO: 23205 - protein, 351 aa, unknown; identical to SEQ ID NO: 23204
  TnpB Polypeptide

SEQ ID NO: 23206 - protein, 317 aa, unknown
  TnpB Polypeptide
VGKRSRLEIPVGQELKDEYGLGYHERLRLEVRGNPKWDGKQGRLELEYDEVSDTFRAFQPVTVPDSRLDSPLASEEAALDVGANNLVACSTTTGNQYLYDGRELFGRFRETTDEIARLQSKLREGRYSSNRIRRLYRQRTKRRDHAQNALVRDLVERLYDEGVATVYVGDLTDVLEAHWSVRVNEKTHNFWAFKKFIHRLACVCEEYGISLETESEAWTSQTCPECGDHEKTVRHEDTLTCPCGFEGTPTSRRQRRSFGKTAIAKSGRWHGPCDSSGTTTTGRGNYTLTKVPKKCARTCKLPPWVGSRTLNGGILAL

SEQ ID NO: 23207 - protein, 505 aa, Symploca sp.
VATLRQTFRLYPNQSQQRQLFKARRWHQYIYNACLAGRKHAWETEGRSIKYFDQQNKLPQFKKDNPEFAVLGSQALQATVKRLNLAFVAFFQGLRKRPKFKSLRNYSGWTYPGSAGWKVYSNGKHGKLELRDNGLSIRMRGKVKQWGNPTTLTIVYRPRTNQWHASFTVEVATVEAKYGSTSDLKYESIIAYDLGTSTALTTYDGSEYVELTNPRFLGNKEQKVKQKSKQMRRKVAPNRNKKTQRCAFHTGGNLRGELSTCREPSRRAFHLPETDKWVSPPGGSPLRMGRTLPSNRWKKARKVVSRLQRKVSNQPQDWQHKVTSDIASRYDIGVTEELRVRNMTRKALKGSKRKKQKAGLNKSILDVGMSTLNKMIGYKIEAKGGLLLVLDTKKVQLSQRCPNCGKVHKHWAELSNRHHVCDACSFEVERDQGSALVMYQVATLQQPGDGIALVDVDASGSTSKRRNRKDTASLKQLQQKKRSKLSKSSPDDGVARNPVLRSEAG

SEQ ID NO: 23208 - protein, 413 aa, unknown
  TnpB Polypeptide
MHYTYRFRLNPTPEQRERLDYHRNTCRQLYNHSLNEFEQIPESAGTLNQRVRRVRDQLTDLKEWWGELNDLYSTVAQAAVMRIEDSIKALSELKQHGYNVGSLNWKAPQDFRSFTYIQSGFEFDSKNGQTVLSLSKLADIPITKHREIPDDVTIKEVTIKKEPTGEWYAFLVVDGKQTPEKPTDPERCVGIDVGILKYTHDTDGTAVESLDLSVERERLERAQRDLSRKEHGSNNWEKQRNVVAKRHADIKRKRQDFLHKLSNYYATEYDLVAVEDLDAKELIEFPGNSRNRTGAAWGTFQQMLEYKCEREGTHFVEVDPRNTTKECASCGVKTDKPLWVREHSCPACGFEADRDANAAWNILSRGLEDIGVVHSESTPVETALPTDTVVSAKRVIETGSPTLKERTASAVSE

SEQ ID NO: 23209 - protein, 370 aa, unknown
  TnpB Polypeptide
MVKLLPDKQQEDTLIETFVKFNEACNFLSQFAFERNLYNKVLLQKLVYRDIRETYSLSAQLAIRVIAKVVETYKADRTVMHEFREYGSIVYDQRVMSFKGLDTVSLNTVRGRIRVPITIGKYRELPLDRVRGQCDLVRRNRIFYLMVVAEIPEEEEISLTDIIGVDLGIENIAVDSSGHYYTGDKINEVRTKRSNLRSRLQACGTKSAKRHLKRLSGKERRFVRDVNHVISKEIVERAKGTSSAIALEELKNIRKRTTVRKNRRYRHNSWSFYQLRTFIEYKALESGVPVIGVNPMNTSRECPVCHAIDKRNRPERSSFKCVSCGLEGEADFVASLNIRNRAAVNQPIVAGAIFDQQLIPQLQAPSVRAG

SEQ ID NO: 23210 - protein, 387 aa, unknown
  TnpB Polypeptide
MVKAIKAMLIPNNVQKTKMFQYAGASRFAYNWALAREKENYEKGGKFISDAELRKEFTKLRHSDEYAWLLSISNNVTKQAIKDACTAYKNFFKGLQKFPRFKSKKRSMPKFYQDNIKIQFSNTHVKFEGFSSSRKRNKQKLNWVRLAEHGRIPTDAKYMNPRISFDGLNWWISVCVEFPDCIEKLNDDGIGIDLGIKDLAICSDGAKYKNINKSQKVKKLEKQKRRLQRSISRSYEKNKKGESYCKTNNVIKKEKLLLKRNHRLTNIRKNYLNQTTSEIVSRKPRFICIEDLNVSGMMKNRHLSKAVQNQGFFEFRKQLEHKCSDKGIQLIVADRFYPSSKLCSCCGNIKKDLKLSDRIYKCDCGNVIDRDFQASINLKAYGERVAS

SEQ ID NO: 23211 - protein, 264 aa, Caldicellulosiruptor sp.
LTFPKTELKLKTRITDKLKEVRIIPKGSIYVVEIVYEKEIAKIQRPPKRIAGIDLGLNNFVTLVNNIGIKPIVINGKVIKSINQYYNKKRAQLMSYVGNRGSSKRIEKLTLKRNNKIKDFMHKASRFIVNWCKQYDIDSLVVRYNPNWKQEIELGKVNNQNFASIPFYQFVNMLKYKCEEEGINIIITEESYTSGCSFLDGEEINEINYNPRRRIKRGLFRSNKGILINADVNSAYNIIRKVFPEEFAKGIEGVGLHPVRLNIV

SEQ ID NO: 23212 - protein, 294 aa, Caldicellulosiruptor sp.
MYQIVFPKNQFKIEDKKVRLSLGRKFAKESGVRYLYFELPATVLGKKIKEVRIIPRFNGRWFEIEYVYEDKQQLNIFDLSRYLGIDLGLDNFAAVVDTIGTAFLIEGRFLKSVNRWYNKERARLQSIYSKQGIKCSRKLALVSRKRQHIIDNFLNQAVSLIIKHCLNNQISAVVVGRMKGIKQGTELGAINNQNFVGIPYDKFKRKLKSKCMNYGIRYMEVDESFTSQRCSRCGIVDKSNRKHRGLYVCKGCRNVVNADINGAINILTKVAGESAVKQITSSGCVNHPVRIRVA

SEQ ID NO: 23213 - protein, 260 aa, Caldicellulosiruptor sp.
LYFELPQNITGKKLNGVRIIPKFHGRWFEIEYVYEEEEQMSILDPSRYLAIDLGVNNFAAIVDTIGTAFLIEGRYLKSVNRWYNKERARLQSIYSKQGIKSGRRLAQISLRRQHIIENFLNQTVNLIVKHCLSNQIGWVVVGKMKEIKQEINLGKVNNQNFMIIPYDKFKKKLKSKCEEYGIGYVEVDESFTSQKCSRCGVIRKSNRKHRGLHVCNECGYVINADINGAINILAKVACESAIRQITSSGCVNHPVRIRVA

SEQ ID NO: 23214 - protein, 328 aa, Caldicellulosiruptor sp.
MDKTYILPVPEEYQVLARELSKQSGKIYSKAVSFLKRMNKKGIKISRKTFDRYMEWWIHQKDFVLHSQSKQAAYQQVWTNYVATLRKIQKAKKKGKDISRIRLPYRNKRYNKVVFKESAVHLKGNVLIFSNKKGYKAIVLKDVMIRTTPKYAELIYHHSKKKYYFHVVVEVEGKKNEKDKGVLAIDLGVIHPMVCFDGQNVLLYNGGVLNSKLRYRNKKIAEFQEKLSKCQKNSQRYRKLTRAKRRILTKINHQIRDVLEKYTSHLMGYCVKNGIGIIVLGDLKGIRNGAKHGKVANQKVHQWMFKKVAKRIEQKAQETCQEFCVSIS

SEQ ID NO: 23215 - protein, 383 aa, Caldicellulosiruptor sp.
VLKAYRYRIYPTKAQEEFFEKAFGCCRFVWNKMLEEKLEALKQGKKVPRITPARYKKEYPFLREVDSLALANVQMKQEKAFKDFFKNPKHFGIPKFKRKKDKQSYTTNNQQTKSGNETIRVDFEKGLLYLPKVKSGIKAVFHREFEGKIKSATVVKTKAGRYYVSILVDVQDPRNKEVNRIFENEITKRENFICGIDTGLISFVTIANDTGISKIEYPKYLIKAEKRLKRLQRQLSRKKEGSKNWEKARERLAKEYEYVKNSREDFLHKISKTIIDENQVVVVESLNVKGLSRTRLSKHILDSSWSKFLRYLKYKADWYGRKVIEADRSFPSSKMCSRCGYINKELKLKDRVWKCPKCKAVHDRDENAAKNLKNYGIAYIRNQ

SEQ ID NO: 23216 - protein, 199 aa, Caldicellulosiruptor sp.
LTSLPIVINGRVIKSINQYFNKKRAEFMSYVGNRGISRRIEKLTLKRNNKIKDFMHKTSRFIVNWCKENNIDTLVIGYNSGWKQEIELGKVNNQNFVSIPFYDFVNMLKYKCEEEEGINFIVVEESYTSGCSFLDREEINKTSYNPQRRIKRGLFKSNKGILINADVNSAYNIIRKVFPEAFAEGIEGVGLHPVRLNIA

SEQ ID NO: 23217 - protein, 352 aa, Caldicellulosiruptor sp.
VKESEDYRLLPSQVAQQTLISVIEAFKSFLGLLRAKKEGKIEEKVSMPKYLPKDEMYQIVFPKDQFKTEGKKVRLSLGRGFAKEFGVRYLYFELPQTVLGKKLKEVRIVPRLGGRWFEIEYVYEDKQQLNIFDLSRYLGIDLGLDNFAAVVDTIGTAFLINGRFLKSVNRWYNKQRARLQSIYSKQGIKCGRKLALVSHKRQHIIDNFLNQAVSLIIKHCLNNQISAVVVSRIKGIKQGIELGAKNNQNFVGIPYDKFKRKLKSKCMYYGIRYMEVDESFTSQRCSRCGQVSKSSRRYRGLYVCKDCGYVVNCGYKWSDEYTFEGIRYKVESARKQIASNGCVNHPVRIRVA

SEQ ID NO: 23218 - protein, 418 aa, Caldicellulosiruptor sp.
MDKTYILPIPNEYQNLARELSMQSGKIYSKAVSFLKKINRKGLRIKQKTFYRYMEWWIHQKSFILHSQSKQAAYQQAWTNYTATLRKIKKAKKKNKNTSKIRLPYRNKKYNKVCFKDSAIKLEGDNLILVNMKGAERIVIDNVRIGIKPKYAELLYHADKGKYYVHVVVEIAKEQEAKKRSGKTIAIDLGVIHPMVCFDGNKVVVYNGGVLNSILRYRNKKQSLLQSKISGCQKGSKRRGKLQRAKTKLLRRLSNLIRDVLGKYTSHLIGYCVENGITTIVMGDVKGIRNSKKKSNKVASQKVHQWLFRKISKMIEQKAEFAGIEVVYVKENMTSQICPVCGSKNKPLDRNYECKSCGFRYHRDGVGAVNIYRKYTGESLVVGRLACPTGVRFKSHLRCPVEWNTHPWDKNCSTGKVA

SEQ ID NO: 23219 - protein, 290 aa, Caldicellulosiruptor sp.
LPKYKKKNGRNVSIFTNQQCKIKDRYLTFPKTDLKLKTRIEGKLKEVRIIPKGSVYVVEIVYEKEVVETKKPSKRIGGIDLGLNNFVTLVNNIGIKPIVINGKVIKSINQYYNKKKAELMSYVGNRGTSNRIKKLSIKRDNKIKDLMHKMSRFVVNWCKQYDIDTLVVGYNKEWKKEIELGKVNNQNFVSIPYYQFINMLRYKCEEEGINFILVEENYTSGCSFLDGEEVNRTNYNPRRRIKRGLFRSNKGILINADVNSAYNIIRKVFPEAFAEGIEGVGLHPVRLNIA

SEQ ID NO: 23220 - protein, 383 aa, Actinomadura sp.; identical to SEQ ID NO: 5

SEQ ID NO: 23221 - protein, 449 aa, unknown
  TnpB Polypeptide
MATRRQTFRLYPSKVQEKALLAARRLHCYLYNACVSHRETEYKLHRRTVAYFEQQNLLPEFKQVWVEYAQLHSQSLQATVKRVDGAYQRFFQGLSKKPHFKSIRKYSGWTYPAQSGWKVNSTGKYGTVTLNDLGITLKMRGQAKHWGVPTTLTIVHRPSRRQWFASFTVDVAIPEPKLGSQSDLRYESIVAYDLGTETALTLFDGAEFQEIANPRFTQRSEAKIRKLAKLKRRKRAPEKGVKASRRWRKIHQRESRLQAKVARQRKDWQHKVTSEIAGRYDIGVTEKLNVKGMTRKGGKRKAGLNKSILSVGFGTLNQMLTYKIEQKGGLVLVLPTKTIKPSQRCPKCGAVHKDWAELNNRYHVCSACGFEVLRDRGSVMVMYNVATHQQPGLRTSLVSLGCLSTTSKTRHSRQRRVATTGSMKQLGQRKRQKSRRQVDGETPSADAVG

SEQ ID NO: 23222 - protein, 202 aa, unknown
  TnpB Polypeptide
MINKLKNLARKQQKLARKQKGSKNKEKARKLVAKVHERTSNTRHDFLHKLSRKIVNTNQVVVVEKLNIKGMVRNHCLAKAISDVGWGMFINFLDYKLKQKGGLLVEIDRWFPSSKTCSNCLYQMSEMPLDVREWTCPSCGTVHDRDENASKNIRAEGIRIIKTDGIAVSANGGTVRPKGGLKSVLGHEPVKLEANTVIFDSV

SEQ ID NO: 23223 - protein, 286 aa, Cylindrospermopsis sp.
MDQPFLVQGMCQLFEGLFEGDVNDSIGKARKLVEAMIIPRNNGSYLLKFIYEVQEPTTRSTQVIAGIDLGVNNLVALTTNSSTIRPLLVNGKPLKSLNRLFNRKRDLIGSYQSESQPSRRLGGITSKYHNRVDNYLHQTSSIVINYLKSNGIKTLVVGKNDEWEKETRMGISERHKFMPIPYSRLIGMLEHKCRLAQIELITVNEAYTSKCSAWDFEPIAKHQKYLGERVHRGLFRSANGQVINADLNSSLNIIRMYSSEALTAERIGSCGVQPLKVNPLARVKQI

SEQ ID NO: 23224 - protein, 327 aa, unknown
  TnpB Polypeptide
VLSLPNSLSGQRSLILRPRLASAERVAFAIQRFFANCKANKPGKKGYPQFQKNNRSVEYKTTGWKLAEDKKHITFTDGFGAGEFKLIGTWDLHFYQTDQIKRVRVIRRVDGYYAQFCIDAERRIESIPVKHNIGIDVGLTDFYTDSDRNKVDNPRHLRKSEKALKRQQRRVSKKKKGSNNRKRAIKRLGRKHLKVSRQRKDFAMKLARCVVHSNDVVAYEDLKVGNMVKNRRLAKSISDAGWSQFFEWLQYFGVVLGKIVIAVPPQYTSQECSQCNKIVKKTLSERTHICQCGCVLDRDENAAINILAKGLKQYPGALENLNALLTD

SEQ ID NO: 23225 - protein, 369 aa, unknown
  TnpB Polypeptide
MKLIAQLQLKPTPEQAAALQNTLKTANAACDFLSALAWEHQEFGKFGLQTLGYRVVKDRFELTAQVVIRCIAKVADAYKLDKKVQRTFKPVGSIAYDDRILRYKLSQGTVSIWTVDGRLEIPFVCGDRQRKLLESRQGESDLALIKGKWFLLATCEVEEPETDSGDGVIGVDFGIAEIATTSEGKSYSGEKVKALRRKMKAYRSRLQKRGTKSAKRRLKKASKKQERFVCNTNHCISKELVRDARASKKALGLEDLTGIRQRARLNKEMRWQMGNWAFAQLRQFVTYKSKQAGIAVIIVNSAMTSRTCSVCGCCEKGNRKSQPHFQCLACGHESNADFNASINISRRAAVNRPPVAAPLGLVTSPRLSP

SEQ ID NO: 23226 - protein, 297 aa, Burkholderia sp.
  misc_feature (297)..(297): Xaa can be any naturally occurring amino acid
MIIVYRYRVKSLNGLLNKQSRAVNYVWNFCNDTQKHALKWRKKWPTGFDLNVLTTGSSKELGIHSGTINATCEQYAKSRSQHRRPYLRYRGRKSLGWVPLKGRDLKREGDAFRFAGHTFRVFNSRPLPDGKIRDGTNFAQDARGNWFLNIVIEMPDVPARPVRSGVGIDLGLKDFATLSTGEKLPHDRFGRRAADKLAKAQRARKHKRHIAKLHAKVANARADFQHKLALDLVRRFDYIAVGNVSAAKLARTRMAKSVYDAAWSSFRNKLRYKAMAHGATFEEVDESGSTQSCSSCX

SEQ ID NO: 23227 - protein, 430 aa, Microcoleus sp.
MLTMTYEYKLQPTAEQMTVIEHTLDVCRSVWNFALRQRKDWCSSRRSPVNACSLRSEYIISANEPFPSYHKQAKQLTDAKSQYPHLKTVHSQVLQQVLRTLDRAWDDMKARGFGFPRFKNKYRMRSFVFPQLGKEPVKDDAIKFPKFGWIKWRQSRPIPEGFEVKQARIVRKASGYFVMLSLQLNVAIPQPMPQGHPRGLDLGFDKFVATSDGEEIKRPRFLKTKQRQLKLLQRRLKNKQNGSNNRHKLNQKIARLHQRISDHRKDWHFKLAHHLCEGAGMIFVEDINFVSWQRGMLSRHSADAGFGQFVHRLEWVCWKTDTYFAKVNKDGTSQTCPNCGAHTGKKTLEIRVHHCDECGYQTTRDVAASQEIRNRGLTAVGQTVVENVCGLDATGSISHDALVGTERSRNPDSRGLGIPHFKDIKRSEMA

SEQ ID NO: 23228 - protein, 459 aa, unknown
  TnpB Polypeptide
MIFFCYNSFIPKKGGSFMNLYSTYSCKIKHYNRILKQTVVIYRSAVDYCIQVCLQHWDELSLINTNLQKRQYVEQMIHSTKCCTAIYDFDKKFYKFPSYLRRAAITEAIGKVSSYKSNLENWTNEDPATRGRKPSFPKAGLIYPCLYRENMYQQTGEYTARIKVYVRNTWDWIDIQLRKSDVDYITRHCSDRKQCAPTLQKRGHQWFLDFPFEESITLKNASAYEQTILAVDLGINSSATIAVMKADGTILGRHFLRLTKEYDSLTHAINRIKKAQQHGNRKTPRLWAKVNGINDHIATSTASFIMDVAIQYNADVIVFEHLDTSGKKSGSKKQRLHLWKSQYVQSMVTDKAHRLGMRVSHICAWGTSKLAFDGSGITLRGRNANLSSYSICQFPNGKIYNCDLNAAYNIGARYYIREILKSLPAKVRLAIEANVPQFAKRSTCTLSSLLNLNAELILS

SEQ ID NO: 23229 - protein, 402 aa, Escherichia sp.
VKRLQAFKFQLRPGGQQECEMRRFAGACRFVFNRALARQNENHEAGNKYIPYGKMASWLVEWKNATETQWLKDSLSQPLQQSLKDLERAYKNFFRKRAAFPRFKKRGQNDAFRYPQGVKLDQENSRIFLPKLGWMRYRNSRQVTGVVKNVTVSQSCGKWYISIQTESEVSTPAHPSASMVGLDAGVAKLATLSDGTVFEPVNSFQKNQKTLARLQRQLSRKVKFSNNWQKQKRKIQRLHSCIANIRRDYLHKVTTAVSKNHAMIVIEDLKVSNMSKSAAGTVSQPGRNVRAKSGLNRSILDQGWYEMHRQLEYKQLWRGGQVLAVPPAYTSQRCAYCGHTAKENRLSQSKFRCQVCGYTANADVNGARNILAAGHAVLACGGMVQSGRPLKQEPTEMIQATA

SEQ ID NO: 23230 - protein, 412 aa, unknown
  TnpB Polypeptide
MNKAYEYRIYPTKEQVSIFNKTLGLCRLYYNLVVENKNKDHKMPIEGYKPTFAKFKPEALEWIKDVDSIPLGQVWCDVRGAYTNFFASLKGIRKGKPMQPPTFKRKKNNKASFRYTIQGNVAHINSHGLFVSRRLGYIPICASSQFCKGKWKTITFKRSASGKWYVAICVDIKEEQNKIQNGKAVGIDWNCNSDSFLTLSNGTKIKCPRFLKRKELQLEKYQQIQSNRFVKGKETQSHRYQKAKLKVARLHEKVVNQRKDWLHKVSRELANKYQYVFVEDVNLNKMASELEHGKTIGDQGFGLLRQYIAYKTNLMKVPANNTSKTCHHCGNINPQVVLGIKQWVCPVCNAQHDRDVNAAQNILYLGVKRTIGREPTDVIKNARGSNETRMPEAITDNSPCKLGESHASLVHG

SEQ ID NO: 23231 - protein, 433 aa, unknown
  TnpB Polypeptide
MKTVKLQISNAPDVLDDMRVFSSIVRMAFNRYQEGLSEKEVRAYVSSKFSHNSWFIQSAVKEAQTIYLARGKEKIVFGGKWNLTQYLKGLITKEQFKRTRMMPICSYGEKANTGNRLIDFDLLNSLIIYKPSRYVHKEIRFCPVKKKLAHELAIVQELADKKKMPITVKFTDKHLYLTYDESLIYNEAYNNLKYTRVLGIDMNPNYIGVSVIEFDKKDEFKLLHKEVYDLTILTKLSGKASTDAKSQYYTNKLKHETIAIAHKINKLVDYWKCSKLAIEDLTINSGDIQKGNTFNRLCNNKWERTLFVNKLKMLANIHKYELVEVNPIYSSIVGNFAYGNENTPDMVAASIEIARRAYKKFEKGWFYPKFNVETLDEQWKQTLAGVKTWKKLFQIVKEAKLKYRFLLSDYVGNAVFSKFYRQCRWKLYIFSRS

SEQ ID NO: 23232 - protein, 565 aa, unknown
  TnpB Polypeptide
MLSNTKKAEILHRAEEIRTIRNEISEIFFSDMLGFQDMSKFEAFNYFNPLFSKRLRSHYLKKAIEDVWKSYQLRFDAIRNKIEFVKVEELVPSFYKINSHGHKNGELRSIERHTKKTELTKVLTWLARYGKDDSVQWLESVMPSVVETKKKFYKTILVKIQKFGFARLMQLALSRRESVYKLYQKRGRINFESLTFSGRSRLTSPIVCARRNENGKFDYFIEISWDWFNKGYRGGSDHSLCIPFKYNKAYHRSLKRYCNGDCTPYTVVIRGNDIHIVLTRVGYRYKNITTILPDNTIGIDINSKHNMLALSSGAFISNDDDLIEDLKTELLKIDKKHKSYNDKFNKNEEHSAFKWSRKDKARIFAISLKLNESNKRTIANVCKNYGLGGVENLVLENLTGFKGSKLYADDSKGFNLGRLHLRTRLSSLKDEFIHIAPKYGLSVSLVQPEYTSKMCGHCGCIDDRNRQTQEVFKCVECGHTENADIHSAKNIKFRLTSTVLRGYLLEKARDNGYRNFQPKSLSRWQVREFLEKCHHSGLFEQSIENYTKPAISRICVILGGAGLFS

SEQ ID NO: 23233 - protein, 420 aa, unknown
  TnpB Polypeptide
MVVTKGIELRLYPTKAQKVFFNKCIGAERVAYNAMLNTKMVLYNDYGVKNFNPNWSSLKEFYPWMNEVDSRCLNYAKIEVATAYKNWFRSLKTGGKVGHPKFKKKSHSGNYHNTSMPTTPNKLFRDGWIFIPKAGLVKFVHYKELDLTKIKKIRYLTIKRTNTNKYFVSVCCDVELPEYEHTGNCIGLDLGIKDLIVTSDGTKFENKRFIKSCEKRITHLRRIHSHKQKGSRNREKARIRLATAYEKLGNRKKDYLHKLTTKIVRENDIICIEDLNVKGMLNNHTLAKSISDCSFSMLRSMLTYKCEWYGRKLVVIDRWSPSSKRCSCCGHIMASMGLDIREWVCPSCHTVHDRDVNAAKNILDEGLRILDIGPELPEYKPVENPTMDDRAETYLKSSGSVKQEAYMRMGGETTTSLACG

SEQ ID NO: 23234 - protein, 410 aa, unknown
  TnpB Polypeptide
MNKAYEYRIYPTVEQVSIFNKTLGLCRLYYNLVVENKNKDHSMPIEGYKPTFTKYRPEALEWIKEVDSVPLAQMWRDVRGAYTNFFKSLKGERAGKSIQPPTFKSKKNNKASFRFTCLTDSRKITSRGLYVSKKIGYIPIQASSQFCKGKWKNITFKRSASGKWYVKICVELKEEQNKIQNGKAIGIDWNCNSDSFLTLSNGTKIKCPRFLKRKEMQLEKYQQIQSSRFVKCADTQSHRYQKAKLKVARLHEKVANQRKDWLHKVSRKLANKYQYVFVEDINLQKMSSELEHGKTVGDQGFGLLRQFLAYKTNLVKVSAEYTSKRCNTCGVINPTVVLGVKQWVCPVCNAKHDRDVNAAQNILYLGVKRTIGREPTDVLKNARITPRMPEAITNNSPCKLGESHTALACG

SEQ ID NO: 23235 - protein, 408 aa, unknown
  TnpB Polypeptide
MFRMAYNRLQEGCSENTTWHKLKEIFGVNCWLASSAVKEAHGLLNANNCKKVLFGGKWNLKQYLKGLITKEQFKQERQMPLCSIGESNYHGNRLFSFDFANNTVRYKPNRDIRKEIKFCSVKKKLAQELAKVQELAEQKKMPVTVKFTDKHLYLTYDESLIYNEAYKSLKHNRVLGIDMNPNYIGVSVIEFDKNDELRVLHKEVYDLTALTKPSGKSLSDAKSKYSTNKLKHETVAIAHKINKLVDYWKCSKLAIEDLSIKPTDKQKGKTFNRLCNNRWERQLFVNKLNMLANIHKYEFVEVNPAYSSIVGNFAYGNPNTPDMVSASIEIARRAYKKFEKGWFYPKFNVETQDERWKQTLDGVKTWKNLFQKVKEAKLKYRFLLTDYVCNAVFSDFYKQRKWKRYVFA

SEQ ID NO: 23236 - protein, 407 aa, unknown
  TnpB Polypeptide
MMLRAYKYRIYPNKTQKVLLAKHFGCARYIYNYGLERKIKSYSETKKSISRFAIQADLPKLKKAEGTKWLSEVNSLSLQASLLNLDMAFTRFFKEKKGFPKFKSKHDNHQSFQVPQNTTVDYDARRVYLPKFKEGIKCKFDRQFKGKIKTSTVSRTPTGKYFISILVETEDTIPNKAPIDENKAVGVDLGIKTFATLSDGTEIQNPKYLKQALKKLKRLQRSVSRKVKGSNRRKKAVKLLTRQYEKVTNKRKDFLHKTSKYLIDHYDTICLETLSASNMVKNHRLALALSDISIGTFNAYMDYKAEWYGKNIIRIGQFEPSSKMCSCGYIYRGLKLSDRVWTCPACGSVNQRDLLAAQNIKKFAFKLNNTAGTAGIYAKESMNPVRGAALETSLADAVETHTSLACG

SEQ ID NO: 23237 - protein, 583 aa, unknown
  TnpB Polypeptide
MARLELKATVSSERVIFVSMSKHCWTLKDKYESQFSVSFYPFMLSNTKKAEILHRAEEIRAVRNEISEIVHNDMLRFQDMSKFSFQKVFNSLYNHRLSSHYLHKAIDDVWIAYNRRFKAIAQKIEFYKVDKLIPTFYKINTHGHHIGDLRSITCHTRKTDLTLALTWLAKHGNDTTIEWLKSTIASGSSKNAFYYKLLGYIQRFGFGRLMRLATSRRDALFKSYFLRGRIIFNSLTFHGRSRHTRPIVSLARKEKGKFNCYIELSWLWNNQGYHGVATNALCIPVKYSKAYHRSLTRYTHSFDTFYTMVITGKDIHIVLYRRGYRYKNNVEISDNNTIGIDVNSKTNMFTLSTGGFIANDSSLINEFIVESRKVDRKQHHYNSRYAIQPDVSAFKMSKTDKIHISSISRKLKESNRRTIVNLCKQLAIKGIWHIAMENLIGFKGTKLHPNDELGFNLGRLHKYINLSSLKDEFIHIAPKYGLSVSLVQPEYTSKMCGHCGCIDDRNRQTQEVFKCVECGHTENADVHSAKNIKFRLTSTVLRGYLFERARDNGYRNFQPKSLSRWQVREFLEKCRSSGLFSSS

SEQ ID NO: 23238 - protein, 371 aa, unknown
  TnpB Polypeptide
MVELKTYKYKLYNRDALKYLDDILVIAGRIYNHCLALHRKYYALYHKSLNKYALSKHLTKLKKQYPSWNDVPSQAVQDITDRIDRAYRLFYSNLKHGIKTNPPHFQKTSKYRSFTTKQAGYKFHDNNKVRIGVKEFAYWNSRPFNGKVKTLTVKRKNNGYYIYVVIEQEAQIENWAKSGKIVGFDFSLKNFLVSSDGTDCSMPKLLQKNLNSLRNLSRKYSKSKGKRGSLQTLQKLHEKIANQRSDMHWKLARQMCRDYDVMVFENLDLANMDKHFKKSINDFGLKTFLSILEYVAHKTSKTVMYADKYFASSQLCSSCGYKNTALKDIKIREWVCPSCGTHHNRDLNAAINLQKVGASAFSKQHPKLSAC

SEQ ID NO: 23239 - protein, 376 aa, unknown
  TnpB Polypeptide
MVELKTYKYKLYNRDALKYLDEILVVAGHIYNHCIALHRKYYALYHNSLNKSVLSRHLTKLKKHHPEWTKVPSQAIQDITDRIDRAYRLFFSNLKHGIKTNPPHFQKTSKYRSFTTKQAGYKFHDSNKVRIGVKEFAYWNSRDFDGKIKTLTVKRKNNGYYIYVVVEQEAQIENIAKSGKIVGFDFSLKNFLVSSDGSDCSMPKLLQRNLNSLRNLSRKYSKSKGKRGSLRTLQKMHEKVTNQRADLHWKLARKLCKDYDVMVFETLDLASMDRRFKKSINDFGMNAFLSILGYVAHRTGKTVMYADKYFASSQLCSECGFKNTALKDITIREWVCPSCGCLHNRDFNAALNLQKVGASTFGKCCPSVATPRIPRL

SEQ ID NO: 23240 - protein, 405 aa, unknown
  TnpB Polypeptide
MAYKRLQEGCSGNDTWHKIKEIFGVNCWLASSATKEAQGLFLSSSGKPILFGGKYNLKRYLKGYITKEQFKQHRMHPLCSVGESQYAGNRLFEFDLGNQVIIYKPSRGVHKEIKFCPLKKKLAHELSIVQELANQNKIPITVKITDTHIFLTYDETLIHNETYKGLKINRVLGIDMNPNYIGVSVIEFGKNDEFQVLHKEVYDLTALTKPNGKYSSDSKSKYYLNKLKHETIAIAHKINKLLDYWKCSKLAIEELSIAPANKHKGKNINILCNNKWKRKLFVNKIKMLANIHKYELVEVNPAYSSIVGNFAYGNENTPDMVAASIEIARRAYKKFEKGWFYPKFSVETQDERWKQTLDGVKTWKKLFQKVKEAKLKYRFLLSDYVGNAVLSKIYHKQKWIYHVFV

SEQ ID NO: 23241 - protein, 436 aa, unknown
  TnpB Polypeptide
MYISDMKTVKLQTLTKPDVLDDMRVFSSMVRVAFNRFQDGLSEKQITAYIKGRFSVNCWLIRSAITDAHALFDSQEQRHIVFGGKWNLKQYLKGLITKEQFKQNRLMPLCSIGEYQFKGNRLVDFSLLNNRVVYKPFRGVRKEIQFCPVKKKLARELAMVQELADQKKMPVTVKFTDKYLYLTYDESLIYNEAYKGLKHNRVLGIDMNPNYIGVSVIEFDKADEFKVLHKEVFDLTALTKPSGEASTDKKSKYFTNKLKHETLAIAHKINKLVDCWKCNKLAVEDLSIKSSDKQMGKTFNRLCNNKWDRSLFVNKLKMLAGIHRYELVEVNPAYSSIVGNFAYGGPTTPDMVASSIEIARRAYKKFEKGWFYPKFNVETLDERWKQTLAGVKTWKNLFLKVKEAKLKYRFLLSNYVGNAVFSGFYNQRKWKLLLFN

SEQ ID NO: 23242 - protein, 407 aa, unknown
  TnpB Polypeptide
MKHTELYITYNAEMVFPNNECRSHFMELLEQARDAYNECAKIIYDNSIPLDIKSVHNAVYSHIRSSYSKLTSNAVIALYRDVMGAIRSIKSNKHENARIPEKTHLNHKLNRYLYKHLTAEGIWLTTNTKRIRSHITFKTYPRLQEMFQKYVPGDPTIFLRDGRFYMSIPFKVPEIPLQNDTCIGVDMGERRFAITSDGLMLNDKEYNARRRKIRYLKRCLQKKSTKSANRHQYKLSRKEQNQSTNICNHIANAIIHSTSASIIVIEDLSNIKKCTSKSKEGLKTKSHNRRISQIPFYKFKQILSYKALLHGKRVETVSPFMTSQTDCTTGKKDGIRKNRRFYCANGIILDSDWNAAINIARKSKHPFSFSIPYDGALRTWRAGCKSTTQSYCKPIVETQIALQAHTF

SEQ ID NO: 23243 - protein, 423 aa, unknown
  TnpB Polypeptide
MIVKKGIEIKLYPNKAQKVFFAKTFGCCRFVYNQCLRIKSYIYEETKMSFQPKLKSFKEEWEWLREADSQGLANAYMDLSQAYQNFFNGKSKYPRYKSKKDKQSYRNAMCHKDLDKLIVGNTIVLPKVGAVKCRFGKTFEHENIVKIYNVTIKKSKKGNYYCSICCDVDVPEMEHTGECVGIDLGVKSTIVLSNGETIKNPHFEKKSERKLRHLQRKLAKAKKGGSRYEKVRIQLATAHEKLGNRRNNFLHQVSHRLVRDYDIICMENLNIKGMQKNHCLAGALTNQALGTLSRMIAYKAQWHNRTVVKVGRFFPSSQLCNNCGHRYHTLKLSEREWICPDCGNLIDRDWNAATNILDEGLRILDNEGTPRTGEAVVLRPLCLAENPTVDDRPLDLKSSGAVMREIQPVVPVVTETHRSLAGG

SEQ ID NO: 23244 - protein, 403 aa, unknown
  TnpB Polypeptide
MCTLTYNAELQFKDSEALEYWLGLLNASRLAYNTCAKILFSKKIHLDLKSVHNAVYYTLREQFPIIPSQGIIKIYKECISAFRAINSNGHIGHKIPEKTNCSMRLDKRLYSKMSIDGITLCSRKLNHRVIATLVKFPRLVELFKQYPTRDPLIFKRGNTFYLSIPFEVPEIPQHDDTCIGIDMGERRFAITSDGLMFNDKEYNTRRRKIRYLKRCLQKKGTKSANRHKRKLSHKEQNQSTDICNHIANAIIASTTASIIVLEDLSNIKKNTSHSKEGFKKKSHNRRISQIPFYKFKQILSYKALLHGKRVETVSPFMTSQVDCTTNKKEGTRKNRRFYCKNGTVLDSDWNAAINIARKSKHPFSFSIPYDGALRTWRAGCKSTTQSYCKPIVETQIALQARTF

SEQ ID NO: 23245 - protein, 431 aa, unknown
  TnpB Polypeptide
MKTVKLQISNAPDVLDDMRVFSSIVRMAFNRYQEGLSEKEVRAYVSSKFSHNSWFIHSAVKEAQTIYLARGKEKVVFGGKWNLTQYLKGLITKDQFKRTRMIPVCSYGEMANMGNRLIDFDLLNSLIIYKPSRYVHKEIRFFPIKKKLAHELSIVQELAAQKKMSITVKFTDKYLYLTYDESLIYNEAYKGLKHNRVLGIDMNPNYIGVSIIEFDNKDEFKVLHKEVYDLTALTTSSGKSSSDAKSKYRTNKLKYETIAIAHKINKLVDYWKCSKFAIKDLTIKPTDKKKGKNINRLCNNKWERNLFVNKLKMLANIHKYELVEVNPAYSSIVGNFAYGNENTPDMVAASIEIARRAYKNFEKGWFYPKFNVETLDERWKQTLAGVKTWKNLFLKVKEAKLKYRFLLTDYVCNAVLSKFYRKCMWKIYIFA

SEQ ID NO: 23246 - protein, 249 aa, unknown
  TnpB Polypeptide
MQKGVKFRIYPNKEQQTIINQTLGCCRLIRHPQFKSKHNRHQSYRTINQGDNIRIVGKYIKLPKLGYVKVRQSMEVGKINNVTIEHTPTGKYFAVLNVDFEPQPMLNQGGSIGIDVGIKEFYSDSNENTVSNPKYLEKSMRKLIREQRKLSRKEKGSSNRNKQRIKVALVHEKITNQRNDFLQKQSTMLIRENQTICIEDLNVKNMMRNHKLAQHIGSASWTKFFDMLSYKATWYGNDIVKIPTMYPSS

SEQ ID NO: 23247 - protein, 383 aa, unknown
  TnpB Polypeptide
MPDFIRTLRLKVRPEFYPWLNAAAVEVNQTFNYVNETSYAAATRTDRKRKWLSGFDLCSLTAGASEYFEHIGADTIQRICTEYAQKRSAAKRLKLRWRVSRGPRRSLGWVPFKAASLKRKGNALRFCGKTFRVFERERLDGVTWQQGCFAQDAVGDWWLCLPVKVTPEYSVAPKEVVGIDLGLKDAAVTSDGDRLEAIRFYRDAQHKLGMLQRRGHRRQAKRLHRRIRRRRQDACHQFSRKIVDQYQNIVVGDVSSLKLVKTRMATSVLDSGWGMLRQMLCDKGKYACRSVQIVNERNTTRACSNCGSLTGPKGLKHLAVRTWVCVRCGVSHDRDVNAARNILASGFRCGTSVSGNESSPAERPPSQIPYLRAAGSDALQSAA

SEQ ID NO: 23248 - protein, 405 aa, unknown
  TnpB Polypeptide
MQRLQAYKFELRPNGEQQRQMRRFAGSCRFVFNKALALQKERHERGEKKLGYAGLCKLLTAWKSRPETLWLGETHSQVLQQSLKDLERAYQNFFAKRADFPRFKKKGMGDSFRFPQGCKLDQADSRVFLPKLGWLRYRNSREVLGAVKNITVSASGGKWFVSIQTEREIEQPVHPSGSIVGIDVGIARFATLSDGTVFEPINSFKKQQARLARYQRAMSRKVKFSSNWKKEKARITKLHSKIGNIRRDYLHKTTTAISKNHAMAVVEDLQVRNMSKSAAGNADRPGKNVRAKSGLNRSILDQSWFEFRRQLEYKQAWRGGEVLAVNPRNTSRTCPCCGHVSADNRQTQAKFECVECGFEENADLVGAINVLAAGHAVLACGGTAQSGRPMKQEPTEATTQGLAFA

SEQ ID NO: 23249 - protein, 365 aa, Streptomyces sp.
VIGIDRGVTITAALSDGRTLNCPQLTTRERAQIRKHQRRAARAPKGSAAKAAGYAKVARLKAREVNRRKDWCEKTSTMLARGYDLVRFEKLNIKTMTRSAKGTVERPGRNVAQKSGLNRSILAQGWGLLRQRTGHKAPGRVEDVPAPYTSLRCSACGWIDKNSRKSQAEFVCSSCGFTCNADTNAATNVAAGQGGIPRPRRTAGAGGTTPPNQRSSVREPQPAWVGIPLFLRGGGCQSLRFPPARWKAVRSRLDTGRPQTTATPERDFPDEDTLDHERRAYRSYRDHLAFDIAAHTLFVVGSPTAFREHGTALRGLVDQAPSFPYRHPHAGHFCVELDPGPWSRIRNRRRLPATLHIQYSADWRV

SEQ ID NO: 23250 - protein, 436 aa, Nocardiopsis sp.
MPRFRLHPTRAQEAQLFGHCAQARHAWNLALEVNSSYRKGGARTERPPRFAGMCRMLSQVRQTDTTGMSSEEADYINWVASGNVDVQQQALRDFDQALTNFFNGSHRYPTPRKKYRNEGFRIIGTGRVLAFTADGEPLLNAKGKQVMHRKVLVHKLNKKWAQVKIPGCGWVKFRNTHQGLPDAKSYRVTYRHGQWHISFAVVPDPIEAPGDGSVVGIDRGVTITAALSSGKMLNCPQLSKKERAKRRKHERRAARAAKGSPQRKAELAKVNRYRRKEANRRKDWAEKTSTRLARGFDTIRFERLNIKNMTASARGTAIEPGRNVAQKSGLNRAILAQGWGLLRTRTGHKAPGRVEDIPAPYTSLQCSDCKWIDKNSRKSQAEWSCTNCGFTCNADLNASYNVAAGQGASPGSKTRAGGATRRDPVSVREPQQLPLF

SEQ ID NO: 23251 - protein, 404 aa, unknown
  TnpB Polypeptide
MLTATKIRIYPSALQEESLAKAFGCARWLWNNSLAETQKVYQETGKGFSQFGLTYRLPKLKEEYPWLSETHSQVLTSVCLHMSRAFINFFERRAKYPKFKSKRGNQSIQYPQSVKIVENKIYLPKIGLVKAIIHREIIGKIKTVTISRVPSGKYFASILTDNGVPIPSPSFEGKVIGIDVGLNHLAITSDGAKFDNPRHLLKAEKNLKRKQKKLSRKMKGSKSRNKARILVAKAHEKVVNCRKDYLHKISRRLVDENQVIAVEDLHVKGMMKNHKLAKAISDVGWGTLVEFLRYKTERVGKGFIKVNRFFPSSKACSVCLHVQSEMPLNIRSWRCDRCKTLHDRDVNAAKNIRNEAQRMIAAGIAVTAGGGTVSQGRGRKSSVLASARETGNPMLKRRKLLHLG

SEQ ID NO: 23252 - protein, 428 aa, unknown
  TnpB Polypeptide
MNYNYRYRLNPSDDHRERLPWTVDTCRQVYNHFLYRLNRHDDTSSHSEQKRLPNLKDWWTDLQDVHSKVLQKVVQRLYDNLSTLKGRKQNGYSVGELKWKAPGEYQSFTYSQSGFKLKNTSGRTRLWLSKIGDIPITFHRDLPDDATIKTVTVKREPTGEWYAILGVKTSDDPPEKPDEVTDAVGIDVGILKYVHDSDGTAVESPDLSDERERLERAQRNLSRKEHGSNNWEEQRKTVARRHADLKRKRRDFLHKLSSYYAREYDLVAVEDLDAKGLVELPGNSRNRAGASWGTFLRMLEYKCEREGTHFVAVDPRGTTKECASCGTETDKPLWVREHSCPSCGFKADRDANASWNILSRGFEQVGTGCPESTSPEIEDFWCTNESRSGSLTPVETALPTDTDSVSAKRVVEAGSPTLKERTASAVSE

SEQ ID NO: 23253 - protein, 320 aa, unknown
  TnpB Polypeptide
MRVNISNNVTKQAIKDACTAYKNFFRGLQKFPRFKSKKRSMPKFYQDNVKIRFSNTHVKFEGFSSSRKANKQKMNWVRLAEHGRIPTNAKYMNPRISFDGLNWWISVCVEFPDCRETLNDDGVGIDLGIKDLAICSDGTKYKNINKSQKVKKLEKQKRRLQRSISRSYEKNKKGESYCKTNNVIKKEKLLLKRNHRLTNIRKNYLNQTISEIVNRKPRFICIEDLNVSGMMKNRHLSKAVQAQGFFWFRKQLEYRCSDKGIQLIVADRFYPSSKLCSCCGNIKKDLKLSDRVYRCACGNMIDRDFQASINLKTYGEKFAG

SEQ ID NO: 23254 - protein, 400 aa, Blautia sp.
VEKPQYYSITVKKMNILTRHSDWLVKTQELYNQILEFYYNLYLDTFQDGRPGSMEALRTLEKLTIPGRDRQPVQYPLPWQKVPLYFRRAAINSAIAVASSYLSREKQKIRSTSFTESVTCYKGMYRDFEGNAITLKIWTGEKWLWNRIKLRGNTIPEEGQMMSPSIVLKKTGPELHIPWKTFVKDGRTAKERMAAGEKICAVTFTNQDALAVCCVLNSDGAKENVFFVRGGAEYAHRCRQVTDKIKKSEVSGSSGSSAIPNSRYWMKLKNLNDFYSHSISRQVINYTIKQDAKIIVLPEYEKEYSRILMSKAGNFSPIHLSTAIREKIKYKAWQEGIVVVELQQHNISSTCAACGASLHKKGQNFVCKNGHQGNYYLNASWNLGLKCIRGFQPKEPRTSD

SEQ ID NO: 23255 - protein, 348 aa, Duganella sp.
MKMVFRYRVKSLTGLLNEQARRVNDVWNFCNDRQKDALRFNRPWHTGFDLIKLTTGCSKELGLHSGTINDVCQQYAKSRQQRRRPYLRYRGRKALGWVPLKGRELKREGNAFRFAGHTFRVFYSRPLPEGKICDGTNFSRDRRGNWFLNIVLDVPEPPKRPPGREVGIDLGLKDLTTLSNGHKEPAPQFYREAEAALAVAQRAHKKRRVAAIHAKIANRRHDFLHKLSTGLVRAFDLIAVGNVNAAGLAKTSMAKSVLDAGWSTFRTQLAYKAMKHGAWFVEVDERFTTQVCSDCGAKPDSRPNGIADLGIREWRCCDCGAVHDRDLNAATNILRRGRATLAAGILVL

SEQ ID NO: 23256 - protein, 348 aa, Duganella sp.
MNLAYRYRVKSLTGLLNQQARKVNFVWNFCNDRQKDALRFHRRWHTGFDLINLTTGCSKELGLHSGTINDVCQQYAKSRNQSNRPYLRYRGMKSLGWVPLKGRELKREGNAFRFAGNTFRLFYSRPLPEGKIVDGTNFSRDRRGNWFLNIVLEVAAPPVRTPAQRVGIDLGLHDLARLSTGEPIPAPNFYREAEPVLAVAQRARKKQRVQSIHAKVANRRYDLLHKLSTRLVLEFDHIVVGNVNAAALAKTGMAKSVLDAGWSTLRNQLAYKAVKHGATFEEVDERFTTQICSNCGVKPDSRPRGIADLGIREWRCSDCGAVHDRDLNAAINILRRGRATLAAGIPSL

SEQ ID NO: 23257 - protein, 458 aa, Streptomyces sp.
  misc_feature (400)..(443): Xaa can be any naturally occurring amino acid
VQVRLLPTPVQAAALEATLRACNEAATWVSGVAFERGEVKNFALRKLTYEQVKSRWNLGAQAAQHTIKKSCDAYTTLKANLKAGHLGRPGSARYRRATQKPVAFRPLGAQPYDDRMLSWQIAGRTVSVWTTSGRMKNVAFTASVEQLATLALYRKGESDLAHQDGMWFLNATCEVPEAEPNAEPVDFLGIDLGIVNIATTSDGEIMAGRELNRIRLRERSLRTKLQKKNTPSARRRLKKRRRREARRAKDINHKIAKHVVAEAERTGRGIALEDLTGMRERVRLRKPQRAAHSSWSFAQLGQFIAYKARKAGVPVVHVDPAYTSRTCAECGHIDRANRVSQAWFACRSCGVVAHADRNGSRNIRARAWELWRRGVRSTTPAPSAKSAGGAGPKRSTTASXXXXXXXXXXXXXXXXXXXXXXXXXXXXXXXXXXXXXXXXXXXXREVSRRGGTQTQHHS

SEQ ID NO: 23258 - protein, 418 aa, Thermococcus sp.
MKRTVTIKLQLSKEQEKVLFELADVGAKAWNRVNYLRRQEFFDGKPVDFNKTEKTVYEEFKRVIGSATVQQICRKNAESWRSFFTLSRKKRAKELPNWLKPKPPNYLKENGRGNPLILLRNDQYKIEGNKLILKGLGKFKRLEVQFKGRIHLKGKQGRLEITYDDVKRKWYAHISFTVEEKLIGDEWVKVPKQPLDNLSAGIDLGVNNLMAIYVENGESFLVNGRPLKSIAFYWQRKIAEYQSKLNKSGCKKSRKLKRIHEKAKLQAKHYINTVVRQTVETLYHLGVSRILVGYPKGIARNSDKGKKQNFMLSHVWRFNYVIKRLTEIAEEYGIRVLVVDEVFTSKRCPVCGKPHEGARFVRGLFKCPATGLVFNADLVGAFNILGKAGKTITPSLPALAGGGVIGVRPPQRGGKPTF

SEQ ID NO: 23259 - protein, 431 aa, unknown
  TnpB Polypeptide
VSEVTRTVVVKSTPLPRKVFRVFAELEGMYRNMVEQLALYAVRNGITSFTRLKALKYRELTSLYPQLPSHYTYTACQDASTRVKSFLRLKRRGLAKSDYPAVNRVSIWLDDHLWKVRSLTSIGIATHRGWIAVELEPHKQFWKYINSGWRLASEAKVKLDKRNRQLIICLTFKKSVEAYKPRGFIAVDVNENHVAVLVDDKVYLFETGFRDVVLGYYYRRKRVQERYDKLYGVNCRVKGRILKRLKERRKKSDLKWKLANIVVRVAREKQYAVVLEELGEEPAREMINHVNDGQLRHRIYQASFKGVQRAIEEKAREHGVPVIYVNPKNTSRMCPVHNAKIVYSNGCRIGRCSKGGELWHRDVVACYNLLLRARLGNGSNAPSLRGLSLDGSPMPLGSTAAHDPTVVTRTLWARWKSLDAINKHELMRMSI

SEQ ID NO: 23260 - protein, 382 aa, unknown
  TnpB Polypeptide
MKIERAYKFRFYPTPEQEVLLARTFGCVRYVWNAVLRYRTDAFYERQEKVGYNDASAFLTQLKKRPDTAFLSEVSSVPLQQCLRHQQTAFKNFFAKRARYPRFKSKHHRQSATFANSAFSYHGGVIRLAKCQEPLDIRWSRELPGAPSTVIVSKDAAGRYFISCLCHVEAEALDVVPTIIGIDLGLKDLFVTSDGHRTGNPRHTAKYAARLAKAQRRLSKKTLGSANRAKARQKVARLHAKISDCRKDSLHKLSRKIVNENQVICVESLAVKNMVKNRSLAKSISDAGWGEFVRQLEYKALWADRQFVQIDRWYPSSKRCADCGHVMGKMPLHIRAWTCPECATHHDRDVNAAVNIKAAGLAVLALGENVSGMGQVSMSGSR

SEQ ID NO: 23261 - protein, 310 aa, Clostridioides sp.
VVVVEKAYKFRMYPNKKQQELINKTFGCCRFVYNKYLAKRIEVYKNDKETFTYKQCSSDLTNLKKELKWLKEPDKFSLQNALKDLENAYEKFFKEKAGFPKFKSKKINRFSYKTNFTNGNIMYCGQHIKLPKLGMVKIRDKQVPQGRILNATISKEPSGRYYVSLCCTDVDIEVFENTNNQTGLDLGIKEFCISSCGEFIENPKYLKKSLNKLAKLQRELSRKTIGSLNRNKARLKVARLQEHIANQRNDFLQKLSTKLIKENDIICIEDLQVKNMIKNHKLSRLISDVSWSEFIRQLEYKANWYGRQIV

SEQ ID NO: 23262 - protein, 370 aa, unknown
  TnpB Polypeptide
MKKSYKFRIYPTKAQEILIAKTFGCGRFVYNNALSFRQQQYKDHGISVSKYDCIKRLPELKKQYPWLKEVDSFALQASIENMDAAYQQFFKGLKTGRKVGFPKFKSKKRSRPSYKTKQHILVFEKAVKLPKLGKVKCQVSTPVQGRILSATISQSRSGKYFVSICCTDVKIPTLPATGAVAGIDLGLHDLVITSDGSKYQNPHYYAAAEKKLAHLQRRLSRKSMGSHNWEKSRRRVAVLQEYIAHCRNDYLQKLTTSLIRSYDIICLEDLAVSNMLRNHHLAKGISDVAWGELVRQLQYKAEWYGRQVVKINRFYASSQICSCCGSQNPKIKDLSIREWDCPSCGAHHDRDVNAAENILQEGLRLLNTAA

SEQ ID NO: 23263 - protein, 376 aa, unknown
  TnpB Polypeptide
MRELKSYIYRIYLNKIQKEKFESLYQKNLFLFNRLIDEKNKRISSSLDEAIFVKHFVKQFKELDHGSFISYISTYKIVNKLFDRYHENKLTPLYRNSLKYPRKIHFDVFFTNVKYSKNRISIPHLGTFKARIHRDLPINCMIHSSIIEERTKDVFFINFLVETKVEYQKMIPQNAIGFDYSVPHLFCSSENDWGDEFKVRNFNQTKINKIKRKMAKCVFNSKNYLKLKTKEEKLYNEVARKRDYMLHNLSLNCVKKFDVIGVETLDLEEMASKNHLGKGIYEDAFNKFCKYLSYKSLKYGKYFIKVPKYFPSTRMCSQCGVVHEKMELDERSFKCDCGLLINRDLNAAINIREKALSILKDEKDRQKIRRSIRCFN

SEQ ID NO: 23264 - protein, 368 aa, unknown
  TnpB Polypeptide
MLKRTLKFKLPLDNRLTRLLKYLKEIKNKVAYICFENDFRSLNKLHRNVYYKIKCEYPFIPARYVIDIEREILSLRKGSKVFHSFKSYSAWLTVNQSFKFDWESISILYEAYGKGKEAKWITFSLNKDKRKKKYGDWTFKEARLKFDGENLWFHLIVEKEVEKKNVTEFIGVDINFDNITLSNSEKIPYDLKRVLAIQYDIEKIQKRYNKQWKHNKGILRAIRKRFKHIRDYITDLAWKVANKVVSFNANIVMEDLRNLKKNVDYGRKFNKKLNLWAYRKIQKAIEIKAEEHGLTVFYVDPKHTSTICYNCGSKLKVRSWKELYCENCNTLWDRDYLASLNILKRFEMWVGRQPEPLQLDAIPRGMKR

SEQ ID NO: 23265 - protein, 326 aa, unknown
  TnpB Polypeptide
VSAVVLQQALADLNTAYRNFLASAKGTRKGPKVAPPRFRSRKDRRQAVRFTRNARFAVTPGGKLRLPKIGDVPVRWSRDLPSDPSSVTVIRDAAGRYFASFVVEAGPDALHGTAPAIGIDLGLTHFAVLSDGRKISSPRFLRRAEKKLRRAQRSLSRKQDGSRNRDKARAKVARAHTRVADARREFHHQLSTALIRDNQAVAVEDLAVKALARTRLAKSVHDAGWSAFVSMLEYKARLYGRTFARIGRFEPTSQVCSACGHRDGPKPLAVRQWTCPACGARLDRDVNAAVNVAMAAGLAVSACRAQVRPGPVLAQRGEAGTLRGAA

SEQ ID NO: 23266 - protein, 372 aa, unknown
  TnpB Polypeptide
LENVFTQKPAPILDHPDYVVGEGVDAMCLTFKVVMPSHLTPILEDMSTRAKGCLERMLQDRTLRSSKSYKEIPCVLAKSLISKYQRNKRLKEVKNLVLPICGDKGRQVKLVQGGIRVPALFKKEIIVVSLPKPIIGFIRQVEFFKRGKVWYMSYSYNTLTKPLSKIRGFLGVDRNSVGNVATIADSKTGKVLKLGPSTAGLSYNFRRRRANLQRKKATGALKKLRRKQSRRTRDINHKVSRTIVDYAKIHCSVLVLEDLGKIGKKGKSRRYVQKSQWSFYQLQSFIVYKATLLGIPVVYIDPAYTSQKCSRCKNINKSNGKRYKCSKCGHFDHRDANAAFNISTLGYEFYGRALIDSDIGAGTVGGPHNWRI

SEQ ID NO: 23267 - protein, 596 aa, unknown
  TnpB Polypeptide
MCDLLLAIKTNVNLLKKRKFVTLESLVSNKRTTLNDRSKISRNSTQTEKLSPTLAVGSTLKGKAYKPFWNESTAEISKKLPLPTKTACVDTDLNSLNLSVKSLVQKSWFSVKMSQAMEIENLQTTCLPSSTISWRSVMDYVREQTEKNVSLMQQTTQKTIKVRLYPTLEQRRKLNQWFGTARWTYNQGLNAIKNGASISLKELRKQIINASNYKEDNKWVLQTPKQIRDDALRDLIKAYKSNFAKKKKNVDHRFELKYKYKKAPQDSVQIQKQSWTGAGRIFPSKEFMNDTIIRSSQNRRKRKINNDCKNIRQERNSCPDELPTDTRLVRTKSGKFYLCLVKPLSFVDQKHIPRIMEKNSIIALDPGDRTFITGFTNSGQILEVGRADKQRIIRLGCHLDQLQSQYSNKDLCHRNRYHMKKAAQRVRDKIRNLVDDLHCKLAKHLVHSYATILLPTFQTSKMVQKNHRSISSQTVRSMMTWSHYRFQQRLIHKTREAYWCRVMLVDEAYTSITCGKCGFIRSKNKSKEFSCPQCHFEADRDIQAARNILLRFITLHSSVNSNGLTLGVHPFLNYDTIQPKTCYDSLILDKSNHKRL

SEQ ID NO: 23268 - protein, 549 aa, Streptomyces sp.
MPVPVVQTPSVIWPVEEPTPEVVGRTVAYCRFSSGDQKAELDRQVSRVVQGAIGLGLAVAEVVTEAGSGLNGNRRKLHRVLSDPAVAVIVVEHRDRPARFGVEQLESALSASGRRLVFEARPGFHIVGHRLALDPNASALQALASHCGAARVAYNWAVRHVPANWSQRAAEETYGVPEAERVAWRSWSLPSLRKAFNEAEHNDPCLREWWAQNSKEAYNTGLANAAAAFDNYAKSRRGERKGTRMGRPRFKSKRKARPACKFTTGTIRLDDRRHIVLPRLGRIRLHEDVQPLVDAIAEGGTRILSVTVRFERGRWFAVLQTEERPTIAPATRPYTAVGIDLGVKTLLVMADSAGEVREVANPKDYDQTLTQLRKASRTVSRRRGPNRRTGQAPSRRWEKANAVRNRVHHRVANLRENHLHQATARIPAEYGTVVVEDLNVKGMVRNRRLSRRISDAAFGELRRRLTYKTQRHGGCLIVADRWMPSSKTCSRCGVVKAKLSLGVRVFERAVGAAPRQGTELDRTPSASNSRSGDTVTNLPGGNTRNAESR

SEQ ID NO: 23269 - protein, 398 aa, unknown
  TnpB Polypeptide
MVELALTMKVKLTTNKHESEALNRLCDNYTSCCNEVSDWIGEHHTLSQRKINEAVYHPLRDKYGLLAQMTQSSIRRVIASYKAIHSRMERRNGKNPKRKRTAYYSTRPKYSSAGVDLLWNRDYSYSPMTGMFSLPVMGGRIKVKAQWKGIPDEYRTARFGTARLMSKRGKWYLHIPIILQVPDPTPSPKNIVGVDLGIRMLATSYDGETTVFQHGGEVKSKRGKYKRLRQQLQKRGTRSARRRLKTIGDRENRWMTDVNHQASKALVNRYDRDTMFVLEDLTGIRNATEQVRVKDRYVQVSWSFHQFRQMVEYKAKRNGQKIVFVDPAYTSQTCPKCGKIRKANRDKKRHLYVCRNCGYRSNDDRIAAMNLRHKGYDLLNSQYAASMTDGVRVQSTTL

SEQ ID NO: 23270 - protein, 287 aa, unknown
  TnpB Polypeptide
VRRWKQNFFKHQSRYPRFKSKHNHSQSYRTRNQGNGIRIVDKRIKLPKIGAVKIKQSRVFEGRILNATVIRTASGKYFVSLCVELDKEILLCANSGGEIGIDVGLKEFYSDSNGNTVANPRILRRLTKKLVREQRKLSRKMPKSVNRGKARIRVARVHERITNIRKDFLHKTSTMLVRQNKTIAIERLQIKNMLKNHKLARAISDVSWSEFFRQLEYKAELHDAEVLRIDTFYPSSQTCSECGYQNTETKNLGVREWICPKCGSHHDRDTNAAVNILRRALEEKQIA

SEQ ID NO: 23271 - protein, 406 aa, Scytonema sp.
VIIVLKAVKVRLYPTTEQEIALAKSFGCARWYYNYALNACIQHYEETGKSLKLSVYKAYLPQLKVEHPWLKEDCYSAVLQCVAINLNRAYTNFFEGRAKFPRFKSKHHKQSIQYPQNVKVVGDCLEIPKIGVVKAVFHRPVEGKVKTVTISKTPTDKYFASILCEVENSGSQCKSDKTLGIDLGLKDFAIVHDGNEVTKYSNPKHLKRHERNLARKQKKFARKVKGSHSRNKYKKLVAKVHERVSNSRQDFLHKLSRKLVDESQVIIVENLNVKGMVRNRKLSKSISDVGWGIFINFLDYKLKRKEGQLVEIGRFFPSSKTCSICDHVVDELTLDIREWDCPKCNTHHDRDGNAALNIRNEGIRILSMDGGNPVLAVPRRSKTNKPKGGRASVNEAGSLHSPLGGV

SEQ ID NO: 23272 - protein, 383 aa, Scytonema sp.
LLLNYQYRVYPNTSQKLELNTWLRICQYWYNKQLGDRFDWWENNCNSINACPLVCSLPQLRDNPDFYSQKKQLPIIKEDLLKVGYSGELLDFTRVPSQTLQDVSKRVDLAFSRFIKGDSNGNRSGKPRFKNAARYRTMRIEGQAITIECVEKDWLFLSFSKLKGWVKVRLHRSLPNGFVLKNALLTKKADGWYITIWLEDPNVPVFTPDDVIPTWGNTLGLDAVLHEDDYLATSENTKLPALKSFRKSEKRLAKVSNRKSANKKGSKSRRKLAKREAREHQRIARARKDHAFKTAYAVVRTNKKVFIHEDLNLKALSRRNKAKQDENGKYLPNGQSSKSGLNKSWNDAAFGQFFTILEYIAGKAPGVDNGSKTCVHVPITCIP

SEQ ID NO: 23273 - protein, 383 aa, Scytonema sp.
LLLNYQYRAYPKTNQKLQFNSWLRIAQYWYNKQLGDRFNWYETNRCSIDSCPLVCSLPDLRDNPDFYSQKKQLPILKEDLVIVQHSGELLDFTSVPSQTLQDVSKRVDLAFKRFLAGDTNGKRSGKPRFKNSARYRTLRIEGQAITVERSEKDWLLLSVSKLKGWLKVRLHRPLPDGFVLKNMLLTKKSDGWYATICLEDLTIPVFNPDEVIPTWENTLGMDAVLHEDDYLATSQGTKLPALKSFRKSEKRLAKISRRKENKRKGSIARRKLAKCQGREHQRIARARKDHAFKTAHALVRTGKKVFVHEDLNLKALSKRNKAKLDEDGKFLPNGQRAKSGLNKSWNDAAFGQFFITLGYIAAKAGARVIAVKDSIYISIAGIS

SEQ ID NO: 23274 - protein, 389 aa, Scytonema sp.
MKRELKLNNKEVSQMRGMAGFKRVVYNFGLDLLVASWQFAEVKATDSKRIDNIKKVFTQVTMQKPENSWMKNYPSTIYQSAFIDLKNAVSRWREGLGGFPKKKSKKKGDSFSVYKTAGVYPEKGKPALPFTNRVTIFAGKQIKLPGLKIFRLKERIDFICSSQTFTVSRTADKWFVSFVLGAEKIPPILHAVERAGVDLGVKCLATVSDGSKYDMPLTTKKARTKLGKLQWRNRNKVLGNKKLQVFASNKAKKYYVRLSRHHLRISNIRQDTTQKMTTDLSRKVYNIRIEDLNVSGMIANHKLAAAVSNNCFYEIRRQLVYKQLHYGTKVELVDRWYPSSKTCSCCSHIQDMKLSDRVFQCKKCGHSQDRDENASINLKNAPKDKIRLA

SEQ ID NO: 23275 - protein, 428 aa, Scytonema sp.
MLLKLDQHDKNVFEFLAQQSNKLRNCATYLLRQAYFTFGDILDDPFGLHAELKTNPHYQIFYSQAAQQVCTEVAESFTSYKELLPQLVSGQLKDKPNLPKYRKKNGLAGWTYPKQALSFDIETGLIRLPLGNTFKALFGFDSLFVTMPHNIKFEAIKELRILPRNGCFYAEFVCKQSDTIIRELDKSRALGLDPGINNWLTCVPNTGDNSFIIDGFKLKSLTQWYNKQVATIKEGKPQGFWNEKLAYITEKRNRQVKDAVNKTARLIVHYCLTHNIGTVVFGWNQGNKDGIETGKVNNQKIVQTPTSRLKKRIEELCNHNGIQFVETEESYTSKASFLDGDSLPKYGEKPDSWKPSGTRPKRGQYKTKAGECINADCNGAANILRKVETQLGLNLAKVCRAVLTLPTRFRIWETKTKKRNGTAIDVLV

SEQ ID NO: 23276 - protein, 204 aa, Scytonema sp.
VKARYQYRFYPTDQQQQSLAQLFGCVRVVWNDALAICKQSEKLPSNNDLQKSVITQAKKTSERAWLSNVSNIPLQQSVADLGVAYKNFFDSLKGKRKGKKVGSPKFKKKVARQSARFRIGGFSIKGGEVYLAKIGNVKPIWSRELPSAPSSITVIKDCANRYFLSFVVEVEPVSIDALTGISCGDATRTPVTCCRETLPQCWTQ

SEQ ID NO: 23277 - protein, 463 aa, Scytonema sp.
VSQLYKTVPVRARFTDEEKAFWLDQCQHANSLINCAIYHIRQTHYARLQEMGNAYTTFWCGDELRSGWKTYQCNGSYPELNKVLKDNPHYKGLAAQAAQQTLKSVGESITSYNGLVKAYYKGEVDRPSLPKYRKKGGLQAVTFPRQALSFKNGYFKPSISKETKSELITEIKLKLPDFIGSDWVKEVTIRPCLGQFIIDWVIDDGKEPIKANPSLDYSHAWSFDHGGSNWLTGVSTCGKSLIVDGKKLKAMNQGYCRLVAKYKLGLPDFYWDSSLDRVQRKRNNQMRDAINKAARFIVNRCLTDKIGNIIIGWNDGHKVGSDMSKVNNQNFVPIPTGRLIARLKQLASEYGIVVTVTEEAYTSKASFLDGDTLHKFGEKPTCWKPSGRRVERGLYKTATGLLINADANGAANIARKVATQLGVSLVEVGRAVLTTPQRYDLFTEKLGLKPRPSRTAFSLSSGF

SEQ ID NO: 23278 - protein, 466 aa, Scytonema sp.
LYKTQQIRLTDAINDETNNFLILLCEQASKLSNEVVYSIRQKHFETCQRVEFFDKDGFYRSGFKLKKISVDSYASLCKEFAASQHYQILGGQQAQQTIKSVIESFRSYNELLPLFFNGELKARPRIPGYRKDGLTVVTFPVQAVKLDIETGMCRLAISRELSKDKDILSDVWIPGGYGFKPHQLVEVRILPRNRELYAEYVYKSGNEGVSCLLGLDYEQALGIDPGTNNWLTCVSTLGKSLIIDGRQLKSLNTNYNRKVKKIKTGKPQGFWSEELASLAELRNCQMRDAINKTARFIVNYCLNHKIGNVVFGWGQGVKDKITLGRRNNQNFVQIPTSKLKERIRQLCEEIGIQFTETEESYTSKTSFLDGDFLPKFNGEKPGSWKPSGKRVKRGMYKTKNNLVINADCNGAANILVKVKTQLGLCLAKVIREVFTLPKRYNVFSSLKKIYRKRSEAGLLACFATSV

SEQ ID NO: 23279 - protein, 421 aa, Scytonema sp.
VLVLEYKVKGRRHQYQAIDEAIKTTQFIRNKAIRYWMDAPKETKINRIALNNYSTALRKEFKFVEELNSMACQAATERAWSAIDRFYGNCKSNKPGEKGFPTFQKDNRSVEYKTSGWALHPTKRRIIFTDKKAIGEVKLLGTWDIHTYPVKSIKRVRLVRKADGYYCQFAVDIEVKTESRTGDGELGLDVGLEFFYSDSNGHHEENPKFLRKAEKAIKHAQRQIYKKEKGKNNRRKARRRYAKKHLRISRQRTEHSKRLARTLCKANALVAYENLNVKGMVKNHRLAKSINDVAWTLFCRWLEYFAVKLGTTVVAVNPKMTSQKCSDCGAIVKKSLSTRTHKCECGCQLQRDTNAAINILNLAKARGGHPRSNATGVATSTLLGASLVEQVATMNVESPSLKARGVSTHAKLHTLGVGKVR

SEQ ID NO: 23280 - protein, 375 aa, Scytonema sp.
MASIEPYFMAARRNKNVMTRAYRVFLNDLNQGKSEELKRFLRLCHDVMQYFVDLHWQRQDFSAKLANLPTIHRAVKRFGITTRLSQALCKQAKEFVASQRKKDKKRKPRLRRHVVTLFYHFVTIEPFNGKGFDWCIKFIGSGAPKMVCPIKATKPMNQKLADGWIRSRTIRLGCKGDRVFIDLLLEKEPPQPRSEGKVVGMDSNYKNGLVFSDGQNVATELHQTIQGFAKRQKHTRVEMKSMIGQAIKRIDFSQVKMLVIEDLKKVKHGKRGTFSRVFNRRLSHWLYAYTASLLVRRCEELGIEVQRKDPWKTSQRCHACGKWDKRNRRGDRFLCVNCGHADHADLNASKNLEFLGLAEMYGFRLRPSSKRQSFG

SEQ ID NO: 23281 - protein, 423 aa, Scytonema sp.
MATKRITFRLYPNKAQTNKMHYWRRLHKDLYNACVEHRKTSYKKFGKSVDYFDQQNCLPEFKEYWEEYKELGSHALQDTVKRVDFAFKRFFKLKSGYPKFKSSRYYKGWTYPCSSGWKACTNGKNGYLKISNLGNLKMRGQARDWGKPKTCTIIFKQGKWYASITVDCVPTRPQTDTGAVGLDFGTHHAIADSNGNVIENPRFVKVAQTKINQIAKTSRRKRPPSRGVKASRRWRKASESVAKIQSLVARQRQDWQHKVSTQIVSCNSLVATEKLNLKGMTRKSKGKNKRQKSGLNRSLLDVGIGNLKELIKYKITEAGGFYIEIPTVKVKPSQTCPNCGHQKKKTLAERVHYCEKCDYQCDRDVAAAMVMLNYARGQELSSTDASESTSTGVRKLQASCSSEASETHNERVADMRSSLFSLR

SEQ ID NO: 23282 - protein, 432 aa, Scytonema sp.
MYGCQQNLINPDVELKAVLEFICSESHKLTNCGIYYARQLYFKTSKLIGKYDLEKEYKTNKHYQVLHSQAAQQILRSVAESFKSFKELDKKYNKGELHFKPKLPKYRKGAGYALVTYPKQALKLVGNNIKIPLGNTVKRWFKLDSFTIPMPSNLQFADIKELRILPRNQCFYAEFVYEQDSAPELNLNPQYALAIDPGINNWLSCISNVGTSFIVDGRKVKSLNQWYNKRVSILKEGKPQGYWDDQLAHITEKRNRQMRDAVNKAARLVVDHCIKHHIGTVVFGWNQGQRQEVVLGKTTQSFVQIPTAKLKERVRQLCEHYGIKFVETEESYTSKSSFLDGDFLPTFGAKPEGWTPSGKRVQRGMYRTGTGKLINADLNGAANILKKVETQLGLCLVKVCRQVLTLATRFRIWETKTEKRKGVAEALRVATV

SEQ ID NO: 23283 - protein, 434 aa, Scytonema sp.
MTFRLYPNKQTKQSLRYHQKLHKDLFNAAVNNRFVQYQKFNHRVDYFEQQNSLPAFKEMWTEYKEVGSHALQATLKRVDFAFERWFKGLGKRPRFKSIRHYSGWTYPDSAGFQVESSGENGYLNLSKIGRIQMRGKAKYWGKPTTCTIVYRNGLWYASITVNVLDQALAPQVLPVGAIGIDLGCKSALSITDGESHQQIDAPKFLRNAEHQIKKASKEKRRKQAPNRKKKVKASRRWKKAQFKVSKLVRKVANQRQNWVHQVAAEIVSGNSFVATEKLEVKNMTSKAKKGKRKKQKAGLNKSILDVGFGMLRSTIKYKVEQIGGVFIEVPTKKVKPSQTCPKCGHQHKKTLDIRVHECSVCAYVQDRDIAAAEVMLYWSKGTLPGFGTSLVDADVLSSTSSTSKKAGSMKQLGCAKRQKSTLTGRDVETRPSTK

SEQ ID NO: 23284 - protein, 420 aa, Scytonema sp.
MLILTHRYRIYPDATQEQTLIEWMEICRSAYNYALREIKDWCLGRKCLADRCSIEKEYILSPELKFPNEIQQLNNLPKAKKEFPRLGEVPSQVLQQVIKQVHVGWKYFQERGFGFPRFKKFGQFKSLVFPQFKDNPVTNLHIKLPKIGVISINLHRPIPAGFVVKQVRILKKADKWYACILLQCDVSVPDPVPHGHPIGVDVGLEKFLATSDGVLVKPPKFFKQLQSRLRVLQGRLVRKKRRSKNYEKQRIKVARLHHQIDNTRKDFHFKVAHALCDSGDMVFMEDLDYRTSAKGMFGKHMLDAAFGQFRTIVKHVCWKRGKFFGEVDARGTSQECPECGGEVRKDLSVRVHDCPHCGYKTHRDIAAGQNIRNRGIKLISTVGQTGTETACADDLPGIEVTQSRQVSKSPKKRATRKPKP

SEQ ID NO: 23285 - protein, 410 aa, Scytonema sp.
MRRQAVKVRLYPTEEQIQILAQHFGCARWWWNYGLNKCIETYQSTGKGLSQSGLNSLLPALKKDKETEWLRDCYSQVLQSVSLNLSRAYQNFFEGRAQYPKFKSRHHRQSIQYPQNVKQVGESLKFPGFLGKVRAKIHRPLDGTIKTVTVSKCPSGKYYASVLMEYESDYPACNTDGKVVGIDLGIKDFAITYDGEKTSKYPNPKHLAKYEKKLAKKQRIAARKVKGSNRRRKATRIVARVYEQVSNVRQDYLHKLSRKIVDNNQVVVLENLNVKGMVRNHKERDAISDTGWGAFVNFLSYKLERNGGKLVEINRWFPSSKLCSNCHYQINELPLDVRTWTSPSCGTHHDRDGNAAMNIRAEGIRMLSSFGTGEANANGEEVRPIRGRKPKMRHSSVKLEAHTVPQGQCG

SEQ ID NO: 23286 - protein, 313 aa, Scytonema sp.
MSRKKMGFPRFKNKYRMRSFVYPQLGKGQLFKGNQIKLPQLGWMEYVKSREIPDGFKVKQVRVVRKASGYFLMLTLECNVNVPDTVASGHPRGIDLGLDKFAATSDGELVERPRFLSTLHRKLKLLQRRLKKKQKGSNNRHKLNRKIARLHQRISDTRKDWHFKLAHKLVIDAGMMFVEDIDFRVWAKGMFCKHTLDAGFGQFVEILKWVCWKRGVYFEKVSKDYTSQVCPQCDTHTGKKELKDRIHSCPACGYTTHRDVAAAQVIRNRGINALGRSVLENACGDGLTGAGDSLVKSRKSRKNGGEARLKTAS

SEQ ID NO: 23287 - protein, 304 aa, Scytonema sp.
MITLTHRYRIYPDTTQEQTLIEWMEICRGAYNYALREIKDWCDSRKCLIDRCSLEKEYILSSELKFPGEIYQLNNLPKAKKEFPKLSEVPSQVRKLAIKQLHKGWEYFQERGFGFPRFKKHGQFKSLLFPQFKENPVTNLHIKLPKIGAIPINLHRPIPTGFVVKQVRILRKADKWYASISLQCDVNIPDPIPHGHPIGVDVGLEKFFATSDGVQSKPPKFFKQLQSELKLLQRRLSRKQRRSKNYEKQRIKVARLHHKIDNTRKDFHFKVAHALCDGGDMVFMEDLDYRTSAKGMFEPRIPAL

SEQ ID NO: 23288 - protein, 206 aa, Scytonema sp.
LACFAAIYLATLSTAEVFDGVKAYKQYEKKLARLTWRNRHKEPGSSNWKKAQVKIARLHRKIANIRKDTLHKITTYIAKNHGVIAVENLNVSGMLANHKLALAIADMGFYELRRQLEYKCQLYGSKLVVVDRFFPSSKRCSNCLCVKQTLSLSERTYCCSSCGIQIDRDLNASINLHLAVRSTVLASGLEGCRHPQDEGGKSVSDC

SEQ ID NO: 23289 - protein, 392 aa, Scytonema sp.
VLVLEYKAAVKKTQSQAIDEAIRTSQFVRNKVLRYWMDNRGVGKKQLYQYNTQLRAEFEFVKSLNSHATQASVENVERAINRFFDNCKNNKLGKKGYPKFKKDSRSVEYKTSGWSLHPTKRRITFTDKKGISELRLLGKWDIHTYPVQLIKRVRIVRRADGYYVQFCVKVDVTCETRTSDGEVGLDVGLEYFYSDSNGHHEENPRFLRKAEKAIKHAQRRIYTKEKGKNNRRKARGRYARKHLRVSRQREEHAKRLARCVCKANAFVAYEDLNVKGLVKNHCLAKSINDVAWASFRRWIEYFALKFDTKVVAVAPHYTSQKCSNCGETVKKGLSTRTHNCQHCGTVLQRDVNAAINILCKAKSTGGHPGSNAWGDVSSTSIGRKTSRGKKGR

SEQ ID NO: 23290 - protein, 383 aa, Scytonema sp.
MLVLEAKLEGTNEQYGRLDEAIRTARFVRNSCVRYWMDNRDIGRYELSAYCAVLAKEFEWANKLNSMARQASAERAWSAISRFYDNCKKKVPGKKGYPKFKKEQTHGSVEYKTTGWKLSSDRRYITFSDGFEAGTFKMWGTRDLHFYQIKQFKRVRVVRRADGYYAQFCIDQERLEKREPTLKTIGIDVGLKHFYTDSDGQTVPNPRHLRKSEKSLRRLQRRLSKTEKGSKNRAKFRNRLARIHLKVSRQRKDFAVKTARCVVQSNDLVAYEDLKVRNMVRNRHLAKSISDAAWTQFREWVEYFGKVFGVVTVAVPPHYTSQNCSNCGKVVKKTLSRSTHTCPHCGHIQDRDHNAARNILEKALRTVGHTGTRASCRDLPLSW

SEQ ID NO: 23291 - protein, 398 aa, Scytonema sp.
MQSMEKTYRYRFYPTLEQETLLRRTIGCVRLVFNKALAARTEAWYSRQERVDYVQTSALLTLWKKEDDLQFLNEVSCVPLQQTLRHLQSAFTNFFAGRAKYPNFKKKRNGGSAEFTKSAFRWKHGQVYLAKCSEPLSIRWSRHLPKGCEPTTITVKLEPSGRWFVSLRIDDPTDKRLQPVDKSVGLDVGISSLVTLSTGEKIANPKGFDKYYHKLTKAQKTLTRRKKDSRNRDKARLKVARIQAKICDSRIDHLHKLTTRLVRENQTIVVEDLAVKNMVKNPKLARAISDASWGEFVRQLEYKAKWYGRTLVKIDRWFPSSKRCGNCGHVVERLPLNVRSWNCPNCGTHHDRDINAAQNILAVGHTVTVCGASVRPDGHKSKGQLRKTVQGKKQKPKS

SEQ ID NO: 23292 - protein, 400 aa, Scytonema sp.
VLKAIKVRLYPTAQQEIALAKSFGCARWYWNYALNACIQHYEQTGKSLKLGVYKAYLPQLKVENLWLKEDCYSAVLQCVAINLNKAYTNFFEGRSKFPRFKSKHHKQSIQYPQNVKVVGDCLDIPKIGVVKAVFHRSIEGKIKTVTISKTPTDKYFASIVCQTEGSDNQASGDKTLGIDLGLKDFAIVHDGEQVTKHSNPKHLKRHQKNLARKQKKFARKVKGSNSRQKYKKLVAKVHERVSNSRQDFLHKLSRKLVDESQVIVVENLHVKGMVRNRKLAKSICDVGWGMFVNFLDYKLKAKDGQLLEIGRFFPSSKTCSCCGHIVDKLTLDVRGWDCPSCRTHHDRDGNAALNIRNEGIRILSDGGGNPVTADGGCVRPPTRTRARGNGQRSQKPTPYP

SEQ ID NO: 23293 - protein, 511 aa, Scytonema sp.
MELATPMVRKKVVQTTEYTVTRIAYSVGDIPDELSKVAQALGDLRSELWNKYGSLQAWGIDKNTIIKNIRNTPELKKLYGAERFNLSSEIWERTVQAVIDDFHAVQEAAKVQVIRKIYSTFKPEKKQVVKGKKTILVDNLETSFRDELIKSLNSQEWQQYPLISRWVRQYYKRGHTWVDNQIVINATGNTMKGKVSRKGKVTTYQIPGFMDGKKVAWISIPILTGRVTPKAGRLRFLINNSGIVELHYPKTTKIEVSPNKDSLGVDKGFTEGFYGSDGIAYAEGLGSVINDASDRRTKKNKKRQKLFAISRKVDPARRQRILENNLGRKKAGKLDSKKRYYITQLIRTDTKKIFDSYGEVVAEDLSKYIKGKNRAKAVNRRLNEWSKGELQKALDEISLRKGGVVKLVNPAYTSQVDHRNGTLLGKRLGDQFLTFDGVVLQADQNAATNIKIRGSDLQITRFMKKEQIHRILLERTALFLAELGHSLESAVSMGWLDEKHHPQGKPPRRRR

SEQ ID NO: 23294 - protein, 237 aa, Scytonema sp.
MLTITHRYLIYPDTAQEQQLIEWMDICRSAYNYALREIKDWCDGRKCLIDRCSIEKEYILSPELKFPNEIQQLNNLPKAKKEFPRLSEVPSQVRKLAIKQLHVAWKYFQERGFGFPRFKKYGQLKSLLFPQFKENPVTNLHIKLPKIGAIPINLHRPIPTGFVVKQVRILRKADKWYASIFLQCDVNIPDPIPHGHPIGVDVGLEKFLATSEGSIVRPPKFFKSLLLLAEIAATQTL

SEQ ID NO: 23295 - protein, 315 aa, Scytonema sp.
MKAWNQDPSKFLGKPKIPGYKHKTDGRNVVVYPNESVSIPGMRKGFVILSQCGIKIPTKTSNVDQVRIVPQKTCYVIEVVYSKELPEETTGCSAGVDLGLGNLMTVTSNNPGTKPMIVNGKPLKAINQLFNKRKADAQSKNATRLALDLVHKRNNRVSNYLHTASRRVIDWCLTNGITQLIVGKNDGWKQNINIGKSNNQQFTAIPHARLIQMLEYKGALAGIKVVTTEEAYTSKASALDGDVLPKYKQATPSFSGKRVKRGLYRSGAGRLINADVNGSLNIARKVIPNFMEGIEGLPFIPVVVDPLRMHLTSFV

SEQ ID NO: 23296 - protein, 221 aa, Scytonema sp.
LEFFYSDSNGHHQENPRFLRKAEKAIKHAQRQIYKKEKGKNNRRKARLRCAKKHLRVNRQRNEHALRLARCVCKANALVAYENLNVKGMVKNHRLAKSINDVAWSLFRRWLEYFAQKFKTNIVPVHPHHTSQICSNCGVIVKKTLSTRTHACKCGCVLQRDVNAAKNILDRAKLNRDGQSRINATGLATNTLVGESLLEQVTRKNVESPGFTSKRAAAMFS

SEQ ID NO: 23297 - protein, 504 aa, Scytonema sp.
MPREITPSLRHGLRPTFVVEYPAIVDSKAQKELDASFNAGLRLLNTVQNEALIRIEMVRQSSAWADAKKLPKTITKKGKPTKNPERAKAFEAVKKAYRFTEFELQDYATLVAKRSKWIWEKLDSQSIQKIATRVFNAVNKILTGRALKVRFKNNRSFSSMEGKQIGTGIRVDKKMQMFVWGKLRCPLIIDWDDPCQKHGWDSKWKYARIIRRELNGKTRWFVQIVCEGIPYQGRENTQPLDAKVSIDLNISNVAYFSFKKAGLKPFADKVPTFEKEIKVIQRSQDRSRRINNPDNFNSNDIVFKGKKKGRKVKRKGQIKRGKKLHWNNSKNYRRLLHKRRELERRKTAYARSQNRALANDILRNGGKHLNLEDVSVKGWQRRYGKAISAKSPGFFQSELLRKAESAGGVVNKYSTQKTACSQTHLDGSRVKKKLSERIHYDQTGIVMHRDLFSAYLGLFVHQDGYLSVEDAFRQYPGSEPILSAAWAEFQKRSSDKARPSPRSS

SEQ ID NO: 23298 - protein, 318 aa, Scytonema sp.
MGAMKAWKKEPSGFLGKPRLPGYKHKTDGRNIVIYPDESVSIPGLRKGFVVLSQCSIKLPTKTSNVDQVRIVPQKTCYVIEIVYSKELAQETQGYSAAIDLGLSNLMTATSNNPGVKPLVVNGKPLKAINQLFNKRKARAQSVEAHRQVLDLVHKRNNRVSNYLHTASRRVIDWCLASGISRLIVGKNDGWKQDINIGKSNNQQFTAIPHTRLIQMLEYKGALVGIKVMTTEEAYTSKASALDGDALPKYREATPRFSGKRIKRGLYRSGSGRFINADVNGSLNIGRKVIPDFMKGIEGLPFIPVVVDPLRMHLTTSA

SEQ ID NO: 23299 - protein, 491 aa, Scytonema sp.
MTTLTYVKGLPTPAEELNSLGMTDFEMFLSAYSPVFHKAACETVNHLKSVDTFEKSGWNSYLQVTYGISKRHANGIISHAQGAVDASIEHRQRHIKTLEGKLKSINSWITKSEKKLDDAVKFYAKKNWQKSKTGCRFPISYSLKFRYTNWKNLRFQIHNKKRRAYQLTKQLEHLKTAPIQTVVSKSQVFVVGSRDESFGNQACQWDGDILKFRVPACLEAKFGKYVQTKLGNFERKINRLPKDGSKTWHFFRKDGKWNAAVQFTPAPVERVSRHSAYGCIGIDMNPGSIGWAYVDANGNLKAHGQIPLQMGLPSGLQDAQIVDACLQLATLGETFACPVACERLDFSAKKELLCERGRKYARMLSGWAYSRFYELLESILSNRGIYLMKVNPAYTSIIGLVKYARQYGLASDEAAAMAIARRAMRLTENIPVTITAYLPVKDRKHVWSQWNQLNNAIKKSGMKRHNFYAVSNWGSLVKQWAEQSVQSKPKR

SEQ ID NO: 23300 - protein, 397 aa, Scytonema sp.
VKGAVLVLEYKVKGKQQQYRAIDEAIRTTQFIRNKAIRHWMDAPKEQKVDKIALNNYSTALRKEFGFVKNLNSMACQAATERAWLSIARFYDNCKAKKPGKKGFPRFQKDNRSVEYKTSGWSLHPTKRRIAFTDKKGIGELKLLGKWDIHTYPVKLIKRVRLVRRADGYYCQFAVDVEVKTERRIGNDEIGLDVGLEYFYSDSNGHHQENPRFLRKAEKAIKHAQRQIYKKEKGKNQRRKARHRYARKHLRVNRQRNEHAKRIARNLCKSNDLVAYENLNVKGMVKNHCLAKCINDVAWTLFRRWLEYFAVKFNTTVVAVNPRMTSQKCSDCGTIVKKSLSTRTHRCSCGCELQRDVNAAINILNLARARDGQSRSNATGVGTATLIGETLLEQVAT

SEQ ID NO: 23301 - protein, 450 aa, Scytonema sp.
MELARNSELYKGAKKIPRGEKKKRNDAFNEVRKHYRYSEYDLQAYATTVANKSKWIAQKVDSNTQQKLASRAFKASERVLFGQAKKVRYKVPSRFRSMEGKSNKTGIRWKDNCLVWGNLKLRAMIDPSNPVIQHGLASPIKYARVLWRDLNGKRRWYCQLVNEGMPYQKPQNYVFDGLIGLDLNISNIAYVGDDHADLLPFAEGVPTFLYEIAALQRQMQRSQRVNNPDNFEPDFEARKGRKIVVNKGKVKKNSRKWNKSNNYKRLATKKRELQRRKAAYAKNQNRRIVNEILRHGKHIKTENVSVKGWQKRYGKAIAAKSPGFVQSELKRKAEIAGGSFTKFSTQKTALSQTHLNGERIKKPLSQRVHVDKLTGDAMQRDFFSGFLARFVNQDELSCKDAARQYPRSKSILFGAWRRQRINCEKSRQARNPVPDSRQSSSQRRRKRLAR

SEQ ID NO: 23302 - protein, 375 aa, Scytonema sp.
VLLNYQYRAYPNTNQKEQLNRWLRISQYWYNKQLGDRFDWWQNNRCDVNSCSLTCSLPDLRENPDFYSQKKQLPILKEDLVTVQHSGELLDFTSVPSQTLQDASKRVDLAFKRFLQGDSNGKRSGKPRFKNSARYRTLTIEGQAITVETTGKDWLFLSVSKLKGWLKVRLHRPLPIGFILKNMLLTKKSDGWYATICLEDPSVPVFNRYVVAATWENTLGMDAVLHEQDYLATSEGTKLPSLKSFRKSQKRLAALSRRKEKKRKGSRSRRKLAKRQGREHQRIARARIDHAFKTAHELVRTGKKVFIHEDLNLKALSKRNKAKQDEDGKFLPNGQAAKSGLNKSWADAAFGQFFTGKLGLKPRTFRAAFSSFLDF

SEQ ID NO: 23303 - protein, 392 aa, Scytonema sp.
MYAIKVELKVNNKEQTLLRKHAGFARFVYNYGLALMQGLERNDIAGGYGKKIKAIKKVLTNYTKKQQEFQWMSKLSSKVYQSSLQALLNAYKRCGQGIADRPKFKRRKDRESFSVYDGNGKVLLPSGKQIKIPTLGTFRLKESLSCSYCTQTFTISHRAGKWFVSFAVDAEKIPPTYHAQEKIGIDLGVKCFCTLSDGTTVESPKPMKKAKTKLAKLQWRNRKKQLGNRRLGVKQSNKAKKYFDSLARRHYHVASQRQDFLHKLTTDISRKYYQIRIEDLNVSGMLANSKLSAAISDLGFYEFRRQLTYKSQVYGTKVELVDRWYPSSKTCSMCGTKHDELKLSDRIYKCINLGCVAHTITLDRDLNAALNLLNAPDEYVRLAQPEVTPVDK

SEQ ID NO: 23304 - protein, 430 aa, Scytonema sp.
MDNAYATYWRGDELRCGWKTYKCSTTYPELDKALKDSSHYKAMAAQAAQQTLKFVGESIASYNGLVNAYYKGEVNKPSLPKYRKKGGLSAVTFPRQALNYKNGYFYPSISRDTKPHLLTEIALPLPEFIDSDWIKEVTIRPYLGELWIDWVLDDGKQPIECNPSLDYTQAWSYDHGGSNWLTGVSTLGKSLIIDGRKLKSMNQGYCRLVAKYKQGKSDFYWDRNLDRVQRKRNNQMRDAINKAARFIVNRCLKDRVGNLVIGWNEGQKIGSGMGKRNNQNFVVIPSGRLIERLKQLCPEYGIMLTITEESYTSKASFLDDDFLPKYGEKPDGWQSSGERIARGLYRTAKGFLINADCNGAANILKKVASQLGVSLVKLGRVALTLPHRYCLFNRLKNTFRTKLRSVASGGTALGGFADLKQVPSHRATTI

SEQ ID NO: 23305 - protein, 379 aa, Scytonema sp.
MRYEISAKAVDKWRKGEAGFPQMKNKKKGNSFTVLKKAGVYPAKGQPMLPFTNRQVLHPGKRITIPGLGEFRLKQPIPFLCSSQSFTVSRTADKWFVCFVLDVEKVPPLIHEVESVGIDLGVKTFATLSDGSTIEAPTSLKKAKTKLNKQQWRNRNKQLGNRCKGVLTSNRAKRYFGQIAKTHAHIANIRKDFLQKTTTDISRKYVRIRIEDLNISGMIANHKLSEAISSLGLYEFRRMLTYKQAFYGTKVEIVDRWFASSKTCSNCTNVQPMPLSERIYACGAGCGHIQCRDLNAAINLNNAPLQKIRAVSSALDGFPGLKRLRTRRASAKLTPVDRLGADSPQTLQEANFKEFELFGLSDLCKFCVAQEFSNNTFRL

SEQ ID NO: 23306 - protein, 416 aa, Scytonema sp.
MLVFEAKLVGTNEQYGKLDDAIRTARFVRNSCLRYWMDNKDIDKYDLSAYCAVLAASFEFAKNLNSMARQASAERAWSAISRFYDNCKKGKPGKKGYPRFRKEQTHGSVEYKTSGWRLSEDRRCITFSDGFEAGTFKMWGTRDLHFYRQSPTEGDPPAALAHQLKQFKRVRVVRRADGYYVQFCIDQERLEKREPTAHNVGIDVGITLFYTDSDGQTVANPRHLRKSEKSLKRLQRRLSKTKKGSKNRAKFRNKLARKHLKVSRQRKDFAIKTARCVVMSNDLVAYEDLKVRNMVRNRHLAKSISDAAWTQFRTWVEYFGKVFGVVTVAVPPHYTSQNCSNCGKVVKKSLSTRTHTCHHCGHTQDRDWNAARNILERGLRTVGHTGTSTSVDETDQYLSEETPSSKSTRRNRKPKK

SEQ ID NO: 23307 - protein, 392 aa, Scytonema sp.
MRTAYQYKLRPTKQQAEEIDRWLSMLCAQYNYLLASRFDWYEQNRCPLNACPLVCHIPELRENPDYYSQKKTLPNLKKTHPHYGDIHSQVLQDVVKRVKVTFDRFLSGDSNGKRSGRPRFKSRDRYRTFTYPQMKDDCIKGSVICLPKLGDIKLILHRPIPDGFKVKTASVTKKADGYYVTLSLEDPTVPSVKPDINPDSMTGIDLGLKEFLTTSTGETVEIPQHYRKSQKRLRVIQKRVSRRKKGSKRRQKAVRQLGKQHKKVADKRKDFHFKTAKQLLSKYDVVAHEDLNVKGLSKSRLAKSVHDAGWSSFLSILSNKAENAGLLVVAVNPKNTSQDCSSCGVKVPKKLHERWHSCQCGCSLGRDHNAAINIKNRAVGHSVLKAQRLRAQ

SEQ ID NO: 23308 - protein, 345 aa, Scytonema sp.
LSNKIVCLSLKSIGKSIKSLVAMLCKILLSVLILRLSAFLNSSLDILNSSQVVTTNGYLKISNLGNVKMRGQARDWGKPKTCTIIFKQGKWYASITVDCVPTRPQTDTGAVGLDFGTHHAIADSNGNVIENPRFVKVAQTKINQIAKTSRRKRPPSRGMKASRRWRKASESVAKIQSLVARQRQDWQHKVSTQIVSCNSLVATEKLNLKGMTRKSKGKRKRQKSGLNRSLLDVGIGNLKELIKYKITEAGGFYIEIPTVKVKPSQTCPNCGHQKKKTLAQRVHHCSECGYQCDRDVAAAMVMLNYARGQELSSTDASESTSTGVRKLQASYSNEASETASSAESG

SEQ ID NO: 23309 - protein, 418 aa, Scytonema sp.
VLHKAVQVRLYPTKEQQVLLAQTFGSARWWWNYALNKSIESYKETGKGLGRSALNALLPDLKKAEDTSWLAECYSQVLQATTLNLTTAYKNFFDKRAGFPKFKSKHGKQSIQYPQNVKIVEGNVDPSATLGVKIPGNIGIVKAKIHRPIEGKIKTVTISKTPSGKYFASILTEVEGDNPTTAEGKIYGVDLGLKHFAVVTDGEKVSKYDNPKHLAKHEKNLKRKQQKLARKPKGSNSRYKYRKVVAKVYERLSNSRQDFLHKLSYKLVSDSQAVIVENLHVKGMVRNHKLAKAISDCGWGTFTNFLAYKLERKGAKLVEIDRWFPSSKLCSNCFYQMGEMPLDVREWTCPHCGTHHDRDGNAAINIRAEGIRWLLAEGSAVSAVGGEVRPKMGRKSNLRHSPLSTEADTALGTPSQCG

SEQ ID NO: 23310 - protein, 191 aa, Scytonema sp.
LGVKCLATVSDGSKYDMPITTKKAKTKLGKLQWRHRNKVLGNKKLQVLASNKAKKYYVRLSRQHLRISNIRQDVTQKMTTDLSRKAYNIRIEDLAISGMIANCKLAAAVSNNCFYEIRRQLVYKQAHYGTKVELVDRWYPSSKTCSRCGHIQDMKLSDRVFHCKKCGHSQDRDENASINLENAPPDKIRLA

SEQ ID NO: 23311 - protein, 209 aa, Scytonema sp.
LVERPRFLQVLHRKLKLLQRRLKNKQKGSNNRWKLNRKIARLHQRITDTRKDWHFKLAHKLCDNAGMVFVEDIDFRVWAKGIFGKHTLDAGFGQFVSILKWVCWKRAVYFEKVDKDYTSQVCPQCDAHTGKKELNDRLHVCHECGYTTHRDVAAAQVIRNRGISALGRSVEQNACGDGLAGTGNRLVKSQRSRNKGGEARQQVLPRNIF

SEQ ID NO: 23312 - protein, 402 aa, Scytonema sp.
VLVLEYKVKGKQQQYRAIDEAIKTTQFIRNKAIRYWMDAPKEMKVDKIALNNYSTALRKEFRFVKDLNSMACQSATERAWLSIARFYDNCKSKKPGKKGFPRFQKDNRSVEYKTSGWSLHPTKRRITFTDKKDIGEVKLLGKWEIHTYPVKFIKRVRLVRKADGYYCQFAVDIEGKHESRTADGELGLDVGLEFFYSDSNGHHEENPRFLRKAEKAIKQAQRQIYKKEKGKNNRRKARRRYAKKHLRVNRQRNEHALRLARCVCKANALVAYENLNVKGMVKNHRLAKSINDVAWSLFRRWLEYFARKFNTTVVAVNPRMTSQKCSDCGAIVKKSLSTRTHKCNCGCELQRDVNAAINILNLARQARDGQSRSNATGLVTSTLVGESLLEQVTRKNVESPCL

SEQ ID NO: 23313 - protein, 409 aa, Scytonema sp.
MRTAYQYRLRLTTAQQSTIDQWLELGRRQYNYRLAERFNWYEQNRCDINACPLICHLPELKDRPNFYSQKRDLVNSKKWFPEYKELPSHTLQDVIARVEKTFDRWLSGDSNGKRSGKPRFKGQGRYRSITFPDPVKPEHIDGQLIQLPKVGKLKLILHRPLPDGFKVKTATITKKVDGYYVTLSLQDSSVPVITPDVPELDNTIGVDMGLKSFLVDDSGNEIKIPQHYRKAQKNLKRLQRSLSRKKKGSNRRQKAVKRVAKAHLKVSNKRKDFHYKIAKKLLSQGKHVAHEKLNIKGIAKSRMAKSTHDAGWGQFLQILSIKAERAGLLAIAVNPNGTSQNCSGCGTKVPKELKDRIHVCPECGLTLDRDHNAAINIKYLAVGHSVNKAQITSDAIAGVTEKPALYPIG

SEQ ID NO: 23314 - protein, 393 aa, Scytonema sp.
VLVLEYKAVVSKNQERSINEAIRTVQFIRNKAIRFWMDSPKDAKVNRIALNNYSTAVRKEFKFVEELNSMACQASTERAWYAIDRFYANCKCNKPGKKGFPKFQKDNRSVEYKTSGWALHPTKRRITFTDKKGIGEIKLLGKWDIHTYPVKSIKRVRIVKRADGYYVQFSIDVDTHKESRSADGEVGLDVGLEFFYSDSNGHHEENPKFLRKAEKEIKHAQRQIYKKEKGKNQRRKARQRYARKHLRVSRQRNEHAKKLARNVCKANALVAYEDLNVKGMVKNHCLAKSINDVAWTLFRRWLEYFAVKFSTTVVAVNPRMTSQKCSDCGAIVKKSLSTRTHKCDCGCELQRDTNAAINILNLARARDGQSRSNATGVATTTLLGATLVEQAAT

SEQ ID NO: 23315 - protein, 296 aa, Scytonema sp.
LEWIKEKGICQKITQYAFDQLGDAYSRFFKGQGGYPKFKKKGLNDSFTIDASGKSIPVGGVRIKLPTIGWVKTYEGLPHTTTTKLTISRIADDWYIAFAHRVETEPTAKSVDVVGVDLGVKELATLSTGVTFPNPKAYKKNIQKLKRLSKALARKTKGSNNRNKAKAKLAKHHNRVSNIRKDSLHKVTHYLCKNHAVIVVEDLNVSGMMANHKLAQSIADCGFYEFKRQLEYKTKKFVAKLVLADRWYPSSKTCSNCGCKKESLLLSERVYSCEHCGHVMDRDLNAAINLSRRALA

SEQ ID NO: 23316 - protein, 321 aa, Scytonema sp.
VSIARFYDNCKAKKAGKKGFPRFQKDNRSVEYKTSGWSLHPTKRRITFTDKKSIGEVKLLGKWDIHTYSVKSIKRVRLVRKADGYYCQFAIDIEVKSEQRIGDGELGLDVGLEFFYSDSNGHHEENPRFLRKAEKAIKHAQRQIYKKEKGKNQRRIARHRYAKKHLRVNRQRNEHALRLARCVCKANALVAYENLNVQGMVRNHCLAKSINDVAWSLFRRWLEYFATKFNSTVVAVNPRMTSQKCSDCGTIVKKTLSTRTHKCVCGCELQRDVNAAINILNLAKTRDGQSQSNATGLATSTLVGESLLEQVTRMSVESPCL

SEQ ID NO: 23317 - protein, 263 aa, Scytonema sp.
MLLSIKTKLKLTPDQKTVMSKHAGIARFTYNWGLATWQSLYQDGYKPNKYLLKKFFNNEVKPKLEWIKEKGVCQKITQYAFDQLGAAYDRFFKGLGGYPKFKKKGQNDSFTIDASGKTIPVGGVRVKLPTIGWVKTYEGLPHTTTTKLTISRIADDWYIAFPYEVETEPTPKLVDAVGVDLGVKELATLSTGVVFPNPKAYKKNIQKLKRLSKTHSRKSKGSNNRYKSKIKLAKHDARVSNIRKDALHARHQLLMQKPRCDSD

SEQ ID NO: 23318 - protein, 140 aa, Scytonema sp.
MPLRVSPAETLRERQSPAVGKPSRSAGLNKNQSIGIDLGIKTFAVISNGEKAVSPDYSKQDRKIRKLQRRLARQQKDSKRRNRTRIKIAKLYNQIVDTRKDFLHKLSTKVVSENQTIILEDLNVSGMVKNRKLARAKLNS

SEQ ID NO: 23319 - protein, 479 aa, Scytonema sp.
MPRSTKPSFVLELPLKVDSKQDSELQARFNAAMRLYNNVLREAKTRMELVRKSEAYQAAKKTSRDQKKARSDAFNKAREAYRFSDYDLQAYANRAAKDSQWIARKIDAQTQQKLATRAFKAVERVLFGKAKDIRFRVESRFRSVEGKTNKQGIRWKDDRIIWAGLELPAIIDSENVVIKHGLSCSVKYCRILRRELNGKRRWFVQLVLEGTPYQKPQNYVSDGFIGLDLNVSNIAFVADSHAELLPFAEDVPAFQKEITALQRRMQRSQRSLNPDNFEPNLEARKGRKVIVKKGKPKKGKLQWKKSARVRKAAQKKRELERRKTAYAKSQNRRVVNEILRHGKHIKTENVSVKGWQKRYGKAIGAKSPGFVQSELKRKAENAGGSFTKFSTQKTALSQTHLDGSRIKKPLSERVHQDITGIPEHHRDLFSAFLSRSVNQDKLVLRDAQNEYLRLESALLEAYQRHLTRNSRKRVPKQAV

SEQ ID NO: 23320 - protein, 407 aa, Scytonema sp.
MKVLKAVKVRLYPTTEQEIALAKSFCCARWYWNYALNACIQHYSQTGKSLKLSVYKAYLPQLKVEYPWLKEDCYSAVLQCVAINLNKAYANFFEGRAKFPRFKSKHHKQSIQYPQNVKVVGDCLEVAKIGVIKAVFHRPIEEKVKTVTISKTPTDKYFASILLEIEGESSQISGDKTLSIDLGLKDFAIVHDGNEVTKYSNPKYLKRHEKNLARKQKKFARKVKGSNSRNKYKKLVAKVHERVSNSRQDFLHKLSRKLVDESQVIIVENLNVKGMVRNRKLSKSISDVGWGMFANFLDYKLKAKDGQLVEIGRFFPSSKTCSCCGHVLDELTLDIREWDCPSCKTHHDRDGNAALNIRNEGIRILSMDGGNPLLADRGCVRPPTRKGKGQRSMKSEAHTVPDRVGVG

SEQ ID NO: 23321 - protein, 394 aa, Scytonema sp.
MYAIKRELKLNKVETSLLRGNAGFKRWVYNFGLDLVQASWEFVDIQASDAKRIDAIKKVFTQVTMQKPENVWMKKYPSTVYQSAFIDLKRAFARWREGLSGFPCKKSKKKGDSFTVYKTAGVYPAKGQPPIPFTNRVVISPGKQIKLPGLKEFRLKERIDFYCSSQTFTVSRTANKWFVSFVLDAEKVPPIIHPIERIGVDLGVKALATCSDGSKYDMPVATTRAKTKLGKLQWRNRNKTLGSKKLKISASKNACKYYNATARQHARIANIRQDTTQKMTTDLSRKAYAIRIEDLNVSGMIANQKLASAVSNNCFYEIRRQLIYKQAHYGTKVELVDKWYPSSKKCSRCSHIQPMKLSERVFQCQNPQCGHIQDRDENAAVNLEFAPDDKVRLA

SEQ ID NO: 23322 - protein, 406 aa, Scytonema sp.
VLKAVKVRLYPTTEQELALAKSFGCARWYYNYALNACIQHYEETGKSLKLSVYKAYLPQLKVEHPWLKEDCYSAVLQCVAINLNKAYTNFFEGRAKFPRFKSKHHKQSIQYPQNVKVLGDFLEVPKIGVVKAVFHRSISGKIKTVTISKTPTDKYFASILCEVEDSASQHRGDKTLGIDLGLKDFAIVHNGSEVTKYSNPKHLKRHEKNLARKQKKFARKVKGSNSRNKYRKLVAKVHERVSNSRQDFLHKLSRKLVDDSQVIIVENLHIKGMVRNRKLSKSISDVGWGMFINFLDYKLKASYGQLVEIGKFFPSSKTCSYCGHVLDELTLDIREWNCPSCGTHHDRDGNAALNIRNEGIRILSMDGGNPVLAVSRQRKTNKPQGGKAVVVETGSPHPICTQMGVG

SEQ ID NO: 23323 - protein, 492 aa, Scytonema sp.
MQIQRRDECPDKESATPDLYQACLDAGTGSALSLSISRFGNESISSSTTCVIVLSVWAAYKRSLFNRLSDNRILIEFGFICITIVNTFMLAWIYEGSDKQMRTAYQYKLRPTKQQAEEIDRWLSMLCAQYNYLLADRFNWYEQNRCPINACPLVCSLPELRDNPDYYSQKKTLPSLKKTHPHYGEIHSQVLQDVVKRVKVTFDRFLSGDSNGKRSGKPRFKPRDRYRTFTYPQMKDNCIQGSLINLPKLGNIKLILHRPIPTGFKIKTASITKKADGYYVTLSLEDSTVPTVKPDINPDSITGIDMGLKEFLTTSEGEPVAIPQHYRKSQKRLRVIQKRVSRRKKGSNRRRKAVKQLGKQHKKVADKRKDFHFKTAKQLLSKYDVVAHEDLNVKGLSKSRLALSVHDAGWSSFLSIVSNKAENAGLLVIAVNASGTSQDCSSCGVKVPKKLHERWHSCQCGCSLDRDHNAAINIKQRAVGHSVLKSSAPPKQ

SEQ ID NO: 23324 - protein, 497 aa, Scytonema sp.
VNSKQEAELLSRFQAGRQLYNACLNEAMKRLDLVRNSELYKTARKIPRTKKKERSEAFKKAREQYRYSEYDLHTFATITSKNSKWIAEKIDSNTQHKLATRAFKASERVMLGVASGVRYKVPSRFRSIEGKTNKQGLRWKDDCLVWGKLVLQPIIDPINPVIRHGLESPVKYVRLLWRVLNGKRRWYAQLVNEGLPYQKPQNYVSDGLIGLDLNISNIAFVGDNYAELLPFAENVPTFQKEIAALQRKMQRSQRANNPNNFEPNFKAKKGRRVVVKKGKVKKGKAQWRKSSNYLKASAKKRELERRKAAYAKTKNGSVINEILRHGKHIKTENVSVKGWQKRYGKAISAKSPGFVQSELKRKAECAGGSFTKFSTQKTALSQTHLDGNRTKKSLSERVHRDVTGIANHHRDLFSAFLSRYVNQDVLVLRDAQTEYPGAESLLLEAHQRYLTRKQVSTSESRKPGSPSERVSNKGKAASQIAITSKKLVSILPESACL

SEQ ID NO: 23325 - protein, 513 aa, Scytonema sp.
VARSTTSSFITEIPLIVDSKQEAELLSRFQAGRQLYNACLNEAMKRLELVRNSELYKTARKISRTHKKKRSEAFKKAREQYRYSEYDLHAFASITSKNAKWIAEKVDSTAQQKLATRAFQASERIMVGRAKNVRYRGSSRFRSMEGKSNKTGIRWKDACLVWGKLILKPIIDSTNPVIRHGLESPVKYVRLLWRILNGKRRWYCQLVNEGLPYQKERNYVNTGLIGLDLNVSNIAFVADNHAGLLPFADKVPTFSKEIAKLQRQMQRSQRANNPDNFEPDFEARKGRKTFVKKGKPKKGKPQWRKSANYRKAAQKKRELERRKAAYAKTQNRCVVNEILRHGNHIKTENVSVKGWQKRYGKAISAKSPGFVQSELKRKAESAGGSFTKFSTQKTALSQTHLDGSRIKKPLSERVHRDVTGIPEHHRDLFSAFLSRFVNQDKLSLRDAFIEYPRAESLLLEAWQHHLTRKQVSASESRLSDSPLERVSNKGKTTSQIAITSKKLVSILPESACL

SEQ ID NO: 23326 - protein, 401 aa, Scytonema sp.
MERAFRYRFYPTPEQQTLLRQTLGCVRLVYNKALAARTEGWYERQERVDYADTSAMLTAWKKEESLSFLTEVSSVPLQQGLRNLQKAFANFWAKRAKYPNFKRKHNGGSAEFTKAGFRWKNNQVFLAKCDQALPIVWSREIPPGCNPNTITVKLDASGRWFVSLLVDDHTIKSLEKTDKSVGLDVGITSLIATSNGEKINNPRHFKRLRRKLRQVQKSLSRKQKGSNNTHKARRKVAKVHSKITYARKDFLNKLTTQLVRENQTIIVEDLAIKNMIKNPKLALHISDASWGELVRQLEYKCRWYGRELIKIDRWFPSSKRCGNCGHVVEKLPLNIREWDCPKCGTNHDRDLNAARNILAAGLAVSVCGANIRPDSQPTCRAVAKNPKGVRKQNPQGQEAET

SEQ ID NO: 23327 - protein, 214 aa, Scytonema sp.
MPHGEAIGIDVGISHFAAVSNGKLFPNPRPFRKLERKLKLLQRSVSRKVKGSNNRKKALLKVQKLHERIANVRAYYHWLLSHNLCDWGGMIFAEDLNFKELARGFLGKHTLDGGWGQFFQVLEQCCRKRGVFFLKVDSKKTSQICPECLTETGKKELSERIHSCEHCGYTTDRDVAAAQVVLIPWACSRGTHGSCMLSEGKAVALPVTKESPSL

SEQ ID NO: 23328 - protein, 379 aa, Scytonema sp.
LIWLSLTCSLPELREKPDFYSQKKQLPVIKEDLVIIQHSGELLNLASVPSQTLQDVSKRVDLAFKRFLAGDSNGKRSGKPRFKNAARYRTMRIEGQAITVERIEKDWLFLSISKLKAWLKVRLHRPLPSGFVLKNVLLNKKSDGWYATICLEDPAVPIFNPDEVTPTWETTLGMDAVLYEQDYLATSEGTKLPALKSFRKSEKRLAKVSRRKENRRKGSKARRKLAKRQGREHQRIARARIDHAFKTAHALVRTGKKVFVHEDLNLKALSKRNKAKQDEDGKFLPNGQSAKSGLNKSWADAAFGQFFITLGYIAEKAPGVGNCSQSCIHISTEERIVRSLSSLTAMCVLIGMLNIRLMLTAILTRQSTLSALGWNCSQR

SEQ ID NO: 23329 - protein, 141 aa, Scytonema sp.
LFPNPRPFKNLERKLKLLQQRVSRKVKGSSNRRKAQERVSKLHERIANIRKDFCWLLAHNLCDWAGMIFAEDLNLKGEESGILGKHCLDAGWGQFFQILEQCCRKRGVFFLKVDSKKTSQICPNCLTQTGKKELSLACSFM

SEQ ID NO: 23330 - protein, 339 aa, Scytonema sp.
MEVCRGAYNYALREIKDWCDSRKCLIDRCSIEKEYILSSELKFPGEIQQLNNLPKAKKEFPRLGEVSSQVRKLAIKQLHVAWKYFQVRGFGFPRFKKFGQFKSLLFPQFKENPVTNVHIKLPKIGAIPINLHRPIPTGFVVKQVRVLRKADYWYASISLQCDVSVPDPTPHGHPIGVDIGLEKFLATSDGVLVKPRKFFKQLQSELKLLQRRLGRKQQRSKNYEKQRLKVARLHHEIDNTRKDFHYKQAHALCDAGDMVFMEDLDYRTSAKGMFGKHMLDAAFGQFRAIVKYVCWKRGKFFSEVDARGTSQQCPECSGEVKKDLSVRIHCCPPKWIYNR

SEQ ID NO: 23331 - protein, 404 aa, Scytonema sp.
MLTLTYEYKLKPNNRERAIFEDWLEINRKVYNYALNERKAWLKSRSCHVNCCSLQGEYIISADAPRPTYSQQSRSLTEAKKEFPDLRRVQSQVLQQTLIRLEKAFVSMWEQNHGFPRFKKPGAMRSFVFPQLKQEDLSEDQIKLPKIGWVAFRVSRPIAEGGKLKQARIVKRASGWYVMLTLQWDVSVPSPMPHGDALGVDVGLTSFIATSNGLCVKRPKFFVDLQRKLKLLQQRVSRKKLGSNNWRKAQGKVQKLHEHIANARKDFHWKVAHRLCDQAQTIFVEDLNLIGLSRGILGKHCLDAGWGQFFSILGQCCFKRGVYFQKVDSRKTSQICPNCQTETGKKTLADRVHECQNCGYTTDRDVAAAQVVAIRGLAAVGYTVKMLGEGKFIGIPLNQESPHF

SEQ ID NO: 23332 - protein, 369 aa, Scytonema sp.
LVLLTSIKTKLKLTWEQKVLMSKHAGISRFTYNWGLATWNALYNEGYKPNHLMLKKFFNNEVKPVIPWLKEKGICQKITEFAFENLGKAFQRFFDKKASYPRFKKKGRHNSFTINSGGKPMAVGGTSLKLPTIGRVSTYEGLPHTTTKSFTLSQKAGDWYISFSYEIESEITEKQHDYVGVDLGIKTLATLSTGVVFVNPKALKQAQSKLNRLQRQLQHKVKGSNRRNRQKLRIAKAHQRVTNIRLDATHKATSFICKNHAVVAIEDLNSSGMMHNHKLAAAVGDANFYEFSRQIEYKATRYGSKVVLVDRWYPSTQLCSNCGFKQPMKLSDRVYSCQECGYTTDRDLNAARNLKKYARMASPCLDVEG

SEQ ID NO: 23333 - protein, 300 aa, Scytonema sp.
MSNRLLIVFVRQMLYNITMLLGFKTELKINKVQRLMLAKHAGVARHAWNQGLALCQQVSAHNRANPDDKIKFPSSIELHKWLVASIKPENPWYYEVSKCSPQYALRHLSDAFKSFFKKVKGFPKFKKKGRNDSFTLDGSIHVDHKRIKVPVIGWLKTFERLPQGVKPTAVTISRQADRWFISFKIDVPIEQTPKVCDIVGVDLGIKALATLSTGVVFDGAKSYRQAERRLKRLQRNLSRKVKGSANWNKAVLLVAKAHRRVANIRKDVLHKVTTYLSKNHAVIGIEDLNVSGMMEGSLFG

SEQ ID NO: 23334 - protein, 431 aa, Scytonema sp.
MLIKLDQHSMNVLEFLAEQSNKLRNCATYLLRQAYFTFGEVLDDSFGLHGELKSNPHYQIFYSQAAQQVCTEVAESFTSYKELLPLWYSGQLKDKPSLPKYRKKNGLAGWTYPKQALSFDIEAGLIRLPLGNAFKALFGFDSLFVTMPHNIKFEAVKELRILPRNNCFYAEFVCRQVENTPLELDKSRALGIDPGINNWLTCVPNTGDNSFIIDGFKLKSLTQWYNKQVATIKEGKPQGFWNDRLSHIAEKRNRQVKDALNKAAKLIVNYCLTQNVGTVVFGWNQSNKDGIETGKVNNQKIVQTPTARLKKRIEEMCKQHKIQFVETEESYTSKASFLDGDSLPKYGEKPDNWKPSGTRPKRGQYKTKCGDFINADCNGAANILRKVETQLSLCLVKVCRAVLTLPTRIKLWETKTKKRNRTTLASCSATV

SEQ ID NO: 23335 - protein, 499 aa, Scytonema sp.
MPTLTYVKGLPTPAEELNSLGLTEFEMFLAAYAPVFHKAACETANYLLTGNSFNKSSWNTHLQTTYGISKRHANGVISHDQGAVDASKEHRKRHIKTLEGKLKSINSWISKSEKKLTESVKFYAKKNWQNSNTGCRFSLSCSLQFRSTNWKKIRFQIHNKKRRVYQLARQIEHLKTAPIQTVIPRNQAFVVGSKDESFGNQVCQWNGDVLKFRVPACLESKFGKYVQTRIGNFDRNINRLPKDGSKTWHFYRKNGKWNVAVHFTPAQVERVSRHSAYGCIGIDMNPGSIGWAYVDRDGNLKNHGQIPLQMGLPSGKQDAQIVDACLQLATLADTFACPIVCEQLDFSTKKEQLCERGKKYARMLSLWAYSRFYELLESILSNHGIYLMKVNPAYTSVIGLVKYARQYALASDEAAAMAIARRGMKLTENIPATITAYLSVFAKRLRQEKDGKHVWSHWFQLNNLIKKSSIKRHNFYAISNWESLVKRWSEQSSQSKRKC

SEQ ID NO: 23336 - protein, 487 aa, Scytonema sp.
MVWLSVEFCNFASPLKAGSFKYFLQSFQYCLIDNFSTVFAYKHQVNIKTVNRPIAYIVSHGTKCYHDYMLLTYQYKLNPTPEQVVTLETWGELLRRHYNYALSERLDWLNRTRCQIDRCSLVSEPIGKIPDKADYYTQASDLKRTKELFPDYKNIYADCQQQNLMRLDSCWKRWLIPDKTGKRGGRPRFKKRSDICSFTFPRVNAPKAGAHLSGNVLKLSKIGEVEVILHRPIPEGFEIKQATIRSKADGWYVSFSLEDKTVPTALPIDEIKTATGIDVGLEKFLTTADGQSVAVPQYYRKAQATLARQQSKLARKTAWSKNYQKQASKVARLHLHVARQRKEFHYQVAHWLVDSYDLIIFENLNIKGLARTRLAKSILDVAWGAFLQIMQAVAVKCGKLTLGVDPRGTSINCSGCGERVEKTLAVRVHSCSCGLVIDRDWNSALNLLKRGSVGLPIPVCGGLDSSQPVKQKVSFVSLRCSRYTACS

SEQ ID NO: 23337 - protein, 450 aa, Scytonema sp.
MYLTLRNQVRELNKSEFLALRELCRLSKNLYNVGLYTVRQYFFEERKHLRYESNYHQCKANENYQLLNTDIAQQTLKVVDRTFKSFYGLISAVKGGSYQQRVKLPHYLPKEGYFLLIIPCGWSTRRDKTKVPRLTMKDGRFRIPMSTQFKREFGEIWINFPDRINYESLKEIRIHPRYNARFFEVEFISEVEPESVEVNPSTAISIDLGVDNLAACVDTNGASFLVDGKPIKSINQGFNKRNAYLQSIKDKQGIKSFTNQQVKLIAKRNNQVRDYLNKTARFIVNHCINNQIAQMIVGYNPGIKQEINIGKRNNQNFVQIPLHSLRSKLKALCGRYGLIYTEQEESYTSKASAVDGDEIPVYNADNPNTHQFSGKRVKRGLYRTKDGHLVNADLNGSLNIGRKSKHEGFGRVSRGSLTAPRRINLLKLERNVPQRVKIRLRNILLESPVL

SEQ ID NO: 23338 - protein, 275 aa, Scytonema sp.
LHPTKRCITFTDKKSIGEVKLLGKWDIHTYPVKSIKRVRLVRKADGYYCQFAVDVEVKSEHRTGDGELGLDVGLEFFYSDSSGHHQENPRFLRKAEKAIKHAQRQIYKKEKGKNNRRKARRRYAKKHLRVSRQRSEHAKRLARCVCKANALVAYEDLNVKGMVKNHRLAKSINDVAWTLFRCWLEYFARKFNTTVVAVNPRMTSQKCSDCGAIVKKSLSTRTHKCNCGCEIQRDTNAAINILNLAKARDGQSRSNATGVGTATLLGASLVEQVAT

SEQ ID NO: 23339 - protein, 511 aa, Scytonema sp.
MATKTYTMLAPKELCEYLEAYGKLQNAIREDLKSRLLSGDKAANLVKEFQPKYNINKRQINSIRIEVEGAIASAKECRERHIKIIESQIKSAKEYIKSQEKRIADYRKAKSSKKYKASHVKDACSIRAKQRGGSTLLQDAKFGIHQKKRRVYLLENKLKHIKNSPFVVTIGGNTDNFTLTGSKDETNGNQISQLSPDGILKIRVPAALKAKFGKYVTASGVKFPYGQENINYAINNSAVSFRFYRKKQRWYIAVYVNIQDVPIQSNNRWQFGCIGVDLNPSVIGWAYVDAYGNLKDKGQFKLNLHSRSTNQIEAILTDIAVQLALIAESFEVPLVLENLDFCAKKNQLREKGKRYARMLSGFAYAKWQEIIERRCSNRGVELIKVNPAYSSLIGMTKFMRQYGLSSDTAAAMALARRAMFFSESVPLRNAYLNSVDRRYDGLFDARKHVWAHWNILSQKLKSLGIRRHEFYRTGINSPLVVMLSDLVSAKSDSKPKGTSRTRRKSSAVIVS

SEQ ID NO: 23340 - protein, 219 aa, Scytonema sp.
MQRSQRASNPGNFEPNFKAKKGRKTIVKKGKVKKNTRQWNKSKSYHKTTAKKRELERKKTAYAKTQNRRVVNEILRHGKHIKTENVSVKGWQKIYGKAISAKSPGYVQSELRLKAERAGGSFTKFSTPKTALSQTHLDGTRIKKSLSQRVHRDVTGIPEHHRDLFSAFLSRSVNQDKLILQDAQAEYLGLEPILLEAYQRHLTRKRIGKSESRQSDSPD

SEQ ID NO: 23341 - protein, 224 aa, Scytonema sp.
LGEVPSQVRKLAIKQLHIAWKYFQERGFGNPRFKKFGQFKSLLFPQFKETPVTNLHIKLPKIGAIPTKVHRPIPAGFAVKQVRILRKADRWYASISLQCDVSLPDPIPHGHPIGVDVGLEKFLATSDGTIVRPPKFFKKLQSELKLLQRRLARLQRRSKNYEKQRLKVARLHHKIDNTRKDFHFKVAHTLCDGGDMVFMEDLDYRTSAKGMFGKHMRHGCVRSI

SEQ ID NO: 23342 - protein, 265 aa, Scytonema sp.
MLLGFKTELKINNQQRRALMKHCGVARHAWNWGLGLTKQILDHNKANPDAKIKFPSAIDLHKWLVALVKSEHEWYYECSKSTPQQALMALREAWKRCFNKTAGVPRFKKKGKRDSFTLEGTIKVGTNKIQVPVIGVLRTYERLPQVLTKSCTISRQADRWFISFRFEVDQQTTENTSVVGVDLGVKNLATLSTGGGSAGAKSYKKYEAKLSRMQWLNRHKIIGSANWKKAQLQIARLHRKIANIRKDTLHKLTTLLVVCQGNFAG

SEQ ID NO: 23343 - protein, 320 aa, Scytonema sp.
VYNRFLTLRKELYNTEQKTLNYNGCSQQLTLLKKEIEWLKEIDKFALQNSLKNLETAYKNFFSDLKKAKGKKGVGFPRLKKKHGCKQSYKTNLTNGNIQVIQNRLKLPKLGWVKFHKSQDITGKLINVTVTCTSSGKYIASILCETEIEKYPQVTENIGLDLGIKAYLVTSNGEVVDNPKYYRTQKRKLRSCQKKLSRSAKSSSNRVKAKNKLARTYERITNLRDDFLHKLSTRLIKENSIICIEDLRVANMVKNHKLAMSISDASWAKFVVMLEYKALWHDRIVQKIGTFYPSSQTCNHCGFINPLVKDLKLRVLSYLQ

SEQ ID NO: 23344 - protein, 466 aa, Scytonema sp.
MRPFPWKHLTYPYLRDNISITQEVNETVGTRRMTFRLYPNKQIEQSLRYHRKLHKDLFNAAVYNRFTQYQKFKHSVSYMEQQNSLPAFKEVWTEYKEINSQALQATLKRVDFAFERWFKGLGERPKYKSIRHYSGWTYPAKTGYSVESNGENGYLSLSKIGRIQMRGKAKYWGTPTTCTIVYRNAKWYASITVDVLDQSLKPSVLPIGAIGIDLGCKSALSITDGENHQQIDAPKFLRNAEHQIKKASKEKRRKQAPDRKKKIKASRRWKKAQYKVSKLTRKVANQRQNWVHQVATEIVSGNSFVAIEKLEVKNMTSKAKKGKRKKQKTGLNKSILDVGFGMLRSTIKYKVEQIGGVFIEVPTKKVKPSQTCPKCGHQHKKTLDVRVHDCSVCGYVQDRDIAAAEVMLYCAKGTLPGFGTSLEDADVLSSTSSTSKKAGSMKQLGRAKRQKSTLTGLDVETSPSTK

SEQ ID NO: 23345 - protein, 242 aa, Scytonema sp.
MDNRGVGKKELYQYNTQLRAEFEFVKDLNSHACQASVENVERAINRFFDNCKNKKPGKKGYPKLKKHSRSVEYKTSGWKLHPSKRRITFSDKKGIGTLRLLGKWEIHTYPIELIKRVRIVRRADGYYIQFCVKVDAATLRRTRDGEIGLDVGLEHFYSDSNGHHEENPRFLRKAEKAIKHAQRQIYTKEKGKNNRRKAIRRYARKYLRVSRQREEHAKRIARNVCKVNAFVAYVDAKRRAAG

SEQ ID NO: 23346 - protein, 160 aa, Scytonema sp.
LNHNIGTVVFGWNQGNKDGIETGKVNNQKIAQTPTARLKKRIEELCKQHGIQFVETEESYTSKASFLDGDSLPKYGEKPDNWKPSGTRPKRGQYKTRCGDFINADCNGAANILRKVEAQLGLCLVKVCRAVLTVPTRIKLWETKTKKRNGVASAFRVATV

SEQ ID NO: 23347 - protein, 348 aa, Scytonema sp.
MLAHRASEYIIPADSKRPTYANQCKSLTAYRKTSPALQKVQSQVLQQTLRRLEQAFVSMWEQNHGFPRFKKVGTMRSFVFPQMSAGSIENSRIKLPVIGWVKFRQSREIPSDAKVGQVRIVRRVSGWYAMITLQWNVEVPSITPHGEPIGIDVGISHFAAVSNGKLFPNPRPFKKLERKLKLLQRSVSRKVFGSNNRKKAQFKVSKLHERIANVRAYYHWLLSHNLCDWAGMIFVEDLNLKGLARGFLGKHCLDAGWGEFFQVLEQCCRKRGVFFLKVNSKKTSQICPNCLTETGKKDLSERVHSCHHCGYTTDRDVAAAQVVLIRGLAAVGHTGLACFLRVKRLRSP

SEQ ID NO: 23348 - protein, 363 aa, Scytonema sp.
MINASGVIYNHCIALHKRYYRMWGKHLNCAKLQAHIAKLRKRNSFWQSVGSQAVQDICQRIEKAYQLFFKHSKKGVKPPGFKKVKKYKSFTLKQAGYKFLGSNRVKIGNRLYQFWKSREIEGTVKTLTIKRTPLGELFMVVVVDNVVDLEIKFTTGRIAGFDFGLKTFLTCSDGSLIESPQFFKQSLNTIKKASRQHSKKLKGSANRERARKNLVRKYEDISNARRDWFWKLAHELTNKFDVLCFETLNLKGMQRLWGRKISDLAFGEFLQILEWIANKKGKQLVYVDQWYPSSKSCFNCGHVLEKLDLSVRQWRCPSCQSVNARDENAAKNICAVGASTAQVRRCKTGNACNRCLSLESPHF

SEQ ID NO: 23349 - protein, 355 aa, Scytonema sp.
MINAAGVIYNHCIALHRRYYKMWGKHLACGKLQSHIAKLRKRNPLWQSVGSQAVQDICQRIEKAYQLFFKHNKACARPPGFKKVKKYKSFTLKQAGYKFLGGNRVKIGSRVYQFWKSREIQGTVKTLTIKRTPLGELFMVVVVDTVDESEIKFETGKIAGFDFGLKMFLTCSDGSSIESPQFFKQSLNAILKASKQHSKKLKGSSNRERARKNLVRKYEDISNARRDWFWKLAHDLTNRFDVLCFETLNLKGMQRLWGRKISDLAFGEFLQILEWVAKKKGKQVIFVDQWFPSSKTCSNCGHVLEKLDLSVREWRCPSCQSVNGRDENAAKNICAVGASTAGLGSVRRVQPATTV

SEQ ID NO: 23350 - protein, 381 aa, Scytonema sp.
MIVGYQYRIKPNTEQKHRLNHVRRLCQYLYNRMLGDKLDWWENNRCPVDSCSIISCPLPELRVNPNYNTHQDLLPFLKEDLILVEWSGELLDLSDVYSQVLQDTVKRVHLAFDRYIKGDKNGKRSGKPRFKSESSFKSFTYPQALDSWIKGNFIKLPKIGEVEIILHRSLPSGFKVKTCIVSKKADGWYITLSLEDRKVPLLPSIEIVPTVKNSNGLDAVLDGDAFIATSEGELLPSVKAFRKNQEKLAKISKKKSTKKKGSAKRRKLASQEAKLHQKIARSRKDHHFKTSHQLTRTGKKVFFVEDLDLKNLTLRNKAKQDENGKFLPNHQAQKSGLNKSFLDAGFGQFVDILSYIAEKAGGQVIKVKPNYTSQICCNCDA

SEQ ID NO: 23351 - protein, 438 aa, Scytonema sp.
MYGCQQNLINPNNELRAVLEFICSESHKLTNVGIYYARQLYFKTGKLIGKYDLEKEYKTNKHYQVLHSQAAQQILRSVSESFKSFKELDKKYDKGDLHFKPKLPKYRKSNGYALVTYPKQALSLVGDSIKIPLGTTVKRWFKLDSFLLPMPSNLKFEDIKELRILPRNQCFYAEFVYEKESATRYYLNPSNALAIDPGINNWLSCVSNVGSSFIVDGRKVKSLNQWYNKRVSTLKEGKPQGYWDEQLAYITEKRNRQMRDAVNKAAKLVVNHCIKHHIGIVVFGWNQGQKQEATLGKTTQSFVQIPTAKLKERVKQLCEYYGINFVETEESYTSKTSFLDGDFLPTFGAKPEGWKSSGKRIKRGMYHTGTGILINADLNGAANIMRKVETQLGLNLAKVCRQVLTLATRFRIWETKTKKRNGTDGCLSCSNSLESLWL

SEQ ID NO: 23352 - protein, 479 aa, Scytonema sp.
LYRTIPVRAKFTDEEQAFWINQCEHANSLINSAIYHTRQTHYNKLEQLEDAFTTFWCADELLKGWKTYRCSTTYLELDKVLKDNPHYKAMAAQSAQQTLKTVGESITSYNGLVNAYYKGEVDKPSLPRYRKRGGLAAVTFPRQALNYKEGCFYPSISRETKPHLLTEIKLHLPEFIDSDWIKEVTVRPSFGELWIDWVIDDGKRPVSTNPNLDYTQAWSFDHGGTNWLTGVSTRGKSLIIDGRKLKAMNQGYCRLVAKYKQGKSDFYWDCNLDRVQRKRNNQMRDAVNKAARFIINQCLNDRVGNLVIGWNDGQKNGSNMGKRGNQNFVVIPTGRLIERLKQLCPEYGIRLTITEEAYTSKASYLDGDSLYKHGEKPNGWKPSGKRVKRGLYKTSQGWLINADCNGAVNIAKKVATQLDLNLVEVGRASLTVPQRIDLFTRLSKSYRKRCRVGLLDPLRNISLESPVFPTRGDVKTFDT

SEQ ID NO: 23353 - protein, 200 aa, Scytonema sp.
VFSLTYEFKLKPTSKQVVIFADWLEQCRLVYNYALAERKDWFKSRSCQINACSLRSEYIIPVDSKRPTYANQCKALTAKRKTSPNLQRVQSQVLQQTLRRLEQAFVSMWEQSHGFPRFKKPGTMRSVVFPQMSSGSIENNRVKLPVIGWVKFRSSREIPGDANLKQVRIVRREARLVCYVDVAVECSSSESNASWRSNWD

SEQ ID NO: 23354 - protein, 400 aa, Scytonema sp.
VFIYEFKVNPKPQEILAIKEAIRTSQFVRNKVLRFWMDNRGVGKTEMFRYNTSLRKEFKFVEDLNSHACQTAVERVLKAVNRFYDNCKKQIPGKKGYPKFKKYSRSVEYKVSGWKLSENRKHITFTDKKGIGNLKLIGSRDLNFVAIEQIKRVRILRRADGYYVQLSLQLDPRDTVLPITPSQKAVGIDVGIKYFLADSQGNIEPNPQFYRQGEQQLNRRNRRKSKKYRQGKPQSQNYHKARCLYALKHLKVSTIQREEFVKRVALRLIKSNDLVAYEDLNVKGMVKNRHLSKSITDAGWSKFRRWLDYFGYKYGKITIAVFPYNTSQNCSNCGEKVQKSLSTRTHICPHCNYVEDRDINAALNILQKGLSTVGHTESLKLGEFDPLAELEQSCSVKIGL

SEQ ID NO: 23355 - protein, 420 aa, Scytonema sp.
VLVLEYKAVVKKAQSVAIDEAIRTSQFVRNKVLRYWIDNRGVGKKDLYQYNTQLRTEYPFVKDLNSHACQASVENVERAISRFFDNCKKNKPGKKGYPRFKRDTRSVEYKTSGWKLHPTKRRITFSDKKGIGELKLLGKWDIHTYPLDLIKRVRIVRRANGYYVQFCVKVDAATEPRMANGEVGLDVGLEYFYSDSNGYHEENPRFLRKAEKAIKHAQRRIYSKEKGKNNRRKAKGQYARKHLRVSRQREEHALRVARNVCKANAYVAYEELNVKGLVRNRRLAKSISDVAWSAFRRWLEYFAIKFGTQVVAVPPHYTSQKCSGCGNVVKKGLSTRTHTCKCGCVLQRDVNAAINILSKAKSTGGHPGSNAWGVATSTLLGATQACASCDVEPRIPRLIAVGSVKHSSIAPLPSKGEAAK

SEQ ID NO: 23356 - protein, 426 aa, Scytonema sp.
VLHKAVQVRLYPTKEQQTQLAQTFGCARWWWNYALNKSIDAYKETGKGLGRSALNALLPALKKAEETEWLADCYSQVLQATTLNLTTAYKNFFDKRAGFPKFKSKHGKQSIQYPQNVKIVEGNVKLPGNIGVVKAKIHRPIEGKIKTCIVVKTPSGKYFVSILTEIEGENPSTTEGKIYGVDLGLKHFAVVSDGEKVSKYDNPKHLAKHEKNLKRKQQKLARKQKGSNSRYKYRKVVAKVYERVSNSRQDFLHKLSYKLVSDSQAVIVENLHVKGMIRNHPYGFATCYNGGNPRNAVAHNLAKAISDVGWGTFTNFLAYKLERKGAKLVEIDRWFPSSKLCSNCFYQMGEMPLNVREWTCPHCGTHHDRDGDAAINIRAEGIRWLKAEGSAVSAVGGEVRPKLGRKSNLRHSPLSTEAHGERRRQP

SEQ ID NO: 23357 - protein, 459 aa, Scytonema sp.
VLLNYQYCAYPIANQKRQLNAWLRIAQYWYNRQLGDRFDWWQSNRNDINSCPLICSLPELRENPDFYSQKKQLPVIKEDLVIVQHSGELLDFTSVPSQTLQDVSKRVDLAFKRFLQGDSNGKRSGKPRFKNSARYRTLRIEGQAITIERIEKDWLFLSVSKLKGWLKVRLHRLLPNGFILKNMLLTSKTDGWYATICLEDPTVPVFNPTDVHPTWENTLGMDAVLHEQDYLATSEGTKLPSVKSFRKSEKRLAKVSQCKEKKRKGSKARRKLAKRQGREHQRIARARIDHAFKTAHALVRTGKKIFVHEDLNLKALSKRNKARQDEDGKFLPNGQAAKSGLNKSWNDAAFRQFFTTLEYIAGKAGTRVIAVNPAYTSQLLAYRDKFVFTDCGIREYWDEEFLLYVDRDINAGINIKRVGLGLFPTIKRRKGNPVVSNSTTNSTLKEVLETLKMYQKPTP

SEQ ID NO: 23358 - protein, 240 aa, Scytonema sp.
VVYSQPIEQLVNGSAKAGVDVGLNNLAAVTSNQKGFQPFVINGRPVKSVNNYYNKRKAFLQSQLKGNRKTSNRIQRLSSKRGFKIDDYLHKATRFIVNQLVDNNISTLVIGFNENWKQEINIGRVNNQNFTCVPHAKFIQMLTYKAELVGIKVVITEESHTSVSSFLDTDPLPVYGTPEAKTVKFSGRRVKRGLYRAKNGVKFNADVNGSYNIIRKVFPDAFCNGIKGVVVHPVKVTLAN

SEQ ID NO: 23359 - protein, 328 aa, Scytonema sp.
MQKPENSWMKKYPSTIYQSAFIDLKNAISRWREGLGGFPRKKSKKEGDSFTVYKTAGVYPEKGKPPLPFTNRVTIPAGKQIRLPGLKTFRLKEQINFICSSQTFTVSRSADKWFVSFVLDVEKIPPTIHAVQKAGVDLGVKCLATVSNGSKYDMPATTKKANTALGKLQWRNRNKALGNKKLQIAASNKAKKYYVRLSRQHLRISNIRQDTTQKMTTDLSRKVYNIRIEDLNVAGMIANRKLAAAVSNNCFYEIRRQLVYKQAHYGTKVELVDRWYPSSKTCSRCGHVQDMKLSDRIFNCSKCGHCQDRDENTSINLENAPPDKIRLA

SEQ ID NO: 23360 - protein, 195 aa, Scytonema sp.
MYGCQQNLIHPNDQLKAVLEFICSESHKLTNCGIYYARQLYFKTGKLIGKYDLEKEYKNNKHYQVLHSQAAQQILRSVSESFKSFKELDKKYTKGELHFKPRLPNYRSCAGYALVTYPKQALKLVGDSIKVPLGNTVKRWFKLDSFLLPMPSNLQFAEINELRILPRNQCFYAEFVYEQKSAPELALNPQYAVFN

SEQ ID NO: 23361 - protein, 431 aa, Scytonema sp.
MLIKLDQHNMNVLEFLAEQSNKLRNCAIYLLRQAYFTFGEILDDPFGLHVELKTNPHYQIFYSQAAQQVCTEVAEAFTSYKELLPLWYSGQLKDKPSLSKYRKKNGLAGWTYPKQALGFDIETGLIRLPLGNAFKALFGFDSLFVTMPHNIKFEAIKELRILPRNSCFYAEFVCKQSDVVISNLDKSRALGIDPGINNWLTCVPNTGDNSFIVDGFKLKSLTQWYNKQLATIKEGKPQGFWNDRLAHITEKRNRQVKDAVNKAAKLIIGYCLNHNIGTVVFGWNQGNKDGIETGKVNNQKIAQTPTARLKKRIEQLCKQHGIQFVETEESYTSKASFLDGDSLPKYGEKPDNWKPSGTRPKRGQYKTRCGDFINADCNGAANILRKVEAQLGLCLVKVCRAVLTVPTRIKLWETKTKKRNGVASAFRVATV

SEQ ID NO: 23362 - protein, 465 aa, Scytonema sp.
VSQLYRTIPIYARFNNEEKAFWLEQCQRANSLINCAVYHIRQTHYARLEEMGNAYTTYWRGDELRSSWKTYQCYSSYPELDKVLKSNPHYKGLAAQAAQQTLKSVSESITSYNGLVKAYYKGEVDRPSLPKYRKKGGLAAVTFPSLALSFKNGYFKPSISKETKPELIAEIKLKLPDFIDSDWVKEVTIRPTLGQFVIDWVVDDGKEPIKVNPNLDYSHAWSFDHGGTNWVTGVSTRGKSFIIDGRKLKAMNQGYCRLVAKYKQGKSDFYWDSNLDRVQRRRNNQMRDAINKAARFIVNRCLNDKIGNIIIGWNDGQKVGSNMGKVNNQNFVPIPTARLIARLKQLASEYGIVVTVIEEAYTSKASFLDGDTLHKFGEKPNGWKPSGRRNYRGLYKTATGLGVNADCNGAANIARKVATQLGLRLAEVGRAVLTTPQRYDLFNRLDKSYRRRCGDGLSALVAATV

SEQ ID NO: 23363 - protein, 419 aa, Scytonema sp.
MLTLNYRYQLYPNTAQEQTLIEWMEICRGAYNHALAQIKDWCNSRKCLIDRCSLEKEYILPADLKFPGEVYQLNNLPKAKKEFPKLQEVPSQVLQQAIKQLHHGWEYFQSRGFGFPRFKKYGQFKSLLFPQFKENPVTNLHIKLPKIGAISVNLHRPIPSGFVVKQVRILRKADRWYASVNIQCDVSIPDPVPNGHPIGVDTGLEKFLATSDGLRVLPPKFFKKLQSELKLLQRRLSRKQKRSKNYEKQRLKVARLHHKIDNTRKDFHFKQAHALCDTADMVFMEDLDYRISAKGMLGKHMLDAGFGQFRTIVKYVCWNRGKFFGEVDARGTSQECPECGGEVKKDLSVRVHHCPHCNYVTDRDVAAGQNIRNRGIVLISTTGLVGKETACADGLPGVEVTKSRQVSKSRKGRTRKSLK

SEQ ID NO: 23364 - protein, 428 aa, Scytonema sp.
MQNVEKHIIKSGHEWFTYCEDITTASGQLYNTVQLTQRQGFFYGWGRQSQAKLDVMFKSDSNYGAMPAKVAQLVLKQNADAWSAYFKAIEAYELDPKKFTGKPAPPNYIDGRNIVKFNYQAIGKKEFKNGYIVPSMSRIKIPVKPGLKFEDLCEVRIAPKTGCFVIEVVYNIPDLTEFFCSLNPDLVASIDIGLDNLAMIVFSDPTIQPIAVNGKPLKSANQFYNKQLARFRGFLPNSRGTSSRIQNIVRNRNNFVESYLHQSTKMIVDELIKQGVRLVAIGKNEQWKTSLNIGKRNNQAFTQVPHAKFIEMLTYKLEKVGITVKVGEESYTSKASLIDWDIIPTFDPNNKIKHTFSGKRVERAWYVSKDGFRIQADVNGAFNIGRKVIPNSFNCLQEIVERDRGCLVVHPRRITPLFYRENDKKGVA

SEQ ID NO: 23365 - protein, 419 aa, Scytonema sp.
MILTYSYKIKPNAEQEAAMLHTLELLRRHWNYALGQRLDWLRRTRCQLDRCSLVSEPIGEIPVSVNYYTQQADLKQTKELFPEYKNIWAESQQVNLQRLNKAWERWLFPDKSGKRGGRPKYKKIGELRSFVYPRVNCPKAGAYLNNSILKLSKIGEMRIIVHRPIPDGFTLKTCTIVHKADSWYACISMADDTIPEPLPLEQVKTSVGVDVGLKEFLVTSEGETVPIKQHYRKAQSHLARQQRFLARKQKGSRGFTAQQNKISRIHQRIGRQRKDFHYNTAHKLAKKYDLIAVEELNIKGLARTRLSKSILDAAWGQFITILESVAVKCGVRVVKVSPHGTTQNCSKCGAKVPKTLSIRLHECDKCGLQMDRDQNAALNIKERALSEVGLILPAGGGLVNRQPVKPEAWGLNGVQLSLF

SEQ ID NO: 23366 - protein, 526 aa, Scytonema sp.
LTFQKKTLKKTNKKDKGDDLLLAAKTSSFVTEIPLITTSIDIAVLGARLESGRQLYNAVLSEGKTRLQLLRNSELYQQAKLIAKTDKKRRSTAFLKAREAYHFSDYHLQAFANKTAIASIWIKSHLDANTIQKIATRAFKAVERMMFGKAKKVRFKQKGQFVSLEGKSNKQGIRWIGNGVEWAGLKLTGIITNDPVILHGLNSKIKYVRLVRRILNQKTYWFAQLVCEGMPYQKPKNIVADGTVGIDLGVSTVAIIGDQETIWTPFVVELTSKQKEVRKLQRKMDRQRRANNPDNFNSNGTVKKGKKRWNNSSRYKKTASLKREIDRKQAAYRKSLHGKLVNQTLKLGKNIKTEKVSVKAWQKKWGKSIKFKSPSSFQSELKRKAENAGGTVLMFSTRYTALSQTCLCGNKQKKSLSQRVHNCSECGLKMQRDILSAYLSRYVDPKTETLSIELARNGWLGMEQSLLDGWRVGSNQSARTATSLKSPTIGGIERMSSNPITSEESEPVRVNETYAVSWNPPDLSVG

SEQ ID NO: 23367 - protein, 307 aa, Scytonema sp.
LHSTKQRITFTDKKGIGEVKLLGKWDIHTYPVKSIKRVRLVRKADGYYCQFAVDIEVNTEQRTSNGELGLDVGLEFFYSDSNGHHEENPRFLRKAEKAIKHAQRQIYKKEKAKNQRRKARQRYAKKHLRVNRQRNEHAKRIARNLCKSNDLVAYENLNVKGMVKNHCLAKSINDVAWSLFRRWLEYFAVKFGTTVVAVNPRMTSQKCSDCGAIVKKSLSTRTHKCSSGCKLHRDVNAAINILNLARATVGQTGSNALRSRSLYSSWCKPARASCDVEYRIPSAKAEGSVNFDFRFYIQPFAFKYTTL

SEQ ID NO: 23368 - protein, 434 aa, Scytonema sp.
MTFRLYPNKQIDQSLRYHRKLHKDLYNAAVYNRFTQYQKFKHSVSYMEQQNSLPAFKEVWTEYREINSQALQATLKRVDFSFERWFKGLGKRPRFKSIRHYSGWTYPAKTGYSVESDGENGYLNLSKIGRIQMRGKAKYWGTPTTCTIVYRNGKWYASITVEVLDQALKPKILPIGAAGIDLGCKSALSITNGESHKQIDAPKFLRNAEHQIKKASKEKRRKQAPNRKKKIKASRRWKKAQAKVSKLTSKVRNQRQNWVHQVAAEIVSSNSFVASEKLEVKNMTGKAKKSKRKKQKAGLNKSILDVGFGMLRSTIKYKIEQIGGVFIEVPTKQVKPSQTCPKCGHQDKKTLDIRVHECTVCGYVQDRDIAAAEVMLYWAKGTLPGFGTSLVDGDVTSSTSRTRKKAGSMKQLGQMKRQKSESTGAVVETRSSTK

SEQ ID NO: 23369 - protein, 465 aa, Scytonema sp.
MKRLELVSNSELYQAVRRIPRTKKKERSDAFKKAREQYRYSEYDLHSFAAITSKSSKWIAQKVDSNTQQKLATRAFKASERVILGHAKNVRYKVASRFRSVEGKTNKQGLRWKDDCLVWGSLKLQPIIDPVNPIIRHGLESPVKYVRLLWRILNGKRRWYAQLVNEGKPCSEAKNYVSDGLIGLDLNINNIAFVGDNHADLLPFAEKVPTFQREMTALQRQMQRSQRTNNPDNFEPNFKARKGRKTVVKKGKVKKNSRQWNKSKNYHKAAAKKRELERRKAAYAKTQNRRVVNEILRHSKHIKTENVSVKGWQKRYGKAIAAKSPGFVQSELVRKAENGGGSVIKFPTQTTALSQTHLDGSRIKKPLSERVHRDVTGVPEHHRDLFSAFLSRSVNQNKLILQDAQTEYLRLEPALLEAYQRYLTRKQVGKSESRQSGSPSERVSNELLISSQIANMGKKLDGDVA

SEQ ID NO: 23370 - protein, 309 aa, Scytonema sp.
VKSENEWYYECSKSTPQQALIALREAWKRCFNKTAGVPKFKKKGKRDSFTLEGTVKILGNNKIQVPVIGVLKTYERLSQVLIKSCTISRQADRWFISFRFDVEQHNLGNTDVIGVDLGVKNLATLSTSEVIAGAKSYKKYEAKLSRMQWLNRHKIIGSANWKKAQLQIARLHTKIANIRKDTLHKLTTLLAKNHGTVVIEDLNVSGMMANHKLAASIADMSFFEFRRQLTYKCELYGSKLVVVNRWFPSSKTCSNCGIKKEALTLNERVFECSHCGFVIDRDLNAAINLSHCVAGVPPVVASGVSRVVS

SEQ ID NO: 23371 - protein, 309 aa, Scytonema sp.
LGSHSLCPGIHPVAESAYYSAGLLPELAKAGAHLTGNVLKLSKIGEVEVILHRPIPDGFEIKQATILRKADGWYVSFSLEDKTVPTALPVDEIKTATGIDVGLEKFLTTADGQSVAVPQYYRKAQATLARQQRKLAHKTAWSKNYQKQANKVAKLHLHVARQRKEFHYHVAHWSVNSYDLIIFENLNITGLARTRLAKSILDVAWGAFLQIMQAVAVRRGKHTRGVDPRGTSINCSRCGERVEKTLAVRVHSCSCGLVIDRDWNSALNLLKHESVGLPIPGCGGYLDTSPAKQQVSFVNLRCSRYIACN

SEQ ID NO: 23372 - protein, 225 aa, Scytonema sp.
LIIDGRKLKNINQGYCRLVAKYKQGKSEFYWDSNLDRVQCKRNNQMRDAVNKAARFIVNQCLNDRVGNIIVGWNEGQKSRSNMGKRNNQNFVVIPTGRLIERLKQLCKEYGIVLTVTEEAYTSKASFLDGDSLPKHGEKPVGWKPSGDRVKRGLYRSRDGHLINADCNRSANIMIRCNTQLALNLVEVGRASLTVPQRFDLFTRLNRSYRKRCAGALLAPVATSV

SEQ ID NO: 23373 - protein, 427 aa, Scytonema sp.
MRCCEKHIIKEAHEWFGYCALITTVSRKLYNTAQFSQRQGFFYGWSTLSSASLDSLFKQNENYKSMPAKVAQLVLKQNADAWVAYYKALSAYKIDSSKFTGRPKPPNYVDDKNLVKFNHQAIGKREFKKGWIIPSMSPIRIPVKSGLKFEDLCELRIIPKTGCFVIEVVYEIPDHSQLCSSLNKSLNAAIDIGLDNLATIVFNDLTIQPIILNGKPLKSANQFYNKQVAKFRGFLTLGIGKSRRIANIIRNRNQFVDSYLHQSTKMIVDEFLRLGVTHVSIGKNGQWKTHLNLGKRTNQNFTQIPHAKFIEMLTLKLERVGITVKVAEESYTSKASFIDWDIIPTYQPNNKIRHAFSGKRVQRAWYLSKNGFKIHADVNAAFNIGRKSNPEGFDTLKSILRDRGCLVVHPRRITPLFRRVHAESRVA

SEQ ID NO: 23374 - protein, 420 aa, Scytonema sp.
VLTLTYEYKTNPTAEQIQIIEHTLNVCRKVWNFALRERKDWLNSRKCQVNACSLTSEYIISADEPYPNYNTQAKSLTGAKVQYPELKTVNAQVLQQVLRKLETAFIDMKRKGMGFPRFKNRYRMRSFVYPQMGKSKFLSGNKIKLPQIGWLKYVKSREIPDGFVVKQARIVCKASGYFLMLTLECDVNVPAPVASGHPLGIDLGLDKFAATSDGLLIERPRFLDTLHRKLKLLQRRLKHKQKKSNNRHKLNRKIARLHQRISDTRKDWHFKLAHSLCNEVGMMFVEDIDFRTWAKGMLSKHTLDAGFGQFVEILKWVCWKRGVYFDKVDKDYTSQVCPQCDTHTGKKELNDRIHSCQSCGYTTHRDVAAAQVIRNRGISALGRSVEENACGDGLAGTGNSLVKSRKSRKKGEEASFQSAS

SEQ ID NO: 23375 - protein, 281 aa, Scytonema sp.
VLVLEYKVKGKQEQYRAIDEAIRTTQFIRNKAIRYWMDAPREQKVDKIALNNYSTALRKEFGFVKELNSMACQAATERAWLSIARFYDNCKTKKSGKKGFPRFQKDNRSVEYKTSGWSLHPTKRRIFFTDKKGIGEVRLLGKWDIQTYPTKLIKRVRLVRKGDGYYCQFAVDVDIKSEQRTGNGELGLDVGLEFFYSDSNGHHEENPRFLRKAEKVIKHAQRQIYKKEKGKNQRRIARQRYARKHLKVSRQRNEHSKRLGRCVCKVNALVAYVDAKRRAAG

SEQ ID NO: 23376 - protein, 402 aa, Scytonema sp.
MRTAYQYKLRPTKQQVVEIDRWLAMLCSQYNYLLARRFDWYEQNRCPIDACPLVCHLPELRENPDYYSQKKTLPNLKKTHPHYGEIYSQVLQDVVKRVKVTFDRFLSGDSNGKRSGRPRFKPRDRYRTFTYPQMKDDCIQGNLVVLPKLGSIKLILHRPIPEGFKVKTASVTKKADGYYLTLSLEDEAVPTVKPDINPELITGIDMGLKEFLTTSEGEAVPIPQHYRKSQKRLRVIQKRVSRRKKGSSRRRKTVKQLGNQHKKIADKRKDFHFKTAKQLLSRYDVVAHEDLNLKGLSKSRLGKSVHDAGWSSFLSILSNKAENAGLLVVAVNPKNTSQDCSSCGVKVPKKLHERWHSCQCGCSLDRDHNAAINIKNRAEGHPVLKAHRVSEAIAGFGEKPTP

SEQ ID NO: 23377 - protein, 236 aa, Scytonema sp.
MGLDAVLHKDNYLATSENTKLPSLKVLREALGKLAKISKKKNARKKGSASRRKLARKEGRQHQKIARARKDFHYKTAHKLVRTGKKVFFHEDLNLKGLTRRNAPKQDETGAYIPNGQSAKSGLNLSWADAAFGQFFEILGHIAEKAGAVVIAKNPAYSSQLLSYRDESVFTDCSIREYWDNIEKLLVDRDINAAINIKRLGLDVFPSIKRRKGGIVIVGSITDATSKEVLHTLRGV

SEQ ID NO: 23378 - protein, 272 aa, Scytonema sp.
MSYAYRLYPRFLQVLQCKLKLLQRALLHKKKGSNNRHRLNRKIARLHQRIADTRKDWQFKLAHKLCDDAGMMFVEDIDFRTWAKGMLGKHTLDAGFGQFIEILKWVCWKRGVYFDKVNKDYTSQVCPQCNTYTGKKELKDRVDSCQSCGYMTHRDVAAAQVIRNRGETALCRRVSRPRRLRTRRGSLGSCRSLEENACGDGLTGTGNSLVKSRKSSEVAVERHLLRVPPNICLRIPAHLCRGVRQPDISVSPTTRKIPQSPCETAHFSTPLR

SEQ ID NO: 23379 - protein, 421 aa, Scytonema sp.
VLVLEYKAVCNQRQSKAIDEAIRTSQFVRNKVLRYCMDNRGVGKKELYQYNTALRAEYAFVKDLNSHACQASVENVERAISRFFDNCKKSKPGKKGYPRFKKDARCVEYKTSGWKLHPTRRRITFSDKKNIGELKLLGKWDIHTYPAELIKRVRIVRRADGYYIQFCVKVDITTETRTENGEVGLDVGLEYFYSDSNGYHEENPRFLRKAEKAIKHAQRRIYSKEKGKNNRRKARGRYARKHLKVSRQREEHAKRVARNICKANAYVAYEELNVKGLVRNSRLAKSISDVAWSAFRRWLEYNARKFNTQVVAVPPHYTSQKCSSCGNIVKKTLSTRTHSCKCGCLLQRDVNAAINILCKAKSTGGHPESNAWGVGTSVLLGETLAHASCDVEPRIPRRVFPWGVSSSWFWCKGEDIYGVRF

SEQ ID NO: 23380 - protein, 418 aa, Scytonema sp.
VELVRSKPVIIYEFKVKGKDKQYRAIDDAIRTSQFIQNKCLRYWMDNKDKKIDKYALNKHCAVLAAEFPFADELNSMARQSAAERAWGAIARFYENCKKKVKGKKGFPRYKKHCRSVEYKTSGWKLSTTRKAITFTDKKGIGTLRLKGTYDLNYYDIKQIKRVRLVRCADGYYAQFAIDVDLKVETQPTGQIVGIDLGLKYFIADNKGNVEQSPQFYRSSEKQLNRANRKKSKKYDPKKKKAKQPQSTNYHKARNRYARKHLRVSRQRKEYCKRVAYSVIQSNDLVAYEDLNVKGLVRNRHLAKSISDAGWSTFRSWLEYFGHKYGKVTVAVPPHNTSQNCSNCGEKVKKSLSTRTHVCPHCGFVEDRDVNAAINILRKGLSTVGHTGTYAWGDLPSWAVGASLLSNGESMNQESQCL

SEQ ID NO: 23381 - protein, 417 aa, Scytonema sp.
MQLVEKHIVNKQHKFWKECDYLALQSKHLYNSANYVQRQYFFETKKYYNSIDIYHQTKELESYRYLPTKVSKQIVRRVADAWKGWLTALKDWSKHPEKYLGKPKIPGYKHKEHGRNVVIYPIDAISKPALAKGIVKLSQTSIEFSTQAKNVDQVRIVPKLDHYVIEVIYTIDDVPKSNGKYIAGVDLGLNNLMAITSNHPGIRPLLINGRPLKSINQFFNKRVALAQSIEAWRQIKALNSKRDRRIDNYLHTVSRRVINWCQLNDIGQLIIGNNQGWKQEINIGKKNNQEFTKIPHAKLIDLLTYKAQLAGIEVILTEESYTSKASALDGDKLPTFNSKSETKPVFSGKRVKRGLYKTNTGRTINADTNGSMNIARKVIPNFMDGIVGLPFIPVVLGLWTKIANVDVENPLPLGSFV

SEQ ID NO: 23382 - protein, 392 aa, Scytonema sp.
VLVLEYKAVVKKIQAMAINEAIRTSQFVRNKVLRFWMDNRGVGKKELYQYNTQLRSEFEFVKNLNSHACQASVENVERAINRFFDNCKKNKLGKKGYPRFKKDSRSVEYKTSGWKLHPSKRRITFSDNKGIGTLKLLGKWDIHTYPVEFIKRVRIVRRADGYYVQFCVKAESTTEPRTGNGEVGLDVGLEYFYSDSNGHHEENPRFLRKAEKSIKHAQRRIYTKEKGKNNRRKARGRYARKHLKVSRQREEHAKTRARNVCKANAFVAYEDLNVRGLVKNHHLAKSINDVAWTSFRRWLEYFALKFNTEVVAVAPHYTSQKCSNCGETVKKGLSTRTHNCSHCGTVLQRDVNAAINILVSAKSTGGHPGSNAWGDVSSTCVGQKICKGKKRQ

SEQ ID NO: 23383 - protein, 232 aa, Scytonema sp.
MHGERWSVYTRLYDPANFPWQTTSDGLLVERPHFLNSLHRKLKLLQRRLKHKKKGSSNRHKLNLRIARLHQRISDTRKDWQFKLAHKLCDKAGMMFVEDIDFRTWAKGMHGLHTLDAGFGQFIEILEWVCWKRGVYFEKVSAYYTSQLCPQCDTHTGKKELKDRIHSCPECGYTTHRDVAAAQVIRNRGISGLGRSLEKNACGDDLTGTGNRLVKSQRSRKKSGEARLESAS

SEQ ID NO: 23384 - protein, 407 aa, Scytonema sp.
VIKVFNLTYEFKLKPTQSQIAMFEEWLETHRRVYNHALAERKDWYKSRSCQVNACSLHSCYIIPADAPRPTFASQCKSLTAARKENEYLKRVNAQSLQQTLRRLEKAFVSMWEQNHGFPRFKKPGRMRSFSFPQLGVNPLTNGFVKLPVIGAVSMRQSRSIPDGGVIKQARVVKRVSGWYVMLTVQWDVNPPQPIPHGEAVGIDVGLTSFVATSNGLLVKRPRFFVDALRKLKLLQQRVSRKRIGSNNWHKAQRKVASLHEYLANCRKDWHRKLSHQICNNAGMVFVEDLNLVGLSRGMHRLHCLDAGFGQFFNILEQTCFKRDVYFQKVDSRKTSQICPSCGVQTGKKELSERTHICSNCGYTTDRDVAAAQVVLVRGLAAVGHTVKMLAEGKFVGIPVKQESPPL

SEQ ID NO: 23385 - protein, 315 aa, Scytonema sp.
LTNITKKRAEFAWMNTMSSKVYQSALQDLQAAFSRWRKGIAFAPTRKTKHNKQSFTVYDSNGSVLVKSGKFIKIPTLGTFRLTEPLKESYISQTFTISREADAWYVSFAVNAERIPPVMHEVAQAVGIDLGVKTFATISDGTEVEAPKPYKIAKTKLGRLQCRNRNKRRGDRRTGEKASNNAIKYYKKMARFHKQIADKRKDFLNKTTTSICKKYAHIKIEDLNVSGMIANRKLSTAISDLGFYEFRRQMEYKSSVFGSKLDIVDQWYPSSKQCRKCGHKHNRLKLKDRVFNCPQCGHIEDRDLHAAINKSECTG

SEQ ID NO: 23386 - protein, 304 aa, Scytonema sp.
MTFRLYPNKQIEQSLRYHRKLHKDLFNAAAYNRFTQYQKFKHSVSYMEQQNSLPAFKEVWTEYKEINSQALQATLKRVDFAFERWFKGLGKRPKFKSIRHYSGWTYPAKTGYSVESNGENGYLNLSKIGRIQMRGKAKYWGQPTTCTIVHRNGKWYASITVDVLEQVLNSKVLPVGAIGIDLGCKSALSITDGTTHQQITAPKFLRNAEHQIKKASKEKRRKQAPNKTKKIKASRRWKRAKNKVSKLVRKVGNQRHDWVHQVAAEIVSGNSFVATEKLEVKNMTSIAKKGKRKKLLCWAKQVNT

SEQ ID NO: 23387 - protein, 382 aa, unknown
  TnpB Polypeptide
VNTVYIYPLKNLSQTQFQRLRDAQMEAAQVWNFCMQMHKTARLQHGSWPGRDELQKATKGRFALHSQSVQMVVHAFLANIDTTQQLRQTHLQMRMRYPYKEKRFYPVMWPTQAVSRERGRVVLPMGRGRASLVLPLDLPENSGACTLVWNNGFELHVCVEVEQRENAPGDNRASVDLGEIHLAAVTTSTGKAMIVTGRGIRSLKRQRTMQLRSITKKQSKCTKYSRRWKKLQRAKNKQCRRAERRIRNQRHQATRKVINFCIERQVGTLFIGNPHGVRNGNKGRRQNQRMALWEYGKDIDYLTHKSKQAHMVCFTGSERGTSSQCPACGHKHKPRNRQWTCKACGFKGHRDLVGSINMHKLAFGEQVKFPRSFTYLRPSKLG

SEQ ID NO: 23388 - protein, 416 aa, Actinobacteria sp.
MSYRYRAYPGVEQIGGLFTHASHARFVWNLACEQQSYYRVAGRVSSPPNSAARFRQLAEARADSEWLAAGSSSVQQQALRDYDQAVRNWLGHKSHRKPSWRKAGRDEGFCIRDVKAQKVNRRWGRVFVPKVGWLRFRLTRPLPVKSGMARVTLDQAGRWHVSFTATQPVIKREPTGSEVGIDRGVATTLALSTGQHYQVPHSRKSDRKARKLAARMSRARRGSKRRDAAKHAFANVHAQAGDRRKNWIEKTTTTLIRDHDVIVLEDLKIKNMVRKPKPKPDPAQPGSFLPNLARAKAGLNRSIHRSCWGLFAQRLQDKAAVSGVTVITVNPSYSSQQCRACGHTAAENRQSQTDFCCMECGYSNHADTNAAQVVLARGIAALRPPQDMGQELAPARSARGNPEKSVARTTRTKAVA

SEQ ID NO: 23389 - protein, 236 aa, unknown
  TnpB Polypeptide
VKIKELDKSKALAIDLGVNNLATCVTSEGDSFIIDGRRLKSINQWYNKQNARLQSIKDKQKFGKGRTEQQKRILRKRNNRVNDYISKTAKMIVEYCLAHNIGNLVCGYNVTFQQESNLGKVNNQNFVNLPFGQFRDKLTYLCELNGIIYTEQEESYTSKASFWDEDKIPVYNADNPQHHTFSGQRIQRGLYRTATGKILNADVNGALNILRKSSVVALSGLYSRGEVTAPVRIRIA

SEQ ID NO: 23390 - protein, 219 aa, unknown
  TnpB Polypeptide
MVGVDCNLRNLTVGNDDQTRYYDTSETMRIAKVTTRIVSSLKRNDVRIRESVASKYGRRRSAKTRHVLHNATKEIVTVAVQKRTAIVLENIEGIRRLYQKGNGQGRKYRGRMNGWSFGEAQRQIEYKARWAGLPIIRLSRRETRGSSVTCPRCGERLQSDKQLERKLWCGKCRIVMDRDMVAAINLARRGRVRFARSRPPIAEAQGGAGEAMKGTRRLR

SEQ ID NO: 23391 - protein, 399 aa, unknown
  TnpB Polypeptide
MRKLLKAFKTEIKATKQQKQKINQSIGVCRYLYNSYLSKNKELYQQYKDGLIDKKQALMSANDFDKYINHEVKTLDEYIWINSCGSKARKKAIRNAETAYKRFFNGQSKFPKFKKKNKSDVKMYFPKNNKGDWKIERHKLMIPSLKNVRLKEFGYLPIGANVINGTVSKKADRYYVSVLIEVEEKYQVNSNEGIGIDLGLKDFAIISNGTTKKNINKTKKVKKLEKKLKREQRKLSRKYESLKIRNKNIKKEGGNATRQNTQKQVVKVQKLQQTLGKIREDYLNQSVNEVVKQKPSFITIEDLNVRGMMKNKHLSKAISKQGFNMFRVKLTNKCKEYGVELRIVDRFYPSSKLCHECGSIKKDLKLSDRIYICECGYKEDRDLNASLNLKDAKIYKIAN

SEQ ID NO: 23392 - protein, 419 aa, Moorea sp.
MNYCYRIYPSAIQEQQLLEWLEVSRLLYNQGLGEIKDWINSRKCRVNCCSLQSEYIIPADIPFPNYYDQQNALPKAKEVFPRLKQAPSQVLQTTLRRLHNAWDFFKTRGFGFPRFKKYGQLKSLLFPQFKSNPITGWQIKLPKLGKVPINLHRPIPDGFVVKQVRVLRKADRWEAVIAISSDISIPEVKPHGKAIGIDLGLSCFLATSESELICRPRFLVSLHRQLKLLQRKYARTNKGSKNRERVRLKLARFHNHIANTRKDYHYKLANHLCSTEGVGMVFVEDLNVLAMSRGMLRKHTLDAAFGQFLNILEWVASKHQVYCGRVDPNGTSQTCPKCGTHTGKKGLSERVHQCNGCGYRTDRDHAAAQVIRWRGLEQVSTQGLCGIENAYAVGLPGVGETRSRSEAKSRKRKTRNAQS

SEQ ID NO: 23393 - protein, 398 aa, Moorea sp.
MVEKAYRYRFYPTPEQETLLRRTLGCVRLVYNKALDARTSGWYKRSRRISYKETSLMLTEWKKQDDLFFLNDVSSVPLQQGLRHLQTAFTNFFAGRAKYPNFKKKRNGGSAEFTKSAFKWEDGQVYLAKCKEPLRIRWSRQLPANCTPSIVTVSLDPSERWQISIRFDDHRDLSLPTTDKQVGLDLGVTSLITTSDGDKIANPKHFKKLKKKLAKYQKALSRKQKGSNNRYKARLKVARVHAQIKDSRRDFTHKLTTQLVRENQLIAFEDLAVKNLVKNHKLAQVISEANWAEIIRQIKYKSQWYNREAISIDKWFPSSKLCSVCLNRVESLALNIREWDCLSCNAHHDRDINASINILAAGLAVSVCGATVRPEESKSRKAGAKNSPKGRRKQKPKS

SEQ ID NO: 23394 - protein, 420 aa, unknown
  TnpB Polypeptide
LEKTDFIFKIYTNMIYKAYKYRIYPNKEQIELISKHIGCSRWIYNYALEKKNRVYQETGVGLSRFDLQKDIPLLKKQEETSWLKEVNSQSLQSSLEHLDNAFTKFFKKTGDYPKFKSKKNNKQSFSIQQSTYVDFENQKLDIPKFKTPIKIKISRIFEGKIKSSTITRTSTGKYFISILVEVPNELPKKKPISEDKAIGIDLGIKTFVVLSNGIEIENPKNLKKSLKKLKRIQRKVSKKVKGSNNRKKQSKKLAIIHEKVSNKRNDFLHKTSKFLVDNYDTLCLETLKPSNMVKNHKLTQSLSDISIGNFNSYLDYKSDWYGSNIIRIGQFEPSSKMCSCGKINNELKLSDRVWTCKSCNTTHNRDLLAANNIKRFSFVKNNRELSLDRELVLNTVGITEIYACGDMKLVTNSAQETINF

SEQ ID NO: 23395 - protein, 384 aa, unknown
  TnpB Polypeptide
MFRTINFKFTPSNKERYLELMGIVHDIFNIHTEWSYKNQTFSKDKAHKALYLDLKNRFKIPSSILQATRDVALEAVKCGKFKCKRPECKSKYMTVRYNDCTISRHGLNMFTFSTLDKREKVYIETPKDKDRKEVFLNWKFKTASVSYCKKTDTFWLHLQFFKPDPVPVDPKKILGIDLGIHNLVTTSNSKIKWNSKELRKHQRKFLYLRSKLQAKGTASSKRHLKLLSGKQMRFSKDLNHVISKRLVNLDYDTFVVEDLSGVRNTKHFSKKVNKWLSNWSFFQLQNFIEYKAKALGKNFVKVNPAYTSQTCSKCGFTNKKARFKSHYHCSHCGFKIHADYNAAINIKNRYLQILSTIKQEDRSVEQVVVNQPIVSDSKMLAIAS

SEQ ID NO: 23396 - protein, 190 aa, unknown
  TnpB Polypeptide
VVTLFYTKIHSEFFIFLGVALHYTIHLKQNANDIKKANRILSRKKKGSNHRRLAKIALARLYKKISNQRKDFHFKLANKICSEYALICIEDLNIKGMQKRWGRKISDYGFSEFIKILEYKAREIGSIVQKIDRYYPSSQICHVCGTKNPETKNLAVREWICAKCKTSHDRDRNAAINIWKVGASTFFGEI

SEQ ID NO: 23397 - protein, 255 aa, Peribacillus sp.
LPKLGLVRFAKSREVEGRIINATIRRNPSGKYFISVLAETNVQVLPKTNRSCGVDVGLKNFAILSDGTVYQNPKFFWTVEKKLAKAQRILSRRQEIALNQNKPLAEAKNYQKQKRKVAILHEKISNARMDYLHKVSTEIIKNHDVIGMEDLQVSNMMKNHKLAKAISEVSWYQFKKMLEYKAKWYGKQIVTVSKTFASSQLCSSCGYQNKDVKHLNLREWDCPFCSTHHDRDINAGLNLMNEAIRLLTVGTTGVA

SEQ ID NO: 23398 - protein, 394 aa, Halosimplex sp.
VGRRHRQSRREVQRRSRCVHGSTSDTEEQRSVARVLREQGSVSRRLECIGHGTPQPPGFRGNEDDGRQLRTVIRNTSYTVEWGKRSRLEILVGSELKDRYDHTGRLRLEIAGDPNWPDYEKQGRLDLWYDETDNTFRASQPVTVSNETRATPLASEKAALDIGANNLVACTTTTDEQYLYDGRELFHRFRETTREIARLQSKLPDGRYSSERIRRLYRKRTRRRDHAQEALCRDLLERLYEEGVETVYIGGLTDVLETHWSVKTNAKTHNFWSFKQFTERLACTAEEYGISVEVRSEAWTSQECPQCGSTDRTTRHQDTLTCPCGFEGHADLTASEMFLERQTEQSVRPMARPVRFEWDDHNWSGISHPHESPKEQRTDPSTVHRDGNIVSRES

SEQ ID NO: 23399 - protein, 405 aa, Halosimplex sp.
MEIQRTAVVKLSVPDERRDDLKRTMNTFRDAAQRFADRGWGGDDDGYVITSRSRLQPLVYDEIREDTGLHSDLTVAAVNHAADALTGCVDRMKEGEQTSKPVFTSNTTVYNTNAISYFDGYCSLAAYGSGRVQAEYVYSDDSPQAEYMESDEWQKQGAKLRYDRQTDTYYLHVSVKQERDESSEEAESRTVLGVDRNVDGYLAVTSTGAFIGNADLLNHKRREYERRRAKLQQQGTRSAHLTIQSIGDTFANWSENFLHQASKRLVKEAVSQGCSVIVFEDLEQIRERISNASKFQQWAFRELKRQTTYKARGEGIAVESVHPAYTSQRCSHADCGFTHEDNRDGDDFACQECGRELHSDYNAARNIAHRYVQNRLKSGSGRATNHLALKSGTLNGNGDYSPSTV

SEQ ID NO: 23400 - protein, 841 aa, unknown
  TnpB Polypeptide
MSYLSKYILATRYLRDNEKDFDDIAKRVSNYIGNDDNERRIFYELMINKKFLPGGRTLACSGTNQRLIPNCVVLPVEDDLEGIFNSLKRAAILQKAGCGLGFNFSKLRPAGYNCRSSPDKASGPISFMNLYSHAFKIVQQYNRSGANIGILSIEHPDVVSFIHMKDDLKVMNNFNISVLITKRFMDQYRNSPNTLWYAKWDDNYVKPRLISYDKDILVTDISDLDITAKEMFDELVDASWSTGEPGVLFEENMNMNNYLKDYLGPINSVNPCVVAGTRLYTDHGHIIIDEHVGEIHNVWNGVKFTPAMIKITGHDQTVYKVTVSDGRYFTCTGTHMMPVYISNFPFMEFRKVIDCKSGDELWDPDFSNIETDMKNYEDRIKWLKSLIYDYDDINGVQIKADHEFLHELQLELITLGCKSIVKDDTLFIPPYEAKEIGLLAYGDEDAVRPVTHLYITSIEELPDKVDEVYCVTTLDNSHMATFDGIVSHNCGEISLYPNECCNLGSMNLEEYCSINPIYGSKSIKNVVQYIHVDELKKEYEWLKEVDKFALTNAIYNMDAAYQKFFKEHAGYPKFKSKHDNHKSYTTNFTNGNITVDFGCNRVKLPKLKGIKAKLHRNFIGQIKSATISQVPSGKYYVSILVETEHTELPHTNQNTGIDLGIKELCITSAGKKYENPKIIRKYEKKLVKLQRQLAHKEKRSQNYYKTKKKIALCHEKITNTRKDYLHKMSHEIISENQVIVSEDLQIKNMVKNHHLAKSISDVSWYELTRQLEYKAKWNGRKYVKIDTFYASSQLCSVCGYQNTETKNLSVREWTCPVCGTNHDRDINAAKNILEEGLRQIA

SEQ ID NO: 23401 - protein, 298 aa, unknown
  TnpB Polypeptide
MLFGLARGQVAGYGNPREDSDRINNLLRKSVCEYAADPDVDVQNVQQIRAVWNGDKWELHIVCRVEIETADAPGDRVAGIDLGICNFAAVAIGDEALLYPGGALKEDDYYFQKERAKCDDSDSRKARRLDRKRDQRRTHFLHAVSTDMVAKCAARSVGTIVVGDLSGIREDADWSDHGNLDLHGWAFDRFTEMLKYKAAERGISVERVDERGSSKSCGCCGTTDDSQRVERGLYVCDECDLVANADVNGAENIRQKVLPSLACDGGDRDNGWMAQPAVRLFDKFTGRVRPQEQVCREP

SEQ ID NO: 23402 - protein, 407 aa, unknown
  TnpB Polypeptide
MIHRAYKVELDPNDCQRTAFLRHAGAARWAYNWGLNRKNDAYRRGEKSPTAIDLHRELVALKHLEKDVGGVPWMYEVSKCAPQEALRHLDVAFKNFFRRCKADGGKKGFPKFKSKRNGVGGFTLTGAIKVAPASIVFPRIGSVRLKEHDRLPLGSKIASATVTERAGRWFVSVLVKDQPAPDPAPAGAVVGVDVGVNHLAVLDDGTKFENPRALKTAAIRLVRLQRRVSRKVKGSRNRAKAAKKLTRQHYRIECVRRDAIHKATTATAKRAAIVGVETLNVTGMMKNHRLARAIGDAGMAEFLRCLKYKVEWRGGVVIEASRFYPSSKTCSCCGAVKDVLGLHERTYRCAFCGLVQDRDVNAACNLKQLAASSAVTACGGALRPGHGTSYRAAPAKQEPSAMGVVHG

SEQ ID NO: 23403 - protein, 348 aa, Burkholderia sp.
  misc_feature (255)..(285): Xaa can be any naturally occurring amino acid
MILVYRYRVKSLNGLLNQQSRAVNYVWNFCNDTQKHALKWNKKWPTGFDLNVLTTGSSKKLGIHSGTVNATCEQYAKSRSQHRRPYLRYRGRKSLGWVPLKGRDLKREGDAFRFAGNTFRVFNSRPLPEGKIKDGTNFAQDARGNWFLNIVIEIPDVPARPIRSGVGIDLGLKDFATLSTGEKLPNDRFGRRAADKLAKAQRARKHKRHIAKLHAKVANARADFQHKLALDLVRRFDYIAVGNVSAAKLARTRMXXXXXXXXXXXXXXXXXXXXXXXXXXXXXXXLVVLPGQAPLQGDGARSHVRGSGRKRFDPVLFVVRVERQHDAAERYRGAENKRVDLQWLWCRA

SEQ ID NO: 23404 - protein, 380 aa, unknown
  TnpB Polypeptide
MNKAFKYRIYPNKSQQILFAKTFGCVRVIWNANVESFNSYDKDANPKPKIITKSDLITDKLWLNEISVAAIQQKIRDFQETSKQFFSKTRKKRIGRPSFKKKSGIQSYRLPNQKFSLGDNKIRLEKIGWVKMRVDRAIPDESKILSCTISMNCCGQYFVSVLVETLILHKHKTGKMVGIDLGLKSFATLSGSTVIDNIKFFREKQSEIVKIQRHLSRKKKGGNRYRKNKLRIARLHNKIANKRNYFLHSVTTYLADNYDVICIEDLNVSGMLSNHKLAKAISDTSFYQFRSMLEYKCNWYGKELVVIDRFYPSSKTCSKCGWKKEDLTLSDRVFKCENCGMEIDRDLNAAINIKRVGVDILYNRTQRDEVTNPVEAFKIK

SEQ ID NO: 23405 - protein, 421 aa, unknown
  TnpB Polypeptide
MKIAYQYRLRPNKAQSVQMETWLGLCRRQYNYRLWERFNWWESNRCPINACPLICSIAPLVDQPEYYGQKRDLVETKVKFPEYKDIYADVLQDVVGRVKKTFERFIKGDSAGKRSGKPRFKPSSRYRSFTYSRMKANCIQGKFITLPKIGDVKLILHRPFPEGFVIKTCTVVHKPDGWYVTLSLSDASCFTWAKPKTALAHDTVPTISPDINLENAVGIDVGLKDFLVTSEGEFVPIPRLARKSEKRRKVLNKALSRKRKKGTKRRQKAGKRLSKHYQKVARQRKDFHFKTAKLLLDKYDIIAHENLNIKGLAKTRLSKSILDAGWGEFIAIVAVKAESAGRLAVAVNPSGTTQNCSGCGEKVPKTLADRWHSCPHCGTELDRDLNAAINIKNTALGRRVVKAHRVTEAIAGVDEKPALYA

SEQ ID NO: 23406 - protein, 400 aa, unknown
  TnpB Polypeptide
MYKAYKFRIYPNTEQQTALAKSFGCTRWYWNYALNLCQENYKVTVKGLTRKVIKGLLPGLKKEYPWLSDAYSQCLQVVALNLSTAYKNFFEKRAKLPKFKSKHSRQSISYPAHVKFEGNLLKLPGKVGLVYCCRHRDFEGTIKTVTISKNPDGKYYASVLIDDGKEKPKSSIEGNAIGIDLGLTHFCITSDGSKYDNPKHFVKHQRNLKRKQQKLSRQKKGSNSRQKAKKLVAKTHSKISRCREDFLHKLSRKIVNKNQVIAVENLNVKGMVRNHNLAKSISDCGWGMFCTMLKYKSEIEGKTYIEVDRFFPSSKTCHVCLNQVDSLPLDIRTWTCEHCQTTHDRDINASINIKNEALRILSLGTSDTANLRGCKTNDKISVLLDAIPVEVGSPNYTACG

SEQ ID NO: 23407 - protein, 452 aa, unknown
  TnpB Polypeptide
MLVYEAKLKGTEAQYRIIDEMLRTGLFVRNKALRYWMDNPGVNGMDLNKYCKVLADNPEFPWVKKLNSMARQAMAERAWFAIVRFFDNCKQKVAGKKGYPKFKKLLTRASVEYKTCGWKLSEDRKYITFTDKFGAGTFRLWGTRDLHFYQIDLLKRVRLVRRSDGYYVQFCINHERKETHELTGRMIGLDVGLNHFYTDSEGNQIENPRFLRQCEKAIKRAQRQLSRKKKGSKNRIKARNRVGRKHLKVERQRKDFVVKLARCVVQSNDLVAIEDLQVRNMVKNHHLAKSISDASWSMFRQWLEYFGQVFGVPVVAVPPNYTSQDCSNCGAVVKKTLSTRTHQCPNCGHIQDRDWNAAINILNIALSILSEMLKNTVGQTEINASGENDLCLVGATQLSKPTRRKRKPKEQSLESPAIFGTPTLRWEDVNIASLLRRIAYLNISTRELWFLH

SEQ ID NO: 23408 - protein, 404 aa, Oscillochloris sp.
MQLVEHTRINRSDPRFAALDAAAFASKNLYNVALYTTRQAYIFRGAVIPYAWLAKELRTHEAYRALPAKVSQWVLKQVCAAWNNFFAARAAYTRDPSRFLGRPKLPQYKAKDGRNLLTYTIQAISRVALRRGMITFSGLNVEVPTQQTRIAQVRVVPRDTHYAVEVVYAQDVQPADVNPAWSAGIDLGVSNLVAIATSKPGVTPGLVNGRPLKAINQAYNQARARLQAKLPAGRHTSRQLDALTDARTRRVNDYLHNTSRAVVNWLVTERIGTLIIGHNPDWKQGITMGRRTNQTFVSIPFARLIQMLTYKAELVGITVITHDEAYTSKCSFFDHELVGKRTTYAGKRIHRDLFRTASGQRVNADINAAYNQIANVAPDAFGPGRRGCGVQPGRIALPNRKQAA

SEQ ID NO: 23409 - protein, 344 aa, Escherichia sp.
  misc_feature (44)..(83): Xaa can be any naturally occurring amino acid
VKRLQAFKFQLRPGGQQECEMRRFAGACRFVFNRALARQNENHXXXXXXXXXXXXXXXXXXXXXXXXXXXXXXXXXXXXXXXXQVTGVVKNVTVSQSCGKWYISIQTESEVSTPVHPSASMVGLDAGVAKLATLSDGTVFEPVNSFQKNQKKLARLQRQLSRKVKFSNNWQKQKRKIQRLHSCIANIRRDYLHKVTTAVSKNHAMIVIEDLKVSNMSKSAAGTVSQPGRNVRAKSGLNRSILDQGWYEMRRQLAYKQLWRGGQVLAVPPAYTSQRCAYCGHTAKENRLSQSKFRCQVCGYTANADVNGARNILAAGHAVLACGEMVQSGRPLKQEPTEMIQATA

SEQ ID NO: 23410 - protein, 457 aa, unknown
  TnpB Polypeptide
MLRMVEANRTVVIPLNVPEESRSDFHRTILPYAYCQQEAVEHCWPDTPKQPDDLQTSKQDAEDALYDRLREDTNEQLHSNLVQKAIKDATSAVSSCKTSWENGDRISKPDFYDREQSGYTMTYDKRAATYDRYEATFSTRNGTVTCRYELPAEIEGTPYGEYVLDRRWSFSTSKLVFDGERFWLHAVMQRQFGDEPVYAPQTDDASSDTHNEDTHRVLGVDLNVDGATAVTSSGQFYGNADALNAYRSEQEQLRGELQQTGTRSAHLRFQQRRGTEWRYYDQYAHYVANSIKQEALRVHATHVAFENLTRIRKRISNLPKFQQWLFKKVRKYTEYKLEQYGVTVDATNPEYTSQGCSRTDCDCVDEDNRDGKHFECVECGYTVNADYNAAKNVGFRYLSEELSNPAGRTCSSGQATSQLALVSGTLSLTGDFAECDWASTDKPHPQQASGSSSARAQ

SEQ ID NO: 23411 - protein, 435 aa, unknown
  TnpB Polypeptide
LIGYLRRFFGIGLRLCAARNTNLCYTFNMLIQRAYKYRFYPRAAQRRQLAVEFGHARFVWNRCLDLRGKAWTQRQERHTYVSLGRWVTAWKRGEFPWLADSASCTVTQTLIDQDKAFKNFFEKRGKYPKFKSRYDRQAICYQLDQRQIERTHQAGTSLKLPKLGLLKVRWSQIPAGTPKMATVSKTPDGRYFVGFACEVEIKPLPLTGQTIGVDLGIKDVAVSSDGWKSGNPRHLKGQLKHLKRQQRFLSRKQRGSNRRNRQRLKVARIHARIAAMRQDFLHKTTTALVQRADVIALEDLNVKGMMKNHHLAGTIADVGMGEFRRQIEYKTAWTGRKVIVVDRFAPTSKTCSHCGSYQQKMPLSVREWTCPDCATRHDRDVNAAQVILKFATAGNAGTDARGGGKNLSGHESLTPVEARTDAEKFIEAACLERAA

SEQ ID NO: 23412 - protein, 207 aa, Salmonella sp.
MPEHIFLQDAYTDNLQQKLKDLHAAWKRCFDKKLAAKAPVWKRKNKGRDSIRFVNFEKYCRLENRRVKLPSGLGWVKFRQSQRVNGKIKNATISQLAGQWYISFQVEVETAEPNHTSTTIVGLDAGVTKLATLSDGTVYQPVNSFKASQRKLATLQRQLSRKVKFSSNWQKQKRKVQRLHSHIANIRRDYLHKVTSEISKKPRDDSH

SEQ ID NO: 23413 - protein, 489 aa, unknown
  TnpB Polypeptide
LKKTIKNYCLNATESKLTELYEIAQRYAKVKNEVFMRYGSVDGLRYLSYPREIRDEWVKTGYGDKFGLQARQWKMAFDEAFANITSKWANVANDVRISLSRNKSFTNNEKHYAYYLLKSPSLLYKTITFKTFKLPSQFAELDIDILKVHKYLKSRLRKHFGEKPHQHKTNSFAIDSDMYDLYKDAKGRLWIGITGLEPRKRIHLLLRSTVEPKKGSSLKVVLKAKRIEIHHTIDVEVKETNNSNVVAIDKGFTEVVTSSSNKRYGLGFNEILKEESNRLSEKNKRRNKLRALVKKYEEKGNFAKAEAIKVSNLGKRKDNHQGLTNKDKLKTFINTAIGEFIQREAPSVVIQEDLTFSNWSKKLSKKVKRYFSSWLKGYIKERLEYLSKLNGVKLETVNAAYTSQVCHICGRFGKRTGDRFYCAEHGEMDADYNASLNILARYFDTEINLYTSYKQVKAILQERLRLSNQDSRHFLVKESQTESELTQCI

SEQ ID NO: 23414 - protein, 253 aa, Tolypothrix sp.
MQLSRPIPDGFVAKQAQVVKKASGWYVMLTLQADVDVKSFAPHGQPVGIDLGLKSFLATSAGEQIPRPRFFVDLQRQLRLLQQRVSHKKLGSNNWRKAQRKVSRLHEHIHNTRKDFHFKLAHYLCDQGGMIFAEDLNFQAWAKGMFSKHTLDAGFGEFLSILEWVCWKRGVYFAKVNPDGTSQTCPNCNHHTAKKDLSERVHRCGECGFQTDRDVAAAMVVMQRGLAAVGHTVKMLGEGLSNNSLVTQESPVL

SEQ ID NO: 23415 - protein, 183 aa, Cyanothece sp.
MNMDLIIKLSLWRNRNKVHSNRRSGISASKNAVKYYQKLRKKHKRITNIREDFLQKTTTLLAKTYQHILIEDLNIKGMMANHKLSDALSNLGLYRFRELLSYKQECFGFLLTIVDRWFPSSKTCSVCGNIQDMPLFERVYYCQNCGQVMDRDLNASKNIEGWIKNADGLSVNACGQEGAVSLG

SEQ ID NO: 23416 - protein, 392 aa, unknown
  TnpB Polypeptide
MSSETIKLTAKFKLKEIPEGLDDLFSTYREIVNYLITYAYEANITSFKRLKKETYKELREKYPQLSSHYLYTACQMATSIYKSYRKRKRKGKAKGKPVFKKEVIMLDDHLFKPDLEKGVIKLSTPKGRIQLEFYPAKYHEKFKDWKVGQAWLIKTPKGAFINAVFSKEVEVRESKAFVGVDLNENNVTLALPNGEFVQIITHEREIRTGYFVKRRKIQKKLKTGKRRRELLEKYGEKERNRLNDLYHKLANKIVELAVKYGGIALEDLTEIRDSIRYSAEMNGRLHRWSFRKLQSIIEYKAKLKGIKVVFVNPAFTSSLCPICGGKLSPNGHRVLKCRCGFEADRDVVGSWNIRLKALKMWGVSVPPESHPMKMGGWKVSRNDIYELYKSYG

SEQ ID NO: 23417 - protein, 347 aa, unknown
  TnpB Polypeptide
MRRSTRTQDDETWRVAVIPVRLSGADHRRAHEACHKAALLWNFLLTETRAYWDEHGSDPSDKELRHRLYEKQPDLRDGLHAHTIQGVLDGMNDAVATYRENRRQGNMDAHAPHRAKNYRPLDFTAGYGWRPTNDGKHIALSFGRNHKRILVRMPNISDPKTNAPVPVERWGAMRLCWDRNKRQWSLHVSVPTSRPPQGDPSNVAAIDEGIINPMAVAIETDDAYEILVVNGRHARAAKHYRNTRIASLQEKLSRCVKGSKRWRKLDAKRRRIEAKTADALRNADHQTTRKVSDFIQEHDAGRIVAGGRSRHRTKPPQKRDPPRQEPEGPAQTPIAMVPWTAGESACP

SEQ ID NO: 23418 - protein, 390 aa, unknown
  TnpB Polypeptide
VDIHSKEYKKKLRDSLLQEWPYAAHWVDSAIKTAYSIFKSWRKNYVKGERKRRRPTAKRLFTRAKQTLIRLEGEKLRVTVKPDEYVYLDLSKRYFPLPGEVSSAGLGEPIITPEKVHLPVHYGDDAQGGKPGVAWDFNLLSLDGYSPETGWVRIDTSKLASVHTSSFEKRRSVQRRASHSKKARRVLSKYSKRERNRARKHQLEIARVIQSLCGSVGLEELKKQGMYTRSRIWNRRISRSDWRSITRILEGRMGEARVEELDPYGSSSYCSRCGWENRDLNGADVFVCGGCGLRINRQLNAAINLYMRLTFGYTTNWEDGKKRVELRMEGAPQRDWWDRVVLPSLLGGCVLTGAERKTPNELVRELHEVVKPKLHYAYDRHADAYLCIPT

SEQ ID NO: 23419 - protein, 459 aa, unknown
  TnpB Polypeptide
VAPSSGQLLEDEEREPTLTPAIPEEGVREIEFKNVRTNVVRLLPNGFQERKLRTLANISAKLFNEANYERRQQFFRGEKIDFKTTWDKYYQKYKDKLGVNAQAVLQKNNEAWSSFFSLLKLKKQGKLQPHMNRVSPPRYWKDKKPKRRKLLLVVRQDRYEVDKNKLVLKDFNMEIEFVGRLKWDGKQGRLEIYYDETKNAWYASIPVEVGVEESRTGKKSKYIMRGERNSIQSETPKGNKVASIDLGINILASVVLTDGTWLLYKGISAKEDYFYFQKRISEVQSLADRTKNIGEYEAYEELNREKRRLFKKLTRRLLHLYRNLASHTIKTLHELGVSTIYLGYPFNIAQEKGNGFTANLWSYRKLTDSIELKAQEYGMRVFEVAEYNTSKLCAYHQVETKRNPRGVVSCALGHRLHSDLNGALNIMKKGVNLAVSVVKKPLSFIVGHNGVAPVKGCNP

SEQ ID NO: 23420 - protein, 733 aa, unknown
  TnpB Polypeptide
MSGQLDAPQAEPRSYALEGLRGLQSEVPRLTQAMILCRARVERHRNTDLAAARDDYNELQSARKRLADALGNAQLLLMEAEEYQLAANAGRLKEGLLGFDLLSNVYRPVYDALNGFAAQLPVDGTTNAQVVGRLMNNIKLGYYPTDPDNIALILKGVQFPEGVTTNLLDPCCGCGKALRQIADGNNCFTYGVELDSARADEAQTRLHRVGFGSFFYSQVSANAFHLLFLNPPYLSVLNENGGRARHEKRFLIESLGALALGGLLVYVIPYYRLTPDICRVLSDNFENLGLWRFTDAEFKKFKQVAVLGTRKKRDEVPQNTQWLEWLAAHPGSIPSLTELPEGRYALPAKPLEVRTFRGENFNEKELERQLGQSDSFQRMMARSELDSGVKRPPLPLSISQIGLIGGSGMINGLIQCDTPHVNQVLIQEHNRLSQAFRVFFKDPSHFGQPNFKKKKTDRDSFTACNHVFESGPTIYTTRDGIRMTKAGIVRAKFSRRPQAWWKLRRVTVEKTRSGKFYCYILYEYEVKTPEPVIPTQETALGLKYSMGHFYVADSGEMADPPRWLKQSQEKLAKIQKRLNRMEPGSKNYQEAVQKYRELHEHIANQRRDFIHKESSRIANGWDAVCMRAASIQDVSTKKVLPGNALDAGFGMFRECLRYKLARQGKPLILVDRYALTTRTCSACGHTRPDRPHRGAWICPKCGARHDREVNAAKNIKAQGLAQYFNSQDLRESA

SEQ ID NO: 23421 - protein, 412 aa, unknown
  TnpB Polypeptide
MLVLEFKTYGKSHQFKAVDEAIRTAQFIRNSCIRLWMDELGLGKNDLNKYCAVLAKNFPFANELNSMARQASAERAWTSINRFFENCKKGIPGKKGFPQFQKDCRSVEYKTSGWKLAEDRKTITFTDKKNIGRLKLKGTRDLNFYPLDQIKRVRLVRRADGMYIQFCVDVNRLEVLESSGNAIGLDVGLKEYYTDSEGMMIENPKFLRKGETVLKRSQKRVSRKVKGSKNRRKARLILGKRHLKISRQRKDHAIKLARCVITSNDVVAYEDLRIKNMVKNHCLAKSINDASWYQFRGWMEYFGKVFGRITIAVNPQYTSQECSSCGTIVKKTLSTRTHICKCGCVLDRDHNAARNILSRGLGTVGHTGTFALETSALLSPSASNALEESTSTQVGAILSEQVGSLIKESPSL

SEQ ID NO: 23422 - protein, 448 aa, Kibdelosporangium sp.
MWINVRVPGVKRVVRVRLLPTREQACALLATLHACNAAASWLSEQMHTAGVFRKFDVQKRFYAGLRERFGLAAQPAIRVIGKTVDAYATLRANLRAGNYGPRGPDRRRKVESSPIVFRAESSQPFDARCLSWQLGDVGRDGTVSIWTVAGRLRNVRIMGNPGHLALLRSRPVIGETDLTCRDGVWLMHAVIDRPEARQREPVSGFLGVDLGIVNVATTSDGERMSGARLNRYRKRQHRLRKRLQAKKTSSARRLLKKRRRKEARFAADVNHQVSKRIVAEAERTGRGIAIENLVGIRARVRLRKPQRATLHSWAFAQLGQYLTYKAQQAGVACVQVDPAYTSQQCHCCGWIDKKNRRSQASFICGRCGFVGHADHNAAHNIAARGVVCWGEVMRPHAAPNLAASQDGSSKPIGNPQREGRATSPFFRARVHDSSTPISSMTSRKAFRP

SEQ ID NO: 23423 - protein, 443 aa, Sinosporangium sp.
VAVRRSYKFVLRPTRQQEIALAACLEDHRELYNGALEHRRTAYRKAGVTVRYGDQSAELKHIRADDPGGQGRWSFSSQQATLRRLDKAFKAFFKRVKAGRTPGFPRFKGKGRFDTVEWPKDGDGCRWDSQPDHATATYVRLQGIGHVRVHRHRRVSGTVKTISVKWEGSRWYVVLSCDGVPAEALPATGKAAGIDMGVAALVTTSHGDRIDNPRRLAASAGRLSGAQRDLARKKRGSKRRRKAVARVATLHAKVRRQRLDGAHKAALALVRGYDVIVHEDLKITNMTRSASGTIDAPGRNVAAKSGLNRSILDAGWGVFLQVLAHKAESAGRELIAVDPAGTSRTCPRCGHRAKENRTTQADFRCTACGHTAHADVNAAINILRAGLALRDAARGLARSRSLQGAEESLSWCSASTACSKRSSTGAGFRPDGSTSSASGPPSH

SEQ ID NO: 23424 - protein, 195 aa, Synechococcus sp.
MNAASPYIPPYTGGLGGGGIRERSHRPPRSKTERRRSNSWAFYQLRQFVHYKAARAGIQVVVVPPAYSSQTCHQCFWIEQREGKHFRCVNPLCGWEGDADFNGANGIALLGVAVNQPPYIPPHAGGQEGGPWLACQLQGYQKPASYPPQSPRPPAPVYGGWGLEGGRSEPGSLHGSQPYSNLTLELGLLESQPEV

SEQ ID NO: 23425 - protein, 183 aa, Thermoproteus sp.
VRELRRLHEEISRLDERAAREADPARRRRLEERARHLKSRRYRKIRGVVKDVVGEIIKLAREHQAAIVVDTMEEESYRELKEGDGSGVRKHFLDGLGQLRRRLQALAQWYGLPYLEERLYSTVCPRCGAEMEEERRRVMRCPVCGFSDHRDNVPLIWAKRRYWELLQKTKQPAFSASILLLTS

SEQ ID NO: 23426 - protein, 211 aa, Thermoproteus sp.
VLVQVGEEERRRRERASVHTEEEAEGKTVFPSVRRLHERISDLERRAAREADPARRMLLEERARRLKSRRFRRIRDVVARVAEEIIELAGQNNAAIVIDVMDGKTYIARKQSGEGGVKKHLYDGLGQLRKGLKKLAKWYGLQYREVRLYSAICPRCGAKMEEEKRIMRCPACGFSDHRDNIPLLWAKRRYWEILRKQPAFSSLVAITLLTS

SEQ ID NO: 23427 - protein, 418 aa, Thermoproteus sp.
MGQVYRVLKIEIPWRLVEERPDVLDLVTRIHLATEEYVRRLLKEITGQEEPKLTPEELGRLLTPDRRELAHKIIEEVFPKYNLKKYFIDQAKVFWHDIVFFKMVPLKAQLRVENERDFGAPIFIDLRSEILKVRRLKTFVVRLGRNNVTWIKKRLEEGARLKLAFLGIERRRGKEPTYGKLYVALVFAREVTPVEPRTLVAVDVNRLDNGAVIGIIRDGKLRRTLRLPEDGVIRELRRLHEEISRLEERAAREADPARRMLLEERVRRLKSKRFRKIRDVVTRIAKEIIELARQNNAAIVVDVMDYETYLERKQSGEKGDKKHLYDGLGRLRRRLQHLAEWYGLPYLEERLYSTVCPHCGAKMEEEKKRIMRCPVCGFSDARDNIPLLWAKRRYWELIEKIKQPAFSSVPAAILLLTS

SEQ ID NO: 23428 - protein, 394 aa, Thermoproteus sp.
MTSVVLTVVGKVIEPNKGKTLELNRALEEYLKLVRWYVGFGITSKTKLHELTYEEAKKRFSLNTALIQTARDKAVEILKSFSERKAEGRAKADRPAVKRVSIRLDRRAFKLDKSSTKLTPYWLVVSLRRGVRIALPLAFGSRQKQFIEETLQGLWELDSVELVKRDGVWFAHFKIKKNVVTYGAEEAKTLIGVDLGEWNAVAAAAISRDSPSRPMRGQFWGGQRIRFVRGKYAHIRRSLQRKKRLDLVKRIGSKEGRTVNQMLHEIAKGVVEYAKQFPKPVIVMEDLEGIRDRMSGDNKLLNRRLHSWSFRKLQKYIEYKALLSGIPIVYVKPKNTSRTCHRCGFTVDEVKGREFRCPRCGLRYNRDLNAAINIALALTRGRGWGAVTPPRTPT

SEQ ID NO: 23429 - protein, 421 aa, Thermoproteus sp.
MSQVYRALKIRIPWCLVEERPDVLDLTVRMHLAAEEYARRLLKELTGQEEPKLTAEELDRLLTPERRELARRIIEETFPKYGLKKYFIDKAKFFWRDVAFYRAVPLDIQLRIENERDVSRAVFVDLKKGVLRVRKLGIPSFAVELKKSNVTWIRERLEEGAKLKLAFLGVEKRGGEKEPTFGGLYVALVFAREVAQIAPRALVVVDVNRLDHYIKVGLVTDGRAVELRKFPKRERIRKLERIHVHISRLSRALARVNEDIDPRRALDIQRQLWKLETKRYGIIREIVVDAAREIIKLAREHKAAIVVDTMEDESYRELKERSGNGMRKHLLDGLGQLRRRLKELSQWYGLPYLEERLYSTACPRCGAKMTKEEGRFVRCPTCGFRAHRDNVPVIWAEKRYWEILQKAKQPAFPATATFLTS

SEQ ID NO: 23430 - protein, 422 aa, unknown
  TnpB Polypeptide
MNAESFAQDYFRVALKLYKKGQRHYKSKMISYKYPIFPDKTTQQKLAEALNACRWLYNNLLEKMNDSREKGIKLKTYDTQNMIPSLKLENPKLNQVYSKVLQMVNYTLWSNIKGLAASKKNGRKIGHIRFKGYGWYNTLNYNQSGFKIDQDHSLLHLSKVGDMRIKLYRKIEGCIKAVIIKREGKRWFAIVQTDQEPQTLPETGEAIGLDVGLTSFVVDSKGNDIENPRCAEQSEDKLAKLQRKLARAKKGSNNRRTIKDKVAELHKRINCQRDDFLHKLSRMYVNNFDIICVEDLDVKGLKEKGHNNGMHRSIHDASWSKFIFMLLYKAQSAGRKLIKVDPRNTTQRCSACGSIAKKDLSVRVHECHYCGFSCDRDYNASRNILIAGMEQPVAPIESKPLHHVSVRQVLAMKWEAAPFRTR

SEQ ID NO: 23431 - protein, 542 aa, unknown
  TnpB Polypeptide
MDKEVLKMLIEKKSESNFVTVECLLAFDKDEDKGRVLTIMRKFSSMVRFAYKRLMEGAERKELKKLLSRKYGINARYSDGAILLAQQALGSCVERGQNPKKLVFGSRELFEKLKKKHLTGKRRKELRQKWEERRYGVLYSRGEKSKEGNLNLRLVNLNNHWYLRINLGDGEYVWAKVIRSTKRKTDKWLGFISDIEHAEKTGDWFPYTVRLKLRNGKIYAQFSKEEEFPDVTVTKDNGVIGIDINAYPFHLALVHTAKDGNLEKYEQISLDKLLEGSSEKREYLSWQVAHQVVEIAKRERKAIVVENLENLPKGKRGDGLPKLRQKLQKWIYKGVLQKIEIVARRNGIQVIKVNPAYTSIIGKLKYAPLYNIDKDTAGAYVIARRGIGFKERLPKNYRKLLEDKEFLSYSVAKVEDRIAKLRKEIETEKNEYKRNKLRSDLIRLKGELKLLLKSLMDSGESESATQQTVNRKMERVRGLTHVRQKSWQVLSVALALSCLESFRDFSPLKRVILARDWVGAAKRDSPSLPGQGTTVQNVYSFV

SEQ ID NO: 23432 - protein, 504 aa, Vulcanisaeta sp.
VAVELEVTKGLSKLLYSVESAYLGIVREVAEYAVTNNVTSATQLQGLFYSRYRLEYQGLHAHLVIQAIRQASEIAKSFLKRKRKGLVNKPYPEVRSVSIRFTEFTWNYEEFVRSIAPVRIAISLLGGRREVWLRPHKRFWLFWWRVLNGEAELASTLMIKRRANKWYAVFVFEIKPRQELPRAIVAFDINENTVAVGRIGIETTVSKVVDWNKQYLTPQLYMIRTDFGRLARRYERVRNTIIERLKQSFTLPNGKYINITNTREYRKRVKRLREEDRKLGRVRQIANELTKTPAIIVTEELGNNPQEEMINGVGKGELRHRIKQTPFKALERVVEDKALERGSKIFHVSSYRNSRVCPIHFVRLEGTDDWHTLQCPLGHLVDRDYASVMNMTWKITPKAWTKGVWWSLKGLNKNMNWREHEGKSNPLVPHEIVKYTHAALKTFVASEESPAVLARGKPMNHHRIQNEGGGEETSQKGRRPVRLYSMPSLVTLIHRALVITALLR

SEQ ID NO: 23433 - protein, 496 aa, Vulcanisaeta sp.
VGLLHFVGRLSTRFIKPCFSGWLVPGLVPFSSGELVGRLPTVFTNPGTPSSSKSSNVRTVRLRLLPNGSQERKLRRIADATAKLWNGLNYARLVQFRESGEIDFRGTEHEFYHRYRDRLGVNAGQVINLNNWMWNSFFELSRLYKQGKLPKFMNKPSPPGFWKDKLLGKRELRILVRNDRYYIEPINGGEGYIVLKDWGLKIKYAGKIKWSGKQGTLVIKLEGNRWFAYVPITVGEKPAKSNPKGYVRGIYEKIRIEEPKGSNKAFIDIGLNNLFAVVFNHTDVAILIKGSTVKAEYYWWKREIGTYQSIRDWLKNHGFESWKKYHTYYLHAIHKQRERLRHYYRTAIRFLAKTLHGMGIDEVFIGYPYMLSQNNGNEFNTNVWWYAKIINWLSEVLEEYGIKLNVVNEYGTSKQCSICNMEHENGRVKRGLYVCQTTGIKINADLNAARNIAKRVGYEAPIPRKILSYIVTSNGVKPITPKEGVTVETSTVETPP

SEQ ID NO: 23434 - protein, 408 aa, Halorubrum sp.
MTIVRNIQVKLDITKENHSTVDATFEEFQRVTEPVIDYGWSNDPDDIITNKNQLNEATYREIREDSPLTGGHVQSARNLAANALSNGKRLLEDRKSTSKPGFKGTVVTYNSNTITYNDDHCTLSTVDGRIRAEYVFPHEDMGTPFEEYWNENEWVKKEATLHKRDGEYYLHVAVDHVGDTNSSDDSTENGVVLGVDLNVDGYLAVTSTGAFLGNANELNHKRDEYERRRGDLQQTGTRSAHLTIQSIGDRFAEWSRHRLHNVSNDIIQEAIEHDCTYIAFERLTYVWTRISNASKFQQWAFRKLQRQVEYKAEEYNIGVEKVAPQYTSQRCSLGECGYIHNHNRDSDKFECLKCGKKLHADYNAARNVAWRLVQNWLKSGSGRATGQLALKSGVVNANGHFRPTALRS

SEQ ID NO: 23435 - protein, 451 aa, Halorubrum sp.
MKRTNTFAVRPLSQAGERVLRDLLDASAALWNEVNYERLMRYNDEDGLEDESVWDADTGSLEGQYKPVLGASTAQQVIQKNSNAWTAFFRNKQQYHDQSDDSVTEHPSPPGFRGNKDDGRVLKGVIRKDAYSVEWGTRSRLEMIVGEELRDRHNSPKSRLRLEIVGELNWPDYEDQGRLELWYDETDGTFRASQPVTIPDDTRATPLADETAALDIGANNLVACTTTTGEQFLYDGSQPFEQFREAANRIAELQSKLDDQRRTSKRIDRLYDQMYGRRDHAQDALVRDLVERLYVDGVSTVYVGDIRDVLSTHWKAEVNAKTHNFWAYRRFIHRLECVCEEYGIDLLEESEAWTTQECPGCGEREETERNGDLFRCVCGYEGHADLKASQVFLERETGTEVGLMAQPVRLKWDDHHWSEIPHSLERASPNEERTNRSTHRTVGNLASVESA

SEQ ID NO: 23436 - protein, 426 aa, Halorubrum sp.
MAIQVVTRTYTASIRNQSRVQDDLDSLGFAASKLWNVGRWTCSRIWDEIDHIPNHNELTTYLKTHERYDDLHSQSSQRVLQELAEAFNGWYGKRRNGDTRANPPGYRKHSDEHPRSTVTFKAAGFKLDTQYNRVRLSKGSNLKEYWSDFILCKYQTRPGVDLSTVENIQQVRAVWTEDEWELHFVCKVEIDVAEAPGEKTVGVDLGINNFAALAYEDGHAELYPLTCLKQDDYYFSKRIAQCDDSNSVQATQLNHKKSARRTHYFHTLSKHIVQRCVEQRVGTIVIGDLSGIREDEENGESKNWGRHGNLDLHSWAFDRFTDLLEYKAEMEGIAVEAVPERDTSKSCSCCGRKCDANRVERGLYICDECGMVANADVNGAENIRQKVTPSPATNGGDRSNGWLAQPSTLLFDTKTGAFAPQEQVTS

SEQ ID NO: 23437 - protein, 441 aa, Halorubrum sp.
MLEVHRTHQAKILNHQQVEEPLNRHGWSASKLWNVANYHSREVWEETGEIPDHGDLKDELKTHPKYKGLHSQSSQRVLEELAEAFNSWYGKRQSDDRANPPGYCKKNYYDNDGNRVHEEHPRSTVTWKQNGIRHDTKNNCVRLSKGANHKEHPKAWEYILVEYETRPGVTVDNLQQVRAVYDKSNERWELHLVCKDEVETPTAPGNETAGIDLGISNFAAVAYSTEDADLYPGNRLKQDGYYFPKEIAKCDDSGGKRATRLHHKWSERRTHFFHSLARHIVEQCVEKGVGRINVGDLEGVREDEDGDSKNWGRHGNLDLHGWAFDRFTSILTYKAKVEGIEVVEVSERDTSKTCCVCGREDDSQRVERGLYVCEECDAAFNADVNGAENIRHDINNSESNSESSASLDEDRSTGWLAQPGVYLHDLSRGFQPRTEVVDCKP

SEQ ID NO: 23438 - protein, 419 aa, Halorubrum sp.
VTELTETLELKLVDPNVHKHRKLCETKQAYQDALEAAFNANCTSQSAANDVVVNYDLSGYAKNALKKYVPQFCGGSYNAKELHDDPPVRFTNEGPKLDHKPQNAIEWYVKIPHHADYHLWLPAQPNPDQREWLEALHVGDAAMGECRLFDRDGEWYFHIVATRDVKEQESISAETPIGVDIGEASLLTVCHRDERGSPTTPNLWNDEGKTVRQLRETYFTATQRLQKRGSERLAESYGDELWRHIDHILHTVTSEVVAYADQFENPVLVLEDLTHIRENMDYGAFMNRRLHGWGFAKMHTQLRYKAAEKGIRVETVNPAYTSKTCHCCGEQGYRPDQATFKCSNDECWVSEYQADVNAALNIADRYLSGESHSREDTSGDDSAEDGGRLTVPQDSQADVVSSARPSAGAEQMTLGTYAS

SEQ ID NO: 23439 - protein, 424 aa, unknown
  TnpB Polypeptide
MTLAQRHDTLRFVGSRFEGQLRWLHKVRLYPTCAQERALIGMLGVTRELYNALLQQRRDAWTTRRATVTSRDQYRQLTELRSAEPRFAAVYRESEDAVLHRLDLAFAAFFRRLKRGEAPGYPRFKPATRWNQLEFPHGDRALKLDLLQQRVRIPGVGAVRLRKGRIVPEFGRAFVVAKNGRWYAVFEAHREVAPLPSSGASVGIDRGIRVLAMLSDGTPIENVRPGSRRRALVARHQRALDAVTEKDAAGRVLNRRAPGRLAAVRRWARAKEREANARRDWLHQVSRTIVRRFDRIALEALNLVALTRSAKGTVEAPGTNVRAKAGLNRALLDAGFGMLATLIREKAAHAAREVVEVDARYSSQTCAACGHVARESREGRRFACVRCGHVADADVNAARVILLRAESPPTRAPGAARGRQHDAA

SEQ ID NO: 23440 - protein, 384 aa, unknown
  TnpB Polypeptide
MKKRKKKKQNRRTYKYQIREHPQNMRFGNMLDDLGDVHNHFLKLEKRYYRIYGKYAGRYRLQPHLTKLLGRTKKHWAWIPRDTLDEVLIRLHIAWKRFFDFPHVGRPKFKKREKYRSAKFKTGYKLSENSVRLSFKEWHAAKQKFVFVHRDILYHHPRDWKGTVCYIQILRDGVGTYWLYVVTDDTSKEVLPATGESVGVDFGMDTYLTLNTGDKIRSPQFLKQSLKALRRLNKTLSRKVRGSNNWWRAVRALARLYRKVANQRRDWHFKLATDFCCRFDTIVTETLNLEGMKRLCGRKVSDLAFGQFVEILRFKCFKHNREFHQVGQWTPTTKPCSDCGYHTENLSLSDRQWTCPECGSHHDRDVNAAINILRGCLGSPVEQM

SEQ ID NO: 23441 - protein, 384 aa, unknown
  TnpB Polypeptide
MEDFRLAVNSAIRLGVHSNVTSRFALTKLAYKDFRMEHPGMFAQHLVSAFEVAGSILKNHRRRLRKGLPTQVPFVRRLFMKTENQAYKLGRENGVVDLPIRAGLHIRLELVVSGYHRRYLDDKSLSLGSLTLLPDRVVVAIRKHPPKAYAPESIVSLDTNECSLDGVLAKEDRIAAVVRAEFPDVSIIQSVHHDRRKRLQKKKSHDRRTARRLCAREGMREHHRIDYRMHEVANTVLSFAEEHKSMIVLEDLTGIRPRSEKVLNRRISMWPRRKLHQIIEYKAAWRGIPVIKVDPRYSSRKCPVCGRIQDSRKGAEFVCGCGWRADRHINASINLLQTAASEKAAGGLRFDPGAFQHDVVMVLCNPGRVVRPEPNGTSNMRAAV

SEQ ID NO: 23442 - protein, 368 aa, Anaerotruncus sp.
MVKTYRYKLYNSKRNRHLDEAINTAASIWNYCIAVHRRYYKLYGKHLSANRLKKHIAKLKRRRFPQWNKLGSQAVQDVVERVDRSYKAFFQHHKQKRRGRKSPPGFKKRRRYSSFTLKQAGYRFHDESNIVTIMGKDYKYWKSRPLEGKIKTVTVKRTPLGEFFIFVVCEKEVNQVLPRAGKAVGYDFGLKHFLTADDGSAIDSPEWYKASLKELRQAHRALSRCQKGSNNRRKALLHLNRVYERISNKRRDWFFKLVNRLVGENAVICLEDLNLDGMKRLWGRKVSDYAFAEFVGILEYAASQAGTTVVKIDRWAPSSKVCHICGGRNDSLSLDTREWDCPQCGAHLDRDVNAAINIKNIGSAMLSA

SEQ ID NO: 23443 - protein, 412 aa, Phorcysia sp.
MVQTKAERIKNTLRRTRERRKHQIPRVYQLKLQNLSKKDEEKLNRLFLEAKWFYNCIVADIENRLSGNTWKLKEVEIKTPEGLEKREIKQLSSHMRQGIVERIKRSLYSLKKAKEKGIKVGKLSFKSEVRSIPLKQYGTTYKISGDKNRVKIQGIKKKFRVLGLHQIPKSAELAEAQLVKKPSGYYLHVVCYLPKKEVLKEIKEKQVKEPVGIDLGIKHQLTLSNGEKFSWYIPETERLKKLQKELSRKQKGSKRYQKIKEKIRREWEYINNKRRDVQSKVISYLKKFLLIAVQDDNIKGWKEGYFGKQIQNTGIGGITARLRSLATLIPVVFVDRYEPTTQVCSFCGNRQKISLSERTFKCQKCGVEIDRDVNSARNVLRVALSRLADPLKSALPVDCGEVTPVEWVYSPR

SEQ ID NO: 23444 - protein, 380 aa, Fischerella sp.
MKRTVSVPVKLPHERFLPLMGFCADIFNQHVDWALKERTWNKNKAHKALYADLRLQYPDVPSALLQTIRDNAMEAVKATKFKRTPRKKPTSGLRYDKRTMTLRGYQLTLSCIGKREKLILNVPEHFKEVFENWEFCAATLTYSKHNKQFWVRLVFEAETPKVQNGNAQGIDRGLYHLATTSDGQFFSSNKVRATQRRYLYNRRKLQQKGTRSAKRRLRAMSGREKRFMRDVNHCATKKLARQSDYTVFVLQDLSGIRTQRRGKELNKWLSSWSFYQFEQFLSYKAEALGKRVVFVDARYTSQKCSRCGHRSSANRKKSRFRCGSCGYTAHADINAAVNVRDNYILSLAQIETGEQGSVNAPYGSGTLGSQSQAASPCGCG

SEQ ID NO: 23445 - protein, 416 aa, Lyngbya sp.
MAYRQRRRQIMLVYEMKLQGTYCQYRSLDEAIRTGLFVRNSVIRAWLDGQVKSRNDAYKHCKLLSDNPEFPWASRLNSMARQAHAERAWASIERFYRNCKQKTPGKKGFPKFKKYQVRASVEYKTSGWKLSGDRRYLTFTDKFQAGTFKLWGSRNLHYYQLKQIKRVRVIRRHDGYYAQFLIDYEREEKKELTGKQTGLDVGLNYFYTDCSGNQIDNPRFLRKDERKLKKLQRRLSRTQKSSQNRQKARNKLGRAHLKVSRRRNDWACKLAQHVIQSNDLVAIENLRIRNMVKNHHLAKSISDAAWYRFREWLEYMARVYGVPVIAVEPAYTSQSCSNCGEKVVKTLSTRTHECPHCGYIADRDENAARNILKSALKQLSNTVGQTEINASRENVLCFVGETQPSKSARGKRKPRQ

SEQ ID NO: 23446 - protein, 490 aa, unknown
  TnpB Polypeptide
MSSGGNPRGVPVREPDPLEAFKKIVEKRKKSSKRTVRLRLLPEEHEEEILFDIGLASVRLWNELNYEKRQQFFRDDLTPEKRAEINRRYYHKYKKILGVNAGQIINKNEEAWESFFELLKMKRLRRLPPHIRKISPPGYWKDRITGKKKIRILIRNDRYYLETVNEGEGRLVLKDFKLSIRYAGRIRWEGKQGGLEIIYEANRWFAYIPIEVGVKPPKSNPKGYIKPNYKDKKNRIFNPKSIKQRDPVGDKKAFIDIGLNNLFAVVVSDGSALLVKGGVIKSEYYWWKREISTYQAVRDLLRNAGIHKWKEYLEKLLKAMYKRDERLRHLYRSAIRFLAETLWSRGVEKIYIGYPIMLSQNNGNEYNNNIWWYRKIIFWMIDVFMEYGIDVEIVSEDYTSMKCSICGEIHRDGRIYRGLYICRKTNKKINADINASLNIAKRIGYKITITKKVESYLITHNGVKPLTPHQRANTRDPEIRNPALKGGEGS

SEQ ID NO: 23447 - protein, 368 aa, unknown
  TnpB Polypeptide
MLIAHRIALDPNNAQATYLARAAGTARFAYNWALAEWKRQYEAWKADNTLAKPSQHALRRQLNATKREQFPWMLEVTKNAPQMAIIQLGQAFQNFFAGRASYPQFRKKGVHDRFTLTNDQFGLDSSRIRIPNLGWVRMRETLRFTGKIMSATVSRVADRWYVSIAVDTSDSSHLLKAENQGEVGVDLGVSALATLSTAEAVPGPKPHKALLSRLRRLSRSLSRKQKGSANRCKAKARLARLHARIAAIRSDALHKLTTDLTRRFHTIGIEDLNVRGMMRNRHLARSIADMSFFELRRQLEYKAGMRGGIVKVADRFFASSKTCSACGHKLENLPLSLRQWVCPACRTTHDRDVNAAINLKVMAVSSTV

SEQ ID NO: 23448 - protein, 467 aa, unknown
  TnpB Polypeptide
MPQEATKVIKLQLEASEEIFRSLDGQSKICNWLYNRFLEKANGLKQEFIQTKDIQTAKTLYSERGLRNLLPPLKNEFPFLKSVHSSPLKNSALRLSHAIQARQQSRKGKRRGKEVGWPRFRSWQASWFSLLFDEPNKGFKVLGNNLQISLGMGDERKQKSLLFILKEAHLLKNQEIRNLRLVKQAGIYYAVFTVRILLIDKKLLKRVIALDPNHKNMAYGVDIEGRSIEIAAPYWLKNYDKRVDELKSKRDRCDKRAKKVIVTDLHGNSIGKEIRLPSKRWQKYQRALEKALHKRQEQTKTFVYTLAHKLCQQYDCIGIGDYTPQGNGITTSMRRAMNNRSLIGRFKEAVKWVALKSGKTFIEYDEKGTTRTCHCCEYVNAEGLCPSIRKWECPSCLTNHMRDENAAQNGLKLVLRDLLKKGETVVSLVSGSGLVSVIERWAWCVLPSGVQNALQGSKQQLIAASRN

SEQ ID NO: 23449 - protein, 376 aa, Oceanobacillus sp.
MMLLNQKYEIYPSDEQREQLDRWISYCRQAYNSALLDKQRKYKQSKESYTRFAMQKQLKLDKSKIPFLKKIPSQPLQEVFIRLDKAFVYFFRKQANYPRLKKYKDYNSITFPQFGFKPNSHHRYAASFATNGNLQLSKLGQIPIHLHRPIDGTIKQLIIKRQGTRWYAFFSVERQVYPAPINRNLVIGIDVGLDKYAVLSDGRSFDNPRFLRQTEKKLKRAQKKLSQQKRGSANYKKQVIKIRKLHEKVANQRRDTLYKWSHNLTKYYSVIAVENLNIRNMVKNKHLAKSISDAGWGMFRNMLSYKCERNGGLLIRVNPEFTTQDCSECGTRVKKSLSIRTHICKSCGTILDRDHNASLNILRKGLEQLDQMVVMD

SEQ ID NO: 23450 - protein, 488 aa, unknown
  TnpB Polypeptide
MTESFVLTLKLNTSPEQDQWLSHAFWCGQQIYNVLVRHCRKQLRKLMQDPEYRDLLAARRKSNLSKKDKNRINQELATIRRGYGFSEYQLHAYVSVQQHRYQKHIDSLTAQKIASSVWRSVEKYLFDNGKCIHFRKYNKFESMEGKKNTSGMRFKDGRLHWRGQVIQPQIRTDYDRKALKSRVKYCRIHRKPVSAKYHYYLQLVLEGRPPVKHPAGHGTAGLDIGTSSAAIVTDDTCQLTVLGSDTKDRSSQIRRIQRAMERSRRATNPDNYLPDGAVRRGARKWIRTKHYEKLQFRKRSLERRHADAINASHHRLVNEIASKADTVYVEKMSFRGLTRKSKSATKKADGRFRSRKRFGKSISNHAPAAFLNILGNRLASGGGELVKVDTVSFRASQYNHVTDDYVRKKLSCRGSFIGDHYIQRDLYSAFLLMNSNATGTAADRQKCIDAFPMFLITHDACMDALLAENKKYPSSFGLRSYERYKCNC

SEQ ID NO: 23451 - protein, 607 aa, unknown
  TnpB Polypeptide
LANGSDRKDGDRHVRTIVLAVPSREWERAALALTHEAKNLYNTVTFLIRQINSVYRRDEDGAYVRLEEIHPNQAEVLDSFNRMIETINAKRLRKKADAKLLPLLDERMATSPLTLTLDVTLLDNVARVWADADGDVVYRRIPASSAQQVVRSVIDVWKGSLSAMKDWAKNPAKYTGRPQLPGFKDKDGHFPLEIPFAMMVKGFPRPKALPALESLGDASQDLLERFYAHDLRAAIAAACVKRGWDEFQPQHVRIVEKAGRIRIEAVVALAQSYPEGSFLKRMFDRHGEVMRSHKTDAQREAFILGAVKDASVGDAIKVAGIDVGERNVATVAFSTGHRAMVHSGERPTAIAEKYNALLDARKAELASPWMKELQRLKAELEERGERLDKASSIELRKEQGRVFRDPLHRALLSRLDRIRSDLEHKITTDIVGRCATNGVDVIVVGRNKGMKSGKDWGRTRNRKSHLFAHARFLALLRCKAERHGIAVVTAEESYTSKTSFVDHDELRVYGDTKHGNTLEDGASPEAPPRDAVAYSGHRSASNRNWFIRHNAGSGRLSRVHADVNGAFNIIRKVFSRFCYHTGLSLKFNVRRISPRLGAVVPLSCQSG

SEQ ID NO: 23452 - protein, 402 aa, Escherichia sp.
VERLQAFKFQLRPGGQQECEMRRFAGACRFVFNRALARQNENHEAGNKYIPYGKMASWLVEWKNATETQWLKDSPSQPLQQSLKDLERAYKNFFLNRAAFPRFKKRGQNDAFRYPQGVKLDQENSRIFLPKLGWMRYRNSRQVTGVVKNVTVSQSCGKWYISIQTESEVSTPVHPSASMVGLDAGVAKLATLSDGTVFEPVNSFQKNQKTLARLQRQLSRMVKFSNNWQKQKRKIQRLHSCIANIRRDYLHKVTTTVSKNHAMIVIEDLKVSNMSKSAAGTVSQPGRNVRAKSGLNRSILDQGWYEMRRQLEYKQLWRGGQVLAVPPAYTSQRCACCGHTAKENRLSQSKFRCQVCGYTANADVNGARNILAAGHAVLACGEMVQSGRSLKQEPTEMIQATA

SEQ ID NO: 23453 - protein, 368 aa, unknown
  TnpB Polypeptide
LYHGFRKQYGISGQLILSGIRYGYIAKNNSDQIKEILVHFDQNASSFRETQRGNPVVTVRTNDERIGLPIRQDGAYHRMLAHMADGWAVGSVLMKRDKSFLVCLKKDLPDPPVRPNVLGVDVNAGSVAISILTPQRRILRQLYLAEDIEHAQIRFTKRRAKLRSYRDDKRNPNYNHSKAAMKLKKLGKRQHDYVQTNMWLLAKQLCQIARDYDANIAIEHLRHLRKKKGQTNKKTRKRINRIPYGLLRLTLKHKGPQMGVRVVEVPPAYTSQTCSRCGYRAKANRKRRLFLCQRCGFTSNADRNASVNIGLRAIRGPVAVPQLLWAKDQISQVGASFNRLVRQDEAHSWSHPEMSPVASVCHENGKSD

SEQ ID NO: 23454 - protein, 544 aa, unknown
  TnpB Polypeptide
MKRTDHLFLKDANPGKIEALRDLIRAFRSCAPHVAADQWQRFFETGSFKIFLSPTQEKNSPRLSRVRDSIGARRIQMLRGQIVGQLEGFISNRANDFRAAILGSTLDAHTRHQLLVVNALHRWFSRDPVVMRETGELIPDDVRRLARKIMHGVLAKHRRPRFHNLNPNIDERHVTFGPADMATHAPIWIKIISLIPKLTKKGLPRKDNAQKTISIPLEANSFFEGRGGTVAKTIQLIEEWGDGDQPGEIKIGAITDMEDVFAKSQAAYKPLREELALDLGLATMFATADGDLLGRDWRIQLERHDRRITGLARKLQKQGIRPNKSKRYRARVKAFRGFLKTEIGRVLNRLIQMKRPAHIVIENLDFTAPGLSRRLNRILARMGHGVIAGKLDDLQDRYGITWEQVNPAYSSQTCSNKNCGYVAKSNRKSQTDFVCGCCGSTLHADVNAARNLEAGRSSFDRTAFLTKLESLQATVHCHLERLKTRGQVASERAAIVSNPYYADALTKLTAATPLTAADNSLRPTALDQVPIGAPRNLAADVSAG

SEQ ID NO: 23455 - protein, 379 aa, unknown
  TnpB Polypeptide
LDTTTIIHLLFEKEHGNKGDYLTKGKVVEKREEIWKNFFRIEKKKIFGNKDTSYKFNYQVHTDGIGASILKIRSDLYNINGKSVVHSIRKPKGFKQERYIDELTEAEKEKYNKFDIVGIDPNLSDLIYSTNGKTKNVKGKHKTTTFRYTQDQRRKETKDKKYLKIIDSLKKDTKIKNASVKELEAILSKFDSKSCSYTNNCSYIKTKNKINSILYSFYEKSLFRKLKLNGYINRQKSESKMINSFRTTYGNPSKVLVAFGDFEQRQHMKYKEPVKGKGMRKIFSKAGYTIFLVDEYNTSCKCYFNGVDMEKFRKRGNPRPWKDNITTYHGLLRSKNVPNDKSNMIYIMNRDFNASMNIRYKAFCYINNKELPSYLTRKK

SEQ ID NO: 23456 - protein, 512 aa, Desulfobacter sp.
MSTTTLSYPLKFINSFSHTLKSLSPVMCEKINPLWNDESVFEELISARRGLKVYKILEPIVDFNTYLPSRVKRCMLETMGRILKSQLERSALYNNLCELTSNPDEWTYDFLKKNDFASKYNYVKNIRSQTQKFIDEHKRLPASYHELVPKLLVGEFITMAPDDGQFIKIKGTSEFKKKRYLTGKIKVLKERSSVSRKSWKWEEFQISMPDFIADKQEDVKPPDIRINAEGQVIIDYKIEIANQKQENNNRILSIDYGLRKLLVITCFEMTDEGLPVQFSRPFFVDIKGVQNKIERIHQEIDRLKAKLSKSTDKKKIKILKREIKLRWKKLKKLSKELEHLASNIIIAIAKIHNCSTIVIEDLRGLNGKKFARRLNRRIYRTIRAGIFEKLTYKADLIGKTVKTVFPAWTSQFCPKCGECGDHKNYGEFTCSHCGYSGNRDYIATQNIARKFFKISLKSSTGFGYISESASAAVTAGEFLSKIDRWLNGWKKCLNVAPFIVEMKNWKAYPLIV

SEQ ID NO: 23457 - protein, 138 aa, Erysipelotrichaceae sp.
MNALPANTRNDFLQKQSTALADENQIIYAEHLNICGMVKNHRLAKAISDAGWSSFFQMLEYKVTERNGFLIKVDTFYPSSQLCHECGYKNPDVKDLKVRKWTCAQCGAVHDRDQNAARNILAEGIRIFNEPQTAISVV

SEQ ID NO: 23458 - protein, 422 aa, unknown
  TnpB Polypeptide
LAHRIRLRPTRDQEQYFYRACGVARFAYNWALAEWETSFARGQRQSEAALRRKLNAIKDSEFPWMRDVTKNAPQQAIKNLGRAYSKYFAAIRMAQKDALPRRTVRKPTFKRKGRRDSFRADSGPERSRLNGVRTNGRRIKLPRIGWIRMREALRFEGRILSVTVSRQADRWYAAVAVEVAHIVPLRTDTSIAGCDLGITTFATIANDQECTKILAPRPLHRLVGRVRRLSKSLSRKVCGSRNRRKAKTKLARLHARISDIRTDALHKLTTRLVRSFRVVGIEDINVCGILRNRHVAFALSDLAFGEFRRQLTYKAMMRGSTVVVVDRWFPSSKICSVCSTKNAHLRFGAACWACAECKTEHDRDENAARNLFHAASSAVSACGAKGAGSASKPNETSRAEAGRFAKADRNGQEIVGSTSGLG

SEQ ID NO: 23459 - protein, 409 aa, Halobacteriales sp.
MLMEVRRTAVVKLSVPDERHDDLKRTMNTFQDATQRFADRGWAGDDDGYVITSRSRLQPLVYDDIRDDTGLHADLTIAAVNHAVDALSQCVEKMKDGERTSRPVFTSNTTVYNTNAISYFDGYCSLAAYGNGRVHAEYIYPDDSPQADYMESDEWTKKGAKLRYDRQSDTYYLHVSVEQDRDESSAEAESRTVLGVDRNVDGYLAVTSTGAFVGNANLLNHKRREYERRRARLQQQETRSAHLTIQSIGDTFADWSKDFLHRTSKQLVEEAVAHDCSVIAVEKLAGIRERISNASKFQQWAFNELLRQVRYKAEAMGIIVETVNPAYTSQRCSDTECGFTHDKNRDGDEFCCQKCGKELHSDYNAARNIAHKFIQNRRKSGSGGATHHLALKSGALNGSGDYTPATARG

SEQ ID NO: 23460 - protein, 536 aa, Ammonifex sp.
MITLQCLLEFRSEEDRQKVLDLMRRFSSAERYGYQRLLEGHERNGLKSHLAGLFQINTRYADDAILKAQSVLKSCRERGQSPSRVVFGGRNLFEKLKKKHLNGSRREELKREWRERRQGNLYSRGDRSKQGNLNLRFVWLEGELYLRICMGERQWVWAKVVRPVKREKDKWTGFIWSLHQAEKTGEWFPYDVELKLRNGKVYALVSIREKFPPATVTLRNGVLGIDVNAYPFHLALAEVSPDGNLVGYERISLHELISASHDKREYLCWQVAHRVVNLALQKGRAIAMEDLEKLPKGRRGDGLPKLRKKLQRWIYKSLLEKIEVLAKRRRVEVAKKDPSYTSVIGKLKYAPQYLVDKDVAGALVIGRRALGFEEKLPENYKLLFRDEEYLLYALAQLEEKVKELKRELKGEGNEWRKKAIKKRLSATRGELKTLQRHLRMLQSGESEPVSRDPADQRKEPVRGHPPGWRKSWRVLSAALTVPLLEKSPQVKGTVRDFSPLRVILVSGDWERAVRRSVPVPGAGAAVQECSNTFVQF

SEQ ID NO: 23461 - protein, 373 aa, unknown
  TnpB Polypeptide
MSSYRRYNYRAYPTQGQREALSCLYGACRYAYNWTLDQRELMRRRHGRMQSCTQLSNMFTLWKREPGMEWLLAVSSTPLQQSIRHADVAYRNFLRLYKAGRTHIVTNRRTGKRHRTGLPRYKSRRDGEQSAEFTKSARFKVGHADGCKWGFLTLPKIGRVKLRWTRELPSKPNTVNIMLHADGSYEASFTVQVDDESDAPRPLHEACGIDMGLDSLMSIVYTDGTREKIPHPRTLKRKARRLRRLDKQLARETALRRDCRRGGCRGHDGRGHGGAQRPAGAAHREDGEVGPQGPHHGQGTLQRDECPAARGVCRAGAHECRLLRPGLRRVQQPGDDPLLRAAGREARHRARRAGLPAQRQGLGHRQRAAGLLR

SEQ ID NO: 23462 - protein, 384 aa, Paraburkholderia sp.
METVKTLKLRIKDKHAKAMLAMARDVNMVWNFANETQYRSLNRYCDRPKTWLSAYDMQKLTAGFVKCEGVVVGAQTVQETCEEFVTRLKHAKKQKLSWRVSNRKSPKYSLGWVPFKKGALKYKDGQIRFNGLNIGLWDSYGLSKYELRAGSFNEDSRGRWYVNVAVKVDVEEKRIPDGSASIGIDLGLKTMATYSDGGSFNPTRWYRASEQKLGIAQRANKKKRVKAIHAKIANQRKDAIHRETSALVKKHAAIFVGNVNAQALAKTSMAKSVHDAAWSMFRNQLKYKAIRHQVIFEEVNEAFSTQTCSSCGALPDSRPKGIAGLGIRDWTCIDCGAVHDRDVNAARNILARGHARLAGGILGSRAREDVKRPSDAINETGEQK

SEQ ID NO: 23463 - protein, 390 aa, Acidianus sp.
LYINATVLMKLLITASIFFYERDGKGLSQTELRQLALDLRKQDEEYQHLHSQVVQAIADRYYNALEEFLNKQSRFPKEKREDNYNSLVYPQAWMKKRGKLYPNGWKLTDKNKKFKILHLSHLGDFKIRIHRQFPVDKVKQIIVKLTKSGKVFVIFIVENYEFPKLKKTGKKVAIDVGIYRLLTTSDGYYVENPRRLEKKLERLKWLSQSLSRKEKGSNNFEKMRVKIAKTYESRVNFRHDLYYKLGKFFAESYDSLAMEDIKVKQLVSRSARVLRLHLHDVGFYEMREIFKWQMEKYGKEFKVVNPAYTSRTCPKCGFVKENMPLSERVFVCPKCGYVGDRDHVGALNILSRAEWDAPLAPVELTPLPLSRQGLAMKQEPHSLGGMHSVV

SEQ ID NO: 23464 - protein, 236 aa, Okeania sp.
VDVPDVPPHGDPIGIDLGLDKFLATSEGELIKRPRFFNSLHRQMKLLQRRLQKKQIGSNNWQKLSKIIARLHETIANTRKDFHFKLAHHLCDQAGMIFVEDLNFQAWAKRMLGKHTLDAGFGQFVTILQWVCWKRGVYFGKVNKDYTSQICPNCNAHTGKKKLSFRVHSCPECGYMTHRDVASALIVRNRGVSEVGRILDVKEVAWGGGLTGTRNGLVKSLRNRKKGGEAWIYPAS

SEQ ID NO: 23465 - protein, 418 aa, unknown
  TnpB Polypeptide
LLQVRTPSIRYTAPHLLGSLFSEFRLMCNDAIRIALEYERGHGGQKVKSRFHLIELAYPRLKQYRLHSQYILSACEVAFSVYRNRHRRRDPYVKKPFLKLYPQTYSLNHLIIRIPVRPRQFVYIILRGSDYLSSFMDDPSLKRGSVTITPDSLNLAFSKITDGSPTLGNIGIDVNENNLTWSDSSGLTKREDLSDVTDIKERYKFLRARIAERTRQDRRTNNLLQMKYGRRERNRTIQRLHVISSRIVSHAKRKKLGIVLEDLKGIRKLYRKRNGQGRLFRGRMNSWAFREIQRQIDYKGRWVDLPVTYIKANKTSRKCPDCGSSLTRLEQRNLKCSLCNKIEDRDVIASKNILMAALVRAARPPKGSDEVESRRQENAVILGVDGRKSALTTSRSIDGTESFGYGAEAVDLGVGPQA

SEQ ID NO: 23466 - protein, 426 aa, Micromonospora sp.
VLEVNGWRRRRGDVPLVGYQELCRELAASGPGTFAELDTTGARSVLRRFSDAWFAAAKRRKSGDVSAQSPRRRRGLVPVRWYHGTFTLDGRRVRIPTARGTSPLWLRLARELPYPPGQVRSVTLLIEGGRLYLDVTAEVPVATYQPGEGPDRSRVAGGVDVGIIHPYAVAGPDGEGLLVSGRAMRAEHRMHLSDSRARARAVARRAPKPGQRGSRRWHRYRRRARLVEGRHRRQIRQAQHEATATVISWAVQQRVGVLHVGDSRGVLDLDAGQRHNLRLRQWRIGQLLQILTDKATLAGITVHLVDERGTSSTCPACHRRVPKPRGRRMSCPHCRFSGHRDLVAAASIATRSPGGGHTTQAAPVLPQVVTHRRAGRHLPGTGQSRRDPRRPPAARGSDGLRRPAPPTGGESLARKARIHNNHRRSR

SEQ ID NO: 23467 - protein, 415 aa, Bacteroidales sp.
MLKALKIRLYPNKAQAIQINKLLGCYRFVYNQCLERKINSYKENETSENLSTLGHFFHNELTKDEKYSWLKEQNTKVLKQSIRDLLDAYSHFFNEHKGFPKYKSKHDNKQSCRFPLEAISKRNDYSTHRLSLANIHNIKFKCSDEYVNYLVKNKDGIRSATLSRNCSEQYYLSILVDGDFRKKLKATDSAVGIDLGIKDFVVTSEGECFSNLHFKKSEVNKLKKLQRQLSRKQKGSNNRNKARIKLAKLNEKIRNRKLNYLHEISNSLLDENQIIVMEDLNVKGMVKNHKMAESISEMNFGEFRRMLEYKALWYGRDIVYVDRFYPSSKKCNHCGYINNVLKLSDRQWVCPVCGEIIERDYNAALNILEEGLRIIGSRTPEFTLVDYPTMDDKLGNKVLKSSDRMKQEIETHKFL

SEQ ID NO: 23468 - protein, 451 aa, unknown
  TnpB Polypeptide
MLYKTMSSHLSLSEEKNVLLTFLCRAAKNLYNEALYAVRQAFIYDGTYLSYGENEKALQNSLNYRILNSNMAQGVVREVDEAMSAFFGLIRAKQAGRYHGPIHLPGYMRKDGYRAIEISFVRTIWRNGKLCLDLPRSNLVRHVSRYQEEIYKSAKRQGYAETMELENGQHLTFEVPKPIQDKVIKEVRIVPKFQARMFEIQYVYEWEAESRDREIIPGTSLAIDLGVNNLATCVDSDGSSFIIDGKVLKSRNQLYHKKMARLSSQNAKTPETLTRRQIALIMKRNDQVKYYMNKSARMIVDYVLKHKIAEIIIGNNEDFQSGGISKQSLPRRIKGQINQQFCALPLGQLRNRLEQLSNDYRIVFTLQEESYTSQASFYDEDEIPVFEKGTETKTGFQGRRVHRGLYITKTGMSVNADVNAAFNIMKKSKPNTSFEKIWSRGASTPLRLRVV

SEQ ID NO: 23469 - protein, 292 aa, Alicyclobacillus sp.
MPTAPMRWCRVSTPLSSPGASGGRRIRKPNRRAPVLVELGWADSAYELRAVYSRPPVEPVTEGGVVGTDLGEVHLAVVHDGKRTTIYNGRELRAKRQYQNKLKARLAAKRSRLQKGSRRWRKLRRSMRKQLRKLDHQIWDILHKQTTTLVSTLHASRVQTVVIGDVRDLRKRVDYGPAANQRIHQMVSGKVRWLITYKAERLGMRVVLQDEAYTSQECPRCGCRHKPKGRVYTCPACEFRFHRDGVGAINIRRKYLGRGPVVGVMASPTGVRWNPHLRARVARDERERIPAL

SEQ ID NO: 23470 - protein, 388 aa, Alicyclobacillus sp.
VRRLRLVPTPQLDALARAAGALYSCVVVSFWRTVRKHGVWLKPSSMMRWHTSNRLHAHSADAVVQSFYAALKSWRERRKTDPQAKPPYRRRRYFRVQWKSSAIRVRDGNLILSNGRGNTPLVVPWRWEAPVLVELGWTGTAYELRAVYSRSAAEPVPEGGTAGVDLGEVHLAVVHDGERTLICNGRELRAKRQYQNKLKARLAAKQSRMQKRSRRWRKLQRSKHKQLRKLDRQIWDILHKQTTALVSTLHASGVQTVVIGDVRDIRKRVDYGPAANQRIHQMVAGKVRWLLTYKAERLGMQVMLQDEAYTSQECPGCSRRNKPRGRMYTCPACGFRFHRDGVGAVNIRRKYLGLGPVVGVMASPTGVRWHPHQRTRVARDERERIPAL

SEQ ID NO: 23471 - protein, 372 aa, Alicyclobacillus sp.
VELTRTIRLKLQPTKEQAAILEQTMDANRRALDYASQVAFERRIRSAFQLQSAVYRVLRQEFGLRSQMACTVCRIVAAAYKSMKSNGNPGAQARFRRPKPVFQWNKDYVLRGGVLHISTLAGRLRIPYHVQPPYVRYLHDGWTFGAAELVKKRNRWYLHMSVSKTVPAPSQDFDAVIGVDQGMRFLVTASSGHKVLFIRGGQVKQTRLRYVRLRASLQRKGTRSAKRRLCAIGRRESRFMTDTNHKIARQVIRFAKAQGKRPLIVLEDLTHTNLSVLFRLKDRYWRMSWAFRQLAEFIRYKAEEAGIAVVFVDPAGTSETCPRCGHSESANRSRKHHRFRCKECGYQCNDDLAASRVIAQRGAEAMRQSRSA

SEQ ID NO: 23472 - protein, 390 aa, Chromatiales sp.
MKTRWAFRCYPTPEQAEHLNRTFGCVRYVWNWALRMRSDAYKAGERVNHTETDKRLTVLKRQPETVWLNEVSSVCLQQALRDQQQAFAHFFERRAAYPAFKKKAARQSANYTSQGFTFDAKARTLKLAKIGAIKVRWSRKAIPPPSSVRLIRTASGRYFVSLVVDVAPLESPKTGKQVGVDFGVARLATLSNGERIANPRHGDRHQRALTRYQRRMARQVNGSHRRELTRRRIARIHEHITDSRTDVLHKLSTDLVRRFDVIYLEDLNVRGMVKNHHLARALNDAAIGQAGRMIEEKASRAGKTVVRIDRFYPSSKTCSVCGYILSALALSQREWTCPECGVRHDRDLNAALNLLAVGQTVTAHGDSVRAKRATARGASGQRSANRQVAV

SEQ ID NO: 23473 - protein, 388 aa, Thermococcus sp.
MPLETIKLTAKFKLKTIPEGLGSLFSTYREIVNLLITYAFENNVTSFYRLKKETYKGLRKEYPELPSHYLYTACQMAIAIFKSYRKRRRKGKAKGKPVFKKDVIMLDDHLFKLDLETKTVKLSTPQRRLSLKFYPAKYHERFKDWKVGQAWLVKTPKGVFLHVVFSKEVKIREPEAFVGVDLNENNVTLSLPNGEFLQIITHEREVRTGYFVKRRKIQRKIRAGKKRKELLEKYGQRERNRLNDLYHKLANKIVEFAEKYGGLALEDLTEIRASIRYSAEMNGRLHRWSFRKLQSIIEYKAKLKGIKVVFVNPAFTSSLCPICGGKLSPNGHRVLKCSNCGFESDRDAVGSWNIRLKALKMWGVSVPPERQPMSRGWKVTRYNYMFQK

SEQ ID NO: 23474 - protein, 393 aa, Thermococcus sp.
MPSVTVKLTAKFKLKTIPEGLDGLFSTYREIVNFLITYAFENNVTSFYRLKKETYRELREKYSQLPSHYLYTACQMATSIFKSYRKRKRKGKANGKPIFKKEVIMLDDHLFKLDLEKGLIKLSTPNGRIQLEFYPAKYHEKFGDWKVGQAWLVRTPKGVFLHVVFSRAVEVREPKAFIGVDLNENNVTLSLPNGEFLQIITHEREIRTGYFLKRRKIQRKIRAGKKRKELLEKYGQREKNRLNDLYHKIANKIVELAEEYCGIALEDLSEIRDSIRYSAEMNGRLHRWSFCKLQSIIEYKAKLKGIKVVFVNPAFTSSLCPICGGRLSPNGCRVLHCENCGFESDRDVVGSWNIRLRALKMWGVSAPPERQPMKMGGWKVTHYDSFICSKSSG

SEQ ID NO: 23475 - protein, 424 aa, unknown
  TnpB Polypeptide
MTNICNTEVFKPRQIEGKSYSMPVFQRRTGRMVKLLKRYKTEIDPSPGQIQQIHRTLGVCRYVYNTYLSQNIEAHKNGEKFISGMDFSKWLNGSIKEHPELSWIKEVSSKSVKKSIMDCEGAFKKFFKGLALFPQFKSKRRSDVKMYFVKTDAKTVIRCDRHRIKIPTLGWVRLKEKGYIPTNSETHIIKSGTVSRHAGRYYVSVLVEEPDIEKPDLTGEGLGIDLGVKDLASVSTGRKFPNINKTKRVRDLEKRLKREQRRLSRKYEMLKRQPKTLKGEATRQNIQKQVQKVQRLYQRLDNIRTDYINQCVSEIVKTKPSYITMEDLNVRGMLKNRHLSKAVANQKFQELRAKLETKCKAMGIELRIADRFYPSSKTCHQCGYIKTDLNLSDREYLCPVCGYHADRDYNASLNLRDTEVYKVA

SEQ ID NO: 23476 - protein, 377 aa, unknown
  TnpB Polypeptide
MSKTRRTFKYRLWPNRKQREALASTLEVCRQLYNDALQERRDAWKLCRTSVSFAMQSAQLPECKSVCPTLSTVYSQVLQDVLHRVDKTYKAFFRRGRGFPRFKGKGWFDSFTYPQLGFQLQGNQLSLSKVGNVKIKLHRPVRGEIKTLTIKQESGKWYACFSCIVDAEPLPANDNAVGIDVGLEHFAVTSDAEIVDNPRWYRAAQKELRRKQRHVSRCKKRTNVWRKACRQVSLLHKHVANQRNDFQHKLSRALVNANGLIAVEDLNVKGLAKSKLAKSVLDAAWSAFIAKLSYKAESAGRLLMKVDARGTSQQCPCGASVPKKLWCRKHKCEACGLETTRDHASALEILRRGLRLASTTPAIVGVLSEAPSFSYGA

SEQ ID NO: 23477 - protein, 404 aa, unknown
  TnpB Polypeptide
MLVRGVVFYLDSELPSELKFLLEDFRLAVNNAIRAGLQTRITSRNALCKIAYKDFREQHPGMYAQHLVSAFGVAGGVLKNHRKRFRKGVACKIPFVKRLMMKAENQAYKLDRESGVIDLPIRAGCHVELRLIVSQHHRKYLDDMSLTLGSLTVLPDRIIVAFRKDAPKPFVPESALSLDTNERSLDGVFVEGDVANAVKAEFPEVAIIQQRHCDRRRRLQKKKAHDRRKSRSLCRREGTREHHRIDYRLHQVANSVLKFAEEWKSAIVLEDLKGFKPKRSKELNRRLSVWPRRKLHQIIEYKAQWRGIPVVKVDPRNSSRTCPTCGRIQDSRMGAEFKCECGWHMDRHINASLNLLQTAISKGMAGGLRFNPGAFQHDVMMILYEPVMAARSEPNGTSSIAGVT

SEQ ID NO: 23478 - protein, 240 aa, Anaerostipes sp.
MNIAYRFRIYPNREQEVLLAKTFGCCRFLYNQMLNDKIREYDASKKMLRNTPAMYKKAYPFLKEVDSLALANVQMHLEKAYKSFFRDPKIGFPKFKSKHRSRKSYTTNVVNGNIQEEDHRIKLPKLKWIRMKKHRDIPAEYCLKSVTISMEPSGKYYASLLYEKTDCENQAEEFDYENAKILGIDYAMHGMAVFSEDIQKENEGYFRKSEERLAREQRKLSHCVKGSNNYYRQKTPLQNL

SEQ ID NO: 23479 - protein, 197 aa, Oceanobacillus sp.
MRFKLSIPDKYFHKIIDVVMPNIIGETSKGKDMEEYHAYSIELKRKNGQYRVHLTYDMETFGRELKFGGKITSDTLAGIDVNIDKVAVSIVSKQGNLLAHQTFYCHEMEYVSSKKRSNVSGELAKEIIDYILSWNAGAIVLEDITLRQDHDTNKKFNRLTHSFAKNKLQKAIKSRGLRNWFQIKEVTPVYTSGYWKV

SEQ ID NO: 23480 - protein, 409 aa, unknown
  TnpB Polypeptide
MQLVEQHVIKRDDPRFAAIDAASFASKSLYNAALYELRQTFFADGTWLRYAVLDKRMQAHEAYKALPAKVAQQVLKQLDDTWTSFFEALKAYKEAPSKFTGRPRLPKYKHKVEGRNVLVYTVQAVSKKALRDGLIRPSGLAITIETEHTIVDQVRIVPRNGYYVVEIVYSKKPVQAEGDPSFCVGMDLGVTNLAAIAANREGFVPRLVNGRPLKSVNQWYNKRMKQLKKKLPKEDRERVTKQMERITTTRNRRVRQYLHTASRRIIDFLVQEGVGTIIIGKNPLWKQDVNNGRRNNQNFVSIPHARFIEMLTYKAALVGIQVEVTEESYTSKASFLDLDPIPTYTPNDEQEHVFRGKRIGYRKRLYRSKDGRIICADINGAYNILRKRRPDAFAKGVAAYVVQPSRLAV

SEQ ID NO: 23481 - protein, 373 aa, unknown
  TnpB Polypeptide
MKTAYKFRMYPNKQQQAQLDLTLETCRHLYNLALADRKNAYETEGISRSYEDQAAMLTVERKNGNFFGIYAHCLQDVLRRLDKSFKAFFRRVKAGENPGYPRFKGRGWYKSFTYPDSKTGYKMEGSKLTLSKIGSIRVFKHREVEGKIKTCTIKKDNLGQWFAILVTEIEDVPEVDPKIAIGVDVGLKSLVTLSTGESIQYPKYYVQAEKKLAVAQRNLSRKKKVSANRRKAKTKVARIHQRVQNLRDDFLHQVSRKLVDSADIVVFENLNISGMIKNHHLAKHIQDHSWGKLIQFTQSKAAKAGKVVELVDARYTSQKCSQCGIMVPKTLADRVHHCPNCGLEMDRDINASINIRTLGLRGRAYGDTAFSRS

SEQ ID NO: 23482 - protein, 374 aa, Halolactibacillus sp.
MIKAYKIKLNPNNKQRTQLEHSAGVARWAYNWALEQKKKHYEETGKTISQGDLRKHLTKLKQTDDYQWLFQFSNNITKQAIKDSDEAFKRFFKGQAKYPRFKSKRKSKWSFYNDNHKVKLSDTHIRLEKIGWVRFAETGFLSNEFRPLAYRISRYGLHWYVSITVERPDSSDYSTPVNEPIGIDLGIKTLATVSHGKIYTNINKKNQVRKIEKRLRRLQRQVSRKYEMNKEERRYRKTCNIIKIENEMTRLRTRLNHIRTDYIHKMTSEIVRTKPSHIVIEDLNVRGMMKNKHLSDHVSKCHFYEIRKQLTYKTEQLGISLVVADRWYPSSKTCCECGVIDKTLKLSDRKMKCKCGSRIDRDLNASINLSRLAV

SEQ ID NO: 23483 - protein, 464 aa, Streptomyces sp.
MVIAMQLRYNYRAYPSASQCRALARAFGCARVVWNDCLRDRREAHAAGLPYVKSADLSRLRITQAKRTEDRAWLAEVSAVVLQQSLRDLDTAYKNFFDSVSGKRTGRRVGPPRYKSKKDTRHSIRLNTNAFSLRDDGTVHVAKVGSLKVKWSRPLPAAPTSLTVTKDCSGRYFLSFVVDTEPETLPRTQTEAGIDLGLSTFAVLSDGRKIDSPRFLRRAEKKLRRLQRELSRKVKGSRNRAKARIKVARQHARVADRRRDFHHKASTQIIRDNQAVYVEDLAVAGLGRTRLAKSVHDAGWSAFVGMLGYKAARHGRTFAKVGRAFPSSQICSACGYRDGPKPLHVRQWTCGGCGTVHDRDHNAARNVLLEGRRIVAAGRAETQNACGARVRRAHVPAQRGEAGSPRKGPGGPGRTPWTSGREARQDQPTRLSLFPRRTPHGLRQEEQHGPQGANRGDAARRAVP

SEQ ID NO: 23484 - protein, 497 aa, Aquificaceae sp.
MITISTKLLFSSYQDKEKVLNLMRRWSSAMRYAYKRLLEGMEINTLRKLIQSTFGLNSRYSHSAIVKAQALIKVRKEKGQSLKKAIFGGRDIFRKLQKRHINGKDYQRLKIQFQERRKGNLYSMGQANCKGNQNTRIEVKEDGTYLRINIGERQCVYALISAGERIEKIKEIAFSGKAYSVELKLRDGNVYAYFTTEEEYPEIEITKAYGVIGIDLNAYPNHIAWVETDECGNLLSYGELPMPELSSGNGNKRDYYIWIYAHRVVSLAKEKGKAIVIEKLRIKNKGKKGDYSGRLSRRIRHNFAYRKLLERIKLLAKRNSIEVIEVNPAYTSIIGMLKYAPQYMVSKDIAGAYVIARRGLGLKEKVPKNYMELIKRLSVEELKELKEYVKEKVKNAYLKVKHMKEIEALIKALSLGSEPERVLRPLEGTSFNTLNLWRVLKVVVLTALSPGKVLRDLSVLKEKLFRGLWGDPIWARVPAAGGGGVVCVKAQAIFETP

SEQ ID NO: 23485 - protein, 307 aa, Lactobacillus sp.
MAEQIEEVPAELIQTRVYELHPNKTMRRVLDEACDYRRYCWNQGLALWNEMYKARQTLKSSLSTDSKKLTEEQKVLLKDKPSPSERRVRNMLVADKKDWQYAQSARILQLAISDLGKAWNNFFDKAQPGWGKPKFRSKREARQGFKSDQSKIKDGILYLERAKESSVPKDQWRGFKLSEKPLSDEFGVVSYFKEKGRYYVAIPYKIKAKDIKLPDKTGKATAVDVNVGHFDYTGGRINVLPKKLDKIYGKIKHYQRQLAKKQVKNGEAACESENYLKTKAKLQACYRKASNIQNDLMQKFTTELVNN

SEQ ID NO: 23486 - protein, 377 aa, unknown
  TnpB Polypeptide
MTTLKAFKYRLYPTKQQQVLLNKTFGCVRVVWNHNVEVFNQYDKNIAEQQNPLTSTQLRQKFEWMNEVSAAALQQKEMDFKAFKKNYFSKTRKKKIGRPSFKNRDSRQSYRLPNQKFTLNQNSIRLEKIGKVKLVRDRAVPDCCKFMSVTVSKNSCHQFFASVLVELEITQKPKTGQKIGLDIGLKTFLTGNDGFIIENPKFFRESQAKLKLAQRLFSRKVKGSVRRKKAKLKVARIHNDIANQRKTFIQQITSQLIDSYDFIAIEDLNVAGMVKNRKLAKSISDAAFSEFYATLSYKAAWYGKEVVKVDRWFASSKTCSCCGWKNENLTLSDRVFNCSICGLSKNRDLNASENILKEALRVSSAIRTPSECQTEIA

SEQ ID NO: 23487 - protein, 424 aa, unknown
  TnpB Polypeptide
MSEVVKAVRLNLMKPTSKKTAAFRETARNYVAAVNLCKEAVEFWDGFTEERMTRVNLHKVIYKTLRTKLPAQLAVDAISDAWAGRRYPSARIRNLAVSFNVPRSGNLGRTKRENPIVRVKLDRIRYAIPIAQDGAWKRFERHLACGWKYSHFRMTNYGDDWGLSIALRKDVPLRVTHGTIGIDVGSRTLASISEVVGNHPTRQLYLGRDVGAVQQCILRRRSVLQSRTEKGSRRAARSFARLKGYEANFNKTRCYQVAHQIVNMAVENNRSISIENLNHLRDSKLNRAANRVAKRMPYQVFRAALEHVASQSGIPVVIVPAANTSRTCPRCGHISKENRRGSLFRCVRCDFTVDADRGASVNIARRGLSLERQVDILADSAVRQNSSDGGRVNGPARSHDGSMSPGSRPAQPPEFKPLVSMGGS

SEQ ID NO: 23488 - protein, 333 aa, Homo sp.
MKMIQKTYKFRLYPNKEQEMMLANYFGSVRFVYNHFLAERKEQYEKTKKSPNYYEQAKELTAMKKTEAFSWLKEINSQTLQHALRHLETAYVNFFKGRAKFPRFHSKKHGGSFAVPQYFKVEGNRIFIPKFKEGIKFAKSQDVKGELRNMTVSVTPSGKYYVCIMAQVEIEDLEKTNLSVGIDLGLKDFVITSDGDRYTSNKFIKKYSKKLASMQKHLSRKKKGSNSWNKQRIKVARLQEKIMSCRKDKLQKVSTDLIRKYDVICCEDLNVKGMVRNHHLAKSISDASWSVFVTMLEYKAKWYGKDPFQDRKVLSILKDLPSLRLRQGRFVFV

SEQ ID NO: 23489 - protein, 598 aa, unknown
  TnpB Polypeptide
LEVAEKERVKIDDLMRRFQSAKRTAFKRLVEGLKKSKEIEKELVEKFILNSGFARSAISDAKAIMDSQKELLSYYVQNYEGKIRKSKKKLEKCRSELKGKGLLSRIMKYEGKRDLLKQHLENETIPKMIFGRRSNFELLLKGKISREEWRELRINQVYSKGNAYHKGNRNLRVTYEESEKQFFLCINYPPKERGKRGIKQRYKLFVPEFFKPYILSSLELVKKVVGKKKEIVYATKKPHTVRVIRKKGGEYYVYITIEISCPDESLSNANEKGLLGLDLNAKGIGAVIVLPKGNLKAHRWFPCHELLYARSEKRSNLIGNLVVKVFRWAKRFGVNTVVSESFNPFKKDHDTNVKYNRATVNFCKEKMVKTVKSRAAKESFVHIEVFSAYSSIIGEIKYQKMYGLNGHEAAAFIIGRRGLGYNKENIPKEFKKSLKPEGRRRWKDDADPLASICRQWGGLWKQVSKIKNSFFETTGEIPFNLRRFFRHLLIKSSGANSALQLALSYIVKKGETEVEDITDPSSGFRSYLDDLLACSILENAEELRENRSTRRKQLLCAVVDFIKNEGLFAFKRLRSEENTLKGSKPLKRLVEACVGVFE

SEQ ID NO: 23490 - protein, 411 aa, unknown
  TnpB Polypeptide
LKPTIHQRKIFNEWIKTSNYVYNKSIACINNGDKVNFINLRDKCVTSKTKKFNTDYSILTENIRILNKQIKEQENQEQLIILNKQLTVETAKRKLIKFENNLFVQEWESRTPKAIRDGAVRDVCKADVTGWSNLKAGNIKHFKLGFRKITKNKKSLVLPHSLVTNKCGHLVIAPDFLKDESILKMGKRTLKKHKNIEINNDCRLVHERNKYWIFIPIPTILKSKVDSHNYCGIDPGVRTFLTSFGNNGVVEYTQNKTLLKKLNKRIDLLNSRRTKRRNKYKLEQRKENVINEIHWKSINDILKRNDYVFYGDIKSHDIVKKSSNKFLNRNINDLKFYKFKERLLYKANVLNKRVFNVNEMYTTKTCSSCGHLNNVGKKEIYRCEMIKCNNTLLRDVSAAKNILMKGIVKFL

SEQ ID NO: 23491 - protein, 294 aa, unknown
  TnpB Polypeptide
MWFKSRKNPRQIFWIDNRAINTENKKLRIFPTRIKKPIYVRKRQRNKLPPMTQTTDGQKCIKHDAKFLYDRGAYYFVFTINEEATEAIKPKYSIVSLDPGVRTFQTCYSPSGIAFKTSNKQQYILKSLNAKLEELRSERDKSTNPVQYRRRRKKCLKIERKKSNIAENIRNQLATYLTKNYGTIVIPKFSTSQLQQNPDLSSITKKTMTDMSHYKFRMKLADLCKRDGRDLQIVEEHYTSQTCGKCGAINKIGKDIVYKCNKCSYEMDRDMNGARNILLKTLTEAKVKENKESD

SEQ ID NO: 23492 - protein, 201 aa, unknown
  TnpB Polypeptide
MNPHRVGIDLGLTDLVVLSTGEKVGHPQFFRKDEARLAKAQRRLAKKKRGSMNRAKARKNVARIHARIADKRQDFLHKLTTRIIDENQVVCAESLRVKNMVKNRHLSKSISDSGWGELVRQLAYKAEWYGWTFVQIDPFFPSTKTCLVCNHMVDTLPLHVRSWTCPRCDATHDRDVNAANTVLAAGLAVLACGEAVRPMRA

SEQ ID NO: 23493 - protein, 485 aa, Bacillus sp.
MENENKVGSYSTQQIWIKKGHRMYAYFQSMCENSKNLYNTTNFYIRQVYTALTSKKELHPLQKEVMDTLAAFIDPMNKVQTDAYEKRLAKEQQKPAEKRKEVTCNLFSLPDCSNPYVHYNFLDALFKLMKQNDYQSLPIQSSQSTMKTVFKNWKSFYVSLKDWKVNPAKYTGKPNIPRYSRATMKEIEFTNQDCVIKENKFLKFPKTKEKLNIGKLGSTSNKLKSVRVIPRYDQFVVELVFEKPELEEREKCVSSRFMSIDLGIDNLATITTNTGMTPVLLKGKAVKSINQYYNKMRAYYYSILRQGKDPKEGLFSSKRLIHLDAIRHRKLKDLFHKFSFFIKELAAFENIDTIIIGQNEGWKQNSNIGKVNNQKFVQIPYSLLISMIRYKAEEISIKVFVTEESYTSKASFLDGDTIPKYREKGDQTFSGHRISRGLYRTKSRTILNADVNGSANIMRKYTEKGTIPFRIEDVEVHNPLTYRIT

SEQ ID NO: 23494 - protein, 404 aa, unknown
  TnpB Polypeptide
MLISKSYKVEIKPNNVQKTFLMKSCGVARLAYNWGLGYTKTSYEQGEKYKGSIGLHKALCAIKKEQYPFMYETSKLAPQNALRDLDKAMQNFWRGLKTGKRVGFPKFKSKKCSKNAFRIDGANIKVTDNFIKLPKLPPIRLKERAYIPTENVKYMNCTISRKINRWFITVSVQEEIFPNNTPEEIMGIDLGIKELAVCSNGEVYKNPKYTNKYAKRLKRAQQSLSRKVNGSKNRAKQRDCVAKIYNKISNSRNDTINKMTSNITKTKCRILGIEDLNVSGMTKNYKLAKTITDASFAEIRRQLDYKSEWNGGRIVPVDRFFPSSKTCSNCSSVQDMPLNKRTYSCGCGFEMDRDLNASINLEKYTASSVEIKAYGENISLASVSLEASNLNEVRNKLEFKHLRC

SEQ ID NO: 23495 - protein, 489 aa, unknown
  TnpB Polypeptide
  misc_feature (286)..(293): Xaa can be any naturally occurring amino acid
  misc_feature (488)..(488): Xaa can be any naturally occurring amino acid
MSEQARTYQTRLSLDAAQETALAAYADLYCTVERKLFAAICAGGNPDKLKTAFSRTYKLTARQYNAISRNLKGKIKSVTILQATQIEELKARINRAEKVITKVKNPAKRHHKKRRLAALVARLAQKTEAAANGKVNICFGSRKLFGKQFYLADNGYASHDEWKADWKKARNNQFFVVGSKDENAGCQGCVATTDPDGNIILRLRLPDALAKDIGKYILIDGVRFPYGQEHIVAALSARQSVSYRFLRDAVGWRVFVTTDMPIVDVVSRRQLGAVGIDINADCLAVXXXXXXXXRDILDLVVVSGKPIVIEKLDFTKKKAALEGENVRHNRMISSLAYNRIIQTIRARAYMAGIEVIEVNPAFTSTIGKVNYADKYGISVHQGAALAIARRGLGFTEKPASAGEVILPDGVHLTFVLPARNRAKHVWMQWAGIRKNLVTALAAHRRLSKTSPSWPLKPSLGAIRLLPAKLRHVSQQCCSAGDLDDVPHXE

SEQ ID NO: 23496 - protein, 396 aa, Microbispora sp.
VAQIVKRSYKYRFYPTHEQADKLARTFGCVRLVYNKALEQHIRAYGTEGRRVSYMESSSALTAWKKTPELGFLSEVSSMPLQQALRHLYAAFGNFFAKRANYPAFKSRKRSRASAEYTRSSFRWRNGQLTLAKMDTPLDVVWSRPLPDGARPSTVTVSRDSAGRWFVSILVEERIRPLAPNGDAVGVDAGISALVTLSTGKKVTNPRHERADRRRLARAQQALARKAKGSANHAKARLKVARIHARIADRRRDHLHKSTTRLVRETQTVVIEDLTVRNLMKNRRLARAISDASWREMRAMLEYKAAWYGRELLVVDRWFPSSKLCSACGTLQRSLPLHVRKWRCACGAVHDRDVNAAENILAAGLAERRNACGAGVRPQRESSRAGDRQRSRKPSR

SEQ ID NO: 23497 - protein, 400 aa, Microbispora sp.
MRTAYKVRVYPTAEQAAVLNRTFGCVRLVWNIVLAWRQARYRAEGVTTSYAQTDRYLTELKRDGGHDFLYEVSSVPLQQALRHQHTAFVNFFAGRAKYPRFKSRHGRKSATYTRSAFRWRDGRLHLAKMDDPIDFVWSWPEIDPATISPTTVTVSRDSDGRWYASFAVETENEAEPAPATGSEVGVDLGVSDFAVLSTGEKIPNPRHLERKARNLARYQRRMARKQRGSSNRAKARVKVARAHAKVRDARADFLHRTSTRLVRDHDLIVIEDLNVKGMVRNRRLARAISDCGWGEFCRQLEYKAARAGRHLVVIDRWYPSSKTCSACGHLLATLSLSSRHWTCPDCGTRHDRDVNAAKNILAAGRAVSACGADVSHSGSSRMRSALKQEAQPVRAGIPRL

SEQ ID NO: 23498 - protein, 535 aa, unknown
  TnpB Polypeptide
VREIISNGLPRLQWYIKVCTHEHKSIEKLVNNFMRIKATIMPNYTRRFRFCASLSINNSSMLPCERVCAFLILFNIFTVDGLNLIATSLVFNSFLAIKYILLFENNLLTLSSESITFILSDKNNFMMLVERHKIGRSHDYFKEIDALCFLSKNLYNAANYATRQVFINTAKEKEAGLREHAEWLRYNELQKQFQNDKQPDYTALPAKVSQQILMILERNWKSFFASMKDWKKNPQKYKGRPCLPKYLDKVDGRNLLTYTIQAVSKKGLKDGVLHLSGTTIKVRTKQQNIQQVRIIPKCGFYTIEVVYKKEREDKKLDKNRVAGCDIGVNNLAAVTSNVDGLQPILINGRPLKNINHYYNKNRARLQSYVGVGSSKKLRKLTEKRNQKIEYELHCASKFVISHLVKNNIGTLVIGKNDRWKTSVNLGARNNQNFVQIPHARLINMLTYKAEMVGITVLLTEESHTSKCSFIDNESIEHHEKYAGKRVKRGLFVSANSTLINADCQGSGNIIKKAVPNAFANGIQGVVVRPARIYLS

SEQ ID NO: 23499 - protein, 468 aa, Megavirus sp.
MENESIISTRKIRIFPCKEHIDLFNKCFGATRYIYNKTLDAIKKLYKKNSKALRTKAKKGCVHIAPKKKSGSKTTKHKTQCGNKLHNKYFCLKHKHIKPKFDMPLGFQFWRNKMIKKNTDLPESEKWLSDIPFDTRQLVIKNILANHKSAITNLKNGNIKGFDIKYKSRKNKNQFFFVDYRALKSDGKLWNRTVKTPLNMRKGEKKWFDNYMKEYGLKKFGDEKSDKERKDMVITREYPGMYYLHIPFSKFIEKKPIQKSIVSIDPGIRTFHAFYDPIGKSGKIGDGLINRIIKLYKKMDKIQSKITKTNPKNNDFRYKKNKLHRQNMRKRCAWLRTKVKNIVRDYHWKTASFYCKNYGYVVIPKLDTNSLKKRIKKDYGVSKGSPMIRRMMALSHNEFINKLVYKSREYNTKVLIVNEAYTSVTCGNCGIKHEKLGSNKIYKCIHCKKEIDRDINGARNILIKTLSK

SEQ ID NO: 23500 - protein, 406 aa, unknown
  TnpB Polypeptide
MEKNLRIRGVVCRLYSPSTKEKLWQSCNSNRFVWNFFLARRIKRYEKDKPTSYKEDATFLTKLKNKKYKWLKNVSSVSLQQTLKDLDQAFQNFFRRVKKGENPGFPKFKKKFKSRNSFRIVNKKDIRLKDNILKIPKVGNVKITISQDFNIDNVKSYTIFEDCGKWFVSFIEYFKPKKFKKTKSQIGIDLGVKKLIYPSKGKYINPFKNETLERRIKTKQKDLSRKTKQSNNWIKCKQELKLLHQKLRWKHKDYLHKVSTILVNNHDLIVVETLKTRNMTRSAKGTINKPGKNVRAKSGLNRSILKQGWNILLTMLEYKCDWYGKTFIKVDPKYTSQTCSSCGHVSKKNRRSQKSFKCISCGFQRNADRNAAKNILNKGLILNKKRVGLTLCGGTYRVPTKQESRR

SEQ ID NO: 23501 - protein, 494 aa, unknown
  TnpB Polypeptide
MQLTASFNFYRRPGNEEVYDWLVEACTVAKNLYNQTLYYAYEFKEAYDPVREQYKKETGKSFPWFPDEYVGFEKPVDDFFKVMSLRRYASEQDENGEYYTKNLEGKSNWELLKNLVGRDATTEVIRTLLSKNLKSYGRSLGDWSRHPEKYKGMPRKPGFYKKGDLCPLYFSGTSIKINSKTRSLVFPKPRGTDGYNKSIYIPLQKLPHNSEYVKGKRIDQVRIIPKKGYFKIEIIYTYNESVPKLDNKRYLSIDLGIRNFCTIITSDDKLNPVILDGNALKSKIRFYHLMVDKLKHKIEVITDENGKKRPKQYTTKRIEAMTKNHINRINYIVDAYTKYIVRYCLHYNICRVICGWNKDMKQKINTGHKNNQIIVNFPFKKLLDKLEYKCKMRGISFEIVEESYTSKTDHLRNAPLATKEDPETRDEANFGKRIHRGLFSSGVGKLVNADVNGAMGIMRKAIPDFSWVGYHPFHPVRMRVKDVIEGLKYSKFPK

SEQ ID NO: 23502 - protein, 496 aa, Clostridia sp.
MPYCTISLKLLAPTAQKTQLLSRAMERYDRAYEQLLEALFPEIDGKIKTMSKGEVAKLVSPEKLKTVDNLNVQPFKDALKRDVSKTLILYRDRLQKGRKQRYPAKKHWEEALEKTLQSGDCLSANTYERVLEKGGRRQPLLFCRYSHVRNYALLKNPGNGRYYAKLYLLSADQALPQREKPKQPLVYLDDHTPLKHSRRPCCYVLCPLQTGAWQARHLQKLEQGEAVAKSAELVNIKGKFYLHVRLWVEPNETEQPTKMLGVARGIDHALCYALCNEEGIVLRTGVLDAPNETTQQEKEKRLMRAVFSLAEEHKARIVLANLITRNDRLDTFAHPQLRVNEYNRMVQKICYQTEMRGMAPAVVVSARGLFLRCPHCGMVHAGNRMEQSIFLCVACGHMEQLETVGAINLAEKLVQYKRKKLDVFYKIHQTEVSFSMDRLGFTYQTENDPQAKQRCLKALKTWLEDEKQPSSKGKEGMIQKLKHARPLESALRFVAQ

SEQ ID NO: 23503 - protein, 298 aa, Streptomyces sp.
VGGLRGLAAPFVVPDPSGVAVRTRLKQLTTTDVEVLRQVGAHLGALASRDLTARCRDGLDHDAGAWAVRKRALTPLSSARWAGAITKASHDQWALARRSAHAYLQSLEAGTRLLHWATTSGVKASAVEDLDFTAEKTREKHGRKRRFRQLISGMPTSRLRARLTSMADATGITIIAVDPAYTSRWGAQHWQNPLTSTTRKTTRHDAASIAIGRRAQGYPIRRRTAPPRTHQSDGCRHRSAQTGPETPGREGTRPRLPGPRTRSVPPDAARTRVTRTSRTVRDVRSAQEWVQDSLLLTE

SEQ ID NO: 23504 - protein, 371 aa, unknown
  TnpB Polypeptide
MLKAYKYRIYPTKEQMKFIKLHFGACRFVYNWALEQKIKMYKQTQKSISRFDLQKILVREIKPSNDWLKKVNSQSLLSSLMNLESGFTKFFREKEGFPKFKSKKNQVQSFQIPQHYIVDFEMGIVRLPKIGKVKAVFHRCFEGTPKTATVSRSRTGEYYISILVNNGEELPEKQQFSEISTIGVNVGIKNFAVLSTGERISYPKCFKNSLQREKVLQKRVSRKIKGSKNREKAKQKLTKLHKKISNQRNDFQHKLSFRLICENQAVALETLNVKGMTENHHLAQAIGDSAWSSFVTKLEYKAAWFGKTILKIGQLEPSTKICNNCGFHHSELTLKYREWECPECKINHDSDINIAINIKKFSLQDQNLAVI

SEQ ID NO: 23505 - protein, 356 aa, unknown
  TnpB Polypeptide
MSTFLTNYIFLYGGKKMRALKVKIRGLKKPQFERLKELTGHAKNLYNHTLWTLREAFDATGLYFPYPQMDKVMKQVENLEGKINYQLLKAKVAQQTLRRLNKNFKSFFACFQDFQKNPSKYRGKPKPPRFKQQQHDNLIFDYQAFQIKGDIVVLEKGLEIKLPDQLKGMKIQQVEIIPKPKSFHAVFVYEEEPTAFKQVAPSESVMSIDLGLNNLATCVTNGVVEPFIIDGRRLKSINAYYNKRKAAMQSLLSIQRGKKWSRKLQSLTNRRNAAINDYMHRATHTVVQMCVNNGISTVVVGDITKALNKINLGKQTNQNFVNLSLGQFIDKLGYKLGSHGIKLVVTNESYVRNVPD

SEQ ID NO: 23506 - protein, 392 aa, unknown
  TnpB Polypeptide
LDYDKDMLRGYEYRIYPNQKQTGQLEQMLGNARWVYNWSLARRIEAYQKDKKTMSAFTLMTELTQIKKKPEYEWLSLSVAQGLQQSIVNMEKAFTRFFREKHGFPKFKRKHDKRQTVGFPQNTKVDFEANRVFVQKLGWIPTRISRTFEGTIKTSVIKKTATGKFFVSIAVETEDKKMKQKEICKATAVGIDTGIKTFAVLSDGTEIENPKHLKQALGRLKVLQRRASRKVKGSCNRRKAVLQLALQHEHVANQRKDFLHKTTSGIVNRFDIDTVVCENLNIKGMMKNHCLAQSISDLGLGDFYRILQYKLADRGKNYLEIGRFEPSSRMCTCGKVNARLTLSNRLWTCEICGAVHDRDHLAAQNILKFGLQKQNLIVATGGTSGRACGRVV

SEQ ID NO: 23507 - protein, 363 aa, Defluviitaleaceae sp.
MVCENTKRQRTCWVMKRAHKIRLYPNNVQRRALLRHCGCARLAYNVCLAKWNEDYTKNIKHNYYSVKKWFNSIKREQYPFVYDVSKWATEAAIADLASAFKKLYSKQNAHPTFHKKGIRDSFRIDGSVIKICGNTLYLPKGLCLRMAEPLRYEPEKIYNVTVSKTADRWFVSIQCEVPESKNQVEGAIGIDLGISKHATLSDGKVFENIKLEHKYCRKLARAQRNLHRKQKGSNNRRKVQKRLSTIYWRMANKRNDNIHKFTSAVTTIYATICLEDLNVAGMLKNHKLAKAVSDVAFGETRRQFEYKAKKVRIVGRYEPTTKPCCECGKIHEMPLNKRRMVCDCGNDKDRDHNAAINILQLAQ

SEQ ID NO: 23508 - protein, 397 aa, unknown
  TnpB Polypeptide
MLKSFKYKIKPNEEQIVLLNKHFGSVRFIFNHYLNERKVEYETNKQTLNYYDNANSLTKLKKLEEFKWLKEISSQSLQYSLKCLEGSYNGFFKGRTKFPRFKSKHDKNSFCVPQYTKVINGNLIIPKFKDPIKMIQDRKFKGEIRQCSLSKTTTGEYFVSILVETDHQKFEKTSQQVGIDLGIKDFAITSDGFRYKNNRYTKTYERKLKEQQQHLSRKVKGSNRYNLQKIKVAKLHKKITNSRVDNLHKISTELVKKYDTIFLEDLNIKGMIKNHKLSKHIADVSWGKFVTLLEYKALWNDKVIIKIDRFFPSSKTCNCCGYINQNLDLTIREWTCPSCNTKLDRDLNASKNILKEGIKIISSGTDDHRRGDEIRPVLTGKIGESSKKKVQNSPETR

SEQ ID NO: 23509 - protein, 474 aa, Lentzea sp.
MLGPVNFCVRTFVSLSAMSTVLQAYRFALDPTPQQQADLRSHCGGQRYAYNWGLARNKANLDQRAAEKSYDVPEIQLTTPLPWSAYSLRKDWNRAKAAVAPWWSENSKEAYSSGLANLATALTNWQNSRTGERRGRKLSFPKFRGKRSTLSCRVTTGAIGLVDSDRRHVKLPRIGTVRTHESTRKLARHIERGAARIRSATVSRRSGRWFCSFSVEIIRSDPTPSQPDSVVGVDLGLKSLAVLSTGRVIPNPKHLEAVQGRLRRLNRQASRRIGPDKATAQKPSARWRKTQARVAKLHAQVANARRDGLHKLTTSLVREHGVIVLEDLNVSGMIRNRFLARHIADVGMAELRRHVQYKSARRGVQMIIASRWYPSSKTCSGCGAMKAKLPLRVRAFHCDECDLVIDRDLNAAHNLAALAIETTGSTSTASCVGTLNKPDGNPRKTRNLRATGTATGRPAQPRAGQRRRRKATTA

SEQ ID NO: 23510 - protein, 473 aa, unknown
  TnpB Polypeptide
MKAMRKPRKKRAKKGEPQRITKAVTHIRLEATNAGKLTALDALAEVFLALTQAYTTLFCTDELPDAFYAPCFPTELSERWHRVAIQQAAGIAKSWRTNRANAHQSYLDELAEYQEQQADGMLEEGTKEPEWREWGVPTLRQPCIQGNYNVMKLEPSTNSTFDYWLKVSTLDKGHPLLIPIKLACNHIEALTDPKTKQRRPMNSSVTLNKRDEAWWLTLSYDELVQVESPPDAPVIGIDVGIANFVTTSDGKQYGTFNGKLRERQKRDREKRRRKAKLRACLQKKGVPEEKLPSTSSATGQRLIRHVKQSINRAVNLCFEEHEGCQFAYEQLSVASMRHKARAMNAYMRASNLAHIPNHITWNAIKRGIQATRVKSAYSSQECQVCHYVDRKNRPNQQTFCCLYCGHTAHADTNASQNIASRLGDLELRACQDRQEVKALLLRRHEQWKQNFGLAVVQPAVQLSLWDSHKLQRT

SEQ ID NO: 23511 - protein, 426 aa, unknown
  TnpB Polypeptide
MPIYECRIGRIDTDITTYWMLARMSWVATKLYNTALWHSRKQWGETGKIPSGYDLQKVVFASNYHPYLPAHTYQHTAHQVGNAYKSWFKLRKTDKTARPPMFRPKEQLSTMMFDAFKVKDNNNTIFLTLSKSLKEEMDYPYKWLCLRLKWNTPFPKDGKITQIEIVPRNGYFELHAKILLPEPDWKTEGQIMAVDLGMRNPIVSRDEQGNLDIFKGGKILSNLRYWNKEKARVQREVMRRTNGKKKYSKSLSKMSKHGSIQVKHSIHSLTNTFADLCNQRDVKEVVIGNLKNIKKEENGKGKKWGDKSSQNWQQFPTRQVVTQLDYKLARYGIRLIEIDEKGTSRGRCSLCGCEDRGKLRRVHRGLFLCENCSTVQNADVNGAGNILVRYLHQTGKLVPVGGSSGLLADPMVWRWNDHQWKNMVVG

SEQ ID NO: 23512 - protein, 394 aa, Thaumarchaeota sp.
LQAVKAVRQNYHPTEEVLSLLEDFRCMVNDCVRIGLRENLTSMKSLSMKAYHQLSAYDVPTCYRLTAISRAAGILRNYRRELKKKRRLSARVPYVTRLSLTDCYGFRVIHRLVRLPIRKGEYTFIVLNDHTLRTVGGHTPGSLTLTANSLSISLSKEIAEIQPVGAIGIDRNLDNVTLADSDGRILRHDLSRATEIKARCRETKSHFKRNDVRIRRHVYGKYGGIQRNRVGWLLHNVSASIVRRAKEKRFGIVMENIRGIRKLYRKGNGQGTTYRARLNSWSFYELQRQVEYKARWEGIPVVYVAARETSVNCSICGSRTTTTYPNERRTLHCSKCGISIDRDVNAARNILAKGKRGMRFTPDGPPEVRTEAVKGNETTMGPILRADGGKVTQG

SEQ ID NO: 23513 - protein, 435 aa, unknown
  TnpB Polypeptide
MQITKGFKYRLYLNKEQQKQLNHCCFIYNQAYNICLDLQNQTWNDNKDKPKEERVYLKSSELDFKIKQVLKNRELPFKTVIAQRARINAEKALQEAIKKPEHGFPKFKNSSEPNQSFTWNNQGCSIKIEEGKRFGVLRLMKDNFKFRCHRALPKNYKLNEIGISRKGFKYYVAFSITYEEEINAISKEKVQTAIGLDLNVNEVGLSSNELVETRSKQINKIKYSKAFKRLQRKQSRRVEKAKRTKVKLGKNFRKTQRKLNKKYEKAVNIKKDIQHKFSKEIVDKFDLIVVENLNVKNMTKRAKLKNVKAKSGLNRSILDTSFSQLISFLEYKASHNGKLFTKIPPQYTSKGCSNCGTIKFDLKLKDRTFVCDACGFVTHRDLNAAINILRRGLDALGIPLSQIKEIKLSNVKSKSFELGISLLDSKQLAFRVSGR

SEQ ID NO: 23514 - protein, 359 aa, unknown
  TnpB Polypeptide
MTTTETTKLIQDINQARITNSCEELDDFKELNSIYKEIISLSEKGLDRSTILGMVESYCFTPKVTQETTEIPAPVIELKDSSVERATVVQEGSSGQHNVTRIEHLGKVSIAQSVTVKAPVPQLVLVPENCDKHLKSVTETDVCVYNSTKVFDDDSAEEIDFAGIDLGFSFTDENLISIAFSDFSTPVKMTNAPLQKRLKRLRTVSKLLNSGNISGLSDHDLNDLNSSIGNLTKDTVELLKTKKVKEVYLGKIESSKTVMYLVSQSLVSRLKKANIDYKLVEEHQTSLISSLDNEPFDKPGRDFLGKRSNHYFKTATNTVDADINAAYNIIRRGSGLSFKVNKNFAPACYNFKYCSGCNL

SEQ ID NO: 23515 - protein, 390 aa, unknown
  TnpB Polypeptide
MILAHRIQLDPNNVQRTYFAKACGVARFAYNWALAEWKRLYELGEKVSEAELRKQLNSIKRESFPWMLEVTKCAPQLSIMNLGTAFKNFFSGVAEYPQFKKKGQHDSFEISNDQFSLKNRSIRIPNLGWVRLTEVLRFKGKILGAAISRTADKWYVSIQVEMPDAKPIHETSESQAVGVDLGVTNLATLSEGTIIEGPKPHKVLLSRLRRQNKSLSRKQGAKKGEKKSRNFIKSVKKLSKLHARITYIRKDALHKLTTKLTKTYGRIGIEDLNVSGMTKNHRLARAINDMSFYEFRRQLEYKGKMTGSVIIVADRYYPSSKQCSNCGEKNNELDLSMREWDCPNCNYHHDRDINAAKNLKNNAVSYTVSACGEIVETVTSKKQELNIKTG

SEQ ID NO: 23516 - protein, 426 aa, Natronolimnobius sp.
MAKQVVTRTYTASIRNQPQVSDDLDSLGFAASKLWNVGRWTCSRVWDEIDYIPEHDELTAYLKSHERYDDLHSQSSQRVLQELAEAFNGWYGKRRNGDTRANSPGYRKHGDDHPRSTVTFKAAGFKLDTQYNRVRLSQGSNLKDYWSDFILCEYQTQPDVDLSAVENVQQVRAVWTGEEWELHFVCNVEIEVADSRGEKTVGVDLGINNFAALAYEDGHSELYPLNSLKQDDYYFSKRLAQCDDSDSKQATRLSHKKSERRTHYFHTLSKHIVERCVDEGVGTIVVGDLSGVREDEENGKSKNWGTHGNLDLHSWAFDRFTNLLEYKAKMEGITVEEVSERDTSKSCSCCGRKRDANRVERGLYVCDDCGTVANADVNGAENIRQKVSPNLAFDGGDRSNGWLAQPSTYLFDKETGAFAPQERVTS

SEQ ID NO: 23517 - protein, 365 aa, unknown
  TnpB Polypeptide
MEKVYRLRLYPNKQQQELLAKTFGCQRYVYNYFLDRKITLYKEQGESLSFAGCSRELTRLKKEKEWLKEPDKCSLQNALKDLDMAYKKFFKEHTGFPKFKSKKDRHRSYRTNLSNNNIAFLGKHIKLPKLGLVKCKGYKEIDGRILNVTVSQVPSGKYYASICVTDIEMPTPPKTGKRVGLDLGIKDFCITSDGVKYKNPKYLAQSINKLQRLQRELSRKTSGGSNWNKSRIKVAKLQEHIANQRLDYLHKLSNKLIQENDIICMENLKVQNMMKNHKLARNIADVSWSEFKRQLQYKASWYDKQVIQIDTFFASSQLCSKCGYKNPVTKKLSIREWVCPICGEVHDRDVNAALNILNEGLKQIA

SEQ ID NO: 23518 - protein, 378 aa, unknown
  TnpB Polypeptide
VQHRTSRQSSNASSNDWRNSTGASAPTMSLLQCTNEPRRSNHTRCRRRSTESNPGETTARLDAESSIRWQMHWSLACSPTQPMNCVRPLKRATGRCSRTRHDCSFPGPRLRVTSPTTSTPTATPTPTPSAPRNLAPGITEDGIDNQIALMRAHRRTLIDDGLVRSTNRSRSHLGRSSIDRRFSIKRCREFEKRRGEMQQRGTQAAHNALLRLGKREEAWRKQYIHTVANELVTEAVEHDCDVIVFEDLTDIRERLPHAKWHHVRAFRRLYEYVFYKAPERGVSVEQVEPNHTSQRCSRIDCGFTHEDNRHGEQFKCRKCGYEVNADYNGAKNIGLRYARKRTHRLRSSPKSGSGDAEVDLRMHGGTLNSKSHRQIAGD

SEQ ID NO: 23519 - protein, 484 aa, unknown
  TnpB Polypeptide
MVGRHRFAVPDGWVTRAWRFEVELTTPKQRSAVAQHFGARRFAYNWALAQVKGNLDARTTDTTIPVLAWNLPAIRREWNQVKHQAAPWWRECSKEAYASGIADLVAALHNWSEAKHGRRGGRRIGFPRFKARRHSHGRVRFTTGAMRLEPDRRHIVLPVIGRLRSKENTRPLERLLAKGRARILSVTLSEQRPGGRLFVSVATLVAHAPGIPDQPGARCGIDLGIGQEWAVIAHHDDTIERIAHPAQWSSVQQQRRRIARQRSRRIVGSRGHRQANAKLAALDRRAANLRREAIHTLTTRLTRRYGTIVVEDLDVAATARGMGRRAFRRSVYQAGIGRVRPALAYKCVWGGGVLVVANRWFASSKTHHSCGGSHTDLKLAERVWSCPTCGQLVDRNANAARNLRDWTGLVDDWNVQRGGVAAPVPCVGDHGGQAHASAWACEAPEDHREVAGACDTRTDPPILRARNPEQGYQAGSSHRSFLSW

SEQ ID NO: 23520 - protein, 334 aa, Microcystis sp.
LRDLETAYSNFFASCKGERKGRKVKPPKFKKRKSKQSARFTDNGFTVNQHCVTLAKIGDLRIVWSRPLPSKPSSVTVIKDAADRYFLSFVVEIQSEILPNNGESVGIDLGIATFATLSTGEKIDAPKPLKKRLKRLRKAQKNLSRKQKGSKRREKARKRVAKIHAKIKDARTDFLHKLSTRVVRENQTIILEDLNTSGMVKNRKLSRAISDLGWRSFRDMLSAKSDKYGRDFRIISRWEPTSQRCSCCGNIGGKKALNIREWECLFCGTFHDRDINAAVNIKVAGGQSETSKNGRGGKCKTSVKEASSREASTQRSIVQLSLFDLPGITVRPRR

SEQ ID NO: 23521 - protein, 406 aa, unknown
  TnpB Polypeptide
MPTSGVIFFLDSRLPADAKLLLEDFRMAVNEAIRAGLHARATSKNALCRLAYKAFRIEHPGMYSQHVVSSFEVAASVLKNYRRRIRLGTTSRVPYVKRLMMKAENQAYKLDRESGIIDLPIRAGRHVRLQLILSRYHRRYLDDKSFSLSSLTVLPDRVIVAFKKEAPKPFVPQTVLSLDTNERSLDGAILEPGSTFPIVASFPEVATIQQRHHDRRKKLQRKKSHDRRTSRSLCRREGKREHDRIQYRLHQVADSVLSFATTKKSAIVLEDLKGIKHKKNKDLNRRLSMWPRRKLHQIIEYKAEWRGIPVIKVDPRYSSRTCPICGRIQDSRMGAEFKCECGWHLDRHINASLNLLQTAISNGLEVAGGLRFNPGAFQHDVMMILYEPAMAARSEPNGTSCIGAMT

SEQ ID NO: 23522 - protein, 380 aa, unknown
  TnpB Polypeptide
MTQRSIVCKLDVTPEDAKTFAETVSVFADACNDILAVALREKVFNQYKLHKLVYYSTREKFGLSANLAVRAIARVADTLKRGKRKGQLPKQFKARSIDYDARIFAYHAKSQSVSLTVLGDRIKAPLSIGRYQRKALRGQKPTAARLVRRGQEFYIHICIEEKPKVRPAPTKAIGVDRGAYNLAVTSTGRFFSGRKAMHIRAKFASRRANLQAKGTRSAKRVLQRLSGREFHWMSDMNHCISKAIVAEAVRRRASIKFEALDGIRDKINTYRKMWRTRLSAWAFGQQEKFTRYKAGREGVRVDSVLARGTSRECSRCHAEEKRFRRGAHFKCAVCGYRLPADLNAAKTISGRQACPETGIVMNPMVASELHRAPQQQAAGL

SEQ ID NO: 23523 - protein, 389 aa, Francisellaceae sp.
MLIRKVFKFKLKTNYKTNQELTKISGHCRFLWNKCLSLNKERLNNKQRILYYNELSFWNTIWKSSDEYSFLKECPSQVLQQKIKDLDKAFKDAFDKQQPNKRLPRFKKKGLNNNFRFPQGFKVQGNQVYLPKIGWLGFHKSRDIVGKTKNITISKYANDWYVSIQTEQEITEATHSSKTIVGIDLGVVKLATLSDGTYYQPKNSFKKLANKLRTEQRALSRKKKFSNNWKKQKPKITKIHKTIANARKDYLHWITTRISKNHAMIVLEDLKVKNMTKSAKGTIDNPGKNVKAKSGLNKSILDQGWGEFKRQLEYKQKWRGGDVILVNPKYTSQACSVCNNVCADNRTSQSEFKCVACGHKTNADFNAALNVLRAGHVQLACGDIERVTA

SEQ ID NO: 23524 - protein, 262 aa, Halobacterium sp.
  misc_feature (34)..(41): Xaa can be any naturally occurring amino acid
VKRPSPNICRATSGRLLVRHSIIAVAISTSTSEXXXXXXXXGVDLGVENIAVTSTGVFWSADELNHWRQEYVQRRKSLQECGSRWAHENVQAVGRKETGRFEQYLHRVANELVDEAAENGCTVIAFENLTDIRHRMPDARRFHEWAFRRLYDYVSYKTEVRGIQVEQVNPKNTSRRCSSCGFTHGDNRPAQDTFCCQSCGYENHADYNAAKNIGYRLLRNQTGGEGGAPVGVRLNTGMVNANGVKPLPNSARAGVHGEHHGP

SEQ ID NO: 23525 - protein, 535 aa, Pleurocapsa sp.
MSDTDLALEIKSFFIFLGARSRFVFSRRGVAPLFMLQSLCAILTTLIVIYNFQYRLNLTTEQKLVLNDWLRICQYWYNRQLGERFDWWEQNRNYIDRCALLCHLPELKNKPEFYEQKKQLPIIKQDLVSVGWSGELLDFNVVPSQTLQEVCKRVELSFKRYLAGDSNGKRSGKPRFKNTARFRSMIFEGAKLNSCSVGGKWLYLSLPKIGIINVRHHRPLPDGAVLKQTQVIKKSDGWYINLRLQDDSVLKDTASHIPDQRSPASPAFARRGTGDFKPNIAPSWNNSLGMDAVLHEDDYLAVSEGFKLPSLKSFRKSQNKLAKISKRKSFKKKGSKSRRKLAQREAKLHQQIARARKDHAYNTAHALLKTGKKVFFHEKLSIAGLSRKNKSKQDDDGKYLPNGQSAKSGLNKSWADAAFGIFFNILKFKAEKAGALVIPVNPQYTSMLLPYKDEFVFTDCGIREYWDEELSLLIDRDISASINVKRVGLDLFPTIKRSKGNPVIVVSTTNSTSKLVLTTLRGFQKPAFCRKANVG

SEQ ID NO: 23526 - protein, 357 aa, unknown
  TnpB Polypeptide
MNNEVKPLLKTLKYRVKDRTSGKKLDVAARAVNFVWNHCNAMQVHALRHNQKWPAAAAFQGSTKGAGKEIGLPAQCVQEVCDEYFLRRRQFKKAKLRWRVSSGSRRSLGWIPFKNQTISVTGSIVNFNGHKIRLWLHREIEGRIKSGSFSQDARGRWYCNLVIEYVPQHHGRNAEVGIDLGLKDGMTLSTGAKVQNSRVFAKYETELATAQRANKARRVQAIHAKIANTRKDFLHKETSKIADTFGFIVVGNVSGKWLQATNGKSAADASTGMSRTMLRYKAIARGALYVDVSEAFTTQTCSDCGSIGGPKGTKGLEIREWRCDCGAVHDRDVNAARNILRLGHEALAEGSSLLSVS

SEQ ID NO: 23527 - protein, 414 aa, unknown
  TnpB Polypeptide
MWYDYRFRAYPDRTGATAKAERHINIHRQAYNHTRYEYQELDTNNHKVGSAYQHQNRLTEWKDEWSMFSEVHSKALQKTVEQFYNNLSNLSEKKENGHKVGWLKWKSPREYQSMTYSQSGFELKNTSGQTATLWLSTIGDIPIQYHRDIPDNAVIKEVTLKKETTGEWYVTFGLEIEDTELPEKPEANIMNAEDCVGIDLGIQNYVYTSDGDSVDWLDLSDEYERLRREQQSLSRKKRGSNNWERQRKKVAKVKRRMKRKVEDFQHKLSTWLVKKYDAVFVENLNVSGMLQSNGNARNKQDAAWRGFIKMLEYKGDLYGTHIVQVNPRGTTKECAECGVETDKPLWVREHSCPSCGFEADRDLNASYNVLSRSLRELGLGQTESTPAETATAVDPSHRESVPASRVIETGSLGA

SEQ ID NO: 23528 - protein, 299 aa, unknown
  TnpB Polypeptide
MRSKNSRIRLSQGENLTDYWSDFILCQYQTRPDIDLSPVESVQQVRAVWTGTEWELYIVCRVEIDTPESNGDKTVGVDRGITNFAALAYEDGHSELYPLNCLKQDDYYFSKRIAECDETTSEQSTRLKHKKSTRRTHYFHALSSHIVEHCAESGVGTIVVGDLSGIREDDDGEVTNWGKHGNLDLHSWAFDRFCDSLEYKSEVEGIEFQKVSERNTSKSCSSCGQKDDANRVERGLYVCDRCGMVANADVTGAENSRQKVTPSLACDGGERSNGWVAQPSTVLFDTETGLFEPQEQVVS

SEQ ID NO: 23529 - protein, 350 aa, unknown
  TnpB Polypeptide
MVEVSVETTFRNPSRSRRQEWQRATHILRECKQWLVDGWKDGTLTSSVTTGDIDNPLYSALQNQAIRNAKSDYDNEPIEYTGEQPIEANNQNWEIHTTDNSSVIIGFPCISDWWYTPIHVHKSIEEPVTALLDGDAEKTKLSVWREGGDWHCSFTVEYDEQQNGEETPIGVDVGHNYVLAATPDDASATSFLMSGKEHKFVRRYYRSLRDSLQETGALRARTHVGNKEYRRIKDMNHTLSKRLVEYVSQFSNPVIKVEDLKNIRDGSEWNGVHSWPFYELQQFISYKAEKEGIRVEKVDPENTSQECSQCDEIVGRDGSKFECPHCGYVRHADLNAAENISQREGDPCTA

SEQ ID NO: 23530 - protein, 370 aa, unknown
  TnpB Polypeptide
VWATVIRSAKRKTDKWIGFISSIEHAEKTGDWSPYTVRLKLRNGKIYAQFSKEDKFPEVAITKDNGVIGIDINAYPFHLALVHTTKDGNLEEYKRISLDKLLEGSSEKREYLSWQTAHQVVGIAKREGKALVVENLEKLPKSKRGDGLPKLRQKLQKWIYKALLQKIEIVAKRNGIQLIKINPAYTSIIGKLKYVPLYNIDKDTAGAYVIARRGLGFKERLPKNYRKLLENKEFLSYSVARFEDRIAKLRKEIGEEKNEYKRNKLRSDLRRLKGELKLLLRSLLDSGESESAAQQTVNREMERVRGSTQVEQKSWQVLSVALALSCLESLRDFSPLKRVILARDWVGAANKASPSLPGQGTSVLNMYSFV

SEQ ID NO: 23531 - protein, 601 aa, unknown
  TnpB Polypeptide
MKTVSVKGDKRGSKASINNQTIIDDLQAFHTEHYKPLMKEKEVLSYTGLIQMLEYEAEQILTCFENHIQEHFEDMVNRFVNIIFYQDSKIREGSEQDQKRLFRSELAKIKKSIMNSSGKIENDDPTYEIIVDLVNNQLLKGVAINKSLAYMTQSDSLALLPIAIRMSKCGEIIMRGRYESLFKIMDYKNLLQISMKGTKAINVFPLRKSVIPKYIDIDTFLIASNLIGKGNTEYFYNNNLVLKAKEIWGKIFKTNISVFRKKGYKFSRMISTDGIGCTILFIRSDLYKETKKSMVHSIKKPKGYKEDIYVDDLTQEQKIEILKKKKVGIDPGKNTLITCVDGKIETIEKDNGKEYRKVNNMVFTNKQNRSILKCSKNGKKIEKDKKTSIMEEKSVKERETSLSEYNSATCNLDRFKEYLKVKNEENEYLIEYYQKDMYRKLKLETYGNQQKMKEELIKKFANKFGSKDEVVILMGNWSETKQMKNLDPSKGKGIRRIFKRYGYELYLVDEYKTSCRLYETGEELLNVRGKHELLGSKIYNKVDMDKDNLNKEVEIFIAESGRRPTIINRDINGALNIRLKGIKILEGGEVPEYMQRNNNED

SEQ ID NO: 23532 - protein, 234 aa, Okeania sp.
LTLTDKFEVGTFKLWGSRNLHYYQLKQIKRVRIIRRYDGYYAQFLIDHTREKKKELTGKQTGLDVGLNHFYTDSEGNQVDNPRFFRKDERQIKKLQKRLSGTKKGSKNRIKARNRLGRTHLKVSRRRNDWAGKAAQHVIRSNDLVAIENLKVRNMVKNHHLAKSINDAAWYKFREWLEYFGSIYGVPVIAVEPFNTSQNCSNCGKKVSKTLSTRTHKCPHCGYEADRDVSVAPT

SEQ ID NO: 23533 - protein, 398 aa, unknown
  TnpB Polypeptide
MQVEVIEGYKFRLDPTRTQAAALVQAAGCARWIYNWALGQKNAIYQATKELPDEERFEALDRASRFAQDRQLPILKEQFPWLNNPPSHSLQAALHHLDKAFKKFFKKTAGYPEFKRKGHHDSFTETDKACFKWNGQAILLPKIGWVNYRKSRKIAGQPKSVTIVKEGEHWYASITTKQVLEVDVPAGPPIAYDLGVAISIATSEREALHLPVMTKEEEKFLASLQRAVARKEKGSKRRQKAVKRFARFHACITNRVNDARNRFTTDLAKNHCIVIGENLPVCNMTRSAKGTAENPGSNVKQKAKLNKVITRQGWGMTQRQLDYKCRKHGGVHIKVNPRGSSQRCPHCQHQDAENRRSQALFLCANCGYTENADFNATDNLKEEGLRAAAQLGIYLKAA

SEQ ID NO: 23534 - protein, 398 aa, unknown; identical to SEQ ID NO: 23533
  TnpB Polypeptide

SEQ ID NO: 23535 - protein, 428 aa, Mollicutes sp.
MTKNEQIKQTLKETRERRKTQTIKVFELKVNCHHTSKEDYKKFNEMFKQAKWIINDCIASNNIFHYEYKEHRKVINFDKDGNKVEREITIQTGVHQNIISHVQQDIINLSKSKSHGNKVGKLKFRSECNRIPLKTGMLKIKSSKMISIPMFPKLTVYGLEQFINIPNYEIANADIIRKASGIYLKVSVYVPKKENEIKNKSVGLDFGIKTSITTSDGDFFDCNKQESEYLKFLQKQLHRKQQGSKRYWKLRNQIQKEYEHISNQKKDIANKIVAKLEKENDVIYFQDEQISNWKKKKRSKKNGKKCGFSFGRQVQSSCLGKVKTKLELLEKQDKAFKISKWCPTTKFCPKCGCLNTLTLKDRIYICDCGYTEDRDVHASKNVKLFGSTKRTECLEQASAEVSVTTSSIASRLVMQIEPMKREQEAYSL

SEQ ID NO: 23536 - protein, 199 aa, Microcoleus sp.
VQEHEPTIKSHDVVGVDLGVKELAMLSNGVVFPNPKHYKAHLAKLKRLSRILTRKVKGSSNRFKAKQRLAKHHAKIANLRKNTLHQITTYLCKNHATIVVEDLNVGGMLKNHKLAQVIADCGFHEFKCQLEYKAKKFGCEVMVADRWFPSSKTCSNCGHIQDMPLKERVYNCESCGHSMDRDLNAAINLSRLAFTVKAD

SEQ ID NO: 23537 - protein, 386 aa, Microcoleus sp.
MYRAVKLRIYPNDEQESYLAQCFGNTRWLWNYMLNATTTAYKETGKGLSKIAMDKLLPGLKKEYEWLKLAYSQVLQRVTFNLSSSFVNFFEGRAKYPNFKSKHGKQSIQYPQNVKLMPEDCAIKFPGNFGMVKTVFHKELPNAKFTTVTISKKADGKYYASILFNQDDEPVSAINEAIGVDLGLKNFATTSDESKYDLPKKRLAKLEKNRKRKQKKLSRKTDKKSNKRRKAKGLLARVSSKIARVREDFIHKLSRKIAYENQVICVEDLAVKNMVRNPNLAKAISDQGWGMFLTMLKYKAERFGHTYQEINRFFPSSQLCSETLLPIPMLQNGYDSLGVRFVDCPHCLHQHDRDINAAINIKNEGLRLLALGTSASAQGGDVRPKS

SEQ ID NO: 23538 - protein, 401 aa, Microcoleus sp.
MKQVLTVSCKLQVTPEQSIKIDATLQAFANACEYVNQTVSPTLTNELAMQSLIYHDVRDMFGLSAQLAIHAIRRVSGNRKTAKKDGSPVNKFAPTSVTYDARIFSFREKDWTVSLTTIVGRERFALAIGNYQLGLLKGQKPKTATLCKRKDGSYYLNIQLESQPVEPPPSDRVLGCDLGRTDIAVTSDGDTFSGKETTKVRNHYAKLRANIQRKAAKGTRSSRRRCRELLKRLSGKEKHFQTWVNHTISHRIVTSAKHKKQVIALEDLTGIRERTNQQPRSKKERRLSNSWAFFQLRQFLIYKAIKHSVKILFVEPRYTSQMCHKCNHIQPVQGESYRNGKKFACGHCGWKGDADLNGSKNIAAIGAFVNKPEGSRLFCNVQDHFRAIESPHCTCTQVSAG

SEQ ID NO: 23539 - protein, 422 aa, Microcoleus sp.
MQLTERHIIKSTEYRFTEIDTLAFKSKNLYNAANYVIRQSFIYGWGYVGYNEMNCLMKSHEAYKALPAKVSQQILMVLDKNWKSFFEALKAYKKDSSKFTGPPKLPKYKDKVKGRNILVYTIQAISSKQLKKGIIKLSGTEILIKTKVNPERICQVRLVPKCDAYVIEVIYNEPESTASSSNFVASIDLGLNNLAALTSNQPGFIPLLINGRPLKSINQFYNKRSSRLQSQLKGSRKTSSRIQRLTRCRNQKVDNYLHHTSRLIVELLTTHQIGTLVIGKNAQWKTEIDLGKRTNQNFVSIPHARLIEMLEYKARLVGIKVIVQEESYTSKSSFLNLDPIPVYGSTGALDVIFSGRRIKRGLYRTLAGQLINSDVNGSYNILRKAIPNAFSNGIESCVVQPRRVNPLKVKVKGEGFNASHVM

SEQ ID NO: 23540 - protein, 477 aa, Streptomyces sp.
VGGLREVAASFVVPGPSGVAIRAGLKGLTGQDEAVLRQVGGLLGSLASRDLRVRCAAGLGHDSELWARRKRALSGESSSRWAGSITRATHDQWALARRGQFAHMQSLRAGVETIAHRLAQPVGARGAKGVPGGYRFEREWFAKSRRLHVLEDRLVRVRADWEAGRVRVVRGGKKLLNSRHHLEAAGLTEARWRLRWEAERWFLQADGESGKRFGNETIRVTPGGEVSIRLPAALAGLANAPHGRYVLACRIVFRHRGEQWADRVTAGRAVAYRIHYDPDRGRWYVTASWQTPPVRTVPLSAARAGGLAGVDMNVDHLAAWRLAPGRTRQPSRRAPQVRLPDGRHRTAPRRTTAPCPDPPAALGRPPRPGARDRGPRLRRREDPGETRSPQAVPQADLRPAHRPPAGSAGVDGGRARCHRRRGRPGLHQPLGRPALAETPDQQEQEAHAARRCRRGDRKARPGMCDPASDGTAPTRPE

SEQ ID NO: 23541 - protein, 422 aa, unknown
  TnpB Polypeptide
MEKRILKKTYKYRLYPTKNQQDILEKQLSLCRWLYNRFLEERKRAYEKDKTRIPCFDQINKIPGLKKEKPELQIVYSQALQDVAKRLDKAFQNFFRRVKENKQGKRQKLGYPRFKGYWRYDSFVYPQSGFELKDNKLNLSKIGNITIKFHRPIEGSIKTLTIRRTRTNKWYACFSTEGNKRIPEKKNIINTVGIDMGLNSFLTTNTGEKVDNPRYLKESEEKLAKLQRRHSKKKLKSKNRSKSRLKVARLHEKITNQRQDFLHKLSYKLVKNFQLIAFEKLNIKGMTRNKYLAKSISDASWNRFLQMLSYKAAEAGIWALGVNPKNTTQVCSRCGDIVSKTIATKIHKCPKCRLFIDRDINAARNILQLALQSFSEKNLGGLALNTVGTMGINACGVERILSTTKQEATVFNGGSSHPLFFK

SEQ ID NO: 23542 - protein, 407 aa, unknown
  TnpB Polypeptide
MKQSCSAPSKNPRAERVKKPKHRVVIRAFDFPMEVNAKQNDRIWMHIGACWRLCNILVADRIENRAANKLLKQQGVTEDLHYLSQSDQYADIIEYVSHDTALSKVHSQIRQNVAVRVDEGYKRFFDALKEGRASVHPPKFIERKEYRSITYPQYGPAAKIKNGKLHLSGLGEFRLFDYRKVKGKPKTVTVKFKQGRWHCSITAETQEKDVLDLIRPDDTRPDAGFDTGLTALLTDSEGNVYDPPKAWYDYRARLRSAQTKMSRQFEAREKQYEILAAQAKAEGHPVSPLKDIPYSNRLKAQVKVVAKLHTKVDNIRDVSIIAFGVASLTLGAGSHSPEAGQVFVRRGEGKALCGESRLCESECREASESSGKLQPSQALRRSTTGAEATVGGKTRSSRIADRYGIAT

SEQ ID NO: 23543 - protein, 502 aa, Chthonomonas sp.
LIPILQKKVQLAKNLGDVSPVDFVDDHHKSSVGTLSGLFRQTLERPIYQFKARLVLNQTRTVTFNEIFIKNKTRKLFPLGNRGIVFLLGNFCLSKRLSNQNPCRFSFLWDFSLNICIVWTWWYHKGMQICTVLKLQTNEREHDILLKTLQACNAACDSISRVAFEHQEFRQYDLHELVYHNIRAETELPANHVIRCIAKVAHSYKLDHDTLREFNPLGAIELDSALLSFRVKERKVSIKTTSGRLKFVYSCSPEQRKLLKGTKHQSDLLLREGEFYLCVVVSVSEPEPYVPEGTLGIDLGIVNIATDSEGHRYSGEPVKKIREKYRKFRQDIQKVKTRSARKKMAKRRKKESRYVRDINHCISKKIVRTAFVRKKTLAIESLTGIRQRGNRLNRAVRTEIHNWSFAQLKGFLVYKARRAGVPLIELDARYSSQQCSRCGHTEKANRPDQETFCCRSCCFQANADENSALVLEARVEQSAYPRFHMAVLPTWGDKPSRLRDGS

SEQ ID NO: 23544 - protein, 437 aa, unknown
  TnpB Polypeptide
MLLEQLTPDLFCEPDTAGETEEPESETLSFLRVERHIVVKSRVIDDLCFRSKNLYNRANYEIRQKFIGTSKEAAAGEREHAEWLRYSEIDRIAKSWNWSEYRELPAATSQQILMILDRNWKSFFNAVRAWAADKDSFTGRPKLPGYKHKTRGRNIVVFTGQQVKLKDGYIRFPGKSGLAPLKTAVTCGLRQVRIIPSYSCYVIEVVYSRKTAAHSSLDSSLYLGIDLGLNNLAALTSNQSGLRPLLINGCPLKSLNQFFNKRKAELMSFTGGTGTSKRIEKLTLKRNCKAEDYLHKTSRLIADYAVMHRIGNIVVGQNKDWKREINIGRKNNQSFVSVSFGKLVEQIQYKAEEIGIKVILTEESYTSKCSFFDSEEIGKHDEYKGRRVRRGLFETLSGRLVSADVNGSANIIRKVFPDAFADGTEGVGLRPVRVTPS

SEQ ID NO: 23545 - protein, 373 aa, Paenibacillus sp.
VIVNKAYKFRIYPNKEQKILIAKTIGCSRFVFNRFLSQWSDEYKETGKGLTYISCSAKLTQLKKEFLWLKEVDSISLQSSLKNLADAFDRFFKKQNDAPRFKSKNNKVQSYTTKQTNGNIAIVGNHIKLPKLGLVRFAKSREVNGRILNTTVRRNPSGKYFVSILVETEVEPIEKTGSSIGVDLGLKNLATLSTGKVFPNPKWFRKLEEQLADAQRILSRRIKGGMNWNKQRVRVARIHERITNARTDYLQKISTEIIKDHDVIGIEDLQVSNMLKNHKLAKAISEVSWSQFRIMLEYKAKWYGKEVVTVSKTFASSQLCSCCGYQNQDVQNLKLRKWDCPNCGAYHDRDINAGQNLKNEAIRLLTVGTTGIA

SEQ ID NO: 23546 - protein, 329 aa, unknown
  TnpB Polypeptide
VKYDTRTLTVFDDDTVSLSTTKSRVRCPLDLPDADDGYQRQYLESDEWSVTESTLTARNGEFFLHLGFRRPKNDTEQNTAEDGTVLGVDLGIKNLAVTSTAYFFSGRELTHRLREFEKVRAGLQQTGMRSAHRTLVLSSGRELRYVRDVLHRASNALIDEALRYDCDVIAFENLTHIRDRTGASWGHKWAFRTLYEYVEYKAESVGISVKQVGSAYTSKRCAECGFTTDENRPSRNDFQCVKCGSEANADYNAVVRLRLTGSKREAFATAKNIGMRYVRRGQQSSRRTGDSQLALKSGTVKPKHGFTAYPAGFEVEFTDKPHPQNAEGA

SEQ ID NO: 23547 - protein, 343 aa, unknown
  TnpB Polypeptide
MIFTFKIRHYRDFTEELKKAFEVAEFTLANKIRQNNSALVKDIRGCLPAVIASQVMRKYGNQKRIKVVHNVNLIVAGYYVKFFEETNSIWIPCLKLHLENTIPYQFTKINQIELDRVFAYIAVTVPEQPEMIPQTFIGVDRNTTGHVAVVANPDIGKVEKLGKSALHIHRKYSAIRKRLQKQGRYKELKAVKDRESRIVKDLNHKISRKLVEMAKVQHAALVFEDLGGIREKRKQNRSFRHALHSWSFYQLQQFVEYKAKLLGIQVRYVDPAFTSQDCSRCGARGDRIGKEFKCPACGHVDHADVNAAFNIALRQKGMIDRAVSENCTMGALIPHWSSGVKCH

SEQ ID NO: 23548 - protein, 170 aa, unknown
  TnpB Polypeptide
MLVQKAFKVTLIPSRNQFVLINKTIGCARFVYNRFLARCKELYDSEQKTLNFFGCSRELTQLKKEIEWLKEVDKFALQNALKNLETAYKNFFADLKKPSSKRRFGFPQFKRKHSFKQSYKTNFTNGNIQVRENYLKLPKLSWVRYHKSQEIKGTIVNVTVTRTKNRQIHC

SEQ ID NO: 23549 - protein, 249 aa, unknown
  TnpB Polypeptide
MLRSLGLKIGKYIASILYETEIEKHSDVDKNIGLDLGIKSYLVTSESEEVENPKYYRQTLRRFRKANKKLSRATKSSNNRAKAKTKLARIYERVTNKRDDFLHKLSTRLIRENSIICIEDLRVVNMVKNRKLALSISDASWSKFVAMLEYKALWHDRIVQKVSPWFPSSQTCSCCGFINPEVKDLEIREWDCPKCNTHHLRDCTAAVNILREGIRLLTVAVGAPDTQNACGETVRPGDIQAGLAEAGIA

SEQ ID NO: 23550 - protein, 405 aa, unknown
  TnpB Polypeptide
MRRKTKLKAYKYRIYPTDAQMVFFAKTFGCCRFVWNKMLEEKLQAHKKKERIPRPTPAKYKDEFPFLKEVDSLALVSVQNHIEDAFRNHFKNRKHFKLPKFKKKRDKQSYTTYNVNNSIRVDFEKSLLYLLKLREGVKIELHRRFDGKIKSVTVSKTSDGKYFASILVETENPRNKVVEPKSRACGIDLGLEHFVTVTNDFGSYKVEHPKYLRCGEERLRRLQRRFSRKQKGSKNSEKARLRLARQHAYISNARNDFLHKLSKVIIDENQVVVVEDINVKGLLKSRLAKSVADSGWSRFVTYLKYKAEWYGRTFIQVNRFFPSSKLCHRCGYKNADLALNDRTWCCSGCGETHDRDINASINLYFVGLGRPEATPVEQALVDDRSPYGLPKKPSCDEAGSSTTYC

SEQ ID NO: 23551 - protein, 411 aa, Symploca sp.
VKAVQHQAIKVRLYPTIEQQQILAQHFGCSRWWWNHALNLCVETYQATGFGLTQVALNKFLPKLKKQEETRWLSECYSQVLQTTTLNLVTAYKNFFEGRAKYPRFKSKKNRQSIQYPQSVKVVDECLKFPGRVGIVKAKIHRSIEGTIKTVTVSMTSSGKYYASVLTELEGDKPSKHTDGKVAGIDLGLKDFAIVNDGVKTYKYANPKHLAKHERNLKRKQQKLARKEKGSKSRNKARKLVARVHERVSNVRQDYLHKLSKKLVDDNQVMVVESLNTKGMVRNHKLAKAISDVGWGMFVNFLQYKLDREGKVLIEIDRWFPSSKLCSRCHYQVSEMPLDVRSWTCPSCGTHHDRDGNSAVNIRAEGIRMLSVLGTRTAADGGDVRPKLGRKSKLRQSPANSEAYAVLEESA

SEQ ID NO: 23552 - protein, 450 aa, unknown
  TnpB Polypeptide
MWDMISSRERAPEHGGAHLIVDGIDAVVHRKAQFDLFLKPAQEKGLHRLLGVLVEVYNAALEERRSAYAIAGVSVSLFDQFRQVKDLRGVRDDVLAFGIQPVRIALKRLDEAFQAFFRRIRNGETPGFPRFRAEHRYDTAAWDEPRSWALVEAGGRRVVRISGVGDVPVSKRAGKQLARLEARGGVAATLTVTRRRASSGFVWRATIGYKNVAAQKLPETGRLVGVDRGVAVTAATSDGDLHTYPQLARTLRAQADALGEAKSGKKRGSRAWIRISRDIAKLRRRAANLVDDWARQAAIDIVAKADVIVLEDLRPANMTKSAKGTVDKPGVNVAAKARLNREMLAAGLGRLHTRICVKAEEAGRRCWIVNAKYTSRTCAACGHVAKASRVSQAEFVCVACGHAANADVNAAINIAVLGGAAEAAWRAAGEPGLTRRAPRLRRRKARPAAA

SEQ ID NO: 23553 - protein, 272 aa, unknown
  TnpB Polypeptide
LHRRFSGTVKTVTVVRDPSDKYYASVLVDVAQALLAPDAIDFEHTAGIDAGIKTALTVVGQSGTVKIENPTFLKKNSEQLKKQQKRLSRCKRTVTFKENEKGEKVKEVTVSKRYEKVRQELARTHEKIRHRRKDWIDQVTRRLVNDSQVTTYVIEDLNLKGMVKNHHLARAISDVGIGNFYRILRYKLEAAGKNLVVAGRWFPSSKLCPECGTKKESLTLRERQWCCAHCGHEHDRDEAAAKNLRHWVELTEIEKHRYGRNGRALEGEVIPF

SEQ ID NO: 23554 - protein, 342 aa, unknown
  TnpB Polypeptide
MTTYEAVKVPLDPTPVQERMFRMYAGAARFAYNAALQHMKEQLEERKAQVESGVGKKDLIKIDNNVIKLGYWWRANRDRLAPWWDEVASQVYNCAFDNLGKASSNFLKSLSGKRKGSPVGFPKFKPRSAVKSFAFSAITIPDDHGIRLPRIGRVHTLRNIHRLVAGRKVKTTTIRCEHDTWYASLLCETPEPAPPVNTKPDIWCVFTLEHIILSDGTRIDLPRPYRQALEGLRKASRDLSRKARGSVRYEEQRRKVNRIHKRIKALRDTMLHELTRRLVDQYAVINIQKVNIKRGMRHHMLAQSLTDAAFAEFTRQLTYKSLNTGSVVHILDPISIDDKMRA

SEQ ID NO: 23555 - protein, 203 aa, unknown
  TnpB Polypeptide
MIEGVHSFRKHEERLAREQRKLSRKKKGSNNRKKQKREIAKLHHTISNVRSDFLHKLSTDISKNHAKVFLEELQIKNMSASAKGSIEEPGRNVKAKSGLNKSILDQGWFEFRRQLDYKLFWMGGMLVEVNPRHTSQQCSHCGHTAKENRLSQDVFKCQVCGHEENADVNAAKNILTVGQTGPVKRTTKAVGSRTPLGLAQANL

SEQ ID NO: 23556 - protein, 414 aa, unknown
  TnpB Polypeptide
MKVIRAEQVYIKGNSNISKLCHLSKNLFNEANYTVKQNLKDNRKWVRYNELVMILRNSDNYKSLPATSQQILRVFDKSWVSFFKVIRLWKKNPEKFKRKPNPPRYKKKDGEHVLIFTNQQCRIKDYCVLFPKKMLGLDIKTRLPDSTNLREVRIVPKGVGYVCEVVYEKEIILEKKDEDRIVGIDFGIKNIVTMVNNIGIKPIVVKDDGKGIKSINQFYSKEKAKLQSIYDLQKIKNGVKMRRLSDKHKKKSKDYLHKLSKFIVKWCVKHNIGKIIFGYNEQWKQEINMGKQTNQIFTQIPYTDIIEKVTYKAEEVGIKVIKQEESHTSIVSFLDAEQIEHHDVYVGKRISRGLFKSAKGIVINSDVQGGYNIIRKCEPKAFVKAEADGVGGCELHPVQWKDDEIAQSIFSLNV

SEQ ID NO: 23557 - protein, 459 aa, Catellatospora sp.
MKKIQAYRFALDLTPAQERDVLAHAGAARLAHNWALARVKAVMDQRAAERTYGVPHEQLTASVSWSLPALRKAWNAAKPDVAPWWNECSKEAFNTGLDALARALKNWSDSRTGKRAGHPVGFPRFKSRRRSTPSVRFTTGTIRVEPDRKHVVLPRLGRLKLHESARKLARRLEAGTARIMSATVRRDGGRWHVAFTVEIERTVRTPARPDSIIGVDVGITHLAVLSTGKFVPNPRHLNQAQHRLRALGRALSRKSGPDRRTGAHPSNRWQRARVRIARAHARVANLRRDGLHKLTTRLAREHGTLVVEDLNVSGMLRNRKLARHIADAGFGELRRELTYKTTWNGGRLHVADRWYPSSKTCSGCGAVKTKLALSKRVYDCKACGLVIDRDLNAARNLAALVAEIDPAGSSPVAGRGAIQKTRTSGQEAVKRQPGTASAGNTGTVPPQGGTANSALTRAH

SEQ ID NO: 23558 - protein, 211 aa, unknown
  TnpB Polypeptide
VSILFAYEESISPAVVTKETTIGLDYKSDGLYVSSEGDTCGMPHYFRQSADKLAKAQRKLRHKTIGSKNYNKQQKRTAKIHRHIANQRKDFLQKKSTEIANQYSFVCVEDLNMKAMANRGFGNGKATLDNGYGMFLTMLDYKLRDRGGQLIKVGRFFPSSQLCSHCGFKNPLVKNLSIRHWDCPNCGKIHIDRDVNAAKNIKKEGLRSLTA

SEQ ID NO: 23559 - protein, 370 aa, unknown
  TnpB Polypeptide
MRKTFKYRLYLTPAQETILLKTLDECRWLYNHLLEQRKTAWEQDGRSLSLYDQQADLPALKRERTPLKIAYSQVLQHVAVRIDLAFQAFFRRVKAGETPGFPRFRGQERYTSLTYPQLANGCVRVDAERRLVRVAHVGDLRIVYHRPLEGMPKTATLSVSSTGKWSICFSCACADPTPLPKTGQEVGIDVGLTTFATLSTAEQIANPHFFRTDEKALGKVQKRLSKEEKGTPERKKRRKPVARVHERIGWRRSNFAHQHSRRLVNAHDLIAVEDLSIHRMLHNHCLAKSISDAAWNQFVQLLSYKAAWAGREYIAVNPASTSQDCSACGHRQKMPLSERTYTCPCCGLVIDRDLNASLNILGVGRHTLAS

SEQ ID NO: 23560 - protein, 346 aa, unknown
  TnpB Polypeptide
MHYAETANLLPGMKRDPQYAWLKEADSQVLQQALKDLERAYQNFFAKRAGFPRFKSKHDKQSIRYPQRVKVDPEAQRTYLPKVGWVKTVFHRALEGKFKNVVVSKTKSNRYYASFQVEVEIPEPEYYGEGIGIDLGLMHYAVLSDGTKIPNPRNLNQGEKELARMQRRLSQRQKGSQGWEKARMQVSRKQEKIANQRKDFQHKLSHWLVKEYGLIGVESLQVKGMMQNGRLAKHIADAGWGEFNRQLAYKGAWYGCQVKKIDSWYPSSKTCSACGAMMAEMALSMRNWECPVCGAGHDRDVNAARNILDQATVGTTERHAGGVHVRPVIFMQAGTLKPEAPQLAAG

SEQ ID NO: 23561 - protein, 276 aa, Bacillus sp.
  misc_feature (127)..(128): Xaa can be any naturally occurring amino acid
MINKAYKFRIYPNQAQAILINKTIGCSRFVFNHFLSLWDHAYKETGKGLTYSTCSAKLPAMKKELVWLKEVDSIAIQSSVRNLADAYTRFFKKQNSAPRFKSKKNNVQSYTTKQTNENIAVVGNKIXXSRWNKQRVKVARIHEYISNTRKDYLDKISTEIIKNHDVIGIEDLQVSNMLKNHKLAKVISEISWSQFRSMLEYKAKWYGKQVIVVSKTFASSQLCSCCGYQNKDVKNLSLREWDCPSCRTHHDRDINASINIKNEAIRLLTARTAGLA

SEQ ID NO: 23562 - protein, 356 aa, unknown
  TnpB Polypeptide
LIFRNNNLYWSGLEIACIIEENNKIIEYGLKPEHRIKYCRIVRRKINSRNRFYLQLILEGKPYQNPDNKIGFEEIGLDVGPSTIAIVGDTKAELKQFCSDLVPKQKEKRKLQRKMDRQRQANNPQNFNTNGTIKKGKKKWKKSNHYKKTSSNAAELDRKLAAHRKSLHGKDINEIMAMGTRIKTEKIPYKSWQKNFGKSVMVRAPSMFISGLKRKAENAGGSFNDFPTHTTKLSQVCHICGNTVKKPLSHRWHICCGIEMQRDLYSAFLSKCVNVNTGSLDIARARMLWPGLEPVLSAAISRVIQSANGWNCPASFGLEYRRQSGSPVKPEATVTEAVDAVIRDQIYEDESHREVI

SEQ ID NO: 23563 - protein, 476 aa, unknown
  TnpB Polypeptide
MKKTIKNYCFTATQDRLEELSEIAIRYACLKNEVFRIFGSLEGLKYVSYSRDLRNEWSRLGLFKRFHLLSKYSQCAFDDAFSSIRSNWSNSIIKTKKNINKNHRFTKDEKHYMFYLLKATDLLYKAITFQNFDKPEPFKDMVLDRDRLHKYLKSRLRKHLGSNPHQYSNRSFRIEKELYSYYSDNQGRLWINVSGLKSYKRIKLLLTSKVKFDGSLIIVLKDNKVEIHRSIDIEDRINTGTETIALDKGFTTLITTSTNHKYGENFNDLLKQESDRLSSKNQKRNKLRFLSKNSKDLIKSINIRNNNLGKKKYNHQKEIQDNKIKEFINHSLNKFFTQENPKIIITEDLSWQGKSKFTKKVNRYLSSWVKGYLQDRIDFKCIVNGVHQVVVNPAYSSQFCHLCGRLGSRTGDKFYCTQCGVLDADYNATRNLLSRHTDKEITFYTSYKKIKEILLSRSSKHTDETAHPIMDSRYLK

SEQ ID NO: 23564 - protein, 419 aa, unknown
  TnpB Polypeptide
MDKTTKREIRNLSKDQYLTLKDMCHLSKNVYNTTLYNIKQYYKKTEKYLRYESNYHLMKNDKNFKYLFSHCSQHTMMIVDYNYQSFFSLIKKDKNNINEINPPKYLDKNGYFLLIFPQFKINKDGYINLPMNPKFRKDHNNIKIMIKVPDRLKDKKIKEMRIYPKYNAKYFEAHFIYLDEEQIKEVDKKQYLSIDLGLDNFATCISTIGSPFIIDGRKIKSYNQWYNKYNAKLQSIKDKQKTTGITNKQINIVKKRNNRVSDFMFKSARYVINYCLDNKIGNIVIGYNLEMKTEINLGKKNNQNFVFIPHASFRNKLKYLCKFYGISYIEQEESYTSKASFIDKDPIPIIDFNNFDEKFKFSGKRIKRGLYKSKNGTLINSDINGSYNILVKHLIKSKQKIMDQLYSGCLGQPVKIRVH

SEQ ID NO: 23565 - protein, 567 aa, Mycobacterium sp.
LTRKGIEAAAKAHIEASGWLRDHLTKAVGLHVAGEVWETIDRHLFADSSGRRRGPPRVGSWWDFTRIPGRARSHTKATPTWETYRLAGTLDGHLRAYRHPQLPESIHVLEAAGQPAGTSILTQPARMPAPVRPASRSWADHNGALAVVFTGLPGEDMVLPVRLPQGAGQWAHLTHFLADPPMWHKIDLVRVGDRKAPGGWRYYAHLLVHQGGYESDATRVRRAEIPMNRRAGVDANVSNLALASFPDGHPERLATDQIGCTAQQQETAARAAKRARARQRALDRSRRNTNADQYSPSARQQKRADRRAEAGLPTRQVSNPGGPRHARADGVPLRAYRHDKLSQRYHRTRCDHAADTRSASQAKQGRAAQIAARIVAAHGNTITVEDCRICTWARLWGKRIGLFSPGMLVTALSAECAASGGRLYRAGTRPTAMSQHCLCGTRVPKTLDQRTHHCGQCGLRGDRDIVSAALAACVELTNPDDPRTARVDYRLAHALRDGLASQPEWEGSVNRHQPPPSPDEGLARTGSHHPVVSAEQAAPGTPPNRPGTPGRRGNSRKQPAPKLIGAA

SEQ ID NO: 23566 - protein, 302 aa, unknown
  TnpB Polypeptide
MYTSLYKFFRAPRLRNLRRKTWIAHTIWNYFLGWQRTRYALGLPYMSFYEMSREFTVLKHSHPEVFAHWRELNTWSARDILRRLDKGYQRFFKGIAKRPPRFRSWRKPYSFTMCQSGFKFSDSEEGASGFGIYGDKVCIMEHEYRFNLSRPIRGNIRTVTVKTDVLGDFYMSVVTDYIAPEILPKTDEAAGYDFGIKTMFTCSDGTQHESPHFYSSAHSELATAQRKLSSKQKNSNNRERERKNVARVNRKIKKQREDHHWKLAKQMVHQYDTWNMWNYQFFRPKPHPLDCGCRRAKKVVDF

SEQ ID NO: 23567 - protein, 368 aa, unknown
  TnpB Polypeptide
MKAYSAACTYVSDYVDKNLLPLNQFKIQDATYHTCRDTYRLPSQMAVSVTRTVVASYKTIRTNQERHPERFSKKKRNAAIRPAFRAPQLSLVWNRDYSLVWNADKTERLFSVNTLQGRIKCAFHADAMDWAFADGVKFGTAKLVFRHGKFLLHVPVTVEVPDVPEASGYARVVGVDRGIRFLAATYDGRKTFFHSGAQVKQKRAHYKELRRRLQMRKTPSARHRIRTIGQRENRWMNDVNHCISKALVCSNPEGTLFVLEDLTGIRGATERVRVKDRYTQVSWAYYDFEQKLAYKAIKYGSSMLSVDPAYTSQTCPICGHVDKKSRNHEKHTFKCTACGYTTNDDRIGSMNLQRMGIEYLLKAQVSNG

SEQ ID NO: 23568 - protein, 589 aa, Streptomyces sp.
MFDGRVIGGGGVAERSASGLRVLAPPRVAVPTGALTVRTRLRLSDRDAVILRELAEWLSRLAARDLAERVTLGARHTAADFARRKRELTALASSRWAGTITRGSNDQWQLARRAQTAHLERLTAEIATIERRLAAPVGGRDEATRTKGYPTRRVRAAKQQRLQSLRARAARVASDAAAGRVHVVRGGKDLLRGRLRPDSAGRSLEEWRDRWWEARNRIEADGEAGKTYGNQSLRVGPRGDVLVKLPAALAERHREHCDRFGRYTLDARCRFAYRAEEWRAQVEAHRAVGYTVRFSGGRCHLVASFTPAEAGPRAGPGDEALMAAALTGGVLGIDQNADHLAVWRLDTHGNPVGRPGRIDADYRGPASRRDAQVRHLCAELIREARRFGVTALVVEDLGFDTGRERCGWAGRSGRRFRSSVAGIPTARFVSRLVAMAPRAGLAVVVVDPAYTSRWGAQHWLRSTSTTRRKTSRHEASAVVIGRRGQGLGARRRAEKSVPRGKTEEAGRSHREVRRRRAGTETHRPAAHDSGPGFLRAPTTADRPEDGARDAPRRRTPTAVQAAQDRSGQLAGGTRVPAPRDGWTPLQGFT

SEQ ID NO: 23569 - protein, 404 aa, unknown
  TnpB Polypeptide
MYLIEKHIINKNHSFYNECDSLCFKSKNLYNQALYNVRQYFFENNKYLNYVENYHITKKQDSYKELPTKVSNQTLKLVDQNFKSFFALLKKKNNNQYKEKINIPKYLDKINGRYITKYEKQALSKKIFKKNGKIHLSQTEIYINTKLKNFDIINEVRIIPRNNHYIIEVVYEKQELELKIDNNKYLSIDLGLNNLATCCSNINGFKPFIINGKPLKSINHFYNKELSYYKSKLEKENKIKKSKRISRLTNKRNNKVNDYLHKSSRILVNQLVSNNINTLVIGNNKEWKQDINIGKRNNQNFVQIPHGRFIDMLEYKCKLLGINVILQEESYTSKCSFLDSEKICKHEEYLGRRIKRGLFRSGNGVLINADVNGSYNIMRKAIPNAFANGIEGLAVNPIKLEISL

SEQ ID NO: 23570 - protein, 522 aa, unknown
  TnpB Polypeptide
LAKNQTYRAFTARPSHVLDLNGELLDATAIMTELTSEIQGISAYATYVVRNDIKLRSELANVSAVQPAVAGRRAGVTMPDFLATGRTGNSRKERLFRHRVVTEYRSWQERIDAVNGESSKYVSQGWKRTMNASAPAYGEAYVNLGAVDKSYAVIENNPTADGEIILKMVIRGAWYRLIFRFDTARFPEGKVTLPLVKVENNQPVFIFTVVTDNPVVQFSGDYVIGVDVGINDYATVVVRNTETGRIVHETTLSQRVHSLWNSVRASEKQVRSLRKKARSLLYDRQGHMAALDEAQFHCEAASRKKRELAILAAQEIAYLSYFYDNAVVAVEDLSWIRNTMQNGRWNRGELIKWLTHYVTQNGGWVVAVNSANTSQVCHLCGTKVTHPVHEISICPTHGVLDRDVNAAANIAARAVPKVAKARKTRAKNRKLQPKVALKTPIARGSLKYPGRDRTKNCPTPKRKNHPRISKEVILPFSPARVQATCLVTGVLADCGAHGATETSQAAIKQGGKTCKCGLCSLN

SEQ ID NO: 23571 - protein, 396 aa, unknown
  TnpB Polypeptide
MLDAIKVKLKLTKAQKDFCLLNGGACRFLYNEGLRQNIDSYASSRKLKLNNINDILYNLLKSPEFSWLKRCEPTSLTHSLSNLEISFKNFFNSRNKSRKGRIVSFPKFKSKHRSRYNFTIINEKDLCKLRGSNLSLPRLGLIKVWNFQSQLKDRLNNEKIKRVTISRDSDQEWYASILVDRQKLLKQIYQPTNLTVGIDVGIRTSISCYDNLGDYNSVQSPDMTKLDTKIKTLHKTLSRKQHGSKNESEARIKLAKAYFHAKNTRKDFNHKMSDFLVKTYDVITVENLSIQHMMKQHLLAGKIQNQAWYQFILFLDYKCKRNEKTLIKVDTYFPSSKLCSNCKSKNDIGNLEWYRCPICGYTHNRDENAAKNLNKISEHFKKTNQQITTEKEFLLM

SEQ ID NO: 23572 - protein, 437 aa, unknown
  TnpB Polypeptide
VKTIKLPYKSSEDLTPILKQYSSVVRHSYNRFLENKTEKEVRYLTKSLNTVDLLNSWLIQCAIKDAKAIHSRFSNEKVIFGGKKNFILRCQGKISKEEYQLKRLSPLNSQGEVLRQGNRSFKLDIIENNQIIFKLNRNKHIEIKLPNLRNNIKNELFKLQQLNEVKHQKGYTYSIRLDLEYIYISFEEFKSEKARNLNENRYLGIDLNPDTIGISILENENIIYTQEFSLKPIFNKILNEKLSTNSDRMKYFQNKLKFETYEISKSIANLAKQFNCKSVFIEDLHFKQKLNKEQKHNHIGNRKNKNLWKRELFINNLNKRLNTEGIKLYSVNPAYSSFIGNLRYDYTDAVNASIEIARRGFEYRVKKNRNAFYPDLLVKHQWKEMATKYKDWKEFFLEIKNLKLKYRVSLEDCKKSFRVFQQNSSHKSMVLNYIFYD

SEQ ID NO: 23573 - protein, 336 aa, unknown
  TnpB Polypeptide
MRTAYKCRAYPDTEQVGVLNRTFGCLRVVWNRTLAWRHARYHGEQAMTNFAQANAYLTAMKATEDLGWLNEVSPVPLQQALRHQQVAFSNFFAGRARYPRYKSRTGRQSAEYTRSGFRYRDGKLFLAKTDTPLAFTWSWPNVDPASIDPTTVTVSKDPCGRWYVSFAVDVADPAPLPATSAVDLGIKDFAVTSDGEKIPNPRRLARRERNLARYQRRMARKVKGSANRAKARAKVARAHRKIRASRADFLHRASARSACGHLLADLSLKTRTWQCPSCGTRHDRDINAAKNILAAGLAVTARGADVRHSGFSRVQSAVKQEPRPATAGIPVHQGGE

SEQ ID NO: 23574 - protein, 528 aa, unknown
  TnpB Polypeptide
MTRKKSPSWVLELPLAVRPDQAKRLQAHLEAARCLYNALLGEAKKRLNRMRSDPAWQGARAIPRTRKQERNAAFSRLRKQYGFAEYALHDYAKGARWSWIADHVDSTMAQTLASRAYQAVNRVCLGQAKQVRFRSKGRGMGSVEGKRNDTGMRFVLQQAEEGNQRCLLWGEDRIPAVIDWNDPVVAYGLRHRMKYARLLRREVSSPRAQGADGEGNRYFVQLIVEGTPYQKPKNQPGNDTLGLDIGPSSLAVVPREGEAQLVEFCEELRPDMRKKRRLQRKMQRQRRANNPHNYDERGRVNKHGKHRLHWHDSRGYQATRRRHATQERKLAAHRKSLHGKLVNDLVRVGNRMQIEQTSFKGWQKLYGKSVGLRAPGLFVAHLTRTVAKTGGTLTEVPTYHTKLSQYCHNCKRYVKKPLSQRWHTCPCGIGLVQRDLYAACLLAYLDPPETVPSITHDEWAGVESRLKAVVEVLQQRAKEGQSLPRSFGIPGARARRPKSPQPNRQELTSLSRRGRLEALGLAQEPPLL

SEQ ID NO: 23575 - protein, 404 aa, Streptomyces sp.
MIRAYKFLLRPTVGQAAALTAMLADHCSLYNGALQERRDAYRHGSKTSITYGTQSAQLKDIRAFDPERQGRWSFSGQQATLRRLDKAFAAFFRRIKAGETPGYPRFRGGNWFDTVDFPKDGDGCRWDSTPHDPVTRVRFQGVGHVKVNQHRPVTGKVKTVSVKREGRKWFVVLTAEQTQPDPLPATGSVVGIDMGVVNFLADSNGNFAPSPRHGRKAFAKLEAAQQALSRFPRRKAKDRTANHQRAVDKVAELHGKVRRQRLDHAHKTALTLVREHDFIAHEDLKIRNMSKTPTPKPDPDRPGSFLPNGAAAKAGLNRSIADAGWGVFLTILHAKAESAGREVIAVDPRNTSRRCPECGHTAKENRPTQDTFHCVACGHTAHADTVGAVNVLRAGLVRRDANQA

SEQ ID NO: 23576 - protein, 236 aa, Enterococcus sp.
  misc_feature (159)..(192): Xaa can be any naturally occurring amino acid
VERLKAYKFRIYPTEEQEIFFAKTFGCVRKVYNLMLNDRKKAYEEVKNDPSKKMTFPTPAKYKKEFPFLKEVDSLALANAQLHLDKAYKNFFRNKSVGFPRFKSKKNPVQSYTTNNQNGTVALIDNKFIKVPKLKSLIRIKLHRQPKGMIKSATISRHXXXXXXXXXXXXXXXXXXXXXXXXXXXXXXXXXXGFRLVRFVQSADIKMARNRSIFENGLALFVILIMTVISTLVSIF

SEQ ID NO: 23577 - protein, 161 aa, Enterococcus sp.
VNFVERLKAYKFRIYPTEEQEIFFAKTFGCVRKVYNLMLNDRKKAYEEVKNDPSKKMTFPTPAKYKKEFPFLKEVDSLALANAQLHLDKAYKNFFRNKSVGFPRFKSKKNPVQSYTTNNQNGTVALIDNKFIKVPKLKSLIRIKLHRQPKGMIKSATISRH

SEQ ID NO: 23578 - protein, 372 aa, unknown
  TnpB Polypeptide
MKTYKFRLYPTKSQAEKLADTLKSCRVLYNCALEQRKIAYRQFGISIRRLNQQAELLEIKECFPEYKGIHSQVLQEVILRVDKSFQNFFRRVKSGNNPGYPRFKGHGWYDSFTYPQSGFSLSANKKGYQRVKLSKIGNIRVKLHRAVQGKIKTCLIKREVDKWYVCFSCKVEPKILPKTGKAVGIDVGLEKFAALSDGTLIENPRFFRESEAKLKREQRKLSRKQKGSNSRKKQKIKLAKIHRKIKNQRKDFLQKLSTWLIRNYDTIALENLQISNMLKNHNLAKSISDASWSMFAEYLSYKAESAGRKVIFVNPRNTSQICSNCGVIVKKTLATRTHRCSCGLILDRDLNAAINILRRGTRPGGATAVAGL

SEQ ID NO: 23579 - protein, 355 aa, Escherichia sp.
  misc_feature (278)..(338): Xaa can be any naturally occurring amino acid
VKRLQAFKFQLRPVGQQEREMRRFAGACRFVFNRALARQNENHEVGNKYIPYGKMASWLVEWKNATETQWLKDSPSQPLQQSLKGLERAYKNFFRKRAAFPRFKKRGQNDAFRYPQGVKLDQENSRIFLPKLGWMRYRNSRQVTGVVKNVTVSQSCGKWYISIQTESEVSTPVHPSASMVGLDAGVAKLATLSDGTVFEPVNSFQKNQKKLARLQRQLSRKVKFSNNWQKQKRKIQRLHSCIANIRRDYLHKVTTTVSKNHAMIVIEDLKVSNMSKSXXXXXXXXXXXXXXXXXXXXXXXXXXXXXXXXXXXXXXXXXXXXXXXXXXXXXXXXXXXXXQRVRSASRGAMSGQNQV

SEQ ID NO: 23580 - protein, 373 aa, unknown
  TnpB Polypeptide
MIKSLKIRIYPNRKQEELIIKTFGCVRYVYNYYLDKRIKYYENYKKSLSYNECSKDLTSLKRELEWLKEPDKFSLQSSLKNLDEAYKRFFKGLGNFPKFKSKNNKKDFYTTKFTNNNIEMFENYIKLPKLGKVKYRDNTTIKGKILNVTISKTKTGKYFAAITYEKEIKAFEKIGSEIGIDLGLTDFAIFSNGERIKNPRNYRNLEKKLVREQRKLSRRKHLAKKKGLNLKDCKNYQKQKIKVARIHEKIANKRKDFIQKLSTDIVKNHDIICIESLNVSGMLKNKKLAKSISDVSWSEFIRCLTYKCEWYGKTILSVDRWYPSSKTCNLCGFIKKDLTLEDRVWVCPNCNEIHDRDINAAKNILKEAKRQIA

SEQ ID NO: 23581 - protein, 456 aa, unknown
  TnpB Polypeptide
VLFKNLQENKMTNRNKGVYQDTIIYCVKTEIMFSDEVSRILNGQSKICNWLYNRLYEMVEYDYKNNDGAAGLTRKFTLRDQVPVLKRKYPFLKTVYSSVSKNVALRLAGAYKAFFEGKCDHPHFRSQKKKWFSLEYEEKAGWVVDGRDLTLSLGKDENNKQIRVQGILKSKINVDNAKSFRLVKERDRFYGVFTIVEKKREVKESEKWISIDPNHKNLFISIDRNGESIEFDNLAEIKYWDAVCDNLRSRRDLCKRKSVFVSTDGRRGYWKPSKRWVKYNEAYKRAMLTRREQIKLGMFTIANYLCRHYDVIMIGDYVPNSSLSTSPNMSRGMLNQSVIGKLRSTIKWVCEKSGKKFIKTDEKFTTMKCSNCGHMEKKLPDIRVFTCKSCGKTFHRDINSAINIAKNNDYLPCTGYVEEPTYTAHWSHKDSRVEKLNKNRGRFLSNCIGVNKLVYV

SEQ ID NO: 23582 - protein, 402 aa, Streptomyces sp.
VGRVIRAYKFLMRPTVGQQVALGEMLRDHCSLYNGALQERRDAWRHASKTSIQYRMQSAQLKEIRAFDPDRQGRWSFSSQQATLRRLAKAFAAFFRRVKSGDTPGYPRFRGMNRFDTVEFPEDGDGCRWDSIPHDPVIRVRFQGVGHVKVNQHRPVAGKIKTISVKREGKRWYVVLTAEQAQPEPKPKTGSAAGIDMGLAYFLADSGGGFVENPHHGRKVAAKIGAVHQALARCERRSNRRKKIVRKVADLHRKVRRQRLDHAHKTALDLVRQHDFIAHEDLKIRNMVRAPKPKPDPDHPGTFLPNGAAAKAGLNRSVSDVGWGVFLKILHAKAESAGREVIAVDPRNTSRTCPECGHVDKGNRPTQEKFHCQCCGHSAHADTVGALNVLRAGLVRRDANPA

SEQ ID NO: 23583 - protein, 443 aa, Lentzea sp.
MVMVIQAFRFALDPTVGQQAALRSHCGGQRFAFNWGLARIKANLDQRAAEKTYDIPDDQLTPSVSWSAYSQRKDWNQAKDVIAPWWAENSKEAYSSGLANLAAALGNWAGCAKGMRRGPRLGFPRFKGRRSGLSCRFTTGVFGLADDRRHVKLPRIGLVRAHESTRKLARHVTRTDAAPGRPGSVVGVDLGVKSLAVLSTGETIPNPRHLETALREPRRLQRQVARRTGPDRRTRQEPTVRWRKTQARVTRLHTEIANARRDGPHKLTTRLIRTHGVVVIEDLNVAGMMRNRCPARHIAGVGMAELRRQIEYKAGWAGVRLLVADRWYPSSKTCSGCGVVKAKLRLSERTFRCDACGLVCDRDLNAARNLAALVHREMSSPSCGATQNEPAGNPGKTRTTRATGTATGRPAPPRYGSTPTRRRAGCLNTANSCPPTSQVTEWS

SEQ ID NO: 23584 - protein, 413 aa, unknown
  TnpB Polypeptide
MQLVYSFYIKHNEDIDKLCKVSTNLYNQALYIVRTTLDKEGKWLFYSDLNKIMPQTLNLDGECNYRLLKAQVAQQTLRSLEKNVKSYVKSIKDWKKAKEKYKAMPQFPHYKKRGSMSNLCYTNQSCSVRKGFINLSKDLRIAIPQWEKYKDNFRRLNQVRIKPSPSCVKVEIVYTKDVIAKELDGSKFASIDLGIDNLATLVTPDSSVLYSGKFLKSYNRQFNKKLHKLQSIKDKQGIKRSTKRIQRMYYKRDMYLQDVFHKYSRCIVEYLIENKIGNLVVGYNMGWKQSVNIGKKNNQKFVQIPYARLISYLEYKCNMNGIKFQSHEESYTSKCDALALEPIGKHEEYLGRRVKRGLFRSSTGKVINADQNGALNILRKVVGDSEFTRIVDSGHSLCPVRHRTPFFRGAGSM

SEQ ID NO: 23585 - protein, 355 aa, unknown
  TnpB Polypeptide
MKTLKLRIKDKHSKLLTSLARQVNFVWNYGNALCYTHLKRTGKFFSAYDLHHYTSGATACGLDLHSQTIQSINEELVTRRKQFRKAKLQWRVSKGARRSLGWIPFKASSIKYINGQIRYSGHFFSLWDSYGLTNYNIKTGCFSQDARGRWYICLNVVEKEPKPIPCNKDKSAIGIDLGLKDFLATSDGLKIEAKQFYRKSESKLKIAQRANKKQTVRKIHSKIKNQRLDFLHKLSSKLVKEHSAIYIGNVNAKSLSKTKLAKSVQDAAWSAFRTMLRYKCENAKVLFKIVNETYSSQVCSCCSCIGDSSPKGRTGLRIREWTCLHCGTVHDRDINAAKNILALGHERPIVGIPSL

SEQ ID NO: 23586 - protein, 402 aa, unknown
  TnpB Polypeptide
MDDFRLLVNQSLRFALEANLTSRARLSRFARTRALELGVTGGIAVAASEIALSLAAGHRHRLRHGVEGRVPYVRTPFVRLPKACFHLDAASGRVRLSLRRGEWTSIGVRVSNYHREVLEDPRHRVTQLHLGLHRAVIIYARTPDPEYAPTSLVALDTNESSLDGVRLTPEGPSFVRAVFPRVRLVQARHVARRRRLARKKSHDRRVQRQLLAREGRRERHQVRSQLHDLTRAIVDQLARDRSALALEDLSAMPQPRRRVPGPRKPRSGVTRSRRGRRRLSQWPVGELHRQLAYKAQDLGVPVVWVSPYRTSKTCPRCGDVSEHRSRVGPRFTCRACGWTLDRQLNAGVNVGVAALRTRAGLGGLRLDPDALPQDVVNPLYPTAAGRRAREERTGREGRNSNR

SEQ ID NO: 23587 - protein, 339 aa, unknown
  TnpB Polypeptide
MYIAVKLFLKLNPEQEIRLKWYEAVFKFEIERISNIFKNKGHAFEYRYKDISNHISYNSKHLVLVQAKAKYTTEQKDKKFTMPFTSIWSNSSYELQADCILFELGLYEHKELLRIPCYINKQQKLRLTAGRHTNLKLVCSRGKWHALVYVDIPFQQRSGQNQMGIDIGLKVPAVVALSTGEIKFFGNGREIRFQQRRYQSHIEAMIRHHQKKKFVQFQHKLHHVMKDYDHKIAKQIINYAIQNEVSVIKMENLMSINKRYEKNGSKALHHWSYRRLQDYIEYKAALAGIRVLYIKPYNTSRKCPQCGRINVPKDRAYHCSCGYQGHRDAVAAINILHTL

SEQ ID NO: 23588 - protein, 350 aa, unknown
  TnpB Polypeptide
MPSSVLTFKYRVKDATKSKHLQRLAWACNTVWNFCNDVSMLALRRDKRFLTAVDLINLTAGSSRELGLHSDTISEICREYVAKRFTAKKRRLQWRSRKRSLGWVPFKLRFLKLDGESLTYRKRRYRFWASRPIEGTPKTGSFTQDARGRWYVNIQCEGEPPGVPLREREIGIDLGLKNQWACSDEAAPYSRENVTRAHEHALALAQRAHKKKRVKAIHARIANTRTDWAHKTTTAIVNRARLIVVGNVSSPKMIKTLMAKSTLDAGWGQLRTMLAYKANRLGVTYCEVNESGASLTCSACLARTGPRGLSQLGVREWCCSACGVVHNRDLNAAHNILRVGRDTLSGIPRL

SEQ ID NO: 23589 - protein, 542 aa, Streptomyces sp.
VGGLRELVVPFVVTGPSGVAVRTRLKGLTPGDEGVLRLVGAHLGSLASRDLKARCMDGLEHSAGSWAARKRELTGGSSSRWAGSITKATHDQWALARRGQAAHVKSLEAGVATIRHRLSLPVGAKGTKAAPGGYRSRREWHAKARRLRVLEDRLEKVRADHAAGVVRVVRGGKRLARARHNLADAGLTAAEWRRRWETERWFLTADGESGKRFGNETIRITPEGEVSIKLPAPLAYLANAAHGRYVLVAQVSFAHRGSEWADRVAANRAVAYRIHHDTGRDRWYVTASWQIAAAPTVPLEAALAHGVIGVDMNADHLAAWRLDTHGNPIGNPRRLFYILTGSAPHRDAQVRHALTRLLHWARSCGVKAIAVEDLDFQAEKTREKHGRRRRFRQLISGMPTGRLRARLTSMADATGITIIAVDPAYTSRWGAQHWQKPLTHTTRKTSRHDAASIAIGRRAQGHPIRRRTTPPRAHQSDVHGHRTVQADPGTLGREETRPRIPGPRTRCAPPDAERTRATSASKTVRDAPVAQVWVQNSLLLTE

SEQ ID NO: 23590 - protein, 373 aa, Salmonella sp.
VKRAYKYRFYPTPDQIELLAQTFGCVRFVYNSILRWRTDEYYERQEKIGYTQASARLTALKKKPDFAWLNDVSSVPLQQVLRHQQAAFSNFFAGRTKYPTFKSKHHKQAATLTDAAFKYRDGKLYMAKSKTPLDVRWSRELPSAPSTVTISKDAAGRYFVSCLCEFEPVSLPITAKTVGIDVGLKDLFVTDTGFKTGNPRHTVKYAKRLALLQRRLSKKKKGSKNRAKAKQKVAKLHAKIADCRMDNLHKLSRRLINENQVVCVESLKVKNMIRNPKLSRAIADASWGEFVRLLEYKAEWAGRSVVAIDQFFPSSKRCSGCGYTMPKMSLNVRSWVCPECGADHDRDVNAAKNIKAVGLTALAHGATVNPKAA

SEQ ID NO: 23591 - protein, 513 aa, Massilia sp.
VHYEQACSNQDGGHGAWCLDQYAAALGGERASRAPAYRRWTTPLRPRGLPLRARPRRSGAASDDRLCARLQPRPARRPGTPKAGVGTVLRMALRQPQLPQPKTDRRGAPGCPGGAVLIAHRIRLDPNNVQATYLARAAGIARFSYNWALAEWRRQYEARKANPALPAPSQLALRRQLNAIKREQFPWMLEVTKNAPQMAIIQLGEAFKNFFARRARYPTFRKKGQHDRFTLTNDQFRVEGKRIQIPKLGWVRTREVLRFAGRIVSATVSHRANHWDVSITVDTIEPSHLPPAENQGAVGVDLGIAALATLSNGEVWTGPKALRTLLGRLRRLSRSLSRKVKGSRNRGKAKLKLAKLHARIGNLRRNGLHQLTSSIARRFHTIGIEGLNVRGMLSNRRLARAIADMGWYELRRQLNYKAAWRGGRVVAVDRWYPSSKTCSICGHLLDRLDLGARQWTCPDCGTVHDRDVNAAVNLKNKAVSSTATACGGAGAGAVRMHGVKPAPEKQESSSRQV

SEQ ID NO: 23592 - protein, 307 aa, Halopiger sp.
VTWKQKGIKHDAKHNRVRLSKGWNLKDGRSDFILAEYETRPDVEVENIQQVRAVWNDDRWELHLVCKKEIPVEDAPGDNTAGIDLGISNYLAIDYEDGPSELYPGNVLKEDKHYFTREEYQTEGENGPSKRALKARRKLSRRKDHFLHTLSKHIVERCVEEGIGEIAVGDLSDIREDENGDSRNWGVSGNKKLHGWEFDRFARLLEYKAEEHGILVDRVDEENTSKTCSCCGQIRDGNRVERGLYVCSSCETSMNADVNGAVNIRRKITQSPPTGDMSNGWVAQPGVLLFDRESGRFTPRERGDCKP

SEQ ID NO: 23593 - protein, 385 aa, unknown
  TnpB Polypeptide
MRVLVTAFTLAVTPDHSHKYRLIKFLRAYRDWTQYVLDEIWSDKRVPSIKELHHRFYKLLREKGFRAHHCHKIERRTREVVKAVKKNNGSKPILRKLTARLDCQDYKLDINNKILRVTVLNNEWVELKLQWYSYLDKYFNVSWKLKEILVSYRDNEIWIHFTFKKKVVLKKPKTIMGVDINFNNITYTIIDTKGELKTMGIIPFNGLKRALAHKIIAEKIQRKYSRKWRYVKGIREAISKHGRRARNILNDSGHYISRRIVEIAKEYNALIVLENLNKLKSRANGSRRFNKKFTLWTYRRIQSYIHYKALIEGLQVIHVNPRGTSRTSPVGGKLVFINYRWIKLPSGHIITRDIVASWNLALRDLNLLIRDVGSHGYVETSKAPD

SEQ ID NO: 23594 - protein, 426 aa, Natrialba sp.
MAKQVVTRTYTVSIKNQQQVSDDLDSLGFTASKLWNVGRWTCSRVWDEIDYIPEHDELTAYLKSHERYDDLHSQSSQRVLQELAEAFNGWYGKRRNGDTKANPPGYRKHGDEHPRSTVTFKAAGFKLDTQYNRVRLSKGSNLKEYWSDFILCEYQTRPDVDLSTVENVQQVRAVWTGNEWELHFVCKVEIEVAEAPGEKTVGVDLGINNFAALAYEDGHSELYPLNCLKQDDYYFSKHIARCDASDSDQATRLNQKKSARRTHYFHTLSKHIVERCVDEGVGTIAVGDLSGIREDEENDESKNWGKHGNLDLHSWAFDRFTDLLIYKAEMEGIEVEEVSEEDTSKSCSCCDRKRDANRVERGLYVCDKCDTVANADVNGAENIRQKVSPSLASDGGDRSNGWLAQPLTYLFDKETGAFAPQEQVTS

SEQ ID NO: 23595 - protein, 556 aa, unknown
  TnpB Polypeptide
MARSQGITICVKVPINWDTMTRRTRQRLRQIVGRDSRAIRSLLGVIRYHEQRLLTGCNKNRIDITSLHRLTMTAFIVKAGEHQRPSVPHDLKAKFPRMSQNELAECRATAAGLYDSYLRIPNWMRRSRPCTASASGRIPRWIFSQRFKLLKSTSTRTRWWVSLRDSLDTLKQHRHIHDRLLIPLKVSPFHLTQLQRGQVKALQIFTDRHCKWWITFAVRLPQKEPTSTDLPPAVLGIDLGIKKAACTTLVTPEKVRETRYFVQRDRAYAVEKYNQLVANLQQERDKRPADGRRRDGVTARLGSMRTKRENVSQDHDKVLVRQLLDYISALSQKYDLYVAIGKLKYIRATAQKANCPGRAFRASINSWAFSRVTKSLKHGLAQMGWQVDSSRSRFRVVPEGWTSILCWKCGAKGLRPRQNYFVCPTCGQKTNADRNGAINIAGRLIMVTDSLHSVTGHGKWASAATATQRTQLKARGRKSSRGRSLLPAKSVVSHSGESAVVHIAQTSLPDFSDETGMSDYGPAVVRTVERLSAAGHDTPARRQEKEARSEGGIPPR

SEQ ID NO: 23596 - protein, 394 aa, unknown
  TnpB Polypeptide
MVKLLKSYKTEINPTVEQKQIIHKTIGVCRYVYNFYLAYNKETYEKEKRFVTANEFSKWLNNTFVPNNQEYHWIKEVSSKSVKQSIINGEKSFKSFFKGQSRFPKFKKKNKSDVKMYFVKTDAKVIIPCERHRIKIPTLGWVRLKEKGYIPTNSQTHIIKSGTISYKAGRYYISVLVEKQESFKPQLVNNFGIGVDLGVKDFAICSNGKTYKNINKTFQIKKLEKKLKREQRSLSRKYEDYKKLNKNEREVATRQNIQKQKLKVQKLHHKLDNMRTDYINKVISELAKTKPMWITIEDLNVKGMMKNRHLSKAVAQQKFFEFRTKLTTKCNELGIELRVVNRFYPSSKTCHNCGCVKSDLKLSDRIYNCECGYTEDRDYNASLNLRDCQIYKIA

SEQ ID NO: 23597 - protein, 369 aa, unknown
  TnpB Polypeptide
MRKTYQFRLNPTHRQRTLLNQTLELCRWAYNETLVTHKNIWEQEHRYISLYDTNKLLIGWKNDKPELSQVYSQTLQNVQERVDLAFKAFFRRVKAGEKPGYPRFHGFGRYDSFTFKQYGFTLTDKGLRISKIGCVKVIQHRPIEGKIKILIIRRDALNNWYACFSCECEPKPLPKCKKAVGIDVGLESFATLSTGEKINNPRFFRADEKELTKAQRKLSKAEKNTPERVKQRKVVCHIHQRISNRRKDFSHKLSRRLVNEYGIIVLEKLNTKGMLQNHHLAKSISDVAWNQFEQHIQYKAENAGRECVLVDPRNTSKMCSRCGTLVEKDLSVRVHECPVCDLKLDRDENAAINILALGLQCLGEGPKSP

SEQ ID NO: 23598 - protein, 216 aa, unknown
  TnpB Polypeptide
MRADGTVLGRKFIDHPSEKDRMHRTLGRIRKFQREHGSAQAQGRWAYTKRLNIELGKKIAGAIVKYAEENHADVIVFEYLEMQGKIPGKKKQKLHLWRKRDIQKRCEHQAHRKGMRVSRVCAWNTSRLAYDGSGEVTRDRENHSLCTFQTGKRYNCDLSASCNIGARYFIRELLKPLPATERSLLEAKVPPVKRRTSCVYADLRKLHSEMELLKAA

SEQ ID NO: 23599 - protein, 400 aa, Salinivibrio sp.
MLIRKAYKFRLEPTADQVARLAVLCGHARFVWNQGLRHCLDKLDAGEKIPSAFELNKLVTQWKKQEDLVWLKEAYTDNLQQKLKDLHGAWMRCFDKSLAAEKPRFKKKGKNQDSIRFVNFNKYCLLEGNRVKLPSKLGWVKFRKSQEVQGTIKNCTVSFKSGHWYISFQVEQEVAEPKHISTSAVGVDVGISKFVALSDGSFLKPLNAFRKHEKRLATEQRKLSRKVKFSANWQKQKAKVQKLHTLIANCRKDYLHKASSQISKNHAMIAIEDLRVSNMSKSAKGNAEEHGKRVKAKSGLNKSILDQGWYEFRRQLEYKQLWNGGIVIAVPAQYTSQTCPCCGHVSKDNRQTQAHFECVECGYTNNADIVGALNILERGHRLLACEVSGATMPPAAGTSH

SEQ ID NO: 23600 - protein, 242 aa, Coleofasciculus sp.
VCRALQCNVSVPDPIPHGHPIGIDIGLEKFLATSDGVLSLPPKFFKQLQSELKLLQRRLSRKKKRSKNYEKQRIKVARLHHRIDNTRKDFHYKQAHILCDAGDMVFMEDLDYRVSAKGMLGKHMLDAAFGQFRSIVKHVCWKRGKFFGVVDTRGTSQECPECGGEVKKDLSVRIHHCPHCGYRTDRDVASGQVIRNRGVKLISTVGHTGMETACAADLPGTGETQSRQVAKSRKRTTRKSLS

SEQ ID NO: 23601 - protein, 509 aa, unknown
  TnpB Polypeptide
VKYYDTVTRHRFTTENGVDAEQVERDLAQMVSWMTQAEREVLASQEFHDLALKALKGDRPTGPLSAWGRKKLSRYPFSFQKYNMNEMLVSNVVSALEAYAVSVGLFQVMSTHSSMTKPNQILSHYRKTYPNAPQPTSGMVRAHLRRYHIKGERKASLPGVSAKLNLAVCDTYFAPKASRDDNDPLNVIVQVKTPSHGLTKLYLQLPENTERFGTGKVCRPTIRLNNKGQVVFDIAIEHETHQRDTKKFVGVDLGKVEPFVATVIDSKSKHRSAPYHANHKRRLGSLVKAEKRRRVLSAHLYERADLCESHNRTDHADVLRIEAKRVSAKATRIKHEISQCIASQIVEIADQNDAHIAVENLSWLDAKGGRWPHAEIQSRIENTAKRYGIKTIKVSAKDTSRTCSRCGSKVSNDSKTRVGTCTACGFELNRDVSASREIALRATSPSSRSRERMRSLLRQRQEKQSSAATQQSKPVTVLGGIQGHTGTSSIVEATLMMVRETLDSRESPT

SEQ ID NO: 23602 - protein, 382 aa, Erysipelotrichaceae sp.
LINVYSEDLVKMKKTMKIRLYPTRAQEKQFYEFCNTARFIYNESLSYSIKYYETNKKYPSTQCLINHVKDLKYNKYSWILQTPEAVTKQSIRDLKDALTKFFNKTSKFPKYKKKSRAKLSFYQRTDSFHQIDCNHIKITGIKSPVKIKNNNIPNHVYNTRVSYDGKYWYLTISYDVECLNKNTNDKVIGIDLGIKETITTSDGIYFKNINKINKVVKLEKRKKRLQRRLSNKYEINKQGKTFIKTSNIIKLEKNIKLIDRKLTNIRNTYRHTITKRIVEQEPRTIIVEDLNISGMLKNKYLSDSIRKQGFNDIISKLKYKCKLYGIELKIADRFYPSSKKCSNCGHIKKDLKLSDRTYNCDYCGISINRDYNAALNLKQYLT

SEQ ID NO: 23603 - protein, 446 aa, unknown
  TnpB Polypeptide
MQLTHKIALYPTPEQVDYFNRACGTARRVWNWALNEWNKQYAAGRKPNAMALKKQFNAIKYSDPQWLDENGRPWLKGIHRDAHAQPFAYHAKAWDRFFAAKKAGKPAHKPKFKKKGRCRDSFYVANDKFKIDGKVICLPKIGKVAMSEALRFEGKILGATVSRTADRWFVSIQVEVKDEQFYRRRKADGIVGVDLGVKAAATLSNGELLRAPKPLKAALRRLRIRSRRLSRKIEAAKVAAGFNPKGALPKGTRLPISSNRQKSAQALARLHARIANIRADFTHKLTTRLCRENQAVVIEDLNVRGMMANERLARAISDVGFGMFRSQMEYKSKRYGTQLVIADRWFPSSRLCSVCGWKNEELSLRDRAWTCPKCSTHHDRDLNAAINLQRLATATALPVASPFGNGGATSGGVPEVVGKVTPVRHEHGHQDGSGQEENRAHLCALS

SEQ ID NO: 23604 - protein, 250 aa, unknown
  TnpB Polypeptide
LTTKAYGKMSFVQHRDLKGQIKQVSISNKNDKFYLNIITDYIEAKQAVGSIGIDIGLKHLVVASDGLKIKNRTDSKYFDKQIAKIQSRADRLTKGSNQYKFLKKVVNRLYDAKVRKINDYQHKVSRRLGSTYDTIYAEDLSVKSMSEGKWTNLNRSIRNAKLAQFLSFLGYKTNHLVLVNSRNTSKTCNKCGKIHIDLKLSDRTITCSCGSIYDRDENAADNVFCLGQAMRNNPAYVGSMTIQEAFAFRR

SEQ ID NO: 23605 - protein, 235 aa, Photobacterium sp.
VTSITLSLSKTGKFYASILVDDDIEAPALIHTVSKVTGIDLGLTHFAIESNGRKTANPRYLKRAEKNLKRKQRQLSRKKKGSANRAKARLLVAKCHEKVANARADFQHKLSRTLVDKNHAVIVETLKSANMMKNHKLAKHIADASWHSFVVKLEYKLKEQGKHLVKVDQWYASSKTCHCCGYKMEEMPLSVRKWDCPSCGTTDIDRDLNAALNLRDKGILELKAAGRSFLLMEAA

SEQ ID NO: 23606 - protein, 378 aa, Pantoea sp.
MIIHMLRRQAFKFQLKPTPAQIASMKSFAGACRFVYNRALTIQSDIWRNGDRYISYNKMAPWLVEWKSQEEMSWLSNAPSQILQQSLKDLDKAFNNLFARRATFPSPKKKGRNDAFRYPTQRVKLDEGNERIQLPKLGWVRYRKSRNITGVIKNVTVSMKLDKWYVSLQTESEVETPAPLQSSMVGLDTCNIECLTTSEGTDFFSQATLPKMERSLEKSIKRLRRKKKFSCNWIKQRHKINRLLHRISNMRKDHFHKISTTLSKNHAIVVIENLEHATSLLNRSPRKKATAVNNIYELKRQLDYKLSWNGGQLVTVHERDNNLKPVEDDSACTAYGAIRAKKILAAGHAVIACGGVDMLRHPLKQEPSEDNGSTVILL

SEQ ID NO: 23607 - protein, 461 aa, Verrucosispora sp.
VKTIQAYRFAVDLTPAQGRAALAHAGAARVAHNWALARVKAVMDQQTAERSYGMPEDMLTPSVSWTLPGLRKVWNANKEQVAPWWRECSKEAFNTGLDALARALKNWSESRSGTRAGRPVGFPRFKSRRRSTPSVRFTTGAIRIEPDRKHVVLPRLGRLKLHESARKLARRLDNGTARIMSATVRRDGGRWHVAFCVEVDRAERRPARPASVVGVDIGVKHLAVLSTGELVDNPRHLAAAQARLRQLGRALSRKAGPDRRTGQRPSNRWRRASLRLGRAYARVANLRRDGLHKLTTRLACEHGTIVVEDLNVAGMLRNRRLARHIADAGFGELRRQLAYKTEWNSGRLVVADRWYPSSKTCSGCGAVKTKLALSERTYTCTACGLTLDRDLNAARNLAALATEVGPAGSGPAAARGADRKTRIRGPVAVKREPGTASAGQTGIASPQGGAISRALTRAHGW

SEQ ID NO: 23608 - protein, 431 aa, Streptomyces sp.
VASHVKRAFKYRFYPTDVQAAELSRTFGCVRTVYNMALAARTEAWARQERTTYNASSAMLTAWKKTEELAYLNEVSSVPLQQTLRHLQTAFTNFFAKRARYPRFKSLKKSRASAEYTSSAFRFRNGKLTLAKMKGPLAIVWSRPLPAGAKPSTVTVSRDSAGRWFVSLLVEDPAVQALPASDAAVGIDVGLDHLLTLSTGEKIANPRHERRDRARLAQAERAVSRKVKGSNNRAKARRKAAKVHARIADRRRDYLHKLSTRLVRENQTLVIEDLTVRNMVKNRSLARAISDAAWAEFRSLLEYKAAWYGREVVVVDRFFPSSKLCSGCGALQSKMPLRVRTWTCDSCGTTHDRDVNAAENLLAVGLTVSACGAGVRPQRRTPGGQSATKQETHGATRGIPRPQADGRSQQGHTHLPPSPATSSAGRRSSSG

SEQ ID NO: 23609 - protein, 575 aa, unknown
  TnpB Polypeptide
MAKRSKTGLRVIADPFVVAAPSGTATRTRVRVTPVEHEFLTLIGKTLGVESRKDLALLLKHGGKRVGAADWNTRKTSLTTRTSARWAGAITQASHHQYAVGMRCLRAERDSLRIRINVISERLAVPHMSAAPKANPYREWERYAKTRRLAALRDRLDQVVDRIEQGHPRIVVGGGRLWRNKQNLDATWLSEHEWRREWDARRLFLQAPGESGRRFGNDTIRISPDGSVTIYVPASLQDQVPTELRNANDATHITLTHQVRFHHRGGEWADRVDANQAVKYAFAYTPTLGASGGKWFLTASWTFPNIPTIPLSALHAKSTLALDLNGNHLAGWVVDPAGNRVGTPVTFSLDLTDQPASTRDAWLRHTITTLLKYATANGCASVTIEDLNFTSESEGRDAPTTTRKLRKIIAGMPTAQFRDRLVAMAALVGLPIVAVDPAYTSKWAKQHWLKALQPTTLPPTATAPQRVERRPRVSITSHHAAALVIGRRMFGLGARRRMNGPQLRQRTLAGQPELSWDSVSSLVQATPPHEHALTPARSATVRQQVEPVNAHPAGSRQPFTGQPNTGSNIPTLPTI

SEQ ID NO: 23610 - protein, 379 aa, unknown
  TnpB Polypeptide
MNRVYKFRLYPSRLQETLMHKHLWAAKNLWNNSLGATKQLYGCFGKFLTRRTLAQLGKDSGLYSQVAQRIIVRLVLALDAVSRRKKTGGTVGFPRFKNIDRMKSLCYPQSGFKFVGKNLQVTPFGEINIKLHRSIGGKVKTLTLKRESSGKWFAILCVELPDVEFKSNGKPSVGIDVGLKSFAVLSDGSKIMNPRLFERAQGRLAVAQRQLSKKSNGGKNRWKAKRSVARIHEKVTNTRDDFLHKLSHDFVVGYGLIALEKLDISGLKEKNFGKQISDASWGKLSNMISYKAAGAGCKVVFVEPRGTTKKCSQCGQQKEMPLAERVFSCDLCGHQEDRDVNAAKNILAKATAGVAGSNACGVGMLIPTAKQEALSQRIV

SEQ ID NO: 23611 - protein, 407 aa, unknown
  TnpB Polypeptide
MIMATKVKLYPNEAQKVLLEKHFGSCRFVYNYFLAKRDEYYLTHKDAEKSSLNYLDTQNMLIELKKQYPWLYEVNSQSLQMSLRSLDNAFKNFFHKNADHPKFRKKGKNDYFAIPQHVKIEKNRICFPKFSEGIYFKGSKKKLSEIKEINQMVVTKDAGDYYCSIIYEKEDNAPERKPLSAENSVGIDLGLEKFATLSDGIVIENLRFIEKVEKRIKRLQKWLSRKKNGSNNRKKLVLRLQRRYRKLRNMREDFLDKVSTAIAKQYDTIIMEDLNVQGMQQNHHIAKSIGDVSLYSFKQKLLWKADKYGKNLVEIGRFDPSSKLCSNCGNLKKDLKLSDRIYHCDVCGVTLDRDYNASRNIRKMGLIKVGLVQPESTPVETATSGLRGIYPYRQMSGRGSRKLRGFS

SEQ ID NO: 23612 - protein, 518 aa, Streptomyces sp.
MQLTPGDEKVLRLVGGHLGSLASKEVKARCRDGLEHSTEAWAVRKRELTPLSSSRWAGSITKATHDQWALARRCQLAHIQSLEAGIRTIEDRLALPVGQKGTKNTPGGYRSPREWHAKARRLRVLEDRLTTARADWEAGVVHITRGGKQLARTRHHLDAAGLTEPAWRGRWEAERWFCQADGESGKRYGNETIRVSPDGEVSIKLPAPAGYLANAPHGRYVLACKIAFAHRGVEWADRVVADRVIAYRIHYDTGRGRWYLPASWQIPPAPTAPIEAALVHGVIGVDMNADHLAAWRLDAHGNPAGSPRRFFYDLTGTAQHRDAQVRHALTRLLHWARTCGVKAIAVEDLDFAAEKTREKHGRRKRFRQLISGMPTGRLRARLASMADQTDIAVIAVDPAYTSRWGAQHWQKPLTSTTRKTTRHEAAAVVIGRRAQGHPVRRRTAPPPHDRSDRAGHRTVQAGSGVAGREGTRPRIPGPRTRSVPPGCGANAGNQNAQHRPGRSAEHETWQQDSLPLSP

SEQ ID NO: 23613 - protein, 421 aa, unknown
  TnpB Polypeptide
MLSTRRTYRCRIQNHSQVGGPLDRHGWSASKLWNVANYYARQQWDETGEIPDEAELKHELKTHPKYNGLHSQSSQKVLEELSEAFSSWYGSDDDWDNPPGYRKRNYYDEDGNRVHEEHPRATVTWKKKGIRHDTKHNRLRLSKGKNHKDGNDFILCKYQPPPAVDVENIQQVRAVYNARKGRWELHVVCETEITAESPGEKTAGVDLGICNPAAVAFPDDALLYPGDTLREDKHYFQQEEYQTDGPYGPSQKAQWARETLSRRKEHFLHALSKDIVERCVDHEIGTLVVGDPSGVDEDDWGRHSNKRLDNWAYKRVMNLLDYKARERGIEVELPDERGTSSSCSVCGHEDADSRVERGLWKCDRCGVVAHGDVNGADNIRQETLPVTPPLGKGDSGNGCLAQPRVIQFSRTHGFQPRATAE

SEQ ID NO: 23614 - protein, 308 aa, unknown
  TnpB Polypeptide
MLKGIKIRIYPDKEQEKLLLSYCKDYHNMKNFLVAKFKDNLPNVVNNNIIGYKDRDLLQEYESEYNCKTEMLIRSVRGAITDYVSGVKRFYHKLSSKPPKFHKYDPNKQSFYIVDRVYKISQSKINMPINMSCKNKYKTISRKIPIDRKYATKENLTYLKDVRFKYEKGKWYVSGCYDVPDVSIKEDKEFLGLDWGIKNFMTTSESTLINYPKEVVREYYRIRKLQHYLDKKVKNSNNYKRLKKKFDKAYKRMNGLKRNFIHQETTKLARQYHIVIEDISWNQISKDKKGKKRKFIRRMSMIAPKIYV

SEQ ID NO: 23615 - protein, 417 aa, unknown
  TnpB Polypeptide
MYISITILIKPNHCLYRIIDEYAFRCKNLKNAVLYHYRQAFFAGASINAFSLMTDFAHDNQVDYRAIPSKVAQQTILQVDREFKAFRGLLKQWELNKSLPKPQLPRYLHKSNGRANVIFTLDGVSKKFFKNGILSLSPFDKMKKIQISLGKISSKLEYDSIQQVRFVKVANGYECKIIYKKPVLEVKNDNHRYLAVDFGINNLMAVGSNVIEPVLVKGHVLKSFNRYFNKRKAELQTMLDTTKNEQQRVGLQRKIDCLSQKRKNKVNDFLHKASSWLINHAVSNNINTLVIGYNKGWKKDVDLGAVNNQKFVNIPYYRLLAMIKYKAALIGINVIVTEESYTSKCSFLDTEDIRKHDVYKGKRIYRGLFKSSSGKIINADINGALNILRKVIGNFNFDPILAYATPKTVNVLKIDEC

SEQ ID NO: 23616 - protein, 416 aa, Lachnospiraceae sp.
MHLTVKQQVKHLSKENYKTIKELCHIAKNLANEAIYNVRQYYFAEGEFLKYEKNYTLLKNSPNYKALNSNMAQQILKEVDGSFKSFFGLLKLAKQGKYAFKDCRLPHYLPKDGYTTLVIGFIRLNGNKLMLPFSNSFKKTHKAVEITIPPILLDKKVKEIRIIPKAKARFFEIQYIYEAEYVQRNLNTNNALALDLGINNLVTAVSSNGRSFIIDGRRLKSINQWFNKENARLQSIKDKQNFGKRTTNRQKSIARDRNNKVNDYMNKAARKVIDYCIANDIGTLIVGYNKTFQQSSHIGKRNNQNFVNIPYGHLRSKLEYLCKLNGIIFVKQEESYTSKSSFWDKDDIPVYNADNPREYQFSGNRIHRGLYKTSTGKTFNADVNGALNIMRKSSVVDVSILYGRGEVDTPVRIRIA

SEQ ID NO: 23617 - protein, 454 aa, Escherichia sp.
  misc_feature (89)..(140): Xaa can be any naturally occurring amino acid
VKRLQAFKFQLRPGGQQECEMRRFAGACRFVFNRALACQNENHEAGNKYIPYGKMASWLVEWKNATETQWLKDSPSQPLQQSLKDLERXXXXXXXXXXXXXXXXXXXXXXXXXXXXXXXXXXXXXXXXXXXXXXXXXXXXAYKNFFRKRAAFPRFKKRGQNDAFRYPQGVKLDQENSRIFLPKLGWMRYRNSRQVTGVVKNVTVSQSCGKWYISIQTESEVSTPAHPSASMVGLDAGVAKLATLSDGTVFEPVNSFQKNQKTLARLQRQLSRKVKFSNNWQKQKRKIQRLHSCIANIRRDYLHKVTTAVSKNHAMIVIEDLKVSNMSKSAAGTVSQPGRNVRAKSGLNRSILDQGWYEMHRQLEYKQLWRGGQVLAVPPAYTSQRCAYCGHTAKENRLSQSKFRCQVCGYTANADVNGARNILAAGHAVLACGEMVQSGRPLKQEPTEMIQATA

SEQ ID NO: 23618 - protein, 389 aa, Streptomyces sp.
VKLVVRVKLLPTPEQAAALEATLRACNEAANWLSVRAFEHGRTSRSALQVLAYAALKARGLSAQPALHVLRKVADAYTALKANLKAGNLGKRGSKRNARAAGKPVVFQSDAAQPFDDRCLSWQMDGSTVSIWTTSGRMKGLIFTGQAEQLALLAACRKGESDLLLKDGRWYLVATCEIPEAALNTAPEGFVGVDLGIVNIATTSTGARYSGRHLNRQRDADRRLREKLQKKGTKAAKRRAKRHAGKEARRVSDINHKISKCIVAEAQRTGRGIALEDLTGIRERVRLRKPQRVTLHSWSFRQLGTFIAYKARRAGVPVVYVDAAYTSRECSRCHHVDRRNRPSQAVFACQACGFVEHADLNSSHNIAARGWWTWVRGAESQASVLTLTA

SEQ ID NO: 23619 - protein, 392 aa, Tolypothrix sp.
MLIAFKTELKVNNKQRTELLKHSGVARHAWNWGLALTKQILLHNKLNPEAKIKFPSAIDLHKWLVALVKPEYPWYYKISKCAPQYALRNLRIAWDRCFKKVSGVPRFKKKGRSDSFELDGTIKIRSTHCLQLPKLGILKTYEGLPQVQPKSVTISRIANRWYISFRIEVEPTNTPKLVIVVGFDLGVKSLATLSTGVVFEGAKSYRRLEAKLSRLQWLNRHKQIGSANWKKAQIKIARLHQRIANIRKDTLHKLTTYLAKNHGLIVIEDLNVSGMMAKRKLAKAISDMGFYEFRRQLEYKTKLYSSQLVVIDRWYPSSKTCSHCGVKKESLSLQERVFKCEHCYAECDRDLNASINLKKAASHAVSACGLGSADTSSVKREDFSLLANVSKL

SEQ ID NO: 23620 - protein, 490 aa, Mycobacterium sp.
  misc_feature (358)..(441): Xaa can be any naturally occurring amino acid
VRPAVRQARCAEPGQARIGGRRRRVGGCLMAKFEIPEGWMVQAFRFTLDPTAEQARALARHFGARRKAYNWTVATLKADIDAWQATGIQTAKPSLRVLRKRWNTVKNDVCVNIETGVVWWPECSKEAYADGIDGAVDAYWNWQNSRSGKRDGKRMGFPRFKKKGRDPDRVTFTTGAMRVEPDRRHLTLPVIGTVRTHENTRRVERLIAKGRSRVLAITVRRNGTRIDASVRVLVQRPQQPKVTDPGSRVGVDVGVRRLATVATADGAVLERVPNPRPLDAALNELRHVCRARSRCTKGSRRYRERTTEISRLHRRVNDVRTHHLHCLTTHLAKTHGRIVVEGLDAAGMLRQQGLSGAXXXXXXXXXXXXXXXXXXXXXXXXXXXXXXXXXXXXXXXXXXXXXXXXXXXXXXXXXXXXXXXXXXXXXXXXXXXXXXXXXXXXASSAQLGPPSSVEPTVRPGLAGLVAVKRGREAAARLPNNPETGCKSRDH

SEQ ID NO: 23621 - protein, 440 aa, unknown
  TnpB Polypeptide
VKTTITAKLKLTTTPDQFAALRQTQLAYRDALNYVSAYSFAHGKTSNSTRLQKATYQDIRTRCTLPAQMGCSVPRQVGATYKALWTKARQNTEARRLGYTKCRFKGLDNAPHYVSPTLIYVYGHDYSLKTEQRVSLLTRSGRVIVPYQGYHKHVALMRETAEIGEAKLWYDRSRKRFYLLVSLTVETPDPRPEDHARVVGVDVGQRYLATVATLDNGAEFYSGKAIRAKADHYARLQKRLQRKGTRSATRRRIAISGRERRLKLDTNHCINKRILDTHPHSCIGLEDLTHIRERTKRKHGQKASKQQRRANRHASKWAFAELHAFLDYKTGLAGSLCVKIEADYTSQVCPKCGYTSKENQPNKGLLFVCRCCHYTLHADLVGARNISLRTLAIWQDWMATGQLSDAPNVTDNEAKAARLARYAELRWSPATSSPPKDGSI

SEQ ID NO: 23622 - protein, 371 aa, Bacillus sp.
MAKQNKAYKFRLYPTEEQELVIRKTFGCVRFVYNKMLAERKEAYEKHKDDKETLKKVKHPTPAKYKKEYEWLKEIDSLALANAQLNLDRAYKVFFNGNAKFPKFKSKRHKQSYTTNVVNGNIQLLDGHIKLPKLKMVKIKQHREIPSEYKIKSCTLSMTSSGKYYISILTEYEMEIKNKEIEKVVGLDFAMEGLFVDSETGKKANYPRFYRQMLDKLAKEQRKLSCKKKGSANWNKQRIRVAKIQEKVANQRKNFLHHKSKELVSNFDAVVIEDLDMKGMSQALKFGKSVADNGWGMFTSFLQYKLKEQGKLLIKIDKWFPSTKTCSSCGSVKEMRLSERTYQCTCGLNLDRDYNSALNIKNEGIRLLATA

SEQ ID NO: 23623 - protein, 381 aa, unknown
  TnpB Polypeptide
MFRTYKYRLRPTLSQETTLLSWLDATRELYNAALQERNEAWKKQRKSISKYDQQAQLAAIREARPDVDVPVTAQRGVLGRAEKAFAAFFRRCKTGGKAGFPRFKSKKRWDSIEFENKPATKLIRDKRVVVPKIGLVRISLHRPLEGTPKTLTLKRINSKWYAFIGCDNVPKKTLAPTGREVGVDLGLLSFVATSDGETFKNPRPLRTARRQLERAQRRVTRRKKGGARRRKAVALLGKCHARVANIRRENHIKVARSLIFKYDTIYIEALNIKALSKSGLAKSISDVAWSTFKHWLLCKAEEAGRVVVEVDPRFTSQTCSGCGKIEKKALSTRVHECECGLTLDRDINAAINIKRLGSSLRREALVVDRPRRPEKLSEKAR

SEQ ID NO: 23624 - protein, 381 aa, unknown
  TnpB Polypeptide
MFRTYKYRIRPTKSQEATLLSWLDLTRELYNAALQERNEAWKKQRKSIGKYDQYAQLAAIREARPDNNVSIVAQRGALDRVDKAYAAFFRRCKAGEKAGFPRFKSKKRWNSLEFENKPAKDLMRGKRIFVPKMGLIRVSLHRPLEGTPSTLTIKRENGKWYAFIGSADVPEKPLAPTGQEVGIDLGLLSFVATSDGEIFENPRPLKTARLQLKRAQRRVSRRQKGSNRRRKAATLLAKRHARIANIRRENHIKTARSLVSKYDTIYIEALNIKSLSKSRLSKSVNDAGWSYFKNWLSCKAEEAGRVIIEVEPRFTSQTCSGCGRVKKKSLSVRIHECQCGLILDRDINAAINIKRLGSSLRREALVVNRPRRPEKLSRKAR

SEQ ID NO: 23625 - protein, 261 aa, unknown
  TnpB Polypeptide
MMATSEQELLGTDLGKYFSAIADKRGKNSEGRNRMYALFRSLLKKSGKNNLAKAERIRKHNLGRKKQRARYIRDIGVIKTVVNRELNFLFTRKTNPVKAIVVEDLSARMKAHFCKKWNRWLSGWMRGYLQERIRYKAKKHGIEVNEVNPAHSSRECPRCHCTDKKNRQGDVFKCSYCGYHEHADLVSALNILGRLGDKEIRKGMSPSRVKAVLDGRHVGWKLLNDTVTDRTSDEARVVDESPRSASSKSELRSGVQVCTAS

SEQ ID NO: 23626 - protein, 389 aa, unknown
  TnpB Polypeptide
MHKDLYNAALSNRKTQYERFGHAVDYFEQQNSLPAFKEVWPEYIELGSHALQATLKRVDTAFKRFFNGLGGYPKFKSIRHYSGWTYPDKAGWKAHTIGNNGYLDLSKLGQIQLRGKAKTWGMPTTCTIVYRNGKWYASITVNCEPESRELGKGAIGVDFGTKTAAAISYGENGYFIDNPRWFQKMLPLIKKASKEKRRKRAPNRKKKVKASRRYKKAQKKVSKLYNKAANLRQNWVHHQATQITSGNSLVATEKLEVNKMTRKAKKDSKRKRQKAGLNRSILDVGWGMLTQAIKYKLEEGGGVFVEVPTRTVKPSQRCPKCLDVKPKTLDIRIHHCQTCNYIQDRDLASAEVMLLWATNSGAFGTSVLRRGVTGSTASNKERKHCGSMR

SEQ ID NO: 23627 - protein, 486 aa, Bacillus sp.
VTEGISESKNYSTHQIRVKKGHKMYPYFQQMTQNAKNLYNTTNFYIRQVFTSFTQEKELQPLQQEVVDTLQQNLQPMNDIQIVAYQKKLKIQQKKPKEKQKEVKLNEFVTPTKDNPYVDYNFLDALFKRIGQPDYRSLPTQSSQGVMKVVFQNWKSFYASLADYKLNPTKYKGRPKIPKYCRSEEKEILFTNQDCVIKNNKHLKFPKTKERLNIGKLALSEGKLKQVRVIPKHHEYMVELVMEVQSEQEILVDNGRYMSIDLGIDNLATIVTNTGRNPVLIKGQNIKSINQYYNKRKAHYLGILRHGKQPSEGIFTSKRLEKLHQTRSFKIKDIFHKASYRIVQIALNENINTIIIGQNKEWKQQIHIGKRNNQSFVHIPHSLLISMIEYKAVRNGINVIVTEESYTSKASFLDDDVPTYGECSNKIQFSGKRIQRGLYRTERGLLINADVNGAANILKKVLVKLKDKQEFKVETVQIWEPQKMII

SEQ ID NO: 23628 - protein, 384 aa, unknown
  TnpB Polypeptide
MGKDKLMITYKFRAYPTPTQESLLTEISVIEAQIYNEMIKRITDLKATEKDLRQVIHELENLWKGKIYSKAIYAIEERLLYNLKGLARLKKKGKKVGVLKPKESFSYLFYRQHGFKVTIEGVEFSKIGKIKVLFHRPIWGKIKGVGLVKDKDNKWYVYVVSELNPKQLSKSNKVVAVDWGIEKLLTTSDGIAIENPLILDKLDEKIRRLQKALSRKKKGSKNYEKTRIKLAKLYKYARNLMNDYLHKVTTWLIRNYDIIYVENIRVERLIQINYAKKLRRHIFNASYYKFLELLEYKAKLYGKQVIKVSPKNTSKKCSRCGYINKKLSLKDRTFKCPKCGLEVDRDYNAALNILNAGLGQPKVPVERKPLQYIAFSEGVYSKFP

SEQ ID NO: 23629 - protein, 310 aa, unknown
  TnpB Polypeptide
MQLRYNYRLYPSPGHRQALARAFGCVRVVINDGLRARQDAHAAGQPYITDAQLSARLTAAKGTPERAWLGEVSSVVLQQGLADLNTAYRRFFDYHKALREWKAAGRKGPRPRQVGLPRFKSRKDRRQAIRFTANSRFKILPDGRLRLPKIGDVEVRWSRGLPSAPSSVTVIKESTAIIRETQAVYVEDLCVAGLGRTRLAKSVHDAGWSAFTAMLEYKARKHGRTFDRIDRWEPTSQVCSACGVKDGPKPLSVREWTCAACGAVHDRDVNAARNILALGRRERLNACRGGVRPPSAVAVAGETGSHRGAA

SEQ ID NO: 23630 - protein, 310 aa, unknown; identical to SEQ ID NO: 23629
  TnpB Polypeptide

SEQ ID NO: 23631 - protein, 258 aa, unknown
  TnpB Polypeptide
MWVGISVLKKGKRVYLPIKLYKYANNFLKDWELVQGCRLNRNRKGWYLSLTFRASPPILPISKNMGVDIGYRKTVTTSEGESIGKIKTLCEKCARKKQGSLSERRTKEEIRNHIGRVTNQLIDGNSNIIVEDLKHLKSNKKGKWSRSTNRKFNSWYYPLILRRIRNRCEVVGVQCHSVNPAYTSQDCPECGHRDPKNRKNEVFLCTKCAYSADADYVGARNILSRFLWRSQELIVPVVSNQEQQFDLGPIGVRYQPVL

SEQ ID NO: 23632 - protein, 194 aa, unknown
  TnpB Polypeptide
VRRAFKYRFYPSPAQATEFARTFGCVRLVYNLALQARTEAWVRQERVNFNATSAMLTAWKKTEELAFLNDVSSVPLQQTLRHLQVAFTNFFAQRARYPTFKSKKRSRRCAEYTTSGFRYREGRLTLAKMAEPLNIVWSRPLPEGACPSTVTVSQDAAGRWFVSLLCDDRIEQAPAEGVVGLDAGLDSLLTLSTG

SEQ ID NO: 23633 - protein, 475 aa, unknown
  TnpB Polypeptide
MKCRILVLHKEVNQGKVARLEALHAEYVSYVRICVQAMLDASRLTLPKSEKQAFFPRAEHLTSQIEKNARDHAIDMVSTWAKGVYARKMKSTITNLRREGSITEEDAKAFYVIGSRLIDRPWKFITQGHLDAYRAMLDAYGGNPPCVKPSLPMRLSEMTARLEDPDEATTADFWLRVSSLEARQSIWLPLVGSPYVQHAVQVGKGISARKTKLGRWRFEVVDKSAWEPPVLSQDAPKLGVDVGLNVLATTSDGCLYGEAVKPRFDNLYARLMRLRGNRQRQGLRENSRRLDIMESGLSGFVKTETGCIVNRLVKRHPGTVFVIEDLDLSGCKGQKRFAYRALSTNLERKAVVQKVNPAYTSQECPSCGYVSRSNRSGVKFTCRSCGRKAHADWVGASGILRRSEDKGIRCADHPPLLWQERRQRYNLRRRGHSSSGPVPTTAPPPLGLSLTTGGSGFLDTGTGSNSGAARASSRF

SEQ ID NO: 23634 - protein, 522 aa, Crocosphaera sp.
LSKVTYQSKLSDKVAPFCEAMGQLFSKVERDLYKDLAKGEKLKDLKRNYQVKYSINARQFNSIYANLKGKISSRKECHSREIKEIKSRIKGLEKKIYTLTKKLRKTYPSCGINGAKSERGYLKWLLHQKKRKLSTNQLRLESLKNKKYSFIFGGKKLWKSQYNLEENGYNNHEQWLTDWQQTRSSQFTLIGSKDESSGNQNCQLSLDEMLKIRVPKALENQFGKYYLIEEINFPYGQRDVNYALAFNKALTFRFVKKEKGWYIFVSLDLPETPTLSSKRNGMLGIDLNPKVIGWSYCDLEGNLIDHGQIKINIQDKNKNQTLAILGDACKLLVEIGRKYQCPLAIENLDFSRKKASMTELGVKYSRMLSNFAYSCFYQILVSRGRSWGIEVIKVNPAYSSLIGLTKFMSLYGLSSDTAAGLVIARRALRLSERIPPKYARLVQVDSHRHVWSWWNALSKKLKGISRHSFFSSGANSPLEVNPYDEFLEQSRDRSIGKPQGTSRLRRDSSAPVDNAVRSTSPT

SEQ ID NO: 23635 - protein, 467 aa, Paucisalibacillus sp.
MLYNRKIKLQTTKEQQLQLDGQSKICNWLYNQLFQMAEEDYQNGKPKKLLSGRNLRNEVPKIKQNHPFLYKVHSSPLKNTALRLKEAYNRFFDPKLDNQKPKFRSWKKKWFSLYYDEPNKGFKLLNEQELSLTFGRLTGEEYEELNKKDRKAKKQITIKITLLESLVLNENECIKTMRITKDLSGYYAVFTIESLQKKDMVTEESYIVFDPNHKNLAVGIDNEGRSYELKALSSTLKYWDKRIDQLKSKRDKCVRKSKLVQTPYSEYWKPSRRWEYLNRALERAHLTRREQIKQVLYSYAHYFNKKYDHILIGDYVPTPDVAKYGSMKRAMLNQTPIGQFRSILEWVQEKNNKYYTKVDETNTTKECCVCGHKEKKEPHVRMFTCKNCQTTLYRDMNSVVNIGKKEGKLLPRSGYVGVENPMYTVWWDWKRQNIVRGRFRRLAGVCESPGEIKENSSVEEESLLNTV

SEQ ID NO: 23636 - protein, 578 aa, unknown
  TnpB Polypeptide
MAFGSKNSTPSFVLTLPLDISLNEQDYLYKEFKKCGVIYNQLVSATTKMWHQLRKTRKYRELMAAIAKATPDSDEQKTLFKQREKMLKEYRFSEDAFHKLVVPYAKHYAINSHIAQAVASDVWKAWSTFFFSKGKEVHYKRLDDLAAISGKNNFTGIVLRPANLTTSNIESAKRKAQKAVEKRYDDMYGRPDPKDDKKVVLPDEVKPQMEAEIAAAIAKIKPTIGEGNLRIVYGKHEFPVVLRNPKTQTGKYQQEALKCGVKYCRITRKWVKTKWKYYAQFILEGYPPTKCDGNGVMRHSVNQGRVGLDIGTQTLAISSNDICDLRVLAPSARAQAKSLVNEITCTMRAMDRSRRATNPKYYNPDGTIKRLKRQHGQKQRRDWKYSKRYFRLKAKLRDLNRRLADIRKMEHNTLANELLQHGNEFIVEDMDYKALQKRSKKTKINPKTGRAYTKKRFGKSIGRCAPALFITILGQKASRYGGSVIKVSTFETKASQFDHTDDSYTKKKLSQRFAKLSNGTVVQRDMYSAFLLTHLDESLQGYDKEAIDKDFQQFMKLHNETKERLQNSHEWLPASVGF

SEQ ID NO: 23637 - protein, 395 aa, unknown
  TnpB Polypeptide
MIISYKYPIFPDKISQWKLAENLDACRWLYNQLLQDLSEAKEKGIKLKTYDTQNMIPSLKLINPKLNLVYSKVLQMVNYTLWSNIKGLSASKKNGRKIGHIRFKGYGWYNTLNYNQSGFKIDQDHGLLHLSKIGDMRIKLYRKIEGSIKAVIIKREGKRWFAIVQTDQESNLLSETGEAVGLDVGLTSFVVDSEGNDIENPRCSEQSADKLAKLQQKLARSEKGSNNCRAIKYKVKTLHKRINCQRDDFLHKLSRTYINNFDIICVEDLDVKGLKEMSHNTGMHRSIHDASWSKFIFMLSYKAQSAGRKLIKVDPRNTTQRCSACGSIVKKELSDRVHECPYCGFSCNRDYNASRNILITGMEQPVAPIESKPLHQISVMQVLAMKWEAVPFKTR

SEQ ID NO: 23638 - protein, 395 aa, unknown; identical to SEQ ID NO: 23637
  TnpB Polypeptide

SEQ ID NO: 23639 - protein, 469 aa, unknown
  TnpB Polypeptide
LVHRTATVRLRVTRRQAGRCYGLLRSAGDVWAWLLDSNRQRRQQGEQPVTGYRALCRQLTSAGPFGELAVTGARSVLHRYSDAWFQAAKRRKADQQAGFPRRKRSLVPVRCYNGTFTIQGRRVRLPVARGCPELWVRLARPLPYLPEQVRAVTLLHDGGQLWLAVTAAIPIQQDHDLDPGSVAGVDLGIIHPYAVVTEDAGLLISGRALRAENWLHLEDQQVRQARAARRAPKRGQRGSRRWRHHRARVRRVEARHRRRVHQAHHEAARQVIAFAVQQRVGTLVVGDLAGITNHDAGRVQNLRLRQWRRTHLLLALRDKAERAGMVVRLVDERGTSSTCPACHRRVAKPKGRRFACPHCTFQGHRDLVGARNIAAKAGGGPTSTGLPVLVEHRRAGIVPARRDRRRHLYDRRRRSCLASGHPPDDPASRGCRSPRVPDLAPDEDQAMLPIRATLPEGVHVQVVALGPGN

SEQ ID NO: 23640 - protein, 470 aa, unknown
  TnpB Polypeptide
MPRKRAPDAPRVVYRTARCGLRATAGQQRRLFGLLRSAGDVWCCVLELNGWRRLRQDPPLAGYQELCRELARSGPGTFGELDTKGARSVLRRYSDAWFAAARRRKAGDTSARFPRRRRGLVPVRWYAGTFTLAGRVLRLPVARGCAPLVVRLDRDLPYPAEQVRSVTLLYEAGRLHVDVTAEVPVAAYPDGEGPDPGRVAGIDLGIIHPYAAAEPDGELLLVSGRAIRAECRQHLREAKARRRAAARRAPRPGQRGSRRWRQHRRRQQAAEARHRRRVRQAQHEAAKTVIGWAVAHRVGTLAVGDPRGVLGLAAGRRHNQRVRAWRVGHLIRALSDKAQAAGITVTLVDERGTSSTCPACARRVPKPAGRVFSCPHCGQGGHRDLVAAANIAARAGSGTIPALPGAGITHRRAGAHLPGVHPARRDPRRRPHRGPPHGPLAGTGPPRPPHKRPAGSRSPQREEPGIHHSI

SEQ ID NO: 23641 - protein, 397 aa, Cyanobacteria sp.
MIVLEFKARAKPAQASAIDEAIRTAQFLRNKALRYWMDNKGVGKYDLNKLCKELAEEFPFAKKLNSMARQASAERAWSAISRFYENCKAKVKGKKGFPRFKKHARSVEYKTSGWKLIGPKRIKFTDGFAIGELRLIGTYDLAHYDESSIKRVRLVRRADGYYVQFCIQVDSPTVESEPAGSTVGIDLGLRYFIATSGGEVVAVPKFYRQAEQQLSRANRRKSRKFRKGVKPQSKNYHKARKRYALKHLRVSRQRSEWLKNQALRLCQSNDLIAYEDLNLKGLVKNRRLAKSISDAGWSTFRRWLEYFAGKYGKVAVAVPPHYTSQNCSSCGERVKKALSVRTHKCPHCGYEADRDLNAAINILQLGLSRAGQARTLTLGEIEPLAELEESCLAKSSQ

SEQ ID NO: 23642 - protein, 519 aa, unknown
  TnpB Polypeptide
VSADPSLDDAGKRQARRDGLNWRKKELTALSSARWANAIVAANDGQYRLSQDAQDRHIAGLRTAIAAIEKRLAQPTSDTLTPEERAARKKGRSLSGYSTQAQRFAKQRRLQSLRAELTRVTADRDAGRVRVTVGGRRLAKTRHSLQATGLNVAAWREAWEAARWRIEAIGSGDEPFGNLTITVTSGGEVSIRLPRPLEPVANAKRGRYVLSGTARFSYRQDEWLDRITGGKPVSYTITSRPGGAGVYLTAAWAAKPESRVPGTPDEDARADGPVMAVDLNDGHLAVRRLDPYGNPVGRPERIDFALTGRSSRRIAQVRHAITRLVRHTQRHGIGTIAVEDLNFADARQAGRETMGRGQRGRRFRKTVAGIPTAAFRDRLAAQTHRHGIRLYAVNPAYTSAWGTQHWRKPYNNVTRHEAAATVIGRRAQGHKARRREGVTCTRPEDRAVRATDQAGPSESWVTADSRHRPGTRGTESRPPRRTRTRLAARATVTPAPTDIQRPTQEVTVSMPRTRPGMRD

SEQ ID NO: 23643 - protein, 381 aa, unknown
  TnpB Polypeptide
MRTYKFRLYPTKKQEETLFKHFDLCRFIYNQLLAELSNNNTEKHIFHYITVLKKKQPELKQVYSKTLQNEAKKLFSNFKKLISMKKKGIKVGKLRFKGQERFKTIHYNQSGFKLINQNTRYNILHLSKIGDIKILQHREIEGKIKSIIIKRKTDSWEAHIVTDSKYQLKKGNNIIGIDLGVTSFLTDNNGNKISNPLYYKQSLEKLKLLQQNLSKKKRGSNNRYKTKIQITKLHEYIVQQRNDFLHKITTKLIKENKFMGVEKLDIRNMKISFYNSRNINDSSWGKFLSMLDNKAESAGCQVVKVNPVNTTKECNKCGNIQNMPIWQRQYNCQRCGMSMDRDTNSAKVILNRALEQGTVETNNSLSVKQEALTSRVVHKLI

SEQ ID NO: 23644 - protein, 404 aa, Sphingomonas sp.
MKKAIRKVTYRMYPSTSQEASLMELFVHHHQLYNWALRDRIETYREFNYGLSFSEQCKINTRWRNNRNSHGLFNANAQSEQVTLKRVALAFDGFFRRLKKGDKNAGFPRFKPFQRFKGWGYKTHGDGWKLHLKTKKHGAVYLADVGIIKIRGKARNENGIPKTSEIILKNGEWFISVSFEYEQIKRKCGTKAIGLDWGIEYYFSIVDHKGNFEQIENPRYLKQSKALLTSLQRDLSLAKKGTRTHRKLKSKTAKLHQKIARQRLDFTHKQTSKLVEVSALIATEKLTVKNMTCSAKGTAKKHGKNVKQKAGLNREILNTAPAMTLNLLSYKAAEAGSEYVEIPTRQVKPSQTCPNCGAKKKKSLAVRWHSCSCGCELPRDVASAQVNLNWALGIQAGNPPKKVT

SEQ ID NO: 23645 - protein, 414 aa, Opitutaceae sp.
MVRPIEAETVRLKAYRFQLQPELAQAASLFAWSHALRFLWNWMLAQRRDAFRASEGRVRVSYHHQAAQLPPMKAVFPWVGLVPSQALQQTLLQLDRAYVNFFEGRAKYPDFKRRSGAAPGIRWPQGVEINGRCVWLPKLGWVKARMSQRLEGIIKNATVRFDGLRWHVSIQVEQTVEVPAKRETPEIAIDLGVDESIAVSDGRFFRLPVASKAEERRHSTLCRRVSRCVVGSRRHARAKRRRLVFVRRIGNRVNDARHKITTTLAKNHGRIVGEDLALRRLTRSARGTVDVPGKNVALKARLNRALLGQGHAETVRQLAYKLSWCGGELTKVNPAFTSQTCPHCGHVCAQNRPTRDRFSCVACGHNSHADTLAARNILAAGQAVSARGGSREPAKREPTRLRRSLRLSAGIPAL

SEQ ID NO: 23646 - protein, 431 aa, Thermococcus sp.
MRRAVTVKLQPSKEQEKTLFELADTGAKVWNRVNYLRRREFFEGKPVDFLKTEKIVYEEFKKEIGSATVQQICRKNAESWRSFFSLLRKRRNGELPEWLKPKPPNYIKEGGLIVLRNDQYRIEDNRLILKGLGKFKRLEVQFKGRIHFKGKQGRLEITYDTVKQKWYAHVSFTVEKKLVNDKWVRVPRRPLGNLSAGIDLGVNNLMAVYVENGESFLVNGRPLKSIAFYWRKRIAEYQSKINKSGAKKSKNLKRMHEKAKLQARHYINTAVRQTLERLYQLGVGRIVIGYPKGIARNSEKSRKQNFLLSHVWRFNYVIKRLKEVAEEYGIVVEVVGEAFTSKLCPVCGKPHEGARFVRGLFKCPVTGLVFNADLVGAFNILRKAVKTITPSLSALAGGRGNWPKTWPEGSKTQVSLGFNETPQTSPSMVRG

SEQ ID NO: 23647 - protein, 413 aa, unknown
  TnpB Polypeptide
MQRTNTFDIVPQSEPTEEILVRVLDASASLWNTLTYERRQQFFEGESVWECDGYYDEYVDVLSGATTQQIVRVNDTAWRSFFELLDDPEYDPSPPGYWGNRDDGRKLRTYIRNDSYTIQWNSRSRLEIRIGMNLKDEYGYGMYERLRLPVQGNPKWRGDNGRLEIAYDSVEEAYRVHQSVTVDEVEENEPDGSEAAALDLGANVLVACTITSGGQYLYSGQTPFEQFRKTTEEIATAQAKLPDGQHTSQRIKRLYRKRSRRRDHAVNALFRDLIERLESAGISTLYHGDLTGVLGEYWSVEANLKTQTFWAHRQCIDRLESVCEEYGINVETLSEAWTSQTCPDCGDRERTRRHRETLTCPCGFDGHADLVASRTLLAEATNTEVRPTARPVRFQWDDHQWYPVEGAAVTPNE

SEQ ID NO: 23648 - protein, 445 aa, unknown
  TnpB Polypeptide
LKSFKTFSTVLEDDNAKEIIEYFEETAGSYGCLKRSTLHILRNCPEISRNDLNKLLQERFSVTTRTANSAIYEVEEIIDSALALIPLNIEKLEAKIEGKIKLIEKKRKEMVKIHASRKTNAKRLGKLKLHIYNIHNSINRMKQKIENLERQLNEKKPDICMGTKKLARNDIKAFKLHRDSQINYIGRAREKQGNLNFQMQYIKKGNFFTMKVRRDFGKWKDDRSPERFAYGKCHFKYGSRQLRDAMKGNASPVTVSIIRKNDRYYLFVAVVVSYENSRIVTRKEHGVIGIDFNKGFINICETDEKGNIVNIEKMKYPFGKAGNTNAGLADVISKVCKKAVETGKSIVAEDLSFERKKRETKKAVTPTEKERMRMLHSLPYSRYAQILGNLTFNRKIELIKVNPAYTSRTAEQKFCDQMKLNIHNGAAYVIARKGMGIKDSLKKTG

SEQ ID NO: 23649 - protein, 415 aa, unknown
  TnpB Polypeptide
MEKNRKIKLVRQIIYKRNDPEYEEMDELCFKSKNLYNATLYTVRQSFIKNGEYLNYNRINKIFTEENNVDYRVLPAKVAKHTQMLVDFAMKSFFALVKKKKKEGYDKNVKLPKYLDKTKGRMTVHYERGALSFKKRKGYIHLSKTEIYIKLPEELNENDIKFVRIVPGSGKFTVEIGFERELEPQIMSGSYASIDPGVNNLVTMVDTVTKNPVIINGKPLKSINQWYNKKIAEMRSETEKLHGKYWSKKMSGVTNRRNNKIKDYMHKASAYIVNHLVSNRIGTLIIGESKEWKQDTNMYKINNQNFVCIPFEMLKSMLEYKCKLAGIEVVRQHEAYTSKCSFLDNEEIRKHEKYKGSRPKRGCFKTSSGRKVNADVNSACNIMKKYLLKVAGNCTKLLHELAEVFSTPCLKIKTF

SEQ ID NO: 23650 - protein, 471 aa, unknown
  TnpB Polypeptide
MLMLTKTIKQYSFPFEKTKDLNFERLEKLGYEFRDTKNFFYSRFSGISYINKLKDKYTIRNEIIKENLKNISKIPARYWKICLSHVLGNIKTLFENTKKLIKKATYNNSNLSEKDRHYIYTVLKSSEYLENVLKRKKLSNYLYDKFKINHKKLNNLIRRYFRRYKNKTPYSKKNNFLILDSGLYKYKDGFLKISTFNKGKRIEFKMKDERVFEGNLIIKWDNCLTVFGTKKFERKTIFEAENPVAIDKGYKKLIVTDKNTFYGTEYSLLNKILIDKQVEKLKNRNRLFQVAKRHKEKGNSKKVENIFKNNLGKIKQNRFTKKIRKRSKNYINKEVNNFFEKEKPSEIIKEDLTWETYKNKKKKGFRNQMKRWEKGILDKTIEWKALQKNIKITNINPAYTSQVCHICDSFGTRDRENFTCQCCQNKMDADVNAAHNIRKRKNIKEIDLYTDTKKVKQYYENLKKGEATFNI

SEQ ID NO: 23651 - protein, 495 aa, unknown
  TnpB Polypeptide
MASFVMEFELIAGNQEINFLEKRFNTGSNIYNLCLEHCIKQLNKLKRNKEYRKSVKALKTVSRKLEKKNLPQDEIKRLKEIKISCTNKIKELEKEYQFTENDIQKYAKVPREFIGKILNSNIAPKIASAAFDAVKKIQYKKAKKVKFKKKGEISLEGKNNKTGFIFDTRTMKLKLGQKLFCNLKTIDERQRNCFKNRIKFCRVFKRYIRGKKRYFLQIVFEGTPETDFQLGEGEVGLDIGTSTVAISSEDGVKLLKLSKTEQETRKIRILQRSLERKRRMANPDNYDENGRIKKKRKEWKLSKNYFRELKRLKEIYRKKRVKDNQHKNILVKFILSQGDTVKAEKISVNSWKNKSKKTAINKNNGKTMSKKRFGKSVNSNAPGTLKRKLSEKLSYFGKELIEINPFKTKASQFNHIKQEFKKCSLEVRFKELIQGIVVQRDLYSAFLIKNVENLSEYNMKKINRQFEKFYEKQLKEIERIKNEGGLKFYVSGKTV

SEQ ID NO: 23652 - protein, 404 aa, unknown
  TnpB Polypeptide
MLIRKAFKFKLKTNPDIEHTLRQFEGANRFVWNKALGLNVARLERHEKKNRRIIGYNDFAGLLRLWKQSEEMSFLKDVQSQTLQQTLKDLEKATRDAFNPRQPLKQFPVFKRKHDSNGFRFPQGIKMLGNRIYLPKIGWVRYFNSRKVEGDIKNVTVSRSGKNWFASIQVELQINEYTEKPKKAIGVDLGISKNAALSDGSFLEGSRSFKNYKKKLAIAQKKMSKKVRFSANWKKAKSKIQRIHEKISNTRKDRIHWMTTFLSRQFTEIYIEDLKIKNMSKSASGTKESPGRMVAQKKGLNREILDQGWFEFKRQLTYKQDWSGGLLQSVNAAYTSQKCSNRQCGYTAKKNRENQSVFRCKMCGHSENADTNAAKNILAAGLAVFACGEDALATSVKQEPLAVR

SEQ ID NO: 23653 - protein, 444 aa, unknown
  TnpB Polypeptide
VIPVLVVKTVKVPVHYALTKRKLSILDRLTAKTTYGVRLWSNLFDEHDLKGSYADRARFYKQVRVETGLPSAMAQCCFDTASWMWKSYRKQLAEWKRKLRRAEGKGREKLLKRQPQKPLSNGTSGKVPVWFDCRIGSIEKSRIKLCPYVARISTLRKGVKLTIPLNPAKYHLNLISKDELKSFQIVKKDGKYLVHVKVEYEVPDQPIYAIRGIDLGVKRSIASVTLRPNQPLRSSDFSIIRDGLKKERLNRLNRRVANLQQARKWEPLKRLRHKRKHVAEYFDRLAAKAIADTSSSRLVAVGYPKYIKYENYKGNNKAFLRRLLARWSYGRIISHIQEECAERGILVEATEEQWSSTTCHRCGSRKTERVNQSLFHCWNCELWYNADLNAAINVGSRFLAEPLTRQGAVDSPYAGDEQAREIVACEPRSPHPSGVGASHTYVTS

SEQ ID NO: 23654 - protein, 398 aa, unknown
  TnpB Polypeptide
MELNKMYLTKKIRLLPTAEQEKLFWKSAGVARWAYNFFLHYNQEKYNESLKDNSKEKIIKGNEVQKYINNTLKKTTHIWLKEVGGNVIKQAVKDADNALMRFFKKTSGYPKYKSRKKFKPSFYVNYETLKRTPEGFRGERIGFIKTRESLPKIPKNQKYVNPRITYDGKFWYLSVGYKVEPKQVKLTDEKIGIDLGLKDLAIVSNEDNSYSKKYKNINKGYRIKLLEKRLKRAQRKLSRKILNNIESYDENRVPTYIRPLKDCKNILKQNRIVQILYRKLTNIRNNYIHQITTEIVKTKPSKIVLEDLNIKGLMKNKHTAKSIADSKWYEFRRQILYKAELYGIEVILADRFYPSSKTCSCCGSYKKDLKLKDRTYICNECGLKIDRDINAAINLANY

SEQ ID NO: 23655 - protein, 316 aa, unknown
  TnpB Polypeptide
MLPAWKAEHPFLEVAHSQVLQNVTARVDLAFKAFFRRVKAGEEPGFPRFRGKHRYDSFTYPQANAFTLHDDGTLSASKLGRLRLSLHRPLQGRIKTLTLCRNALGRWYACFSVEVELAPLPPSPLVAGVDVGLMTFATLSDETHIDNPRFFRRDEKALKKAQRTLSAQEKGTPARRKARRVLQHIHHRITNRRTDFAHKASRKLVNSYQLLVCEDLDIHGMQANGYRSLHKSIADAAWGQFLQYTGAKAAEAGRTFVTVPPRGTTQGCSGCGAMVPKDLSVRVHACPHCGLTLDRDLNAARNIIARGLARLGASAP

SEQ ID NO: 23656 - protein, 371 aa, Okeania sp.
MKARYKYRIYPNKYQQAKLAQLFGCCRVVWNDSLAYCNDLYKQGKNKPSNAELQKQFITQAKKTENREWLKEVSNIPLQQSLNDLNTAYQNFFNSCKGKRKGKPARPPKFKSRKSRQTARFRKGGFKIGQHKVYLAKVGKLKIIWSRELPSDPSSVTVIKDSANRYFLSFAVEIQPEVLPQTDNSVGIDLGIKTFATFSDGTKVDAPKPLKKRIKKYRKLSKSLSNKTRGTNRYEKARARIAKFHAKLKDTRIDFLHKLSTEIINENQVIVLEDLNVSGMVKNRKLSRAISDLGWRQFRTFLEGKAEKYGRDFRVISRWEPTSQVCSNCGFKGGKLDLMVREWECLNCGAKHDRDENAAINILVAGGQSET

SEQ ID NO: 23657 - protein, 238 aa, Crossiella sp.
VTAPKFLRRAARKLKRLQQDLSRKTKGSNRRKKAVVKVARAHARVADTRRDWQHKLSTSIIRDNQAVYVEDLCVAGLGRSRLAKSVHDAGWASFTAMLEYKAARYGRTFARVDRFFPSTRTCSDCGRLGDKLPLNIRSWVCPCGSTHDRDLNAAKNIKAAGQADFNDRGAQVRPAAMPAPRGEAVTRPDAACSTRSVEGISVLQSGADVNRFVPPPRAAPAPRGPAQRGRRGLWPGLA

SEQ ID NO: 23658 - protein, 410 aa, Crossiella sp.
VQLRYNYRVYPTPDQQQSLARVFGCARVVFNDGLRARQTARDNGEKYISDGDLSKQVITQAKDTPERAWLREVSSVVLQQALADLNLAYRNFFASVSGKRKGGKVGPPRFRSRKDNRQAIRFTRNSSFKVLVNGHLRLPKIGEVPVRWSRQLPAEPSSLTLIRDSAGRYFASFVVRTADDQTLPPAKSEVGIDLGLTHFAVLSDGTKIAAPRFLRQAARKLRRLRQGLSRKQRGSQNRRKAIVKLARAHARVADTRKDWLHKLSTSIIRDNQAVFVEDLCVVGLGRTRLAKSVHDAGWASFIRMLEYKAARYGRTFGQVDRFFPSTRTCSDCGRINEKMSLEIRRWGCRCGSHHDRDVNAAINIKAAGRADFNDRGARVRPAAMPAPRNEAVIHPDAACSTRSVEGISVR

SEQ ID NO: 23659 - protein, 435 aa, Crossiella sp.
MIVVQVRYRYRVEPTPVQRQLLARTFGCARVVFNDALRCREAAYRAGEKITPAEVQRRVITQAKSRLERAWLSEVPSVALVQSVQDAHRAFANFFDSIKGRRTGRKVGHPRLKARKDNRQSARFTRNGFSLRPNGRLYVAKVGEVRVRWSRDLPSKPSSVTIIREPDGHHYASFVVDVQPRPLLVIEQEAGIDLGIARLATVADTRGNRRDIGNPRHLSRRQRKIARLEREKSRRLKGGANRAKSRRKVAVQHSKTARARRDYHHKQALTVVRENQAVYVEDLNIVGMVRNRRLARALHDVGWGQFLRLLAEKAVRFGRTVHRVNRWLPSTKTCSGCGHVLADLPLSVRTWRCPVCSAVHDRDHNAAINILAAGRAERRNACGAGVRPPLGEALGDEAGSTWAAWPPGNPGGQAEEHVKNSGISPQFVTVDHLRP

SEQ ID NO: 23660 - protein, 326 aa, Crossiella sp.
MRFPRFKGRRACLSCRFTTGTFGLAKHDRRHVRLPRIGLVRTHESTRKLARHVERGTARIRSATISHRAGRWFVSFSVEIIRAARTPARPDAVIGVDLGLSHLAVLSTGQVIPNPRHLELAQRTLRRLQRQAARRQGPDRGTQRSPSARWRRTQDKVSRLHTSITNARGDGLNKLTSKLATTFGTIVLEDLNVAGMLRNRRLARHIAGAGWGELRRQLQYKVLCHGSRLLLADRWYPSSKTCSDCGVAKAKLRLSERTFTCDSCGMRRDRDLNAARNLAMLCPPTVGGRHETSPRETHVRPTSGGQRVLPREDPYRSVRANTATAR

SEQ ID NO: 23661 - protein, 439 aa, Crossiella sp.
VSGRAVVQAYQYALDPTPEQERTLRSHCGAQRYAFNWGLRLVRANLDQRAAERSYGITDAGLTPSSNWSAYGLRKTWNQRKDEVAPWWSENSKEAYSSGLANLASALRNWNDSRTGKRAGRVVRFPRFKSKRVAGSCRFSTGAFGLVEDDRRHVRLPRIGTVRTHESTRKLFRHLQRGTARVRSATVAHRLGRWQVSFSVEITRVDPAPTRPGEVVGIDLGVRYLAVLSTGETVPNPRPLETALPRLRRFRRRMSRRSGPDRRTGQLPSRRWLRARARISALHLMIRSGMLGNRGLARRVADVGMAEFRRQIEYKAAWSGVRVQRADRWFPSSRTCSGCGVVRTKLRLSERTFDCEHCGVVMDRDHNAARNLAALAGAQAADTSSLSRRATENGPAGNPRQTCIARATGNATGSPTRATRRREAMAQDTFSDVSRTVSE

SEQ ID NO: 23662 - protein, 392 aa, unknown
  TnpB Polypeptide
VQRTIRVKLAVDSDQEKLLADTLAASRECFNAVARHGWDNGVKNGVELHKATYYNLRAAYSTLPAQLVISARMKATEALRSAFALQRQGKRVSAPQAMRGSVRYDARSHRVDVSKGIVSLATTEGRIIVPFRTHEQGRQRIASASGFDSADLVQYESGWHLNIVLSIEKPAFAANGNVVGVDLGINCPAVTSDAMFLGKRRWKETNQRYFRLIRGLQAKGTKSAKRHLKKVRHVRKRFRRDCDHVLSKRIIQSVRPGSVIVLENLTEIRSRTKQRGRKHRRRHHSWSFAQLRAFVEYKAEDLGCKVEVVDPRHTSQRCGRCTHTHRGNRKTQSAFKCRECGYMVNADLNAARNIAWKYLAEIGTSDPGGRTVNAPIAAEHEAIPVLAASSGL

SEQ ID NO: 23663 - protein, 420 aa, Acidimicrobiaceae sp.
MRCRTYRYRLHPTLRQTQALTRQLRYQCELYNAALEERKGAWNWEKRSVTYFDQCKTLTGLIDVRPEVLSSGVTLCRGTLKRLDGAFASFYRRVGTGENPGFPRFKWTRRWDSLEWQDRSGWTVKGAERRLRLLGIGEVKMNYHRPLTGVPKAITVKREGAKWWVNVRCVDVPASLLAPTGREVGVDLGVVNLVALSDGELIEGSRFAARSSERLANAQRRLAKKQRGSDRRSRQVQEVARLHRKVRQQRMNAAHQLSRRLVNEFDLIVLEDLKITPMVARPRVKPDPRNPSDFLANGAAKKAVLNRSIHDAGRGQLRSLLSYKAESAGRTVVVVNPRHTSLTCYQCGHVDQKNRVIQAVFRCCSCGHEDHADSNAALNILRAGRARLASASDGPNLPTTPSNLTRWACSVTTVSSLPAF

SEQ ID NO: 23664 - protein, 402 aa, Actinobacteria sp.
MKLRYNYRLYPTAGQRSALARAFGCARVVFNDALCLREQAHRAGLPYVTDAEVSARLTAAKATPERAWLAGVSSVVLQQSLADLNAAYRNFFASLTGKRKGPKIGPPRAKTRKDRRQTIRFTSNAHFQILPGAKLRLPKIGNVPMRLSRPLPSPPSSVTVIVDSAGRYFASFVVQARASALPAAEPVVGIDLGLTHFAVLSDGRKITSPRFLRRAEKKLRRAQRSLSRKEKGSKNRGKARVKLARAHARVADARREFHHQLSTALIREHQAVAVEDLAVAGLARTRLAKSVHDAGWSAFVRMLEYKAWLYGREFYRIGRFEPTSQVCSVCGVKDGPKPLHVRAWQCQRCGAWLDRDINAAVNVARAAGLAVPACGAQVRPGPSGPAQRGEAGTHPKPRPEAA

SEQ ID NO: 23665 - protein, 249 aa, unknown
  TnpB Polypeptide
MVKAIKVMLIPNNVQKTKMFQYAGASRFAYNWALAREIENYEKGGKFLSDAELRKEFTKLRHSDEYAWLLSISNNVTKQAIKDACTAYKNFFKGLQKFPRFKSKKRSMPKFYQDNVKIRFSNTHVKFEGFSSSRKANKQKMNWVRLAEHGRIPTNAKYMNPRISFDGLNWWISVCVEFPDCRETLNDDGVGIDLGIKDLAICSDGTKYKNINKSQKVKKLENRNADYSVVSLVLTRKIKKEKVTVKQIM

SEQ ID NO: 23666 - protein, 407 aa, unknown
  TnpB Polypeptide
MQTLEYKLKGKDVQFSSIDDAIRTTQFIRNKCLRFWMDNPTVRLSELNKYCAVLAKEYPFATKLNSQARQAAAERTAHAISRHVKPDTKGNRSNPPRFQKDCRSVEYKTTGWKLSPDRRSITFTDGYNIGILKMLGTQDLCAYSADLIKRVRLLRRVDGYYIQFCLDTERIEEQEPSGNTVGLDVGLSAFYTDSNGEKVKCPRFLRKAEKRLKFLQRMVTRKQKGSSNRSKAKNRLARKHLQIQRQRKDFVVKAARCVVISNDVIALEDLQIRNMLKNHCLAKSINDAAWFQFRMWLEYYGKVYGKIVVFVPPQFTSADCSRCGNRVKKSLSERTHCCLCCGCVLDRDENAARNILILGLQLVLKLYPGAQGNSETSVSQTLVERRTSATQYAVSASHLVEARSPRF

SEQ ID NO: 23667 - protein, 452 aa, unknown
  TnpB Polypeptide
MYWRMISMGAPPQLPAKYDGDHSAPPHSFLRMLGIIWSMQRLQAFKYELRPDGRQECQMRRFAGSCRFVYNKALALQKERHEQGAKKLGYAGLCKLLTEWRNGSETPWLRDAPTHPLQQTLKDLERAYANFFAKRADFPRFKKKGQGDSFRYPDPKQIKLDQANSRLFLPKLGWLRYRNSRDVLGEVKQVTVSASGGKWFVSIQTEREVEQPVPNGGAVGIDLGVARFATLSDGTFHAPLNSFKRHETALRKAQQAMSRKTRFSHNWKKAKARVQRIHSRIGNARRDYLHKTTTTISQNHAMVCIEDLQVRNMSRSAAGTTEQPGKNVRAKSGLNKSILDQGWFEFRRQLDYKLAWNGGYLIAVPPQNTSRTCPCCGHVSADNRQTQAAFRCVECGFEENADVVGAINILRAGHARCACEVSGAVMPPAAGTHRSDSFRLDAGMGAVGIPRL

SEQ ID NO: 23668 - protein, 279 aa, Planktothrix sp.
  misc_feature (270)..(270): Xaa can be any naturally occurring amino acid
VLHKAVQVRLYPTAWQKARLAQTFGCSRWWWNYALNKSIQVYQDTGKGLGRLALNALLPKLKKAEDTLWLANCYSQVLQATTLNLTTAYKNFFAQRAGFPKFKSKHGKQSIQYPQNVKIVEGNVKLPGNIGIVKAKIHRPIEGKIKTVTISQTPSGKYLASILTEVEGENPTVSEGKIYGIDLGIKNFAVVTDGEKVSKYDNPKHLAKHEKNLKRKQKKLARKQKGSKSRQKYRKIVAKLYERVSNSRQDFLHKLSYKLVSDSQAVIVEXESLSSGIRL

SEQ ID NO: 23669 - protein, 388 aa, Caldicellulosiruptor sp.
MIVTYRYRIYPTKEQERKLKKTFGCVRFVWNYFLARQNEIYKTQKVSPNTYEWIRHLQKHLKKEYPWLKEVDKFALENQIKRLVEAFEKFFNKQAKYPKFKRKKSNYFSYTTNFTNGNIEIDFGELATDPKKKRCWGRIKLPKLGWVKARIHRIFEGKIKTATVKLLPNGYFYVSIAVEQDVVDNPNMPKTPANFAIAFDLGVKEFVVDSNGRHIENPKILSKYEKRIKKLQRELSRKKVGSRNFEKTRLKLAKLYEKVANIRLDYLHKLSSQIVHENQVIICEDLKTKNLVRNHNFAKSILDVSWSKFVEMLEYKSEWYGRTFMRVPSNFPSSQICSNCGYRNEQVKDLKIRVWQCPVCGMVHDREENAAKNLLKEGLSRLGITISV

SEQ ID NO: 23670 - protein, 313 aa, Caldicellulosiruptor sp.
LREVDSLALANVQIKQEKAFKDYFKNPKHFGIPKFRRKKDKQSYTTNNQKTKSGTETIRVDFEKGLLYLPKIKSGIKAVFHRKFEGKIKSATVVKTKTGKYYVSILVDVQDPKNDVKKPRNFICGIDLGLKSFATIVNDTACLKIEYPKYLIKAEKRLKRLQRQLARKKEGSKNWEKARERLAKEHEYVKSAREDFLHKLSKTITDENQVMVVESLNVKGLSETGLSKHILDSSWSKFLSFLEYKAEWYGREIIEADRTFPSSKICSKCGYLYKELKLKDRIWKCPECNTIHDKDENAAENLRNYGVVYISRQ

SEQ ID NO: 23671 - protein, 358 aa, Caldicellulosiruptor sp.
LQYESIYHIAKGNENYRLLPSQVAQQTLISVDETFKSFLSLLKAKKEGKVKEKVSMPKYLPKEGMYQIVFPKDQFKIEDRKVRLSLGRSFSKEFGVRYLYFELPKNIAGKKIKEVRIIPRYHGKWFEIEYVYEEKEQDYNLDKNRYLAIDLGLNNFAAVVDTIGTAFLIEGRFLKSVNRWYNKERSKLQSIYSKQGIKYGSKLAQISLKRQHIVDNFLNQAVNVVIKHCLESKIGVVVVGEMKEIKQGIELGKVNNQNFVGIPYKKFKRKLEAKCRLYGIEYAEVEESYTSQRCSRCGTVDRSNRKHRGLYVCKKCGCVLNADINGAINILAKVAGESVAKQITSSGCVNHPVRIRVA

SEQ ID NO: 23672 - protein, 487 aa, Caldicellulosiruptor sp.
VLKDVVTVQAKLIFESFEDKQKVLDLMRRWSSCMRFAYKRLLEGFDRNSLKKDLQGIFNLNSRYVNDAIMKAGSILESCKQSGEDPRKVVFGGRELFEKLKKRHINGNPYKKLKIEWQEKRKGNLYSRGDRSKKGNLNTRIVANERGTFLRINVGDRKYVFARLSAGYKKGKSREEILQEIAVLEMPYSVELKLKNGNMYAYFSVEELFPATEITKENGAIGIDTNAYPNHIAWVEVDRSGQFISYGKIPMPELESGSFEKREYYRWQYAHEIVEIAKEKRKAIVIERLDIKHRGTRGDFSGRKSRRIRHFFSYRSLLEKIKILAKREGIEVIEVSPAYTSVIGMLKYAPQFMISKDVASAYVIARRGLGLKEKIPANYMELLSRLDASSLEELKEYVSKAVKNVHSRRKQIKEIEYVMRMIQSPGSESGRLSAPLDGTSAGSCSAGYNLWRVLRVAVVTPLSPDRVLRDMSVLKSLLISGQVGRPK

SEQ ID NO: 23673 - protein, 388 aa, Caldicellulosiruptor sp.
MIVTYRYRIYPTKEQERKLKKTFGCARFVWNYFLARQNEIYKTQKVSPNTYEWIRHLQKHLKKEYPWLKEVDKFALENQIKRLVEAFEKFFNRQARYPKFKRKKSNHFSYTTSYTNGNIEIDFGELATDPKKKRCWGRVKLPKLGWVKARIHRVFDGKIKTATLKLLPSGHFYVSIAVEKDKADNTKMQETPTNFAIALDLGVKEFLVDSNGRHIENPKLLAKYEKRIKKLQRELSRKKEGSRNFEKTRIKLAKLYEKAANIRKDYLHKLSSQIVHENQVIICEDLKTKNLVRNHNLAKSILDVSWSKFVEMLEYKTKWYGRIFMKVPLSFPSSQICSSCGYKNRQVKDLKIREWQCPVCGVVHDRDENAAKNILKEGLLQLGIAIDV

SEQ ID NO: 23674 - protein, 374 aa, unknown
  TnpB Polypeptide
VNKSLTKNFNKSFKVRIYPNKEQKVLIDKTFGCARFVYNFMLNLKQKLYKNFALNLNYNNMCKVLTELKEHKLWLKEVDAVALQQSLKDLDYAYQKFFKGNGFPKFKSKKRDKLSYRTNNKLRLDQDSRKIRIPKVGWIRFRDKSNFKGLTKINNITISKSSSGKYFASISAEVDIAHFEKVNQNCGIDLGLKDFCILNDGTKFENPKFLVNNEKRLRMLQKSLSRKIYGSKNYMKAKLKLARFHEYIVNCRKDYFHKISLFLVKNYDIICAETLRVKNMIKNHKLAKSISDVSWYEFCRQLEYKCLWYGKKFVQIGTYFASSQICSNCGHKNSNVKNLNIREWTCSKCNTCHDRDINASTNILNEGLRILKLV

SEQ ID NO: 23675 - protein, 399 aa, unknown
  TnpB Polypeptide
MIATIEKLETETVVSVNKTFHYKLKPTKNQEIIFGQWLGTCRYLYNVSLEYRKYLYAQKGVNISKFDLINEIPEVKKTEGFEWIKQVPANTLQAVIERLDNSYQRFFKLGAGFPKFAQKNKYKSFLLKNNSSGSEIKVSGNRFKLPKIGHVKFFNSRPVESKIKTATIRKEADGWYISVTFVGNVEALPLLDNNVGLDLGVKYFAVTSDGEYIDNPRHYNKYQDELRILQRSLDRKKKGGNNRNKASIKLDKIHQKIANTRKDFLNKVSTKLISENQSVVVEDLRIKNLTKKSKPKLSDDGKTYLKNNRKQKAGLSKSILDAGWGMFCNMLDYKSKWFGRWFVKVPAQYTSRDCSNCNFRTEEMPLTIREWQCPQCNSFHNRDENASKNILKKWLEDQN

SEQ ID NO: 23676 - protein, 495 aa, unknown
  TnpB Polypeptide
MRMGHRIEERARTQRYRLYPTFQQEQDLLLQGHGARALWNLLHTWWLLARKDQRATWKHADAQIKQARRDIPWLALLPAQASQQVLKTYRRAWDDYWSGKSGRPKYQVRRGRLGIDLPQARDLNITFDSRKWSSLQVPLIGRVTFRQHRKIVGVVTGARIVREADGRWYLAVRVTQSVRAANRQRKQEQPVAGLDRGIVVPAAVSDGSMFTHDAWLTPREQERFLRLEREGARKRTARVSRGGRISKRERECYRQIAVLHARARRRRSDWLHKITHELANTYSMVGVEALNVMGMTAAPQPKPDPDTPGAFLPNGAAAKAGLSKAILAEAWGECRTLLTYKTLAEGGRVIPVPAAYTSLTCHQCRTITSGSRENQAVFTCRNPLCGWSGNADYNAACNIEWLALQQLASEIDAPARVLSSALGVGLKLTSAGGTPVAARSGYIPETPIGTSSQAGVEPSGWDSGIKHGEPDNGYPASADPIIVDVPPEAATFMWR

SEQ ID NO: 23677 - protein, 382 aa, unknown
  TnpB Polypeptide
MIRSYRYRLYPNREQTKRLDEMFEIFCELYNAALQERRDAYKRNGISISYYDQTSQLPAIRKERDDLAGFSSTAAQQVLRRLDKAFKAFFRRVKAGETPGYPRFKSRSRFKSVPFMFGDGAGLRDDRLHIYGVGQIKVKWHRPIPDDATIKQIVVKRAGDKWYAIFQIELPDPEPVEHPGPAVGIDLGVSSIVATSDGDTIDAPRYMRKAEKKLRKQQRRMARRKKGARGWHNARRQIAKTYEHTANQRRDFSHKLSHQLVDTYSFIAVEDLNVAGMSRNHNLAKSILDAGWSQLLHMLDYKAEEAGSQIVAVDPHNTSQACSGCGCVVKKDLGVRVHHCPHCGLVLDRDVNAAINILNRALNSARMEPSGANVAERIASVA

SEQ ID NO: 23678 - protein, 276 aa, unknown
  TnpB Polypeptide
MASLDIERPDVESRLHDRRSGQGHYHGKKGRPGMLRAGVGTCIRHERGLPRRRVREGGGSWPDERLIRRRQASSGHTLPEAETACPKEGERQAGTEDASGPRREEGEEQGEAAASHREQGNREGGEGATCRHSPRGLDPSRLRGRSRRMNRRLSSWPRSEIHRQIEYKAALEGVPVIKVNPRYTSKTCPACGARRRDRVGVVFECTCGWSMGRQHNAALNILKTALASNEDLARAVRFQPGALRDDMVIPLYDLQAVPEGAREESSGDELRCQDGG

SEQ ID NO: 23679 - protein, 402 aa, Escherichia sp.
VKRLQAFKFQLRPGGQQECEMRRFAGACRFVFNRALARQNENHEAGNKYIPYGKMASWLVEWKNATETQWLKDSPSQPLQQSLKDLERAYKNFFQNRAAFPRFKKRGQNDAFRYPQGVKLDQENSRIFLPKLGWMRYRNSRQVTGVVKNVTVSQSSGKWYISIQTESEVSTPVHPSASMVGLDAGVAKLATLSDGTVFEPVNSLQKNQKKLARLQRQLSRKVKFSNNWQKQKCKIQRLHSRIANIRRDYLHKVTTTVSKNHAMIVIEDLKVSNMSKSAAGTVSQPGRNVRAKSGLNRSILDQGWYEMRRQLEYKQLWSGGQVLAVPPAYTSQRCACCGHTAKENRLSQSKFRCQVCGYTANADVNGARNILAAGHAVLACGEMVQSGRPLKQEPTEMIQATA

SEQ ID NO: 23680 - protein, 309 aa, unknown
  TnpB Polypeptide
MYNLADDYSAQIKIYHNNTWNWLSINLRKSDMDYIYHRCNGRKMCAPTLQKRGKEWFLDFPFEEKATLTDTNSLVVGVDLGLNSACTCCIMDSKGTIYGRRFLRLPRETDRLNHAVNRIKKAQQYGNRKMPRLWAKAKGINDDIAVKTANFIIDTAVMYNADTIVFEHLDLAGKKRGSKKQKLHMWKAKYVQSMVTDKAHRLSMRISHICAWGTSRLAFDGSGRVLRGKDADMPTYSLCRFQNGKTYNCDLNASYNIAARYYIREIFKSCSVTDRLDIEAKVPQCSKRSTCTLADLISLNAVLDNILVA

SEQ ID NO: 23681 - protein, 427 aa, Bacillus sp.
MAKENPSNYKTLQIWIKKGHRMYSYFQECCHNAKNMYNTTNFYIRQVYTGLTQEKELQPLQKEVLDNIHKNIGKMNDTQRLVYRKKLEKEKVKPKEEQKEITCNLFSEPNFEKPYVDYNFLDALFKAMIQNDYRALPTQCSQSIMKGLFQNWKSFFASLKDYKKNPNKYDGMPRIPKYIRSSEQQMIEENARYMSIDLGIDNLATIVTNTGMKPVLVKGKHVKSINQYYNKMKSHFTSILRNGKQTNEGPFTSKRIEKLHQKRYLKIKDVFHKVSHHIVKLAQEEEVCKIVIGQNKSWKQETNMGKRNNQSFCHIPHNLLIQMITYKANAVGIQVVVTEESYTSKASFLDNDFIPTYGENDQNTTFSGKRIKRGIYRSANKTLINADVNAAANILRKVIPNAWTNGIEGLGVKQLANVLTPLTLIVR

SEQ ID NO: 23682 - protein, 240 aa, Moraxella sp.
MKTLKLRIRDKHTDQLNRLSGSVNFVWNYINDLSYKYLQKTGKFFSAYDLNEYTKGSGEFLGLHSQTIQAINETHAKSRRQCKKAKLSWRTNNPNSKRQSLGWLPFKQSAIKHIATHQTGKKGLKSTLQLSLAKGQKLLIDVWDSYNLSLYQINTCEIVQDSRNRWYACITVKEYPKQQCGTGSVGIDLGLKDSATASKGDKLQIKQTLKYAKALATAQRANNKQRVKAIHAKSKTHAKT

SEQ ID NO: 23683 - protein, 911 aa, unknown
  TnpB Polypeptide
MTKYVRKRDGSFVAFQREKIAFAIQRAMEASCPDMTVEEMEETAEKLAEEVEFQILNDRTTQVPSVEAIQDEVEKVIIRHNLAEVAKAYILYRKKRQMIRESANSLSGQLKEIFDSSSIDSDLKRDNANVDGNSAMGTMLQVGAAASKLFFSENYLTEEQKQANQCGDIHIHDFDFYALTETCCQIDFKALAECGFSTGHGFIRPPQSIQSYAALACIAIQANQNDQHGGQSIPNFDYAMAQGVKKTYAREFERILCEYYEEMKGKEPDEEKEFVHQILTDIIKTQPAMVHHEKFDTVLVSTLMVSVFGYMNKEYQLILDEIVARIHKKAYLMTEKATHQAMESLVHNLNSMHSRAGAQVPFSSLNYGTDTSAEGRMAIRQLLLATEEGLGNGETPIFPIQIFKVKEGVNYNEGDPNYDLFRLAMKVSAKRLFPNFTFIDAPFNLQYYVPGHPETEVATMGCRTRVMGNVHDPATIDENGVYHPNGEVAYGRGNLSFTSINLPRLAILANGDEEMFFESLGKMMNLVARQLLDRLEIQSRRRVYNYPFLMGQGVWRGSEKLSPDDEVREVLKHGSLSIGFIGLAETLVALYGHHHGESDEMEEKGLKIIRFMRAFTDRKAQETGLNFTLLATPAEGLSGYFVRKDKKLFGEIPGVTDRDYYTNSFHVPVHYTISAYEKIQKEAPFHALCNAGHISYVELDGDIATNLEAFEAVVRCMHDAGIGYGSMDFGLKHFLNLDDGSVIDSPQWYKVSLKELRAAHRAVSRCQKGSRNRRRAIQHLERVYQRISNRRRDWFFKLANQLVSEYAIICIEDLNLDGMKRLWGRKVSDLAFAEFVSALEWVAGNAGTAVVKIDRWAPSSKACHVCGTVNGDLTLKQRSWECDCCHTSLDRDTNAAINIKQMGLAMLTASI

SEQ ID NO: 23684 - protein, 409 aa, Candidate divison MSBL1 archaeon
MRVTFEFPVSRATGKKESFLERVSGKFPKMVQWFLTVFEKEGLDFREKGLNRARKIVKELCYPTNERDSKYNCKGAVCFPHSHYYDTAITEAIQKWNSFLTWKEKSGTVKRFPEIESYAPVLDSQMFELDLENCWITIKTGRGQKSIHIPITIPNKSHYQKLDAEKISSIRVKEKEKGFVFLLSQKSLSPEKPSPEELGGRPVIGIDLGERNLASLAAIRSDSQQTEITNVKFFNGTEIKKLEHEEHHTRRKLQRQGKSGEIPKRRRKIRNKKKDLCEKIAQKVKELAEDLGVKTVFIGDLKGPKPSGFAPLSRRLNNYPFAKLKEAIKRHLNKAGIFVETVYEGSTRNELGTSQKCHKCGSKGERYKGKFSCPSCGLKDYNADLNAAINIAERGVKLLGKTEGFGAVP

SEQ ID NO: 23685 - protein, 462 aa, unknown
  TnpB Polypeptide
MLVTQAYRFALDPTPAQKGKLASHCGARRFAYNWGLALVKARLDERAAGGEVSVAWSLPALRREWNQAKTQVAPWWAENSKEAYSAGLADLARGFEAFWSSKRGKRKGPRVGFPRFKARGRRRESYRYTTGSFGVSSRIRVALPRIGHVRTHEPTVKLARKLSAGQARLLSATVCRENGRWYCSLCCEVRREEEPPVRSGAVVGVDVGIKHLAVLSTGETICNPRALTTAQKRLRRYQRRLDRQRRASNPGCYDERGRAVKGKRPTNRSQRMRRTQRRVARLHARAANVRRDGLHKLTSHLAAGYGTVVVEHLNVAGMLLNRSLARALSDAGFAEIRRQLEYKTAWHGGRLHTADRFYPSSKTCSACGTAKAKLLLSERSYCCEHCGLVLDRDLNAARNLAALVTNVAPSGGETENARSRPSGRTENPCKTRRPRRAAGRPRSPQRQPAHQTGTAPEQSEAA

SEQ ID NO: 23686 - protein, 350 aa, Paracandidimonas sp.
MNTKVYRYRVKSLNGLLNKQARAVNFVWNFCNDTQKHALKWRKRWPTGFDLNVLTTGSSKALGIHSGTINAACEQYAKSRKQFHRPFLRYRGKRSLGWVPLKGRDLKRHGDAFRFAGNTFRVFNARALPEGKIKDGVCFAQDAKGNWYLNIVIEVADAAARPIKSGVGIDLGLDSFAALSTGEKIDNPRHFRVLEEKLAKAQRARKKRQATSIHAKIRNARSDFLHKLSTRLIREFDYIAVGNVNSKGLAKTNLAKSVNDAAWSSFRNMLRYKAMTHGATVEEVNEAFSSQTCSACGALPESRPKGIAGLRIREWVCSECGTVHDRDVNAAVNILLRSGHRAPVVGIPVL

SEQ ID NO: 23687 - protein, 359 aa, Prochloron sp.
MGVSRYVFNKTVELLQDGEVKANWFAVKPRIMDALPEWCNEVPYQIKNVAIRDACIATREAKQKYRKTLKIQRVKFRSRRDLVQSCFIPKSAVTAKGIYHTKLNELTYSQELPENICDSRLISNNGDYYLCVAHKVTKTPVENQGRLVALDPGVRTFVTFFSETSVGKIGSGDFSRIQRLCQHLDNLKSKISKAQGGQKRRMKKAARQMTIKIQNLVRELHHKTARFLVDKFDVILLPTFETAQMSKKGSRKIRSKTVRNMLTFAHYRFKEFLKHKAQETGKIVVDVCEAYTSKTVSWTGELVNIGGSKIIKSKVDGRIMDRDINGARGIFLRALGDTPWLRNQLALASQGQLLADFGS

SEQ ID NO: 23688 - protein, 502 aa, unknown
  TnpB Polypeptide
MNQGVETGKSFLELKRDGRVHKPHPEVRHVSIRFAKDSWSYRKTAASTTPVKIAVSLPGGRREIWIKPHRRFWLYWWKALRREAELASTLVLKRRRGRWYAVFVFDVSPREEPPAEVVAFDVNENTVAVARLSLLATVDRIASWNRQYINPAVYSIRTNFGRLAKRYEAVRGRKLEELKRKYPFAGRDEEERRQNVTDTREFRKFVRGLRERRRKEGRVRQTAREVTRSPAVIITEELGKNPQEEIIGVEKKAEKSVKKVEKRELRHRVKQTPFRRILRAVEDKAAEGGSAVFYVSSFRNSKVCPIHFVLLKNGSGWHVLHCPRGHVVDRDAAAVLNTLWKTTPTGWVKGIWWDVKDVKRRLEKGRGLVPRDHAKRRNPLVPWRIIRAVWTSLKALKAGNKWPTVLARAAPMTPAQGADEDGARAPPHGTLAPGEEVSSRASPTPEQGPVRSNPNANSVKVANRVATGSLEGRKAAPMRAPTAKPHKSPCGRSTVCYFMLLE

SEQ ID NO: 23689 - protein, 462 aa, unknown
  TnpB Polypeptide
MKATRIAYSKNLNPGKLAALAEQAERLGAVRSEVWQRFGSVSGVSVSDRQIRDGWLREGRSFPVNATAWKETLRDAKADISMTVEAAKVKARRAIRRHTRDASEQKRLFGSLKFNRFAEDPYLSRILRKYWHRGHNHTRNQIVVRSDSYTTFKLADNGNAWLKIPGLDRGKRIAIPLNTTVEPTGTLRLILRGGRVEVHYAVEVEPTADCGGDIVGVDKGYSEVFVDSDGEHHGAGLGDRLRSESDRLKIKNQRRAKLRAIAENCGDPAKRGRIEKNNFGRIKADRRAHRVKSTISTVVFESAHAVVDKASTVAAEDLTAPMAGKKFGKNMNRRLTTWTKGVIAEALETVSQRRGSTLVLVNPAYTSQIDHRNGCLLGKRSGDRFYCFDGVVLQADENAARNVKARLSDPEIDRWTPYQKIKSILLARTQRLRLGLLNLDPSCAVKTESTGSEAPKQLCISF

SEQ ID NO: 23690 - protein, 193 aa, Thalassomonas sp.
MGITRFATMPDGSTLAPLNAFKHHQTKLARAQRKLAKKKKGSQNWKTQKQLISRLHHKIADARKDLQHKASTMLSKNHAMIVPEDLKVRNMSVSAKGSQEIPGRNVRIKAGLNPTILGQGWFEFRQQLAYKQACQDGELVLVDPKYTSQQCPHCDHRHRDNRKTQANFTCVECGFTENVDVVGAMNVLARDTA

SEQ ID NO: 23691 - protein, 543 aa, unknown
  TnpB Polypeptide
MSKSENEKWIATIPSQSLANSGKIDLVADLLVPYSELSAHFLKDIDLRFVRDNELLKYTKAKGYQTEDEFDALLVNCHKRYQKQIEDGIDPTCSLKEQLEDIHEYAVQTPLSARFIQTCYSQTLEIHKSWLTKLEDVVRSYLTNSSVSEKDEFFLVSCYRINKNHLWCHRELSLKWHQTKDGQLLVPTKQNKANVTLPVSQDILFFMRRLMKQARKRIRFPRVKKLKTLKLDEKVATLEVSKNATHFDYFLKLSTLEKGKPIYLPLNRNPYLDECLTKGVRKPFVQLRLDRKKCVISAIVEYDKAPLRPSDSSLGLDFGMVSMFTTSDGEQHGLTSFAKLKIWDEELIALTKELQEKGIKFKSNARYVQLQNRIKSYFKNEICRILNKLAKKNIGVFVVEQLDFRASGLSRSMNRLIGRTYRSFVKAKLARLEEQFGIQIVSVNPAYTSQECSRCHHVSKNNRKSQKQFICEHCHLHCNADVNAGRVIVQRRSLISEFPVYSKKGTSRAIRCQVREASKECHRRYCSNNESSISNASLAESSL

SEQ ID NO: 23692 - protein, 386 aa, unknown
  TnpB Polypeptide
MKLTLKVKLLPTDEQANLLLDTMKEANAVCNAMSDVAWEKKIFNNFKLHHETYYSCKATFNLSSQMLIRCVAKVADAYKLDKKTKRQFRPLGSIGYDSRIMTYKPNDIVSLWAIGGRIKIPFVCHNRNYLPYIKGEADLVFKKGKFYLFQTVDVPEEDIKDIESFVGVDFGLTDIIVTSDGVKHSADGLNAYREHRQKVRSSIQAKADTSKRSTKRNCRKLSKRLQGKERTHSSIVNHTIAKSIIFSAKESGKGVAIEDLTNIRFTSKRRNKKFRTKLGKWSFNQLRSYIEYKGILYGVPVVIVDPRYTSQTCNVCKHIGKRTNKVFKCTNKNCKVDTIDADYNASKVISLLGQTVNSVEKSNDMCCSIAHVYSGLKPIPSLCVGG

SEQ ID NO: 23693 - protein, 355 aa, Halorubrum sp.
VFTEVHSKALQRTVTRFYQNLSNLSEKKRNGQKVGMLKWKSPAEFQSMTYSQSGFELKNTSGRNATLWLSKIGDIPIRYHRELPDKAEIKEVTIKKETTGEWFVSFGLETDEADLPEKPNVDALNTNNSVGIDLGIRNYIHTSDGKTVDWLDLGDEYEQLRRKQRKLSRKEEGSNNYEKQRLKVAKIKRHIRRKVLDYQHKLTTWLVREYDAVFVENLDVKGMLEQSYNARNKQDAAWRQFITLLEYKAELYGTHVVQVEARGTTKECASCGVETAKPIWVREHSCPSCGFECDRDANAAMNVLQRGFAELGLGWPEDTPVETALPANTHSVSAKRVVEAGSPTLKERAASAVSE

SEQ ID NO: 23694 - protein, 331 aa, Halorubrum sp.
MRYTYRFRLDPTPEQRELLDHHRDTCRQLYNHALNEFEKIPESAGTLTQRVRQVRDQLTDLKVWWDELNDLYSTVAQAAVMRIEDSIKALSQLKQNGYNVGSLNWKAPKDFRSFTYIQSGFEFDSKNGQTVLSLSKLADVPLIKHRTIPDTKTIKQVTIKKEPTGDWFASFVVDGKETPEKPTDPDRCVGIDVGILKYAHDTDGYAIESPDFSDERERLERAQRDLSRKEHDSTNWETQRQIVAERHADLKRKRRDFLHKLSNYYATEYDLVAVEDLDAKGLVELPKNSRNRAGAAWGTFLRMLEYKCEREGAHFVAVNRAGRQRSALPVV

SEQ ID NO: 23695 - protein, 413 aa, Halorubrum sp.
MEHSYRYHAYPTQGVAERLEHHLNVHRQLYNHVRWDYENSPEDDKPSEYDQNNKLPGWKRRWKVFSQLHSKAAQATVSRFHRNLSNLRKKKEKGYNVGRLKRQSPVDYRSVTYNQSGFDLDEKRGRDRFAYVRFSKIGWVKIRYHRPIPDQAIIKEVTVKKETTGEWFVSFGLEIDDAELPEKSDVDSLDASNSVGIDLGIQNYIHTSDGKAVDWLDLEDEYERLQREQRELSRKEKGSNNYEKQRREVAKVKRHIKRKVLDYQHKITTWLVREYGAVFVEDLDVKEMLEQPHNARNKQDAAWRQFITLLEYKAKLYGTHVIQVDARGTTKECASCGVETAKPIWVREHSCPSCGLKTDRDANAAMNVLQRGFSELGLGWPEDTLVETVTATDTTQIESVSASHVVETGSFGA

SEQ ID NO: 23696 - protein, 174 aa, unknown
  TnpB Polypeptide
MLLDRVRRLSRDLSRKVKGSRNRGKAKKKLAKLYARIASLRRDSLHKLSTNITHRFHTIGIEDLHVKGMLANRCLSRAIADMGFGELRRQLEYKAAQRGGQVVVVDRWYPSSKTCSCCGYLLAVLDLGTRRWVCPGCGTNHDRDVNAAINLKNLAASSAVAACGGEGAGLAHQV

SEQ ID NO: 23697 - protein, 564 aa, unknown
  TnpB Polypeptide
MPKKKKNKKNNEPKFTVQGEWFPEIYSAFRSSKWSRSNEDPLTTEMRLFCACERWAFNRLLESNSREDLKKKGQQIFGLNSRFCDDVILKAKAIIESQKELLILEIAETETKLARTGKKLSWAKKDLDKAIERNDPAKIEKAKRIVHGRKARVKKITDKLNELKTHQENGTIPKVIFGGRSLWKKVCKGKVSNKEWRQARQNRLYSRGDETKGGNPNIKINYRDDGFTLSVTISHLSEQTGIDSKERPIMTKAPRVTGKLWLPEKHRLKVWELLLSGAPYTVELIKGKDNRYRAHIAFITQIPEIATNPNQGYLGMDTNPDGVALTNVSYFGQPEPWPEGFTIPYPKALHKFDREFRVTVHPNGFLYIKIPELSYSSSYRRTYLIGVLSKVVTDIAKSLGKPIALENLNFAKDRLDTNKKFNRMASNFPFKKIIEAVIRRAFKEGVGTKPVWPAHTSTIGYYKYMRRYGILIHHAAALTIGRRAIGYKECITKELKQKIQTIKEKLTQKVSSLPGEGKGMTRKAKQLFNRLDRKISVYNGLTRFKQESFYSVWHDLKQLVLLSR

SEQ ID NO: 23698 - protein, 268 aa, unknown
  TnpB Polypeptide
LPKLKAVKARLHREYSGQIKSATVSQVSSGKYYVSILVETEHKELTHTNHNIGIDLGIKDLCITSDGKVYENLKIIKKYEKQLVKLQRQLSHKGKRSKNYYKTKKKIALCHEKIRNIRKDYLHKVSHEIISENQVIVSENLQIKNMVKNHHLAKAISDVSWYELTRQLEYKAKWNGRKYIKIDTFYASSQLCSVCGYQNPDTKDLSVRTWICPKCGAEHDRDINAAKKYTDRRIKTNSIKKYIGQGLPKLTPVEIVGYEVDEAGSLLA

SEQ ID NO: 23699 - protein, 443 aa, unknown
  TnpB Polypeptide
MKDVIIKKIREQVLLHKDDLVVPKEYLLTNNKGMCKKLSKIDQNTWFSLEKSDLFKNDFKLENPKGLLKDKILCRKIKLKLAKDQKFKLDIWFKACTQMYNESIVYIKKTKCTAKRKVRTELKEIRDDIKRNSGVMLGKREIKIYTHTLDSMIGLACTNYKSAFTNLRNKNITHFRIRRWKFNTNKIIKLEHQCLNKPKATFYKLFGNLKTYYDGKEYDLTTIDKECVLKYNVQSNEYYLFIPVDKIAERSENRSNLICIDPGLRTFLSGVSNNHILEIGNNIQSKIKRKYLDIDELKKRKINGKKKKKILLRLRRKLKNLKDELHWKSINYLVKNYDNILIGDLNSKGTVKRGGVLQPMSKRMMYFYSFFQFKTRLKDKCEQYGCTLNIIDEVYTSKMCSSCGNIKTDLGGNKTYNCTNCNLSIDRDRNSCKCIYAKNFLKK

SEQ ID NO: 23700 - protein, 289 aa, Virgibacillus sp.
MLPNGNFVFNYDTENKQLHFKTPSGVFVNMEQVHFPYGQEKVASAIQTQQNCKNKKKYGKPIAWSLEDHGDYYIVKCMMDVETHSQTNDAKSDGVIGVDCNVDHFAIANINAKGQLLSSCTLPFKLEGKTSGQITKIIEAEAIGVVAIALKANKPIALERINTTTSNVSNPYGNKKANRKMAMFAYKKMITAIKSRAEKIGVTVYEINPAYTSQMGKMKYMKRFGISIHQAASYVIARRAMGFREKLPPVLRALLPEKMIGAHHWVQWRYVFQPPEESAYTCILSFRAF

SEQ ID NO: 23701 - protein, 436 aa, unknown
  TnpB Polypeptide
MKLTGDFKALENSLAIYRQALTFLIPIINDGWKELSQYEFANQKYNQIEKWIHSTKNNQAQFDFDQEFPKLPTYLRRSVIAKALGIVSSYRSNLANWEKEPKRQAPQLSLTHYEYPAYYKKNLFRNFDPVKQTIELKVFKNGDWVYKTYKLKTSDCTYYLTHLIGKKQNAPIIQKKGCRFYAVFSYEENVQLVPEESINKICAVDLGLETDATCSIMDKDGTVYARKFISFSKENDQLNTQLGRIKRNQKRGARHNKTLWRSVTGISQDIADKTVKAILDFGNEHGVDVFVLEYLDFKGKNIVKRAHFWRYKRIYKILSQRAHQYGLRIARVNARYTSRLAFDGSGWSKRGREITPETPYSLMEFPNGKTYNADLNASYNIGARFFIRHILKTVTVTQRLALEAKVPQVAKRSTCTLSDLINLRSELAVLTARTQA

SEQ ID NO: 23702 - protein, 377 aa, unknown
  TnpB Polypeptide
MRATVSAKIKITATSEIVKTIKAYTKALQFCVDKAWKKGIRNNVKLHPFVYKHLRKSLPAQLAVACISQACGMVKKTKTKPVIKKASVKYNFPRSANLKGDILVLRLLKNRQEFKLKIPACYKDYFNWEICESILRIDRKNRCFFVFTFSKEVDAIEQNGCSQSIVLGIDLGVNNLAVTSTARFFNSGVVKQAKRKFKYLRAKLQSKGTRSAKRLLRRISGRETRYMTWINHNISKNIIKDFDGAKIVLEDLKGIRKKNRGKRINYWISNWSFYQLQSFITYKANMKGIVVEKVKPNYTSQICSRCGLLGSRSCANFVCSHCGYSLNADLNASRNLASPMLDLRQAVVTQPYNRNYEAEGASQCSTEAEFMVKSPRL

SEQ ID NO: 23703 - protein, 206 aa, unknown
  TnpB Polypeptide
VTQSIVAIDPGVRTFATFYSTESGGFLGGADFSRIQRMAHYLDDLMSRATKANKQKKKRMMLAGLRMRQKVQNLIDELHHKTALFLVKNFDCILLPTFETSQMVGRSGRKIRSKTVRNMLTFAHYRFKQFLKNKAFEHGKTVMDVCEAYTSKTHPETGETKQVGGAKRIRLLSGEWVHRDIVGARNILLRALVDKPDCFTVAVSVA

SEQ ID NO: 23704 - protein, 403 aa, unknown
  TnpB Polypeptide
MPPGFSPNGRSVALLDIQDVCDIIFVMQQRTIICKMDPAPTVSDALKDTLTKFAAACDVILEVAVREKTSNKVKLQHLVYHDIRKQFNLSANLAIRAIARVAWAIKAVKRKDRTVKKFRPTSVDYDERIFTYRENEEAVSLTTVNGRVHVPLVLGTYQRDNLRGKRPTAAKLVYGDRKWYIHIVVEDDPGQRSHPICAIGVDRGVYNIAVTSAGKFHSGRKVMHVRERFASRRAKLQSIGTRSARRLLKRLSGREHRWMRNENHRISKAIVDEATKKRAVIKLEDLKGIRDRLKRFSKTWNRRINAWAFSELETMIRYKAALAGVEVVSVAAKNTSRECSKCGVVDKSSRSGAHFTCAVCGYRLAADFNAAQTISRRQACPERALVMEPMVSSPHVQKQAAGL

SEQ ID NO: 23705 - protein, 405 aa, unknown
  TnpB Polypeptide
LYTVVVKVRYRFRFYPSDEQKFELARVFGACRYIYNWALRMRTDAYYKDGVSVGYCESSTRLTALKRDPEHAWLNKTSCVPTQQALRHLQTAFVNFFEKRSAYPKFKRKDGEQSAEYTRSASKWDAKNRNLELSGLGRLKVRWSRNFKTPPTTITVTKDTAERYFVTLCLDETVLKLEPVHKAVGIDLGIMALATLSTGEKIENPRHLIRAQAALTHAQRDLSRKSKGSNRRAAQKLKVAKLHAHVADARVDYLHKITTDLVRRFDVIAVENLNVRGMVKNHNLARALSDAALGEFLSMIRYKCEWYGRELRTVDRFYPSTKRCFDCGHVLEELDLGCRVWTCPECGKEHDRDVNAAKNILAAGQAVTARGGKVRPKRDSHRKGASLRSANHLEATHIVSGIPGL

SEQ ID NO: 23706 - protein, 654 aa, Nocardiopsis sp.
VSRKIPLTAGETSRTACAPGLVRTGVDETTGQALTAGVLAERVGWAADLVSGMVSSLLSEHWNTTDVHTLAEGVDPAGRRLPSNAWMALRRLGWTTAPPEGVRVNDRIVRMAQEQAGRALRSVKWRADVVAGVLVTWPADPRKRTRAEWEAVRAAIPGGEHLPCSVIKGRTRQTTSYLCKHDRLPADVFELEPSPRVARMLVLSACDGQQASVERSEDGRRVLLRLQLPTRPDPVSHRDWTWVACPITLAPTIPANAVVHLPTLRVVGGKVRADLAYTHPVPKASRSGHTVALGVDWGLNTLFSAGAARLHEDGRITALGAGAQFRAAGVLAKQDRLRELSERLHAKADQYTRLADPALGGKQAVLAQEIERVSQRRSHLNDALACSAARWTVDQAIAAQARVIYLEDLRSMEAGGMGRTQNMRLSQTVRGRIAERMRHLAAEVGIAVVTVPAANTSKHCPNCLTPLRHRKAPDRPTEPGWTWAVCPDRAGCGWQGDRDHGAWRRIAARGLTHQATTVVDKTSATMVIREVIDKLEAKALISTVTQTSRKDRSKTGPTRPRTNPPAPRRRGTPSPSRPQGPAGKRPEGHAPTDRRWLPRAAHRHQGVRTISTTTNRPHWARGAVLGAGFHLHAHATPPRWADPPSDTISLTEDH

SEQ ID NO: 23707 - protein, 389 aa, Nonomuraea sp.
VAQTVKRAFKYRFYPTPEQAEELARTLGCVRLVYNKALEERTRAYTREGKRVSYVESSAMLTRWKRSGEFGFLSEVSSVPLQQALRHLQAAFANFFAKRANYPALKSRKKSRASAEYTRSAFRWWDGQLTLAKMNAPLAIVWSRPLPEGAQPSTITVSKDAAGRWFVSILVEELISPLPAIASKVGVDAGITALATLSSGEKIVSPCHERRDRRRLAKAQRALARKEKGSNNRAKARLKVARAHARIADRRRDHLHKVTTRLVRENQVIAVEDLTVRNLVKNRRLARAISDAAWRELRFMLEYKARWNGRTLVAVDRWFPSSKLCSACGAVQEKMPLNVREWSCACGAIHDRDVNAAMNVLAAGLAESRNACGAGVRPQRESSRAGKRR

SEQ ID NO: 23708 - protein, 460 aa, Sinimarinibacterium sp.
MPDGSCLVQPTDAAPPKGGVVQRACRQRCYPKRSQRQLLARHFGAARFVWNRCLRARSDAYHDPELTEMFGRGLSIGSIELSRWLTEVKRDPEFSWLSEIDSGVITQVLRDQDAAFRNFFAGRAKYPKRRKRGGSAAVRFVFDHRHAGKVKAWDAGTLVLPLLGPIKVVWSRRPSVMPKLVTVSIDSAGRFHVSMAVSETLPTAAPASAGAIGVDVGVKDLAILSNGEKIENPAHLRRKTRHLKRLQRGLSRKTKGSGRYRAHRRRVGRLQAKIADCRRDAQHQASRRIVDAAQIICIETLNVKGMVKNHRLAKSISDAGVSELHRQIIYKADWSGRSVSRISQWFPSSKTCSACGAVNDALQLKDRSWTCSSCSTTHDRDINAANNILAEGLRTLAEIGVGQGVPELMRVEGDTHRRTAAKAAVPTASVETRTVSAPDSPCEPAPVIGVANTWISEAGD

SEQ ID NO: 23709 - protein, 543 aa, Streptomyces sp.
VVGGVRELAAPFVVPGPCGVAVRDRLKHLTPQDEKVLRLVGEHQGRLASRDLKARCADGLEHGAESWASRKRGLTGASSSRIAGAITKATHDQWALARRCQTAHIQTLEAGIRTLRHRLSLPIGAPGTKRAPGGFRSRGEWFHKSRRLKALEARHSSAVRDRQTGRVRVVRGGKRLLNTRHHLAQAHLTEEQWRERWEAERWFLAADGESGKRFGNETIRLTDTGEVSIKLPAPLAHLANARHGRYTLASTVAFAHRGVEWADRIAANRAVAYRIHRDVDRGRWYLTASWRRPAVQTVPLETAQARGMVGVDTNADHLAAYHLDPHGNPTGEPHRFFYDLSGTATHRDAQIRHALTRLLHWAKQTGASAIAIEDLDFTAEKTREKHGRRKRFRQLISGIPTGKLRARLVSMAAEHGLAIVAVDPAYTSMWGAQHWQKPLVTPHRRMSRHDAAGIAIGRRALGHPIRRRTAPPRAHQSDVHGHRTAQAGPGIRGRDGTRPPATDHAPRGVPPNGTRKRRPSASNTVRDAPSTHEWVQDSLMRTG

SEQ ID NO: 23710 - protein, 474 aa, Bacillus sp.
  misc_feature (434)..(467): Xaa can be any naturally occurring amino acid
MKTTRTCKINSITKEQIEDLISLIRTFESAKRYSFNRLIEGENEKELIKKLQPKYLLNKRFCEDAVLQAQTILSSQKELLPVYLENNQKKLEKTLQKKDDYESARKNPKKVSLEICLIGLRKRQQKLEQKIEMYETHIKNGTLPPIIFGGRKNFYERMKDKISNQEWKDLRTRQLYSRGDKSKKENLNMRITVDDCGQGWLEIANPLGRTNGKTKSPRIKVPIMIPYRFYHQITNVVMGKQIGVNPKGKPIIEHQKYSVEIIRKQNEFYVNITFDETEIGRVLDFKETPQSDVIAGIDVNPDRIAVSLCTKQGNFKGSKIFYLHNLNTFSTNKRTTVIGQIVQQIKKWLIENNVGGIVLEDLKFQQSHDTDKYSNRKFHQFTYKKMLNSLIRMALRNGFSVKTVNPSYTSVIGKLKYSKKFGISVHETAAFTIXXXXXXXXXXXXXXXXXXXXXXXXXXXXXXXXXXNSLKKHI

SEQ ID NO: 23711 - protein, 507 aa, Bacillus sp.
  misc_feature (440)..(473): Xaa can be any naturally occurring amino acid
  misc_feature (476)..(477): Xaa can be any naturally occurring amino acid
MKRGKRMKTTRTCKINSITKEQTEALITLIRTFDSAKRYSFNRLIEGESEKELIKKLQLKYLLNKRFCEDAVLQVQTILSSQKELLPVYLENNQKKLEKTLQKKDDYESGRKNPKKVSLEMCLIGLRKRQQKLEQKIEMYETHIKNGTLPSIIFGGRKNFYERMKDKISNQEWKDLRTRQLYSRGDKSKKGNLNMRITVDDCGQGWLEIANSLGRTNGKTKSPRIKVPIIIPYRFYHEITNVVMGEQIGVNPKGKPIIDHQKYSVEIIRKQNDFYVNITFDETEIGRVLDFKETPQSDLIAGIDVNPDRIAVSLCTKQGNFKGSKIFYLHNLDTFSTNKRTTVIGQIVQQIKKWLIENNVGGIVLEDLKFQQSHDTDKYSNRKFHQFTYKKMLDSLIRMALRNGFSVKTVNPAHTSVIGKLKYCKKFGISVHETAAFTIXXXXXXXXXXXXXXXXXXXXXXXXXXXXXXXXXXYIXXLFYLYLTCNIFRFSMSFFFMFLPIIKPFHI

SEQ ID NO: 23712 - protein, 380 aa, Bacillus sp.
VKALLVNKAYKFRIYPNKEQEILIAKTIGCSRFVFNHFLGMWNDTYKETGKGLTYNACSAQLPQLKIELEWLKEVDSTAIQSALKNLADAYKRFFKKQNDKPRFKSKKNNVQSYTTKHTNGNIAIVDNKIKLPKLGFVKFAKSREIDGRIMNATVRRNSSGKYFVSILTEVEIQPLEKADSAIGIDLGITDFAILSDGHKIDNNKFTSKMEKKLKREQRKLSKRALIAKNKGIHLLDAKNYQKQKRKVARLHERVINQRDDFLNKLSTEIIKNHDIICIEDLNTKGMLRNHKLAKSISDVSWSAFVSKLEYKATWYGKTIVKVSRWFPSSQICSDCGHHDGKKSLEIRDWTCPICHANHDRDINASKNILAEGLRTLAFV

SEQ ID NO: 23713 - protein, 358 aa, unknown
  TnpB Polypeptide
MKLTYYCNLKGNKGKLEFLEQQYRYVQVIARYILRYIKATREYRRLEVHKATYGKIKAKYPFLYSSLIEDVRNKVLSSVKAGKLFKVKRLNIPLTFDRHNFDMEFTEGYYNAWIRICKRNYPLEGLRTINKLKEVTEIKRIEIKKINNNWRIYFICEVPEQGNVKGNQKLGMDINADNITLSNGKRYSLKQYVHKKMEYRKHKQKKKLANYSKDFFHKLTSELVKYLIEMGGSQIILENLTNIRKSSSRKEGTSKGKDVNYLINNVFPFRMFQDFLEYKCKLNGIDVVYVDPKNTSKMCHFCGSLDTERPRRSLLVCNSCGRRTNADLNGAINILLFSQKDGLLSRSNQALVIVGGDR

SEQ ID NO: 23714 - protein, 217 aa, Methanococcoides sp.
MGANPKKVNPNTSIGIDVGLNSCVTLSNGEQFDSPTYFRKSERSLAVQQKRLSKKKKGSVNRLNQKIKVVKIHRKVRNQRLDFNHTLSRALVNRFDRILFEDLSIKNMVKNHHLAKSIYDVAWGQLIQMAKSKAEEAGKYVELVNPYNTSQKCSSCGNIVKKSLAVRVHRCQECGLELDRDVNAAINILDLCTVGTTDRACGVTDVGLGFEAGSHPF

SEQ ID NO: 23715 - protein, 372 aa, Methanococcoides sp.
MNVDRTIKLKLEMSDEGKENLKQTVVLFNQVFNEVAEYGFNNHTHSKVSIHHATYKDIREQHPELPSSLVQGARDVACEALKGVKLKTCPESQPYSAIRYNKRVVTIHMQYNSATIASIHGRVNISFNIPEYYKQYLGWEIRSSTLRYDRRQDVFYLHVTLRTESPKPVGNTILGIDRGIVNVAVCSNNVFFNTSSIKNTRAKYAYLRKELQSKGTKSAKRLLKKISRKERRFVTDVNHCIAKDIVNMPFDVIALEDLTSIRVQKRKGKNFNRKLNNWSFYQLEQFIRYKAEAVAKQVVSVDPRYSSQKCSKCGHIYKGNRDGSSYRCRNCGFQIHADLNAARNIAQAGISCLSRLTVNQPNVGLKVPLDAT

SEQ ID NO: 23716 - protein, 372 aa, Methanococcoides sp.
MLKAYKYRLYPSESQSEILMKHIGACRFTYNWALEQKNKAYEVNKEHLSRFELQHRLVHDLKPNNEWLKEVNSQSLLNTLINLESAFTRFFREKKGFPNFKSRKNSVQSFQIPQHYSVDFETNTIKLPKLKQPIKAKLHRKFEGTLKTATVSRTSTGKYYLIILIDDGKELPVKQFFEDRTTLGIDVGLTNFAILSNGEKINNPKHLRNSMDRMKILQKRMSKKQSGSKNRNKSRHNVAKLHEKIRNQRNDFLHKTTSKLISENQAIAVESLNVSGMLKNHCLAQAISDVSWSEFFRQLEYKADWYRKTLLKIGQFEPSSKLCNVCGFHNNKMTLKDRDWCCPECNTEHDRDINAAINVKKFALQNQNLLNI

SEQ ID NO: 23717 - protein, 378 aa, Escherichia sp.
  misc_feature (49)..(52): Xaa can be any naturally occurring amino acid
VKRLQAFKFQLRPGGQQEREMRRFAGACRFVFNRALALQNENHEAGNKXXXXQPLQQSLKDLERAYKNFFQKRAAFPRFKKRGQNDAFRYPQGVKLDQENSRIFLPKLGWMRYRNSRQVTGVVKNVTVSQSCGKWYISIQTESEVSTPVHPSASMVGLDAGVAKLATLSDGTVFEPVNSFQKNQKTLARLQRQLSRKVKFSNNWQKQKRKIQRLHSCIANIRRDYLHKVTTTVSKNHAMIVIEDLKVSNMSKSAAGTVSQPGRNVRAKSGLNRSILDQGWYEMRRQLEHKQLWSGGQVLAVPPAYTSQRCACCGHTAKENRLSQSKFRCQVCGYTANADVNGARNILAAGHAVLACGEMVQSGRPLKQEPTEMIQATA

SEQ ID NO: 23718 - protein, 503 aa, Chlamydiae sp.
MNEQIFTYQTRFQLDEIGSTILEECAQLFNKVEHSLFAEIARGKTSASCKNGFLKKYGITARQFNACRVNIDAKIAACQAGQQNALISLKEKIATADRQIAKLTKKPSKHFVIHQKKRRKFSLTHRYSQLQNDQAKKKVRLCFGSKKLFRAQFHLEENGFSSHEEWKKDWTTSRSNEFFVLGSKDETAGNQTCTAILNQDGSISLRLRLPPVLAQKYGKYIHINNLTFAYGHQAILASIHDPEGTAISYRFKKDSKSWRIFVSTSLQRPIQITQTGIGVIGIDLNTDHIACVETDHFGNPIKKQIFSWVSYGKSKNQLKAATSEISKQIIEWALRTKKPIIIEKLDFQKKKLALKEQRNKKLARMLSSFAYGLFFQSLLSQSYRKGISIHQVNPAFTSIIGRVNYARRYGLSIHLAAALCIARRYQQFSESPNLSTKKIPDGKGCHVAFDPPARNRTKHVWHFWGQVKKKTTVHEAHFRARKHRSSDPPSSIPVTEIPEELLA

SEQ ID NO: 23719 - protein, 382 aa, unknown
  TnpB Polypeptide
MYRAVKIRLIPTAEQEIIFKKSVGTARWAYNYFLSENRRTYEKTGKGVSEDEIRKHINNVLKKTTHTWLKEVSSNVMKQAIKDADIALKRFFNRVSGYPKYKSRHRSKPSFYVNYESLKRLPNGFQGEKLGYVKTASSLPKIKGKYSNPRISYDGKHWYLSVGYEVKPEKVKLTGASIGIDLGVKELATVSTGKVYGNINKTRRVRQLKKRLRRQQRTLSRRLEGNIAKRDSLNHPIWKRPLRECRNVERQNALIRLTYKRLTDIRNNYLHQVTSEIVKTKPSRIVMEDLNVRGMMKNRHLSRAIAAQKFYEFKRQIKYKCERYGIMFVEVGRFYASSKTCSHCGHIKADLRLSDRIYKCAECSLVIDRDLNAAINLANYKI

SEQ ID NO: 23720 - protein, 763 aa, unknown
  TnpB Polypeptide
MHTVQLLLKTSKYERHEIDRRFHALAHLHNVCVKHARKCMIRLQHDKRYAELRQLYNELVKKEKMSKEEKSQKKKLAKQLAACRTEQGLSKASLEHYIKVCGKQFSKLLSSQQVQAEADRVWCGVERCLFGNGKELHFKKLMDFDTIGGKSNKNGARFDLDAMHVNWLGLSLKCYLPKSENSLSYVWESLKGKISYCNIKRLMFSSGWRYYAEIVVSGAAPTRVSIGTSTMGIDPGVSTIAGVSEDACVLEELAPNAIQYEKKIQKISQRMDRSRRISNPNKYNEDGTINRSNRDPWKYSKNYVKMCRLLKSLYRRKHAYIVDSHRELCNKLITIARYFPVEKMHFQALQKKAKETRRQEKKTEVKQKDGTVKGFSRFLTDIRRIDANYNVRYLEAEYNFAVSSAQMAASWAEVSQDGDRYDLQYRTAGDDHVREEHRPLNGVTLPPSNDFWRYYYPPNGWNCRCTAVQVLKGKYPTSDDKQAIQAGNRMTDTPKKRIFRFNPGIDGQLFPPKHPYYKLSREAAEQVKKVVIELQADPIETPEQLADELNRIGKRWFEHGPAQLSTTTQKGVNGYTYMDGRIYLAPERMQRAIDGINRMSEGTAATFEQEDALSTLWHEITHNRNKHGNMRLGKTETRYMELANEFVTRNTLSEFFGALGGELHAKELLTNRVSTGYNRMVRNFDALIDATGADRKTVTEAVQDALFNTPYDKQKEGLVKSLIKGGAKKKDGTVLKKGELGQWMKYCVDFGEDMLKTLFKTSL

SEQ ID NO: 23721 - protein, 384 aa, unknown
  TnpB Polypeptide
LLKHKRWELSVLGYNKFASLQSYQFGYFNRDQYKKSHRKNIRKYCEDKRKVVKNLITGRVNLIVEKFEFNSINCQLLRAEVDNTQFDLSENSNFDLLFCLNSMYSKSYKSCRKQKGIKNNHLYIPLCSHHHFNELKSGVVANVQCKLIEIGKSILVSKEGIEVRFKFKPLAKKAEFKNKIVGIDQGQRKLFTAVSVTPETITTNKNEVISYANEKTLKETDLTNQSHGYAYAHTYNEVCDKIARRQKGSKGFKRAQSHRENLINQAVNLLAELFDFEDDVTEVRLEKLRRLGDGKKKSRKLQAFNYADLRHKLERKCQETNVSLTETSNAYRSQRCSLCGFVHKKNRLNGGEEFKCIKCGYSTDADYNSANQREPSSEFTTNLR

SEQ ID NO: 23722 - protein, 476 aa, unknown
  TnpB Polypeptide
MSTKSFIISLPIITGDQDRRRLQKSFSFGCNLQNAVMGGGWDRVLQMRATPEWQATRAMPKGRERTKAFRDLRVRFRLSEYDFHADVAMHRKASGRGHLLGINECQKLASRAWISVERHLYNGGSPRFISSRRGLHSIEGKTNRTGIIWKADQQCVTVCKRVYRVRVDKRDDWLTRALQDPTDPTKPRKVKYCRIVREMRKGKERFFLQLVAEGSSPLKHAYAGKDLRMAIDPGLGSLTYATEDGTIAKVQIAPSADTDHRAIRRIQRAMERSRRATNPDNYEAVDVVRHGKKKKSFKVKSGRLQWRFSKRYESLRAELAEIFRLSAATRKREHGEVCNWLLGHAGHIIVEDNSYKAFQRGRFGKTIGRHAPAALYAQLTNKAESAGLLVEVVSPKKLKPTQHNLLTGQFVKHELWERRVRLGEDDDDRWIDRDAAACLNLLYADLEKQIHGQLPVCKCSGDFLSLFALLRAKCTP

SEQ ID NO: 23723 - protein, 273 aa, Tissierellales sp.
  misc_feature (261)..(265): Xaa can be any naturally occurring amino acid
MILTYKIKHGRDFSDELRKAKKVAKYAIQTRSRSSKDVKHIGLKSMIANQILKKYSNKGRAKKVKSVKLAIPNQGIRLDKDTRTIYAPCLKLSLRYEFPNDFEKVNQIEVGEEYAYVSVSIPEPEIVKPEAWLGVDRNTTGHIAVVSDPDSGKVLKLGKSALHIHKKYKNMRRSLQKQGKYGKVKQIKDRESRIVRDINHKVSREIVDTAKETGKGIKLEDLTGIRNSKKQAESFQYAKHSWSFYQLQQMIEYKAKLLGVXXXXXNLVVDVDS

SEQ ID NO: 23724 - protein, 392 aa, Anaerostipes sp.
MRKLRKSYKTEINPTQEQIQKINKTIGTCRFIYNFYLAHNKELYNKGEKFMTAKSFSVWLNNEFLLNNPEYLWIKDVSSKSVKKSMENAYTAFTRFFKKQSRFPRFKKKNKSDVKMYFVKNNPKDCFCERHRINIPTLGWVRLKEKGYIPTTKQGYVIKSGTVSCKAGRYYVSVLIDIPNTEKPKLNNFGLGIDLGIKEFAVISNGIRKKNINKTAKLKKLEKQLKREQRCLSRKYEDFKKRNNKMKGEATRQNIQKQVLKVQKLHHRIENIRADYINKCVNEIVKTKPSYITIEDLNVKGMMKNRHLSKAVASQKFYEFRTKLEAKCKELGMELRIVDRWYPSSKLCHECGCIKRDLKLSDREYICECGYHADRDYNASLNLRDATSYKIA

SEQ ID NO: 23725 - protein, 389 aa, Anaerostipes sp.
MIKTIRVMLIPNNKQKTKLFQYANTARFAYNWALGREQENYKNGGKFISDGDLRKEFTQLKKTDEYVWLKSVSNNVTKQAIKDACIAYKNFFKGKSKYPRFKSKKKTRPSFYQDNVKIKFTNTHVKFESFSSSKKRNKAKLNWVRLAEHGRVPTDIDIKYMNPRVTFDGIHWWISVGIECPDNEEIPMNDGIGIDLGIKDLAICSDDHTYKNIHKSKTIKKLEKRKRRLQRSISRKYENNKKGESYCKTSNIIKREKELLKVNHRLTNIRKNYLHQTTSEIVNRKPRFICIEDLNVKGMMKNRHLSKAVQQQGFFEFKRQIEYKCKNNNIQMVIADRFYPSSKLCSCCGTIKKDLKLSDRIYKCDCGNVIDRDFQASINLRRYGEQFAF

SEQ ID NO: 23726 - protein, 544 aa, Streptomyces sp.
VGEVRSIEAPFVASGPSGVAVRTRLKQLTPGDEKVLRLVSGHLGSLASRDLKARCRDGREHSADAWAVRKRELTPASSSRWAGSITKATHDQWALARRCRSAHIQNLEAGIRTIEARLALPVGQKGTKKAPGGGYRSRREWHAKSRRLRVLQDRLAAARADREAGVVHVVRGGKRLARARHHLEGAGLTESVWRGRWEAERWFCQADGESGKRHGNETIRVSPEGEVSIKLPAPLVYLANAPHGRYVLACRVAFAHRGSDWADRVAANRAVAYRIHLDTGRGRWYVTASWQIPPTPTLPIEAALAHGVIGVDMNADHLSAWRLDVHGNPTGAPRRFSYDLTGTAQHRDAQVLHALTRLLHWARTCGVTAIAVEDLDFTTEKTREKHGRRKRFCRLISGMPTGRLRARLASMADATGIAVIAVDLAYTSRWGAQHWQKPLTSTTRKTTRHDAAAVAIGRRAQQHPVRRRTAPPPHDRSDRARHRTVQARPGAAGREETRPRIPGPRTRSVPPGGGANAGNQNAQHRPGRSTEHGFWQQDSLPLSP

SEQ ID NO: 23727 - protein, 422 aa, unknown
  TnpB Polypeptide
MQRTVKLKLEEDKDLINTIREYSLIKQWVCDIGLKKKSYNKNELHNWTYKKLKKQYPNMPTGILQTARDVASETLKRTKLKKKINGKEFSSMRLDKRNLRVSMENNKISISSINGRKKLTFKHNPMSIKYIKWSAVAGTLCYKKNQLYLNVVLEIKTQPQIVVDRKYPDIVKIKNGLTHLNLTNQDDIPEELNVGRFVNKDIVGIDRGIINIAVLSNNQFFHSRHLKNIKGKYQYLKEVLQNKGTKSATRKLQKISRKETRFVSDVNHCLSKTIANSDFKVFCFETLKIKKKKRTPEERKKDNIFRSQEKAFNKKLNGWSFGQLEKFVTYKIENKGKIIVKAPINFPSSQICSCCGYKDKANRNRSKFKCLKCDFELHSDLNASRNLANFGKSEISRLLVNQPIVALEKSFSYKPINSLMGN

SEQ ID NO: 23728 - protein, 357 aa, Rhizobiales sp.
VIITFRYRVKDGSQRKHLSRLATACNQVWNFCCATQRESESRWKQGRVAKWKTHFDLINLITGCAAELGIHSDSASAICGAFAKSRDKIKHAPKFRASFGSKRALGWIPMVPRAFKLTPGAITYKGRTFHFWQSRPIDGVIKTAQLVENASGKWFVCFSAEVENKPSSGVGEVGIDLGLKTLATMSDGGKIDIQRTYRRFEPMLAIQQRAGNKNRVRAIHRKIADIRKDFLHKAANAIVAANSVIYVGDVNAAKLAKTSMAKSVLDAGWSMFRNMLAYKSSRAQVHFAVVNERMTSQVCSECGCLPLSRPRGIADLDKRHWICSDCGSELDRDVNAARNILRRGREHSPLVAEIPVL

SEQ ID NO: 23729 - protein, 442 aa, Lactobacillus sp.
MVKLNTQIMSLFSKKGDEIMAFKTKLAEQEIQLGTRQYRIYPKGEEIAWIWQLFGANRFVWNQFVATFEARYKANSQLKFPKIGILKSWLPLMRKEHEWLKRINSTSLQFTVERFSDAMWAFLTKKQIKQGKPRFKSRKYYSQTATIKNVKYQTKAGAQAQIKVLSPHHLRIGRKNGIILRTSSLHNLRNVRIQKAVISYRQDLDRYYISFSVVKNKRQLAQYSAKSTKTGKMVGIDVGLGREWLVTSDGRRFNVPDTFKLEKEMIKRQSHCDRNRTAIEKRVARFNHERENKIDKYDYANWQKLRKTKSKYQLKIINVRYDYLQKVTTELVKSYDVIAIEDLKVKNLLGNHKLAHNIANASWATFRRLLAYKCEWYGKKLIVVAPQYTSRICSACGRKNPQFAHMKTRDWLAVRSWTCPFCQADHDRDVNASKNILAKAIN

SEQ ID NO: 23730 - protein, 395 aa, unknown
  TnpB Polypeptide
MILVERHIINKNHKHWQEIDNLSFLSKNLYNAANYLCRQYFFATQKKYSLPELYKLTKDLVECWGKESSFPQTLVDYRALPTKVSKQIIKRLVSTWTGYFEAHKEWTKNPSKFLGEPRIPKYKDKAKGRNAVIYYHESVYKAGLKKGICHLSMSDIKIPTKIDKVVEVRLVPRPTCYIVEIVYEKESKQQSISEYVAGIDLGLTNLPLKSVNQFYNKTKSKLQSLLGNKRKSSKRIQAITAYRNNYVDNYLHTTSRTVVNLLKVSDIGTLVIGKNDNWKQNINIGKKNNQSFTQIPHARLIDQIIYKCQLAGIKVIVTEESYTSKTSAIDLEAPTKHSVYLGKRVKRGLFKSSNGIKINADVNGSLQILRKVFPNAFTAEGIASAAVAPVKVLPL

SEQ ID NO: 23731 - protein, 202 aa, Fusobacterium sp.
MEKAYKFRFYLTKTQIKKLNSTFGCVRYVYNHFLDLKQKLYSTEKKSMSYSECSKELTVLKKDKEWLKDVDKFSLQNSLKDLDVAYKNFFSGKGYPKFKSKKDNRKSYRTNYTNNNIEFLDKWIKVPKLGRIKIRDKMTPQGRIISATITQVPSGKYYISLCCTDVEVKKLESTNRNVGIDLGIKDFAITSDEAIIENPKYL

SEQ ID NO: 23732 - protein, 448 aa, Okeania sp.
MYQAYKYRIYPTSEQQLALAKSFGCCRWFWNYSLNLCHETYKNTGKSLSRAAIQKMLPQLKKEHEWLKTDTYSQCLQVVALNLSTAYKNFFDRQAKLPKFKSKKGRQSITYPQNVEFQDNYIKLPKIGLVYYRRHRDFSGEIKTVTVSVNPDGKYFVSVLVEDDLVNPEKLAEGKAIGIDLGLTHFCITSDGSKYQNPKNIAKYTLNLKRKQQKLARKQKGSNTRNKARIKIAKLQGKIARCREDFLHKLSRAAVATTGGTPATRCLKIVNENQVIAVENLAIKKRCDPTSAKDALGSAPRHNNLAASIGDGAWGMFETMLSYKAEREGRIYIEVDRFLPYSQTCNICLNQVGSLSLNVKNWTCEHCHTTHNREINAAINIKNEALRILRVRNLPLHDKCQMHSKQELGISSTANLRECKSPGKTSVLLDAIPSEDGNLSYSNSYSIG

SEQ ID NO: 23733 - protein, 365 aa, Dethiobacter sp.
MQITVKIKLQPTKKQADLISATKNEYIRLVNQIVSEYVEADENLKYSSKDVKAFLPSALKNQAIQDARSIFVKYKKQRIANDRLEPENQREIKVPILKKPVSIWNNQNYSLQSNILSFPVWLDGKSKRIAVNAVLTEYQLNKLTGKLGSLRITEKSGKYIAQIAVDAVEEHTDADKTMGVDVGLKIPAVAVVEGGKTKFFGNGRQNKFIKRKHRSTRRKLGQLKKLSAIRKRHDKEQRWMKDQDHKVSRQIINFAKEHNVGTIHLEKLSGIRQTARTSRKNEKNLHNWSFYRLAQYIEYKATLAGMKVKFVDPKHTSQKCPQCCALNKAKDRNYQCGCGFIAHRDRVGAINIISATVADGHSLPA

SEQ ID NO: 23734 - protein, 302 aa, Moorea sp.
MIILEFKSYGKNHQYSAIDEAIRTVQFIRNSCLRYWMDNKGVSKYDLNKYSAVLAKKFPFANELNSTARQSSAERAWSSIARFFDNCKKKVPGKKGFPRFQKHCRSVEYKQSGWKLSPDKKSIVFSDKKGIGKLKLKGTWDLWRLDKKQIKRVRIVRRADGYYVQFCVQVDINEELEPTSKNVGLDVGLKDFYTDSDGLTEPNPRFYRTGEKRLKFHQRRVSRKKKGKAVGHASRTANRRKAINKLGRIHLRISRQRVGVACAKRIEHAKRLVRSYRKKSAAFIVGRLCIKGDRFCCKAALF

SEQ ID NO: 23735 - protein, 201 aa, unknown
  TnpB Polypeptide
MYFVKNNPKDCCCERHRINIPTLGWVRLKEKRYLPTTKDGWRIRSKYENLKKMRKGESAQRANIQKQKLRVQKLHQRINQIRTDYINQTIAEMVKTKPSHITIEDLNVKGMMKNRHLSKAVASEKFYEFREKLMMKCHEEGIELRVVSRWYPSSRKCHSCGCIRKDLKLSDRIYRCSCGYVEDRDRNAALNLKDAETYEIA

SEQ ID NO: 23736 - protein, 372 aa, unknown
  TnpB Polypeptide
MLLAHKIELRPTPAQADYLARACGSRRHCYNQLLAHFSQPGMTWSKAAAYQHYIKVLRPQFPWYSEVSSRVTRNAIDDLDNAFKHFFRRCKNGEKPGFPKFKKKGVNDSFALRESPKFGIDGRKLRIEKLPHCIHMRQKVRFSGKQKQVTLSQRAGKFFASVLVNTQDYNPHAPDKDRVGVDFGIKDLAILSTGEAIPANQKLKCNLKRLKRRSRNLSRKQKGSHRRAKAKLSLARLHLRIANQRQAVLHGLSDRLTREYKTIVIEDLNVRGMVRNHCLARAVSDAGLGMLRRQLEYKAEWRGNRIVLADRFFPSSRMCCGCGQLHDMPLDRRVMQCDCGTVLDRDHNAAINLERMGLDTLAPDLKRAQETG

SEQ ID NO: 23737 - protein, 478 aa, unknown
  TnpB Polypeptide
MKAILINETQEQKQIIDNIMLIFSTAIRYSFNRLLENVKISELEKIVANKYNLNIRQAKDVVESARQTIISQKELVKINYEEYQKKVKDIEKILNNKTKKLSNKKKNVLLSKLAKRQMKLKYWKNFIDTKTIPSVIFGTKEMFLRRCKGLISNQEWKDCRNNRIYSRGDKTKKGNPNLRVIINKGISFLEISTLEKTKTNRAIKIQVPIYLPQKLSKKTDKINGINYRQLFLNHLKTGEAYQVEIIKKNGKYYCHITFELPKTKVIYTGHNEIIGIDTNPDGFALTMIDNKGNHKWHTYLKQHELVYARGNRRINLCGELVRQVILIAKTCGCGIAIENLKFKKDKDVNSKFARIKNNFIYSTLLTMLESACYREGIEILKVKPQFTSKIGLYKYCHQYGMVVHNGAAMVIARRSYKFKEKIPKILKDKLVKDIETFNKKNEWSRWNYINKKILKIRKDVKNPDLWLANRKEILRFVS

SEQ ID NO: 23738 - protein, 435 aa, Aphanothece sp.
VSLFIKYVKIGGMITVTHDFKLKPNQSQIETIETYLEACRRVYNYALRERKDWVNSRKSPINCCSIHSEYIISPETPRPTYNSQCKSLTEAKKIYPGLNFPHSQVLQQTLRQLEAAFVNMWERSFGFPRFKKCMRSFVYPSVKNEWVGDNWVNLPKIGKVKIRRSRPTPEGFLLKQIRVVKRASGYFVLLVYQLAIDVPNVPIHGHPLGVDIGLDFYLATSDGELIKRPRFFNRLSGQLKLLQRRLKNKKKGSNNWLKLQSKIAKLHQKIHSSRKDWHYKLAHRLCDTAGMIFVEDINFKAWAKGLFGKHTLDAGFGQFFEILSYVCWKRDVFFLKVNKDYTSQICPNCNTHIGKKSLNERIHSCSCGYTTNRDTAASQVIRNRGLIAVGQPVIQNACGEVLSGFDSNIRLSEDSLKQESNRFIGWSVKRINLVL

SEQ ID NO: 23739 - protein, 353 aa, Burkholderia sp.
MAGMILVYRYRVKSLNGLLNKQSRAVNYVWNFCNDTQKHALKWGKKWPTGFDLNVLTTGSSKALGIHSGTVNATCEQYAKSRSQRRRPYLRYRGRKSLGWVPLKGRDLKREGDAFRFAGHTFRVFNSRPLPDGKIKDGTNFAQDARGNWFLNIVIEMPDVPARPVRSGVGIDLGLKDFATLSTGEKVPHDRFGRRAADKLAKAQRARKHKRHIAKLHAKVANARADFQHKLALDLVRRFDYIAVGNVSAAKLARTRMAKSVYDAAWSSFRDKLRYKAMAHGATFEEVDESGSTQSCSSCGSTDSTTRPRGIAGLRIREWTCSGCGVVHDRDTNAALNILRCGRASPVVGIARL

SEQ ID NO: 23740 - protein, 370 aa, Halomonas sp.
MKTERAYKYRFYPTSEQAALLARTFGCVRYVWNAVLRHRTDAFYQRQEKIGYNDASAFLTQLKKQPDTAFLAEVSSVPLQQCLRHQQAAFKNFFAKRARYPNFKSKKHRQSATFASSAFSYRDGQITLAKCREPLNIRWSRELPSAPSTVTVSKDAAGRYFISCLCQVDAQILDVTPNMVGIDLGLKDLFVTSDGKRVNNPRHTARYARKLARAQRQLSRKQKGSNNRAKARLKVARCHAKIADTRLDHLHKLTCQIVNENQVVAAESLQIKNMVKNRSLAKAISDVGWGELVRQLDYKAAWAGRQFVQIDRWYPSSKRCHGCGYVMALLPLNVRTWDCPGCGTQGIDRDLNAARNILQAGTALLAGAER

SEQ ID NO: 23741 - protein, 379 aa, unknown
  TnpB Polypeptide
MEQMTITAKVQIVATDADKVLLDETMSVYRDACNYVSDYVFQTHDLKQFSLNKVLYSTLREKFGLKSQMAQSVLKTVIARYRTILENHNKWIRPTFKKPQYDLVWNRDYSLTQNCFSVNTLNGRVKLPYFAEGMSKYFDHTIYKFGTAKLTNKHGKYYLHIPATYDVEESNISDICNVVGIDRGINFVVATYDSKHKSGFVSGKTIKQKRANYSKLRKKLQMRQTPSSRRRLKAIGQRENRWMQDVNHCVSKALVENNPKHTLFVLEDLSGIRNVIERVRIKDRYVSVSWSFYDLEQKLIYKAKQNQSSVIKVAPHYTSQCCPVCGHTEKSNRNKKIHLFTCKNCGYKSNDDRIGAMNLYRMGINYLVDSQVPNTVVTE

SEQ ID NO: 23742 - protein, 421 aa, Methanosarcina sp.
MQLTKKIKIYPTEEQVNVLWELSEKCRCIYNLALADRKNAWCNEQRSVGYIEQQNKLPEFKENNPEYKVVYSKVLQGVLKKLDANYKSFFALRKNGDMTARLPKFRSNKYFMTLCYNQSGYKINNTNIKFAHSVNKTSLDFEFNEILENVRQVEIYNDDPYKGRGDFYLSVTYDVFPKAYTDNGCYQAIDAGITKIVTCINLKGKIHEVKTPRPDKYWQKKMDSIKSKKDHCMKNSRKYLKLHKNYRVMETKKSNQLKDFQHKLSRKMVENTRANTIIVGDLKVKKMAQPKIINGEKQKKTKRIRSRNRSTQNQGYLSRFIEFLTYKAELRGKRVIRIDENYTSKECYLCGKRHDMPLGKRTMECDCGNVIDRDRNSAINIMVRFLSQNALWTGYLQFVDNLRQTGLPMRIRFLESDFQMK

SEQ ID NO: 23743 - protein, 652 aa, Patescibacteria sp.
MELEEKPPDPSEQVYRIIKCPLKCVLKRYDTLHPIIEKAVIDMNEIVILSYQFIRMYLLNKFNNNQELPTINKQFVLDVIKTISSPNSKRGQKTKEENIKNATRKSDMKQFYNEEFSKLVSLRPSYSNKTHIIAITANEMITCINTNISTHFIKHLFKYINCLFREQKSLEIKKEKDKEKRKELYKQLNKEIRDLKSDLINNKIENSKEEYHSWIRENKGFLFPTKISKSVVYDVKANPEKYIKHSFYINQKIEELGKRPYQVIPQRNNIVPKSIKLNSNGIVDLIDDKKQTIFQYNKSELVLHAKKHQKHIWSKILKLEKKHIFKQKEYVFYNQIITDGFSCSLLFILKKYKDKVFGDKLPKVNDEMEFTKLEDLSKEKCDEYLTDKYKLVSLDPGKIRPITMIDENNKFFKYTACRRRFETYTKRSNYIILQEKKKNGIIEKETKLSNFNSRTLNQDKYSNYITNKTILNNKLKEFYQKPLFRKLAFRRFIRTKQSEVKLLNEIENTYLTKEEIKQGKKIVILHGDYSRTSQMKDCISTPNIGMKKLLFSRFDIVEVNEFNTSKLYNKSLKEMENVIVRRKKHKKSLHEILTPKEETKCRIFVNRDTNACKNILLLGKCYLEGQTRPEQFTRKTIIKEKVKKPRKTNKKI

SEQ ID NO: 23744 - protein, 299 aa, Streptomyces sp.
VGGTLPGSKRRVRAESKPIAFRPEAAQPYDDRCLSWQYDAGTVSIWTTAGRLRNVRFTCSPKALKMLCEYRKGESDLVERDGVFYLVAVCDIPEAEQYEPLGFIGVDLGIVNIATTSTGYRAAGRGLNRYRKRQLALREKLQAKGTKSAKRLLKKRSRKEARHTAHVNHVVSKTIVTTAERTGSGIALEDLTGIRSRVRHRKDQRTSLHSWGFHQLAAFVEYKARRVGVPLVYVDPAYTSQQCSECGYIDRKNRVDQATFACRSCGALMHADDNASHNIRRKGETVWTAGRESRAPAIP

SEQ ID NO: 23745 - protein, 382 aa, Mycobacterium sp.
VRGYRSAAERFAKTRRLAVLKARLAAAEAALAAGRPSITVGGKRLWRTRNHLDAADMTEPQWRARWNAARMFLTADGESGKPGGNETIRVDEHGHLRVKVPAALAERFGTHLTVAAPVAFHHRGTEWAGRVQHRRAVRYDISHDPDRDRWYLDASWRTAPETVSGIDQLRDGPVLGVDLNAAHLACCVLDASGNPIGEPVTVAVQTSGLRASRRDGRIRMAITALLDLAAQHNCTAVVVENLDFADARATGRETLGRGGRGKRLRSIVAGIPTARFRNRLVGMATRRGIGVIGVDPAYTSRWGTQHWRTPLQQQTSDPATVTGHHGAAVAIGRRGLGVAIRRRPVGPRTRQRTGVGTPPARPEHPPRTTRRCRSSGSPPRPP

SEQ ID NO: 23746 - protein, 359 aa, unknown
  TnpB Polypeptide
LLVSAETHSALDAVRHAFADACNDIVPYAKENRVFNNVRLHHLCYYDIREKSKLGSQFTCNAIKAVAGKYKALKLKKNQDVPHIQFRSKSVHYDKKTYTLKDDNTVSLSTLGKRVEAKFIWGKHQKSLFEKGLPKEAELNFKNGTWYFNLVVEISTPERVSSNKVMGVDLGENNIAATSTGKVIGGGKLRYDRDRFLAIRRRLQRNGSQSAKQLLKRLSGKEARHVTQVNHQVANAIIAEAIEHNVGVIALEKLTNIRKRIKAGKRVRARLHRWAWYQLQTFIEYKAEAVGIEVIYVNPAYSSKTCNKCGAIATRNKHRLTCSCGNRAHSDLNASQNLAWLGETAVSSRGAVNRPNVAA

SEQ ID NO: 23747 - protein, 443 aa, unknown
  TnpB Polypeptide
MKMIRSDKLKINTSTQDRKVLSDTLVYYRKYVRDLMVLINARWKTLQKASGNECIKLVEDLIHPTSSRPTIKHPHFHKNYYKFPSYLRRVAIMDAFGQVSSFQTRYSDWLDAGMKNMPPKLTCATNTYPSLYKGQCVKFSEDNRMAFIKVRINSEWVWQAFRLSGKSRFLGRGRAMSPLLTLKGKQWALSTPTKIDMPLKENADFSGQVLAVDMGINTAAVCAVVDKYGTVVHRSFFDRTDKDRVYQIMQRIRSKAKKATRHGSKIPSGFCASEHRRLRQLNQNMSHQISRKIVDLAHKFGCDGIIIEDLKRWKPKGHSKTMKIKFHNWFKSSLSDNIQSKSVEIGVRTHPVYARGTSSYAYDGSGKLLRDKDNYANARFISGKRYNADLNAAYNIATRGIIKIYYPQLRKQMWSRNKPNACPTTGNPLVLSSLWLLEQPKEG

SEQ ID NO: 23748 - protein, 403 aa, unknown
  TnpB Polypeptide
MERTYTYKFRLYPNKEQEIYLANVFGCCRLVYNHFLDEKKQQYEETKTSDSYNVQSGKLTLLRKTDGYEFLKNVPLQVLQCSLRNMHTAYENFYKHRSSYPKFKNRRDRQSFKLPQEQSFKIKDNKLYIPKLKSGIDIVMERVIVGTICFATISKNKAGRYHISITVKQDYIPYGKTNRSVGLDLGIKDFVITSDGMKYKNHRSIIRTLKRKLKHNQRHLSRKIHGSKRYENQVLKCNRIYQKITDVKTDYIHKITNELVRNYDVIKVEDLNIRGMMKNHKLAEAISECNWYQFIQTLEYKCLWNEKELIKIDRFYPSSQMCSECGYVEKKVRNLNVREWTCCNCGCHHDRDVNAARNILKYNSVRNTENSRGVVKQLNEKPNLISDCSDNCEATIELDNLQD

SEQ ID NO: 23749 - protein, 362 aa, unknown
  TnpB Polypeptide
LKNPGAYRHQSRHVLKKENIPVAYMQMGIVHEQGSGSVRLSLPKALKIYMEKTFGIHEKFLYLENKIFRSMDQIKQIRIYPPEKGTSRIIVVYEIPDPEILPDKGHYLAIDLGLHNLMTCYDSGNGKTFILGRKYLALERYFHKEVARIQSVWYGQQSAKGIKYPRSSKHIQRLYKKKQDAVTDYLHKITMYLTEYCKKQGITCVIVGDIGNIRKNKDMGHMTNQKFHGLPYNRIYIMLEYKLKMYGICFVKQKEAYTSQCSPLSPEVTKKYAAPSNRKKRGLYRDNTETYNADAVGAFNILRKYLSVTGEQKELSVKGLKNPEIIKSSCIAEKQAVVVLWTHPENKALTRLLRCSGNSVAE

SEQ ID NO: 23750 - protein, 275 aa, unknown
  TnpB Polypeptide
LVIPKFKSGIKVKVHREIKGKILFATISKNTTGKYYVSVTCEENYQPYSKTKTSVGIDVGIKDFAILSDRKVYENIKPLKTKLKKLKYNQRQLSKKIKGSESRNKQKQKLGVIYENITNIRTDYLHKISTEIVKNHDIIVVEDLNVKGMMKNHKLAQAISDVSWGTFYTMLEYKSKWNDKEYVKIDRWFPSSKTCSTCGWIKQDLELKHREWTCDSCNETHDRDLNASKNILKQGLNIISGCGIQSDKKQKRNKALPLGESATSEAQPIGSAVGG

SEQ ID NO: 23751 - protein, 388 aa, unknown
  TnpB Polypeptide
MEQVLTLVCKLQPTEEEALHIDATLQAFTAACTYIHATIPERIVNVMRMQAMLYYDVRGRFGLSSNLTQQAFRRVSGNRKTAKANGEHIKAFDPSSIQYDQRIFSFNERDWRVSLTLLHGRVHFCLQVGNYQRGKLKGHKPTSAQLCKHANGSYAIHIQVKEPLPPPQEPKGVLGVDLGRTDIAHTSEGEYWDGGDIRATRDRFSRLRGGLQAKASKGTRSTRRRCRQLLNRLSGREQRFQRHTNHVISKHLVLQAQTTESALALEDLRGIRARTNQQPRTKTERRRSNTWAFFQLRQFVTYKAALAGIVLYLVPAAYTSQMCHGCLHIGSRSGKRFVCDHCDYHGDADFNAAQNIKTLGEQVSLPRGPWVHSPWSGKPNGLLESCLL

SEQ ID NO: 23752 - protein, 437 aa, Chloroflexi sp.
MRKVTGTTDEKKNKSKEAFVQEGDNAMQLTEQHVITRTDPRYDVIDAAAFASKNLYNAALYEIRQAYIHEGRYLSYNAMDKRMKGHEAYKVLPAKVSQQILMLLHNNWTSFFEARETYEEDPSKFTGRPCLPKYKHKTEGRNTLVYTVQALSKPGMRDGLIRLSGLPITIETEHTVVDQVRIVPRHGYYVVEIVYTKEPVQANVDPSFCVAIDLGVTNLAAIASNREGFVPRLVNGRTLKAWNQWYNKRMKELKKQLPKEDRERVTRQMEQITTTRNRRIHHYLHTTSKRIIDFLVEEGIGTIIIGKNPLWKQECEMGKRNNQNFVSIPHARFIQMLTYKATLAGIQVEVREESYTSQASFLDLDPIPNYKPNDEEEHSFSGKRIGRRNRLYRTKDGRKICADVNGAYNILRKSRPDAFSKAKGVAGYVVHPVRLAV

SEQ ID NO: 23753 - protein, 339 aa, unknown
  TnpB Polypeptide
MFLGERKDSWEKEKKSVSVYDQINQLPSFKEKFPIYKNIYSMVLQEIAFRVDFAFKGFFRRCKKGEKFGYPRFKSWDRYNSFTYIKSGFKIMKGVNKVYLSKIGDVRIIYDRPIIGEIKTCTVKKTLTDKWYVMFSCEIFKPILVKKTKKTIGIDVGLEYFVTLSDGTHVENPRFFRKEEKILKKAQQRLSSQKKGTFEWYKKRKVISRVHERIKNKRHSFIHQLSRKFVNEFDVIIVEDLNINDMTKDNYRCINKSIGDAAWRMLIDCISYKAEEAGKKLIKVNPAYTSQTCSKCGYREKKPLSDRIHKCSCCGLKLQRDHNAAINILTLGTQGLVSA

SEQ ID NO: 23754 - protein, 333 aa, Streptosporangium sp.
VKECDEAIRAARREIDWMGQLPAQAAQAVLKTYRQAWVNFFNPDHPAKRPTSKARLRSRPAVDVPQARDLQIKRVNRRWGAVNLPKIGRVRFRWTKDLPGVTKGGPAGRITGARLVKDASGWQIVFRTQTMAAAVMDTHPGPVVGIDRGITVALALSDQTTREHGPWLTRGEREHLRRLEKRSARRRAARPPGQRTSHRLTRTYDRIARLRATAKRRAVNWQHQTTTELADTFSVVVVEDLKITNMVRSAKGTIEQPGRNVRQKAGLNRAVTGQAWGRTVTPTGAYPAWKAGTAYTTGTRVSHSGADYECRQPHTASAGWEPSNVPALWLRLS

SEQ ID NO: 23755 - protein, 379 aa, unknown
  TnpB Polypeptide
VPLETVKLTAGFKLDGPIPEGLFSTYREVLSDLLDYAWAKEITGFRRLRAEKYRELRAKYPSLPSHYICTACQMACSVYKSFRKLKKRGLAKAEKPTFKKQVMMLDDHLFNLDLENLEASIAVENDKVKLKLHHGTHHEKFKGMRVGQSWLVKRRSGRYLKVVFSRTVELPEPDGKAIAVDVNEDSVAFGSMERVRNIKTGERVVRTAYFLKRRRLQSSPRLNEKPLLAKYRGRERRRVEYICHKLANQIIAEAKETEALTIVLENLKNIRRRIGRSKALNGRLNRWSFRRFQSIMEYKAKLAGLNVKYVDAKGTSSLCPTCGVKLSPNEYRLTKCPICGLEEDRDVVAVKNLLRRYQMDVLPSSVQGEGPPMIGGGKG

SEQ ID NO: 23756 - protein, 492 aa, unknown
  TnpB Polypeptide
MAELASEVRDISAYAIYTVRNDEALGDELARVTASAPAEAGRQAGITMPEFLASGRTGRSRKEKLFQYNVVASFRSYQERVNAANGESSKYVSQGWKRTVNGSAPSYGGDYVNLGAVDRAYAAIENIPFADGEIILKMVIQGEWYRLIFDFDNERFREGKVTLPVIKVENGQPVFIFTVVTDNPVVQFSGDYTIGVDVGITDYATVVVRDTKTGRIAYETALSQRVHSLWNSARASERQVRDLRNKAATLLHDRQARMAALDEARLHREAASRKKRELAILAAQEIADLSHLWGNAVVAVEDLSWIANTMQNGRWNRGELVKWLTHYVTQNGGWVVAVSPANTSQLCHKCGQRVTHPTRKVSVCPEHGAMDRDVNAAANIAARAVPRVAKARATRAKNRKLRPQAPLRTPPARDSLKYPGRDRTKNKPTLKRKNHRLVSREVILPSRPARAQAQRLEAMVLADQGACDALGTNVAALKQGNATYECRLCSLI

SEQ ID NO: 23757 - protein, 358 aa, Oscillatoriales sp.
MLLSIKTKLKLNKSQTTIMSKHAGIARFTYNWGLATWSNLYQDGLKPNKYLLKKFFNNHVKPELTWIKEAGICQKITQYAFDNLGNSFSLFFSKKAGYPKFKKKGHHDSFTIDASGKPIPVGGTSIKLPTIGWVKTYEGLPHTTCKSITISRAADSWFIAFAYEQEPQPTVKQYDVVGVDLGVKELATLSTVVVFPNPKHYKTHLNKLRRLSKELSRKTKGSSNRLKAKQKLAKHHAKIANLRKNTLHQITTYLGKNHATIVVEDLNVSGLLANHKLAQVIADCGFYEFKRQLEYKAQKFGCEIIIADRWFPSSKTCSNCGHIQDMPLRERNYNCGSCGHSMDRDLNAAINLSRLAKT

SEQ ID NO: 23758 - protein, 447 aa, unknown
  TnpB Polypeptide
MTHQAFRYALDVNDRQRGLLASHAGAARYAWNWGLRRIVDTMAAHRAGEATTCLPSAMSLHRDWNSWKKSEAGIAWWTEVSKCAPQEAFRDLEAAMRAFWDSRGGRRAGPRVHFPRFKKKGRTRDRFRLTGAIHVETGHVRLPRLGRLRLHEAAKPLLDRLQGGSGHITAATVSREADRWYVSLAVEVDRTVPVSNGYRDTVGVDLGVLALATLSTGEVVAGPRALRAGLRRLRRLSRRHSRCQKGSANRRRVTRRLARHHARVAAVRRDHLHKLTTMLAKSHGRIVVEDLNVRGMLGNRQLARSLSDAGFGELRRMLDYKCRWYGAQLVVASRWFPSSKACSACGAIRTDLSLGERSFRCPGCGLVLDRDLNAAINLAGWAHPAVAASASETENACPRGGQTAPGAARPDDAGTEPQRASSPGPRKTWTLHKGVMPKGGEVHGKET

SEQ ID NO: 23759 - protein, 380 aa, unknown
  TnpB Polypeptide
MKTKIVQKAYKFRIYPSLEQIIFFSKTFGCVRKVYNLMLDDRKKNYEEYKLTGIKTKYPTPAKYKEEYPYLKEVDSLALANAQLNLEKAFKNFLRNKEFGFPKYKRKSNPVQSYTTNNQGAVHIDKGYIKLPKLKSLVKIRLHREIKGIIKSVTVSRNSINHYYISILCQEEIEELSKANKNIGIDLGIKDFAIMSDNTKIENLKLTKKYEDKLKREQRKLSKRCKIAKDSDKKLKDSKNYQKQKKKVAKIHNKIRNKRKDFINKLSTSIINNHDIICIEDLNIKGMLKNHKLAKSISDVSWSEFIRQLEYKANWYGRKVVRVSTFYPSSKTCSSCGNVKETLKLSERIYKCECCGLEIDRDYNASINILRKGLEILKVS

SEQ ID NO: 23760 - protein, 418 aa, unknown
  TnpB Polypeptide
MLLSHKTDIQLNTTESNIVGHMCYAASKLWNVCNYERRNFKELGMAHYPDWYDQKARLKGSMWFKSLPSQTAQEVCKLVDKSWKSFYALIKSKGIQNPKPPRFKQSGMTITYMQNAIVHVSGSKRVRLSLPKQLKEYLKHTYDIGDNYLYLENKIFQNTDVIKQIKIYPPDRKNVCQVIVIYDVKDVEKMQDNGHYLSIDLGLHNLITCYDSAGTSFILGRKYLEISQKYDKEIARLGHQWNSCQSAGGIKYPKPSKHMLKVYKKKRNCIHDYLHKVTRAVVNYCKANDIHTVIIGDITNIRRNKNLGKVTNQKLHALPYAKIYGMLEYKLAMHGITLAKQTEEYSSQCSPHAPQVTKEYAKKCNRTSRGLYKDQLSVYNADAVGAYNIMRKYFAGCGKEKKISVTGLSSPLIIKVAV

SEQ ID NO: 23761 - protein, 208 aa, unknown
  TnpB Polypeptide
MPRLWVKPKGISDPMPVKTADFIMDTAVYCSAHVIVPERFDRKGRKHGPKKQCLHYRRAQYVQQMVQDKAHRNGQRVSRVCAWNTSKLAFDGSGAVTRDEKNHSLCTFPNGKRYHCDLSASYNIGARYFVREIFKSLSVTTGQRIAAKVPECVKRSTCTLGSLFRLHAELGSTEHQLSECSPHRTEAVPPITNEGSLRLNDMDHPPDA

SEQ ID NO: 23762 - protein, 485 aa, Streptomyces sp.
LITCACSSDTIRRLPPPTWRTSSRVSLPAYSARSSRTSRAGCPRCGRRRSSSPRPAPSARTRWRSTSTRNGSGPGRRSRVETTRDSCLQVPLRPTVRQRQALGEMLRDHCSLYNAALQERRDAYRHSSKTSVKYGEQSAQLKEIRAFDPEQQGRWSFSSQQATLRRLNKAFQAFFRRVKAGEKPGYPRFRGVSWFDTVEFPKDGDGCRWNSIPLDSVTRVRLQGVGHVRVHQHRAVKGRIKTVSVKREGRQWYVILVCDQVPTEPLPTAGTVTGIDMGITHFLTTSEGVHVENPRHGKRGNQALANAQRALKAFPRCKREHRTANHRRAVEKAAKLHRKIRRQRTDHAHKAALALVHAYDQIAHERLNIANMVRVPKPKPDPETAGSFLPNGATSKAELNRSIHDAGWGVFLGILAQKAESAARVLIPVDPRNTSRTCPQCGHVDRENRDGEKFQCTACDHRDHADRVGAWNVKLRAGLVLPDVV

SEQ ID NO: 23763 - protein, 261 aa, Escherichia sp.
MHQENTMLPRRISVSLFIDQSIIWPVKRLQAFKFQLRPGGQQEREMRRFAGACRFVFNRALALQNENHEAGNKYIPYGKMASWLVEWKNATETQWLKDSPSQPLQQSLKGLERAYKNFFQKRAAFPRFKKRGQNDAFRYPQGVKLDQENSRIFLPKLGWMRYRNSRQVTGVVKNVTVSQSCGKWYISIQTESEVSTPVHPSASMVGLDAGVAKLATLSDGTVFEPVNSFQKNQKKLARLQRQLSRKVKFSNNWQKQKRKIQ

SEQ ID NO: 23764 - protein, 410 aa, unknown
  TnpB Polypeptide
MSFFLDNTLEKCYNICITWRGLVTSLQGLSPRQPTVTSGESVIRENPMQLRTQQIELNPNNKQSTLMSQHAGYARVAFNFALSSFKVGLDKDEWRDYREIKREFNAVKRDKFEWCSDLSQNASKNAIHNFGDAVTRWKKGQNKFPVYKHRSGKCSYQADNGEGTVEVYKKRVNLPKIGWVRMREELRYTGEITKVVVSKRNNRWFVSVTVRRLDSNNYKHQPPLFDDKPPIGIDVGINTLATCSDGTTFDNPRPLKRYERKLKRANRALSRKQKGSQNWQKQKKRLGSVHYRITSIREETHHQATLRIVRKASAIGIETLKVTNMLKNRKLAKALSDSALGGFLVKLKYKADRRGIPVHEAPQFFTSSKTCSSCGHEKADLTLSERTYHCSECGISIDRDLNAAMNLCPA

SEQ ID NO: 23765 - protein, 268 aa, unknown
  TnpB Polypeptide
MRKNSRFELHVTVTHEQATVRSKTESDTVVGVDINEDCVGLAAFTESEITDSFVLDFPGIKQERHRFFTMRKRMQTAGQTAFNDQCRNKEKRFVHDQLHKVSRLIVKWIHRLDRPIIVFENLKDMRDNIEYGTRMNRRLHSLPFAKLRDFITYKAAWNGIPSDDVDPAYTSQRCPRTECRHTVRSNRQKKRFKCQNCGFQDHSDRKASVCVVQEWFKKQYENVPALNTLPQVQKCELRRQASGSVDLPTVTQHNARDNQIEDVAGVSD

SEQ ID NO: 23766 - protein, 412 aa, unknown
  TnpB Polypeptide
MLRAYKYRIYPTNEQKALFAKTFGCCRFVYNWALNLKITAYKERKETLGNVYLTNLMKSELKAEHDWLKEVNSQSLQSALRNLDTAYANFFRNTKAVGFPKFKSRKSGQSFLCPQHCSIDFAKGTITIPKAKDIPAVLHRKFKGTVKTVTVSMTPSGRYFASVLVDTVIQEQKTSEPVHDTAIGIDLGIKSLAVCSDGRTFDNPKNLQRSLEHLALLQKRMSRKRKGSANRNKARIRVARLQEHIANCRRDNLHKIAHALTHDSQVRTICMEDLNVKGMQRNYHLAQAVGDASFGTFFTMLEYKCRWYGVNLIKIDRFAPSSKTCGKCGYVYKGLKLSERSWTCPECGTHHDRDFNAACNIKESGLKALPSERGKVKLVDCPTVDDRPPCPEKPWQEEAGKRRTNCVRCSCL

SEQ ID NO: 23767 - protein, 374 aa, unknown
  TnpB Polypeptide
MQTAEDTVKEAVKNFRKWLDNLKLYKQDPSLFTGKPRMPKYCRSTHRTFKVTNQDAVLYPKADGGTEGCSLKLPGFKKKERIPLNYIDQGSNLREITFKPYYDKYIMSFVIEDMAAPFYPDMPYMAGLDLGTDNIAAIACTDGTSVVYKGGAVLSENQFFAKQRAQAVSIITRGHEHKHADSAYLEALSREHDCFLKDQMHKISTDIIRYCVDHRVGILVIGVNKLWKQNTNMGKKNNQKFVSIPHYRLRQMIEYKALRAGIDVVEQEESYTSKADVTASDFMPVYGKVKARPVFSGRRIERGMYLCRDGYCINADCNGAANILRKAVPDAWKGFKDFHFLATPASRGFHQLNPAGRNNSHKQHPDWKILSPAV

SEQ ID NO: 23768 - protein, 468 aa, Lachnospiraceae sp.
MSNVRRKEVRQMLITTCYTVPIRSQMYETSSDEKTVLRPGKVSDSLMKQTSCLCLDALKFCADVFLKEWAYLSSLPTGQKKNVISRKRGADLLIHSTKDNKAKYPDFDTRFPYMPAYVRRAVIADALGLASSYRSNHENWEKRNPSDRGAEPAIGFPDRYELTFYEQERDISGLEDGVIGLKLYDGKTWSWYSFRVSPSDARYIAKMRETRKMLSPVVEKVKGRYRIRFSFEEKRELVQNANPLAYTILSVDLGINAAASWCVMSPDGTVHAKGIIRLACDEDRLKHLMNRKKMYQQAGKKSHSVYRMLTDANRKLSIDTCREIMNTAVLYDVDCVVFEHLDRNGPARGKSCRERIHMWRAIDIQKRVELQAHRNGMRISRVCAWGTSKLAFDGSGPVLRGKDAGFHKNSICRFRNGKVYNCDLSASQNIGARYFLREYGKLPGCPELPKTPQRTYATLLQLLGSLSA

SEQ ID NO: 23769 - protein, 385 aa, Erysipelotrichaceae sp.
VSGQLSPNNEAEEIRSMEITRQYKYLIKPDKKQKEIIIRTFGAVRYVHNRFVEDARNKEFMRGRALSYVEKYRKESPFLRAVDGSALMNQIFQLQDNLGKPMRFKKRNDSYVSYSTGNLVKNPIRILGNNKIQLPHLGIVEMVYHRPIPEDAQIKKAAIIRNREGKYYVGITITYKVPDHNDKDLDFENSVGIDYSSPHFFVDDKGRMVDMPHFYLKEQGKLAKEIKKLQSMVKGSNNYYEQKRKIAALYGRVRDQRADYLHKLSSEMADKYDVICVEDLDMQGIAQGYSLGKRTYDNGYGTFIGMLEYKMKERGKLLLKADRYYPSSKTCHICGYIKKDLRLEDRTWICPQCGSVLDRDRNAAINIKKICIKTYEGRRVSGHYL

SEQ ID NO: 23770 - protein, 193 aa, Okeania sp.
LQSIKDKQGIKGLTKRQISITVNRNNKVRDYLNKAARYLINWCIENRISTLVLGVNPGMKQNINLGKKTNQNFVQIPHHNFRFKLKAMCDRYGLTYTEQEESYTSKASFLDGDLIPVYNADNPTEYSFSGKRIKRGLYKTRKGKLINADANGAANIGVKSNLNGFIPDRLEASLAMPLRVKFDVTSVRQICSA

SEQ ID NO: 23771 - protein, 393 aa, unknown
  TnpB Polypeptide
VVTIIKSYKIRLLPTKEQEQKLWQHVHAQRFIYNWALSLNMSRFENDEKKLSGYDLGKLVTQLKKTDDYKWLNEVSSKTLKQSVIDLDNAYGRFFTKQKKGPKFSENCKVKTVYNMLGHPKFKKRHKCKDSFYSNYEGFYLQPDVAVMDVIGKVKYKTDFELPTVNKKQEMTQKFTNPRISYVNNKWIASFGYETEVEKPVLTDKVLGIDLGVKTLAVVSDGSKYKNINKTRAMNKLDKRMRQTGRKLSRQIKSSTSYVRTKHKLKAIHTKITNKRLDHIHKMTADMVSKLPRAIVIEDLNVSGMMTNRHLSRAISQCNFYEIRRQLEYKCKIKGIELILADRFYPSSKKCSSCGLIKKDLKLKDRKYECHCGLKLDRDMNAAKNLEKLAFVI

SEQ ID NO: 23772 - protein, 408 aa, Pseudoalteromonas sp.
MKKTLRYNYRLNPTPEQEAKLIEFGATARGIWNLLLSENMRRYEYDKTFLFYKEMASLLKELKPFEEFAWIKSFDSAAAQQVARDLETAVKNAFSKVRLQRFPKHKVSYKKKKLHNDSFRAVNNSNCIRIENGAISIPKVGKVPIVLHRELVSKIKTVTVQYRHGKWECSITQEVECKTAKQVLETITGFDINSKQTVVGSNGFVADNPKFLKQAIEKLNQLQRQLARRTKGSNRWLKTKQRINKLHGKISRQRLDFAHKTSRQITNENDILVFEDLNVKAMQKFNGSMVADNVMGLITQLSKYKAELEGKLYHEIGRFEKSTGICSECGQRHVLTLNDRRFTCTACGAYQSRDLAAAKSIASTGELDIIAAGIVARVTPASQQKQSVKTKVFELSKLDFGSEKKEAA

SEQ ID NO: 23773 - protein, 341 aa, Mycobacterium sp.
MNRRAGVDANVSNLALASFPDGHPERLATDQIGCTAQQQETAARAAKRARARQRALDRSRRNTNADQYSPSARQQKRADRRAEAGLPTRQVSNPGGPRHARADGVPLRAYRHDKLSQRYHRTRCDHAADTRSASQAKQGRAAQIAARIVAAHGNTITVEDCRICTWARLWGKRIGLFSPGMLVTALSAECAASGGRLYRAGTRPTAMSQHCLCGTRVPKTLDQRTHHCGQCGLRGDRDIVSAALAACVELTNPDDPRTARVDYRLAHALRDGLASQQEWEGSVNRHQPPPSPDEGLARTGSHHPVVSAEQAAPGTPPNRPGTPGRRGNSRKQPALKLIGAA

SEQ ID NO: 23774 - protein, 370 aa, Firmicutes sp.
VLQKKAFRYRIYPTEEQKIYFAKTFGCVRFIYNAMLHDKMEHYKVNGTMLNNTPAQYKKQYAFLKEVDSLALANAQLNLQKAYKSFFRKDNKDQGFPKFKKKAYNQSYTTNNQNGTVELVDNRYLKVPKLKSLVKVKLHRQLPDDAVIKSATISRSSSGKFHASILVETDIQPLPGRQEAVGIDLGLKTFAVISNGAEIDAPKTLRNYEERLVFLQRALARKKKGSSNYYKNKRQIALLHERIANTRQDFLHKRSMELINENQVIKLEALKVKNMLKNHKLAKSIADASWSKFIEMLSYKADWYGRELIQIGTFFASSQLCSVCGYKNKEVKNLSIRTWTCPSCDTDHDRDVNASINILNYGTVGATGIA

SEQ ID NO: 23775 - protein, 307 aa, Thermofilum sp.
LKLPLVEALQVKQRDKKCATGAYIYSDKLVVRLGGERIELPVPRRTVHWLRDKEHEVAPLKVHKTVRIQWREDRDPKTLRVQIVLRVRRPRPPRPDPKSALLVHVDVNSAYGIALIFASYEDGYAKIHETLKLRPPNRGRRLKEAAKRERAAAYGSKPNKNRALARLTMKFDAQGWVKAAAEILKKAMKRARGRSVWINIDALDSESVKRSRLQRTFSIRRVAENLANWYGVYATSECYPSRRCPTCGGRLKELRTKRARIARCRQCGFFDDRVRPLLLVGQGTGPATAEWPLRALKLPEPNDPEAL

SEQ ID NO: 23776 - protein, 142 aa, Burkholderia sp.
MANARVDFQHKLALDLVRRFDYIAVGNVSAVKLARTRMAKSVYDASWSSFRNKLRYKAIAHGAVFEEVDESGSTQFCSACGSKDSTTRPKGIAGLRIREWVCSDCGVEHDRDTNAALNILRCGRASPGVGILCLLGGGGRQR

SEQ ID NO: 23777 - protein, 401 aa, Burkholderia sp.
MQRFQAFKYELMPTGEQQRQMRSFAGACRFVFNKALALQKERFERGEKKLGYSELCRLITAWRNAPETPWLKAAPTHPLQQSLKDLERAYTNFFAKRAGFPRFKKKGRSDSFRYPDPKQIEVDQRTSRIFLPKLGWLRYRNSRAVLGDVKQVTVLVSGGKWHVSIQTERVAERPVPNGGAIGIDLGIVRFATLSDGTFYAPLNSFRRHEVALRRAQQAMSRKLKFSNNWKKAKTRVQRIHSRIGNARRDFLHKATTTISQNHAMVCIEDLQVRNMSRSAAGCAEQPGRNVRVKSGLNKSILDQGWFEFRRQLDYKLAWSGGHLIAVSPRNTSRTCPCCGYVSAENRLTQARFECVNCSFEENADLVGAINVLRAGHARCACEVSDATRSPAAGTHRSELAA

SEQ ID NO: 23778 - protein, 422 aa, unknown
  TnpB Polypeptide
MQRRKVTYKLYPSVRQAEGLLALLRSHKDLWNAALEERIDAWRKAGKSIRYEDQCRSLTQVRGELPEDWATQNCSSQQVTLRRLDKAFKAFFARCAKGQSPGFPRFKSLARMPGIGFKGHGDGWGFAPNLANEGRPDDFGVIRWARHGTLRLQGLGHIKCRGQARAAGVIKSCEVLYRHGEWYVSVTLECADADVARQRTEHHAMAADWGVSRLLTVVRTDGPKVEVREDHENPRWHAGAKERLVSLDRSVSSKRRGSRNWRKACAVRGAFKARLARKRHEHQHQLSARIAARCSVFATEALSIKNMTGSAAGTVEEPGKHVQQKAGLNREILDTAPAALFQKIAYKVPETGGLFMEAPTRKLKPSQACPACGTVTRKLLAQRWHCCHVCGHEEDRDSAAARVVLRWALGTLDCGQELPEAA

SEQ ID NO: 23779 - protein, 412 aa, unknown
  TnpB Polypeptide
MSRYRLYPTPIQEVVLLGHCASARFVWNLAIEQRSWWQPGRGSPPGFCMQCRQLTDARAAFPWLAEGSIIVQQQALRDFHQAWSNYVAALRTWRSRVARLPTEEHSGPPGPPSWRKRGVDEGFRVVAVEPGNVRRLNRHWGAVKVPKLGWVRFRWSRAVPMATSYRMTCNRVGRWHVAFAAIPPSIPAPGNGRVVGVDRGVTVSAALSTGELLAAPSLHPAEARRLRLLQRRLARGKRGSNRRARAKRALARLYARAADRRTNWVEQTSTDLARRFDLIRVEDLDVRAMTKSAKGTVERPGKRVRQKAGLNRGILGQGWGQVVTRLEQKAPGRVERTPAAFTSQRCHVCGHVAAESRKSQALFACVACAWTGNADVNAACNIAAGRAVPARGGSGSPGLMNREPHHVTSSVA

SEQ ID NO: 23780 - protein, 422 aa, unknown
  TnpB Polypeptide
MLGAAIVVDAQVDLSILQTVQHRSFRYRFYPTPEQESLLRRTFGCCRLVYNKALEQRISSWKSDGVALRFPEQSRALTQWKKTDDLAFLREVSCVPLQQTLQHLQLAYERFFGKLARFPAFKRKKNGGSAEFTSHAFRIKGGELWLAKMKAPLAVRWSRPLPKGAKPKLAAVSVDKAGRWHVSLVCEDLSIRPLKRTKSAVGIDLGLATLATLSTGERIANPNHDGLDLARRRRLGRLYSRKEKGSKNKEKARLKLARVYARITDRRKDFLHKLTTRLVRENQTIAVESLNIRGMVHNRSVARAIHDAGWGELARQLKYKCKWYGRTLVKVDQFFPSSKTCSACGMIRKALRRDVRAWRCECGAEHDRDHNAAKNILAAGLAVSGCGPGVSQRALRSTVQSGKKQQFWIAKPRSQPIGRVAI

SEQ ID NO: 23781 - protein, 365 aa, unknown
  TnpB Polypeptide
MQKGVKFRIYPNREQKNLINQTLGCCRLIYNKGLAMRNAAYENGNKIGYSQTSTMLTELKKCEDFSFLKLVDSIALQQSLRDLDRGFVNFFQKRAAHPTFKSKHNHRQSYRTIKQGDNIRIVGKYIKLPKLGFVKIRQSMEVGKIHNVTIEHTPTDKYFAVLNVEFEPQPRPNNGGYIGIDVGIKEFYSDSNDNTVNNPKYLEKSMRKLIKEQHKLSRKQKGSKNRDRQRVKVALIHEKITNQRNDFLQKQSTMLIRENQTICIEDLKVKGMIQNHKLARSIASVSWAKFFAMLEYKAGWYGNEVHRVPTMYPSSQTCSCCGYKNPLVKNLAVRIWECPDCHTVHNRDTNASINILNKGLQLQSA

SEQ ID NO: 23782 - protein, 385 aa, Ectothiorhodospira sp.
MALVRPVISCRFVFNKGLALQKERHERGEKKLGYAGLCKLLTEWRNGPETPWLADAPTHPLQQTLKDLERAYTNFFAQRADFPRFKKKGQSDSFRYPDPKQVKLDQANSRLFLPKLGWLRYRNSRDVLGTVKNVTVSQNGGKWFVSIQTEREVEQPIPQGGAVGIDMGIARFATLSDGSYVSPLNSFKRHEAALRKAQQAMSRKVKFSSNWSRAKARVHRIHSRIGNARRDYLHKTTTAISQNHAMVCIEDLQVRNMSRSAAGSTEQPGKNVRVKSGLNKSILDQGWFEFRRQLDYKLAWKGGYLIAVSSQNTSRTCPACGHVSADNRRTQERFACIECGFEENADMVGAINVLRAGHARLACEVNGAVMPSAAGTHRGESALAG

SEQ ID NO: 23783 - protein, 466 aa, Ectothiorhodospira sp.
MGMIGHRFRCYPGRQQENILLRWIGCQRFIYNSKVREDRYFRAFARKALSLTGQKPPIDQQYSQFIGPDTAWLREVPSQVLRNGAVRWKQAYSRFFQKLSGRTTIHGKDGEQGVWLTRELFAFEDDGEGGYHLRVGTKKHPLGRLRYVADRPHTLPASIVISINAGQWHVSFATEDDVIHPRPAEIQAELSQWDEASLHAATIGVDRGVVVPAYASTGSVYAFDPVQKQRMARKERQRLRWQRRMARRAKGSSGWHKARKRVARTHTYANNVRKDFAHKVSHALVTAPGVRLVVMEDLKVASMSRRPKAKTDERGRHAPNGARAKAGLNKGILHSAWGKIRTYAQYKAPRNNVLFLVVPPHHSSQECAVCGHIHPDNRLSQSRFVCQRCGQIDHADHNASRVIARRGVTAVIGQCKSHQQVGAVRPEPPSPDGYAGGDQGKSQKGKRPTAHRSSRPETMPTTAQAV

SEQ ID NO: 23784 - protein, 441 aa, Ectothiorhodospira sp.
MDVHLENAMPTVSNIIVVAHRPNYNLCMQQLQAFKFALRPDGQQERQMRRFAGSCRFVFNKALALHKERYEQGEKKLGYAGLCKLLTEWRKGPETPWLADAPTHPLQQTLKDLESAYANFFAKRADFPRFKKKGQSDSFRYPDPKQIKLDQGNNRIFLPKLGWVRYRNSRKVVGDVRNVTVSLSGGRWHVSIQTRREVEQPRHPASSVVGMDLGVASFAALSTGEIMVPAHAFKKRQRQLARAQRDMSRKVKFSNNWKRAKARVQRLHTRIGHTRRDFLHKTSLAISQNHAVVVIEDLQVRNMSKSAAGTVDAPGRNVRAKSGLNRSISDQGWFEFRRQLEYKQAWRGGMVIAVPPHNTSRKCPACGHVDKANRKTQARFECVACGHTAHADVNAAINILAAGHAVMACGGDVRPDRHVSVDPAAPAKQEPTEATQIASAN

SEQ ID NO: 23785 - protein, 424 aa, Ectothiorhodospira sp.
MVQRKVTYRLYPTAAQLAALEHQRWVHCLLWNEALAERRRAWSERQESLGFSSQCKRLTQWRRLSKLLRGLNAQSTQVTLKRLDLAFKHFFRRVKNGETPGFPRFKPLHRFKGWGYKTHGDGWRLITNERMKHGTLRLSGVGKIAIRGKPRTTGTPKTCEVLCRNGRWYASVTLNCEPSRQRGDELGGLDWGLETFATMATPAGTETIGNPRHLANSLNEIRRVQRHISRKEEAARKASGRQRRFPVSNRLQREYERLRRLHRKVANQRHDFQHQTTARLVGQFAVLGLEALNIRNMTASGGQYKKGLNRSILDAAGGAFHQLLGYKAEEAGTWAMEAPTRQLKPSQTCHACGRQEKKPLGQRRHECPCGASCSRDENAARVLMNWAKQQLSGRERGRCVEGGKTESSPDDPARPEKRETHAIA

SEQ ID NO: 23786 - protein, 406 aa, Calothrix sp.
MIVYEAKAKTTKEQSLKINDVLMTALFVRNSCLRYWLDGHAKTGFDLNKYTKVLSDNPDFPWVSKLNSTARQAMAERVWAAISRFFDNCQKKVPGKKGFPRFRRFQTRLSVEYKQSGWSLSECRRFITFTDKFGVGTIKLMGTRDLNYYQISQIKRVRIIRRVDGIYIQFCIDHDRKEQLEPTGKSLGLDLGLSSFYTDSDGKKIEHPRCLRKSEKALKKAQRRLSRCAKGSINRVKVRNRLGRKHLKVQRQRQDWAVKLARCVVKSADIVAYENLQVRNMLKNHHLAKSISDASWSTFTNWLEYFGKVYGRVVIAVPPHNTTINCSNCGHLVHKTLSTRTHICPACSYIDCRDINAAKNILSRGLEMMKNTDGLSEIHASGEFDPCSKKVTSASKSSRGKKNPRT

SEQ ID NO: 23787 - protein, 403 aa, Oscillatoria sp.
MLILSYQYKLDPTAEQSATLDEWLNVCRSVYNFALRERKDWVNSRKCLIDRCELRSEYIIPADSKRPTYASQCKSLTQAKQTNPNLKVPQSQVLQQTLKQVETAFVNMWERGFGFPRFKKAMRSFVFPQIKSDAVEKDEIDLPKIGKVKFHNSRDIPDGFTCKQIRVIKKASGYYVSVSIGCDVDVPAISPHGYAIGIDLGLNDFIATSENELIKGHRFFERFEGELKLLQRRLKNKTKGSRRWLKIKRQIGLLHEKIHNCRKDFFFKLAHRLCDGVGMIFAEDLNLKALGRSALRKACLDAAWGSFLNILSHVCWKRGVYFAKVDARETSQVCPNCGTNCGKKPLAQRVHHCDSCGYTTNRDVAAAQVVKERGLNAVGRIALTLVEGKDIGVGVYAPSRISL

SEQ ID NO: 23788 - protein, 404 aa, unknown
  TnpB Polypeptide
MIVLEFKAYGKAAQFNAIDEAIRTAKFIRNSCIRLWMDIKGTGKYELSKYSATLAKNFPFADKLNSSARQASAERAWSSISKFYENCKKGGKGKKGFPKFQKDCRSVEYKVSGWKLADNRKSITFTDKNRIGKLKLKGTRDFHFYQIDQIKRVRLVKRADGCYVQFSVSVERTETISPTGKTIGLDVGLNDFYTDSNGETAKNPRFLRKGEKVLKCSQRRVSRKVKGSNNRGKARQVLGKRHLKISRQRKDHAVKLARCVVQSNDLIAYEDLRIKNMVKNHTLAKSINDASWYLFRCWIEYFGKVFKKVTVAVNPAYTSQECSSCGTIVKKSLSTRTHICRCGCVLDRDWNAAKNILSQGLGTVGHTGTFMLDMSNALGESTSTLSEVILSEQVGSLIKESPSF

SEQ ID NO: 23789 - protein, 405 aa, unknown
  TnpB Polypeptide
MKLNRQVRLYPNKIMKRVLDSLCDYRRYCWNEAVACWNDQYEAHLVGLPEDLLDKLKNKTEDLTDEEKDLVNRYPSPSHYSVRGELTTRKEDWQYALSSRVLYQAVKDLAIAWASFFEHQDAAGRPTFKTRKAPRQGFKTDRARIHNGQLLLDKPRGYQGQWKTIRFKGLSLPDGKLILCSVARVNGRYMATFTLEVEPTLSPRTGQKTSVDANVDHFDTTEGRVTLKPEVLNPLYSRVRHYQRILARKRCKNPKAVHSKGYQATRIKLQRTYDRIANIQKDLLHKFTTDLYRRFDTIVIEDLDVKKMQMSKRAKNLHRSLFGQFRQMMEYKSKKFGKTLIIADRFYPSTQRCSSCGFIKTRDDKITLDGNLKHGTRHHEYICYQCGYEDDRDHNAVLNLLALAE

SEQ ID NO: 23790 - protein, 182 aa, Acidobacteria sp.
MQSVRPAIENPRYYQQAQAKLRVAQRRVARRKRGHRRGKAVLLLQKIHQHMAQQRADFQHQLSTGLVQNYGTIAVEDLNVPGLAGGMLAKFVQDAGGAGFFQKLAYKAESAGREFIPVPAPGTSQTCICGAAVPKRLSDREPVCTACGLITDRDHISAQVILQRARIVPSCVNVGEVMPCVA

SEQ ID NO: 23791 - protein, 428 aa, unknown
  TnpB Polypeptide
LWNVRHYFLKKYNKIFVYLNIICIFASDMRKINRTYRFRLYPNKAQTELLSKHFGCSRFVYNYFLNQRKEQYRVSGKSDNYYAQAKTLTTLKKQEETVWLNEVNSQTLQFAIKSLEAAYTNFFKKHAKFPKFKSKHSKNSFTVPQFASVAGGRLFIPKFKEGIKCRVHREVKGKIGKVTITKTPSGKYFVSVFTEEEYTTPIEKSGKPVGIDLGLKDLLITSEGETFKNNRYTKKYECRLAKAQRHLSRKVKGSRGFESQKLKVSRLHEKISNSRADYLHKCSIYLVHRYDTICIEDLNVKGMERNHRLAKSITDASWGTFINMLTYKAEWNSKKVVKIDRFYPSSQTCSVCGYINKETKDLSIREWECPVCHTHHERDVNAAINILRIGLNNNISAGTVDYTGGEGVRADLLESHSSVKPEAQKSLD

SEQ ID NO: 23792 - protein, 392 aa, unknown
  TnpB Polypeptide
MGGGGMECVRRAVAVELERPPPELYAVEEPYRKIVEEVAAYVAERGTLERERYNELYRRFRKLYPLPAQLIQQAMNQGVETGKSFLELKRDGRIHKPHPEVRRVAIRFAKDSWSYKKAISTAAPVKIAVSLPSGRREVWIKPHRRFWLYWWRVLRKEAELASTLMLKRRRGRWYAVFVFDVAPKRKSPAEAVAFDVNENSVAVARMSLLSTVDAVARWNRRYIDPTVYFIKTDFGRLAKRYEAVRNAKLEELKQRYPFAGRDEEERRQNVADTREFRKFVRRLRERRRKEGRIKQIVREMTKSPAVVITEELGKNPQEEMIDKKKRELRHRIKQTPFRKILRAVEDKAAEGGSVVFYVSSFRNSRMCPIHFALLKDGGDWHVLALPPRPRRR

SEQ ID NO: 23793 - protein, 307 aa, Homo sp.
MIILEILVCLTKKSYIRSMKYRAYKYRLYPNEEQKILIAKHLGSCRFIYNYALAKKVKAFQTDKTNLSRFDIQADLPIMKKSEEYCWLKEVNSLSLQASLANLDSAYTKFFREHRGFPKFKSKKDSKQSFSIPQNTKVDFENGRVFVPKFKGGIKARLHRTFEGVVKTSTIIRTSTGKYFISILVEVNEPDVPIKPICENKAVGIDIGIKTFAVLSDGTGISNPKFLKHSLNKIKHLQRSLSRKTKGSKNRDKARIKLALAHEKVTNQRKDFLHKVTRNLVNNYDTICLEDLNVKGYGLKTITLHKL

SEQ ID NO: 23794 - protein, 455 aa, Acinetobacter sp.
LLTGIQLRAYPTNHQKLILSQWMGCARFIWNAKCDEDKYFRGFARKFTPYNQYYETQDQKYSHFKSEELSAWLKQCPSQILRNSASNWKDTLDRFKSGICGRPKRKKKTDKGSIYLTRELFRFEPDQFGKLHLFIGTKTNNIGILKFGIHADFNEPKSLYIRKERGQYFVSFCYEDDQDIQVIKPEEHLEYLRGMTAEQLQDIVVGIDRGVVIPVHAEHREFDFSKEQKNHLSKADRYIKRLQRKLSQQQKDSNRRARTKHRIAVHHAKKANIRKDFAHKTSHALVNGFGKVFVFEKLNTKQMTKKPAPKKDELGRFIPNKAKAKAGLNKAILNVGWYQIASFLKYKAERLGKAVFSIPAAYTSQECASCGHTHPDNRKSQDRFKCVNCGHIDNADHNAAMVIKQRAVKLILDSGTLLDDNHLSSSGRGGVRKTKKSVKAFSRCTDEASKEKCAA

SEQ ID NO: 23795 - protein, 419 aa, Macromonas sp.
MSPVQRLQSFQYELRPNGQQVRLMRRFAGACRFVYNKALALQQELHADGEKRLTYAQLCQTLTAWKKQPELLWLNDAPSQPLQQALKNLEHAYTNFFEKRAAFPRFKKKGQSESFRYPQGVQLDQANGRIFLPKLGWIRLRMSRPVLGTLKNATVSQCAGKWYVSIQTEREVEVPVPQASSAIGIDVGIARFATFSDGNFLAPLNSFKRHQKRLARYQRRMARKTKFSSNWKKEKAKVQKIHTRIAHCRQDFLHKATAAISQNHALVCIEDLQVGNMSKSAKGKNVKAKTGLNRSIMDQGWYEFRRQLTYKLEWAGGMLVAVPPHNTSQTCPCCGHISPDNRRTQAEFLCVQCGYQNHADVVGAMNVLERGLRLLACGEDVRRAKVARPKRAASMKQEPAEVTRAQHDAGAGAVGIPVP

SEQ ID NO: 23796 - protein, 472 aa, Ruminococcus sp.
MATVSYGLKITEAYHIFDKTIKIYRNAVHYISDIAIRHYDELKSLESITGDDGKVIISAQQRRQQKMERLIHSTANNDAIYKRFDKEFYKFPSYLRRDAINTAIGLILSYRSQLQKWEDGRRHGRRPYLNRNQNTMPCFYRNNTFLDSEETNIVSLKLYNGKDWIWETFVIRDCDFMYAYSHMKAWKASAPVLIKRNHRYELRISYEMAGSKFPKFKKDKEVETVIGVDLGINTDAVCSVVHKDGTVTGQRFINHPVEKDRMHGLLNTIKKAQQNGNHKTSRLWRLANNYNKAIAVKTAVEIVRFAMESKADVIVFEHLNMKKKKKGNKQKLSLWRKRDIQHRVEALATRNGIRVSYICAVNTSRLAFDGSGKVIRGKDAGFGTYELCKFTTGKVYNCDLSASKNIGARFFIRVLLKSLSVKEELLVLAKVPELNRRTSCCLATLINAYAVLCASKAKSEASAEGNAARQSH

SEQ ID NO: 23797 - protein, 503 aa, Chroococcidiopsis sp.
MRTVEFKLNLNRYQQAKVDSWLAIQRWIWNQGLHLVEEFNSFSTWDKVSQTWVPCCPIPWTYYRNSVGQLIAFTRIAKKKPYRMSCPIPQVYRKPVLESPTFFGLLYYFAQKNHSDKPWFCDVPCRFVAGTLKSLADAWTAYKSGKRQRPCYKQYKDKFRTLINNNAKPIKISGKRITLPKLGKVTVKTLDRRWLKSVPIVTLKIVKEPSGYYLQLSGCFPVNKVKPTNKAVGVSLGYSHLTTDGEKVVEPPNFYHKMEKQLAQLQRQLSRQQKTCPISTYNPSSGEHFLSCPINPGKGANRAKTQRKISRLHEKIRRSRRATNHKISTYLVREYDAIAIVKPEIKRIARKPIAIVNKLGEFEHNGANHKAEFNKGLLNNSLGQLSGLIEQKASVQGRKLISVSPKDIPDELKQCAEKRREQIQWSRAVYSTNFSRRYRAWAWELTPGESTETLNQEPPQGGLFCDAGTTSNFISESIGFCGVGDIPEIIPLLQNQSEANSSY

SEQ ID NO: 23798 - protein, 408 aa, unknown
  TnpB Polypeptide
MNYNYRYRLHPSDTLEQQLVWTVDTCRQIYNHFLHRLNRNDDTSAYAEQKRLPDLKKWWNDLKSVHSKVLQKVVQRLYDNLSTLRGHKENGYRVGTLKWKAPDEYRSFTYSQSGFKLKNTSGRTRLWLSKLGEVPLTFHRELPDDANIKTVTVKREPTGKWYAIFGVETTENPSEKPENPEKCVGIDVRILKYAHDTDGTAVGSLDLSDERERLERAQRYLSQKKYGSNNWERQRKIVAQRHADLKRKRRDFLHKLSNYYATEYDLIAVEDLDTKGLVELPGNSRNRASAAWGTFKRLLEYKCDREGTHFVAVDPKDTTKECASCGAKTDKTLWVREHSCPACGFKADRDENAAINILSRGLKDVGVGHSESTPAETALPVGTSVSAKRVVETGSPTLKEQAASAVSE

SEQ ID NO: 23799 - protein, 447 aa, Sulfolobus sp.
MKRTNVVKLIINKNTHEKLKELAILTAKCWNEVNWLRTQQFKKGERVDFAKTEKEVYKKYKQVLKVNAQQVARKNAEDWRSFFSLIEEKKEGKLPKWFKPKPPGYWKDKNGKYKLIIVIRNDRYEIDENKRVIYLKDFKLALKFKGKLKWHGKQGRLEIVYDEARRSWYAHIPVEVENTAENKGNLRASVDLGIVNLATVYVEDGSWYIFKGGSVLSQYEYYGKRVSEVQKVLARHGQRRGKSLKLLYDKRRRFLKHALNSMVREIMEELKEKGVSEVVIGYPKEISRNHGNKLTVNFWNYSYVIKRFEDIGEELGIKVVSVNEAYTSKTCSLCGEAHEGGRVRRGLFKCPRMWKVINADLNGAINILHIPESLGSGSGGQLPVRDRGNGLKAQPVVYRWTSGAGWVIPASYEVMRMKAVNHKPMIRPEVTLALHGTPKIILQNNSD

SEQ ID NO: 23800 - protein, 397 aa, unknown
  TnpB Polypeptide
MKRNKKSKEPNKVQRRYNIRLYPTDEQIKMFFNHIHTCRFIWNYMLTKQKEQYELYGRIYTYCATSKILTELKQREEYSWLNDVSRHSLAITLNDLDTAYDRYFKGVNEGLPKFKIKKRSKKSFPVRYDRLYFENDHVHIEKIGIVKFKSSKHVPEGKGEVRDVRIFLSKNGKWILSVVMECDRQTPKESLYGNLGIDMGIRKLATFSYLGMSDYIPNINKSRRIRCLRSKLKHLQRRLSRIYYIHGNYHKSKHIKRLLYQIRRIYHRIHNIVQDYNHKQTRTLVNLYPRKVIMEDIEVKKITKKMPRWLRREIYYASWYDFRYKMEYKCNELGIKFVLADKSFPSTQMCSECGKIKTGKHKLTLNDHVYVCKSCGLQLDRDVNAARNLEWYDNYLS

SEQ ID NO: 23801 - protein, 431 aa, unknown
  TnpB Polypeptide
MVIKSHRVQIYPNKTQRNLIKRILRACNVVHREVTKLAFEEYDYQYNYAKTHNMNTPRDIPSTCRFLLNSVLESAEFAGLFSGISKHTLYRSAEIAYEAFTDYIFKHGESYKLYSNERHTSSFYMDPPRSVKWIRKKHVKIPMLKKLAVANTSYLEGHSLDNLVGMTIKKVKDEYFMTVRIREPGLSLSEGIQNNFNLFSNGITIDLSTGPRFAYYIMAADGFVNTIDDFTSDPRIKNYEYKIHLIQSYVNNLKLIHQSSEKITHLENRIKHYRECIKGIKMNHIDKIVYKLVKDSPDYIFATSFCAQYFRNSEPHNYDLFWLTHDRMWDYFFYRLKSSAKFHGADLLVPVNVNEAVIKCANCGRYNALTPFSDVEYRCMHCGKGIIKSRNVVMNLGDPYTKETYSLLHDNMTKKRYILPNIKSDNNSTVS

SEQ ID NO: 23802 - protein, 663 aa, Nonomuraea sp.
VSKLTATASCTAHSAVVERTGEVVAQAMLVQRVAWLTGLARDLTARLVAARWNPADLDALASGVGLDGRVLPSKGWMAVRRLGWGVTPVSGVYVCDRVLRCAQEQAARALRLALHRRTLVAAIVASWPADARKRSGAEWEALRRLLPDGVSAAEIRNRTRQIRAYCDERGALPADLTDLEEPPDIAAQIVLAAADKQLITLQRTGERGARLRVRLPLIASPASGWDWAWHVLPITLPPTVPPQAKLCTPTLRVSKGRVRVDLPFQTPIGFAPATGHVVACGFDWGVNMLLTGATGRLTGGRVICDGRPLTYDATGISAKLHRLRTEREHLAAKHEQLERLLAGLTPADPRYAKLSTAYEVLGVEHERVCARIRNLNKALAWSAARWAVDQAAAAGATVMYLEDLATLEARGRRGRANAWLSGQVRGQIVEAIRHLAAKHTIAVVTVPARGTSKYCPRCGDGTSVLQHCPAPDRLAERGWAWACCPACGLSCDRDWAAAERIVARGLLGQPATRTHRTTGERTILTVVEGNVARARRPRRPTRAARRARRTRTDLHPRPAARGRSKNRPTPKRPARTAKNEAKNDSMTSSRVPDRRTVPAPFLIGSGQRPAGHAPQPGRRLPSRTGHVRNSHHRTGFHHAKATPVLALAAHRGRPSQATPVRTA

SEQ ID NO: 23803 - protein, 435 aa, Veillonellaceae sp.
MKMIKAVRIKLLPNNKQRTKFFQFAGCSRFAYNWALDKQMANFREGRKLQSDYDLRKEFTVLRNSGEKPWLLDVSNNVTKQAIKDLCIAYKNFFRKQKQNGYVKYSPKKLAHLARIGKTPTVYDMNGHPKFRSRKNEDFRFYQDNVKIQFTRTHVKFEQIADSKRKNRKKANWIRLAEKGRIPVGVKYINPRISFDGKNWWLGVGFVVKYKLKPMRGLKFVRKQPMHPYTKGVGIDLGVKDLAIVSDETTVKNINKTKTVRKLKKKRRRLQRQVSRKYQMNKKGDSYCKTSNIIKAEKQLLRINHRLTNIRTNHVHQATRAIIDRKPRFVCLEDLNVQGMMKNKHLSEKVQEQKIYEFRRQIEYKAHWAKISVIIADRWYPSSKTCIECGHVKKDLKLSDRTYVCPVCGNVIDRDFQAALNLKRYGEAELSKSAS

SEQ ID NO: 23804 - protein, 406 aa, unknown
  TnpB Polypeptide
MWWRFSENVREGNVIKMVVRKVAQRIPFTPSKTQAALLEQCFGARRFAYNQQVEAFNAYDKETNPRPAYPNVTDMKNANEWLRDSPIPSNALSNAIQDFRKVQSSYFRKAEYGKNRPRFASKGDNVQSFRNAAPMRSMEGNRYPLSKKLGSVRIRRRDRIRYPLESLSSWTVKRENGVYYLVLLFNVDVQPKPPVDGQVGIDLGVKDFLTMSTGEKVNYPDRLRQLEEKVRWEQRKLSRGVRGSSNYRKQKAVVAKACAKLRHYRENFQHQLSHKLIEDNQFIGMETLAVQNMTRKAKKKLDENGKPARNGQASKRVMNRSILRNGWSGFVDKITYKAQWYGRTLVQVDRFYPSSRLCHNCGHKYDGLRLSEREWVCESCGASHDRDVNAALNILGEALRLSQARE

SEQ ID NO: 23805 - protein, 457 aa, Escherichia sp.
LAHLRSYWQFFCRVIVKNLTSVSGDKDQVNMHQENTMLPRRISVSLFIDQSIIWPVKRLQAFKFQLRPGGQQEREMRRFAGACRFVFNRALALQNENHEAGNKYIPYGKMASWLVEWKNATETQWLKDAPSQPLQQSLKDLERAYKNFFQNRAAFPRFKKRGQNDVFRYPQGVKLDQENSRIFLPKLGWMRYRNSRQVTGVVKNVTVSQSCGKWYISIQTESEVSTPVHPSASMVGLDAGVAKLATLSDGTVFEPVNSFQKNQKTLARLQRQLSRKVKFSNNWQKQKRKIQRLHSCIANIRRDYLHKVTTTVSKNHAMIVIEDLKVSNMSKSAAGTVSQPGRNVRAKSGLNRSILDQGWYEMRRQLEYKQLWRGGQVLAVPPAYTSQRCACCGHTAKENRLSQSKFRCQVCGYTANADVNGARNILAAGHAVLACGEMVQSGRPLKQEPTEMIQATA

SEQ ID NO: 23806 - protein, 490 aa, unknown
  TnpB Polypeptide
MKCIYSKSIMELIIRMKEVSKMSQVVTVEVRIYATRRQDAILKRMGKTYIQTANRVVANMVASEDGKRWSSKDIDTPLPSAVKNQLAGDAVGIYKKARKEDFKRIPVLKKPVCVWNNQNYSFDFESISFPVWMDGKSVKMRFRAAMVDKDNRNTRLLANKLGTLRVTKKGRKWIAQISVHVPTVPRTGMRVMGVDLGLKVPAVAVTDDDTTRFFGNGRKNKYMKRKFRAERKALGKKKKPRAIKRRNQKEQRWMRDKDHKVSRAIVDFARQKKISVIRLELLANIRQTARTSRKNNQNLHSWSFYRLASFIEYKAALSGIKVEYVNPAYTSQTCPSCSVRNKVRDRVYTCACGFKGHRDAVGAMNIRYAPVMDGNSPSALEPIRSVSGGVMAHPYLKARTKQKWIESAKHLRIPPSPTVWACGFSRGSVKSPASTVAGISVIFFRSSPGPPYTSRHDRHHEPDTIVLIPFLLDTVHTSSGPERGRPSFRG

SEQ ID NO: 23807 - protein, 347 aa, unknown
  TnpB Polypeptide
MHAYSNACNHVSAYIFQTHELKQAKINKALYYELRDRFGLRSQMAQSVMKTVIARYRTIQETAGKWIQPSFRHPEYDLVWNRDYSLADSRLSLNTLNGRIKLGFHSESMEQYFDGTWEFGTAKLVTKHGKWFLHIPMSRDIPALADSDVCNVVGVDLGVNFVATAYGSNGKTVFYHGRQIKHRRARYKELRRHLQQRQTASSRRRLKKIGSRENRWMSDVNHQISKALVESNPSGTLFALEDLTGIRGATEKVRRRDRYEIVSWSFFDLRKKLEYKAWRNGSKVKVFDPAYTSQTCPKCGHTERGNRDKKNHRFVCRNCGYQSNDDRIGAMNLHRKGIEYLSAVAGE

SEQ ID NO: 23808 - protein, 421 aa, unknown
  TnpB Polypeptide
MSEEKNLKIKDTLCATKARRANMDCCVISAKIQENRLSKAKLEKLIHCFLEAKWLYNAVVATDSLSLEDTSHVQVKVKDTFEVREIKNLSSQMKQSVVDSAKTNVCNLSKAKKKGLMVGRLQFKKECNEINLKQFGKTYAIRGKNKIRVQNIGVLVVNGLEQINLNEVEFANAKLIQKPSGFYINITVYLKKQPQSDTEKEVLGLDMGIKDQLTFSNGVKVNFYLEESEQLKGLMRKLSRQVKGSNQYKQTLNRIEKIYEHYNNKKKDVVNKLNHILKQNYIICFQDELLNQWKQKKSKHRFSFGRKVQHGILGRVKDKLKKNDSNVMLESSVPTTQTCLVCGCLTKHSLDKRVYHCNHCGFKNADRDVHSANMMVLLSGYGTYRSLNTDAVSIERMVGFLDNLSELGVVVTTNSMQADCL

SEQ ID NO: 23809 - protein, 406 aa, unknown
  TnpB Polypeptide
MNLTEKEIIYPTDERFDFIKELCHLSKNLYNASLYDIRQYFFETGKYRAWQSQASIFIKSKNPDYYALQTHLAIEVLMQVGRQFIGFFNSKTNKNKRIPRYKNKNGHNVVSFPKTTISRHIDFDKGRQIYTYTLCKRSYNLKIQSTKPNVKMVKFVYDEVNNVIKCFKIYEVEEPKFKKDNSRYFSIDPGLNNIVSVYNNIGIRPLLYNGRPIKSINQYYNKTNAGLRSELPKGIRTSKRLKRLSLKRANKLDYEMNKISTHIINEATKNNISKIFIGNNNGWKNEVNMGRVNNQNFVNIPYMKLFHQLAYKGVLKGIEVIFTEESYTSKASFFDKDELPILGQTDSPAFSGRRIKRGLYRDGKGNLWNADLNGAANIMRKVVADNAYKGIRKAKELMKRPILVTL

SEQ ID NO: 23810 - protein, 400 aa, unknown
  TnpB Polypeptide
LTFLSNCGIILKGKGSERMAVIQKGIRVRLYPTEEQEVLINKTIGCCRFVHNKTLENCKQSYEQTQHFPSKKERSANLVPLKEEYEFLKEVSSVALQQSLRDLDSALNNFFKNRGHFGFPVFKSKHNLKQSYRTPYNNGKADILDNKHIKLPKLGRVRTKRFDMPEVYKIFNFTIEKTNTGKYYASICIETEVQPLPKTGKQVGFDLGLIDLLIGSDGTRVERPKFDYANKDKLAKEQRKLSKMRTKLERVNANLDKCRNYQKQKHKVAKIHEHISNCAKDFNHKLSRKLVEEYDFLAFENLNVEGMRKNHYLAYAISDVRWSQLLNFIQYKCLWYEKDFAQVSRFYASSKICSCCGVVHKDIVNSLSVREWTCPDCGTHHDRDVNAAKNILIQALSVGV

SEQ ID NO: 23811 - protein, 417 aa, unknown
  TnpB Polypeptide
MQMRYNYRLYPTRVQKLALARAFGCVRVVFNDGLRARQQAYQAGRPFLTDAELSARLTASKATPERAWLSEVSAVPLQQSLADLNMAYRRFFSYRAALREWKANERKGPKPREVGPPRLKSRKDRRQSARFTANARFAVLTNGRLRLPKIGDIAVRWSRRLPSAPSSVTVIKDAAGRYFASFVVGTDPAADAARFPPAGAEVGIDLGLTTFAVLSDGTVIRSPRFLRRAERKLRRAQRAHSRKQEGSRNKDKSRARLARAHARIAARRTDFHHKVSTAIIRDTQAVYTEDLCVTGLARTRLAKSIHDAGWGGFVRMLAYKAARYGRVYVAVGRFEPTSQMCSACGARDGPKPLSVREWTCAGCGAVHDRDLNAARNVLALGRRESLNARGSGIRPGQPWQPLAKREALAVPHTAAPA

SEQ ID NO: 23812 - protein, 345 aa, unknown
  TnpB Polypeptide
MIRRTQHNISYANRNKLDALDSILIESKRVINLFIDSLWTGSATNQKFISTKVDTWLSARMQQCLGKQALEIVKSQNKRKKKTKPIFKSDVINFDGRFIDVSQDDNSFDLWFRLSSIGNKISINLPSKKHKHFNKFAGWTNKNSVRLRKDGNKYYIDLFHEKTTEPNNKPETIAFDCGYKKLLSDSNNQHYGVDLKLVYDRLANKKRGSRKYKKLVVYKNNMINQVLNNLPLDDVGHVVVEDLKQVKYKSKLGSKFNNKLQYWSYKRVLDKFGSLSEVKGFKLTKVNPAYTSQTCSCCGVIDKKSRQGEAYHCSTCGVELDADYNGARNILHRGTYSSSNFKTIS

SEQ ID NO: 23813 - protein, 312 aa, Rhizobium sp.
MVLVRLPDTTPILGRRTVVAEDFGFTNTSSIVVLRSRTPIGEEALARIGGHNGGGEKKVTKTQAKTYLEDHMSRDDVEVLETVQFDGRDFLRRVKTYAAKVDRLRSEIDRLYNRLDRIRAEINVVARAEPGALVPEVAAMPDHTRYVAMHTRFFRLLRAIDCLKEARRAVYRTVAGLKKSWFGFVAQRKADLAAKHDAVVVTEDLDILAVPTDDPAYKGRTFNKMINNGSKGQYILRSKNTLTWRGISSVKIPSFYTSTTDWRHGKVDKDQRRGAIFRASSDGRVWDADLHAAEMIGRYLFLKPKSESIVAA

SEQ ID NO: 23814 - protein, 403 aa, Nostoc sp.
VFNLTYEFKLKPTHAQAQIFEEWLEINRRVYNYALAERKDWYLSRSCRINACSLKHEYIIPAETPRPTYASQCKALTAAKKDFPELKKVQSQVLQQTLKRLEIAFVAMWERNHGFPRFKKFGRMRSFVFPQIQSQKLNPGMVNLPVIGLVKFRQSRAIPDGGVVKLARIVKRVSGWYVMLIVQWDVNLPQPLPHGEAVGIDVGLTSFVATSNGLLVKRPRFFVDAERKLKLLQQRVSRKPLGSNNWKKAQKKVASLHEYVANCRKDWHRKLSHQICDRAGMVFVEDLNLIGLSGGMLGKHCLDAGFGQFFSILEQTCFKRDVYFQKVDARKTSQTCPNCRVETGKKKLSERTHICSNCGYTTHRDIAAAQVVLQRGLAAVGHTVKMLAEGKFIGIPLKQESPN

SEQ ID NO: 23815 - protein, 407 aa, Mastigocladopsis sp.
MKQVKLTIKLKFVNLNRVKAEMFAQMEQENICLANKLLSLPYMERRKITTAKISSTLASALSNQTIRHTISATGREVKNYTKLPIEINKQNWSLHKVGDTYSLSFPTIKGVKRVPVEVASPHWQTVLEKVLANQCDKGCIRLLYKRNAWYAYMSVTLEVPEVQSQNRIGVDRGQNNLAVAASSRGFAIFFSGLCAKHRRRYYQQRRKSLLQAKKFRALKKQETKEHRWLEAVNHTISRRIVRFTQFLDADVVLEDLKGCLKTTNLSGKTMTDLGDWDSHCFCSLEQKLIYKIEMVGRKVIKVPAAYTSKTCSTCGTLGDRKKHDFNCPNGHYHHADHNAAVNLARWVGFTCDLNLKEPLSAMESVDSGYAVLGTPQSRGTVYCTPTLRESEMSSGHLVNTYPLRDIG

SEQ ID NO: 23816 - protein, 401 aa, Nostoc sp.
VLVLEYKIKGFKLQYQAIDEAIITTQFIRNKAIRYWMDAPREANINKIALNNYSTALRKEFKFVEELNSMACQSATERAVIAIDRFYGNCKGKIPGKKGYPRFQKDNRSVEYKTSGWSLHPTKRRITFTDKKGIGEVKLLGKWDINTYPVKSIKRVRLVKKADGYYCQFAIKTESLSESRIADDEVGLDVGLEYSYSDSNGHHQPNPRFLIKAEKSIKHAQRQIYKKEKGKNQRRKARQRYARKHLKVSRQQSEHAKRIARNVCKASALVVYEDLRVKNMVKNHCLAKSINDVSWGFFRRWLEYFAVKFNTKVVAINPRMTSQKCSDCGAIVKKSLSTRTHKCSCGCELQRDVNAAKNILNLAKARDGQSQRNATGLATSTLLGETLVEQVARVKVESPCL

SEQ ID NO: 23817 - protein, 437 aa, Thermococcus sp.
MKRTVTVKLQPSKEQAKILHQLADLGVKVWNRVNYLRRQQFFKEQIVDFNSTEKTIYREFKREIGSATIQQICRKNAEAWRSFFSLLRKNRNGELPNWLKPKPPNYLREDGKRKPLIILRNDQYKIEGNKLILKGLGKFRRLEIQFKGRIHLKGKQGRLEITFDPIKRKWYAHVSLTVEEKLEDEEWVSVPRQPKGSLSAGIDLGVNNLMAVYVENGQSFLVNGRPLKSIDFYWRRKIAEYQSKLNKSGAKTSRKLKKMHEKAKLQAKHYINTAVRQTVKKLYDLGVSKIVVGYPKGIARNSDRGKRQNFLLSHVWRFNTVIKRLTKVAEEYGIRVVIVGEAFTSKTCPVCGKPHEGARFVRGLFKCPAMGLVFNADLVGAFNILKKVVETITPNLSGLYAQRRGNWPKARPEGFEEPVPTGSLMRTPQTSPPLARG

SEQ ID NO: 23818 - protein, 371 aa, unknown
  TnpB Polypeptide
MMARKKTPIEDGRQIQYTTIKVRLYPTPEQEALFEKTFGCCRYIWNQMLADQQRFYTETDAHFIPTPAKYKKEAPFLKEVDSQALIQEHNRLSQAFRVFFKNPEAFGYPKFKKKKTDRDSFSACNHDFPSGPTIYLTKDGIRMTKAGIVRAKFSRRPQGWWKLKRITVDRTKTGSYYCSILYEVQGKEPTAVIPTEDTTLGLKYSMAHFYVADNGDMADPPHWLQRSQRKLADIQRRLSRMQAGSRNYVEMVQKYRELHEHIANQRRDFIHKESRRIANAWNAVCVRADDLQEIARGPVRGNVLDSGYGMFRQCLRYKLERQGKELLLVSRYAPTTGTCGAVHQRDIHAAKNIKALGLAQYFNRQEVRESA

SEQ ID NO: 23819 - protein, 356 aa, unknown
  TnpB Polypeptide
MQTVSSYGVELRKQNIPVRQTLEIYRSAVSYLTEIYEQVWEELAEIPDAKRRFNAAEHLVHTTKKNPARFDFDLRFPKMPSYLRRAAIQHALGSVSSYETRMDLWEKSGEKAGKPRLAYENHAMPVFYRDVMYREEKEGKDEAYLKLYDGHDWKWFCVRLNHTDMEYLRRNWSGKKASAPTLEKRHHKYFLRFSYTEEVTLTKTPVKEQIICSVDLGINTDAVCTIMRADGTVLGRKFINHPSEKDRMYRTLGRIRRFQREHGSAQSRGRWAYTKRLNIELGRKIAGAIVKNAEKNHADPEDGAKSEDRTRSEDRTRSEDRTRSEDRNRTDDCVEYSICRWEKCERRSIRSHKSSR

SEQ ID NO: 23820 - protein, 393 aa, unknown
  TnpB Polypeptide
VRRAYKFLLRPTSKQAALLTACLDDHRALYNAALQERRDAWKMRSASVKFFDQSAQLKDIRADDQDGQGRWSANSQRFTLRRLDKAFAAFFRRIKAGQTPGYPRFKGRGWFDTVEWTEGNGSRWDSQPHAAATRVYLLGIGHVRVNQHRAVKGRVKTVSVKREGSRWYVVVSCDDVPAEPLAPTGAVAGIDLGVASFLTISDGTHVPNQRHLAASADRLAAAQQALARCKRRSKRRRKAVDRIAAIHCKTRRQRLDHAHKTALALVRDYDVIAHEALNVAGLTRRPKPRPAGDGTFEPNGAAAKCGLNRSILDAGWGVFLRVLAAKAESAGRTLIAVDPRHTSQTCSGCGHVAAGNRVTQAEFRCLACGHQAHADVNAAINILRAGLVLREAA

SEQ ID NO: 23821 - protein, 315 aa, Microtetraspora sp.
VFDVKLVVQVRLLPTPEQVAALKATLRACNDAANFASVTAFTAGDRREYALRKHTYREVKARGLGAQAAQQVIKKVADAYTTLKANARAGNLGPQGCARRIRAESKPIAFRADAAQPFDDRCLSWDHTAHTVSIWTTTGRLKKVAFTGSLDQLKMLALYRKGESDLVCRDGMWFLYATCEIPDVPVTEPDGFIGVDLGIANIATTSDGTRHCGKGLNAVRHRNRELRSWSFHQLGSFIAYKAARHGVAVIHVDSAYTSQACSACGHVDKRNRPDQNTFSCTSCGFAEHADVNAARNIASRGVAGWAVSHAADDAA

SEQ ID NO: 23822 - protein, 627 aa, unknown
  TnpB Polypeptide
MAKTQTLSFPIRLPDAMQAEALRLLDASREPINQIVTELWQQLDLFTADRAGPAWKQVEKHVLRRSGHGSRQERCEMEQAGRILRAQASRKQVFQTILPLLSEGLIRPAEGQRPARKEHRQIKEQVRALRAQMHDAGEDADAFMAMTNVLEQACNQYLQTERFPTTYEELQPVPVLTKGQLTFAGDDGMTAGQTYRAQIEVSHVCDVASRKEHQQATLTLKLRTPDEEDQWAWGQWSQAIPLPETVCGYLWQGAKSQAPTLREIRSDNGSRVAVLDVILEVPARYVSPLEQESRVLGWDWGVRSLITVSVLEQPAGDDPYRQVSRPVFLDTGGIDGRQARLRREIDRLKACSERYTTFIKQSLSASALQHTPLPADFPRWRARVNDYEVRIKQCWKKYERRNRELAHLASNLLILLALLHDCRLICGENLTTLKSEGRGRGVRGRWRNWRNTTTVRGELWRVLKYKCHLFGIRTRQVDPRGTTHTCPHCHQPAKTYRSPAPADREQAIEWGAWLCCSNPACRWNGARDYAASLNIARLGMAFLLTYHETKRYQAYRMTDSSVKPASYTGAGATLLLPSQGITPRLLEGKYVFYAGWSYSTSLRTSQPKRLLAVLSTSKLRKRLLNSA

SEQ ID NO: 23823 - protein, 470 aa, Bacillus sp.
MSEEEKRESTPTFTATIRLKTPPKQVKHLLMLSDCARQLYNACLGEGIKRLHRLQHTTLYRETVQLPKTKKFKTQRSSQFKFLNETFGFKDLFNAFGIKTKNDSKFIVEHLGTHVCQKIATRAFKAVQKVALKQAKRVFFKSKGEFVSFEGKNNETFLTYSNGYVFIGDMTLKCLINPKDKWLQHALQHRVKFCRIISKIIKGNPHFYVQLILEGYPYQKVKMGDETMGLDIGPSTIAMVSDTKAELKEFCKKVVKIDKEKRVIQRRLDRQRKANNPQHYNVNGTIKKGKKVWKNSKRYIKTKNELAEMERKLAETRKMLHGWETNRVIERANTVKLEKLSYIAFQKLYGKSVGRKAPSMFVKMLKRKMMAYGGTVQEFSTYSTKLSQTCLCGTIKKKRLKDRWHVCECGIHAQRDLFSAFLAKHVTKSHKLSLKEAKKEWDKIKPLLETCVSDLKEMKKERKLISTFGV

SEQ ID NO: 23824 - protein, 435 aa, Bacillus sp.
VKTVSKQYGIQKEKLHLNKKEYLALRQLCWLSKNMFNVGLYQVRQHFFETKQYLCYEENYKIAKQNENYKLLGSAASQQTLKKVEEAFKSFFSLIKIEGQKARIPRYLKKDGFFEISYPQFKLQADGSFNVPMSPKFKKEFGLINIKFPSNLNSNDICEIRILPKYNASYFEIEYVYEVKTIKPKLNHKHALSIDLGINNLATCVTTLGTSFIIDGRKLKSVNQRYNQQNARLQSIKDKQGIKTLTNRQIRLLEKRRNFVRDYLNKTTRYIINYCLDHNIGKIVIGYNQGWKQNINLGKQSNQKFVQIPHSQLIDKIESMCKRYGIELVKQEESYTSKASFIDKDHLPAYNEKEDKIHLFSGKRIKRGLYQTKASIKINADVNGAANILRKSNHEFHLEEVAKGILTFPTRIRLISTGKQNHIVVSSKNHVSLAV

SEQ ID NO: 23825 - protein, 542 aa, unknown
  TnpB Polypeptide
VQAEFMNKDVLKMPTGKKIDSNFVTVECLLAFDKDEDKGRVLALMRKFSSMVRFAYKRLMEGAERKELKKLLAQKYGINTRYSDDAILLAKQNLESCLEGKQNPKKLVFGSRKLFEQLKKKHLTGKRRETLRQKWDERRYGFMYSRGERAKEGNLNLRLVNLNNQWHLRINLGNGEYVWARVIRSAKRKTDKWIGFIGSLEHSEKTEEWFPYTVRLKLRNGKVYAQFSREEKFPEVTITKDNGVIGIDINAYPFHLALVHTAKDGNLEKYERISLDNLLEGNSDKRAYLSWQTAHQVVEIAKRERKAIVVENLEKLPKGRRGDGLPKLRQKLQKWIYKGLLQKIEIVARRNGIQVIKVNPAYTSIIGKLKYAPLHNIDKDTAGAYVITRRGLGFKERLPKNYRKLLQDKEFLSYSVAKVEDRISRLRKEICEEKNEYKRNKLRSDLNRLKGELKLLLKSLLDSGESESAAQQTVNRKMERVRGGAQALQKSWQVLSVALAFSCLESFRDLSPLKRLILTRDWVGAAKRNGLVPPHLVRGRMH

SEQ ID NO: 23826 - protein, 402 aa, unknown
  TnpB Polypeptide
MELRMYKYRLYPSGKQKVRIINSLKICKAIYNELLETSIKTYEESGKTLRKFDYNKLIKGKYSVHSQVAQNVSDRVHKAFSNFFRRIKDKSCRQKGFPRFKSRVNSITFPQSGFKILSDRRLRLSKIGDIPIVLHRIPKGKIKTLTIKQNKVGQWFAIFSCEVNTPIIKHQSTEKVGIDVGLENFATISNGEVVANPRHIIQSEYRLTLLQRRLSRKVKGSANRRKARFKVARLHNKIANQRSDFLHKLSSRITKSYSFIAVEDLNIRGMVRNHCLAKQVTDASWSTFIRNLEYKAVTSGSELVKVNPRNTSKTCSRCGTIIEMPLSKREFLCPDCGFACHRDLNASHNILKVGTDCAELNACGDSASTTEQSVASGIVEAGTIYDKKLRSSMSLEALTLNL

SEQ ID NO: 23827 - protein, 365 aa, unknown
  TnpB Polypeptide
MANKAYKFRIYPNTEQQILFAKTFGCVRFVYNHMLADKIKYYEETGKRLNNTPAQYKKEFEWLKEVDSLALANAQMNLQTAYNNFFRSPKIGFPKFKSKKSNRKSYTTNCVNGNISVENGYIKLPKVGFVKLKQHRQIPSDYKLKSVTVSQTPSGKYYASVLFEYESQVQEKEPHNFLGLDFSMHELYKDSNGNEPSYPRYYRQAEKRLKREQRKLSLMQKGSKNRGKQRVRVARLHEKVANQRKDFLHKQSRQITNAHDCVCIENLDMKAMSQALHFGKSVSDNGWGMFTAFLKYKLEEQGKKLVKIDKFFASSQICSCCGYKNPETKNLSIRAWDCPECGTHHDRDVNAAINIRNEGMRIIFA

SEQ ID NO: 23828 - protein, 366 aa, unknown
  TnpB Polypeptide
MCGLWADAEDLEKLRNTVDAFQSACNYASRIAYNRRIHKPEMLRKQTYRDLRALFKLSASLAVRAINRVAASYAEAPHMLHIFKDGFIPLDKRLFSLKRNGDFQASISTIRGRVKAYLLLSEHQRKLLENPILGARLILERELPHINICVNCKVMQGPMISPVGVDLGFKKLMAASNGFKIKGGQFNARIRNYRALEATLRNRGTSSAKRRLKRLSEREGRWKRTSLHQSSRALIESLVDGEYIVLERLHGRKVRTESKRNHQPLERNRSSVMARLHEMITCKCIESGISVVLVPPDYTSQRCPRCGTIDKNNRRSQALFRCIHCGYQHNADYIASINLRELALGGWAAISQPYAAPISERGCKPN

SEQ ID NO: 23829 - protein, 252 aa, Cyanobacteria sp.
LSIYKVKASKTQYSAIDEAIRTVQFVRNKCVRYWMDHQGVNKYDLSKLCKQLGDEFGFAKKLNAQARQASSERAWSAIHRFYQNCKAGIKGKKGYPQFQKNNRSVEYKVTGWKLDPNTKKHITFTDKNHIGRVKLIGSRDIYFYSPDQIKRVRLVRRADGYYCQFCINVDASEKVEPTKQIIGLDVGLTDFYTDSNGHKEPNPRFFRQGEEELKRSHRRLSRKQKGSSNRKKARQRLAKKHLRISRQHNATR

SEQ ID NO: 23830 - protein, 479 aa, unknown
  TnpB Polypeptide
MDIFLVAQNYEESGNYGKNHIGRGITQIPCQRRRKDGSHNGAERYIARQQHAHQPDTEACHRNLRHHKNQQAQCGRNALATLKAQKERIIVAQKCAQSSNHIQQRIVEKITHNIAYRFRIYPNREQEVLLAKTFGCCRFLYNQMLNDKIREYEATKKMLRNTPAMYKKAYPFLKEVDSLALANVQMHLEKAYKNFFRDPKIGFPKFKSKHRSRKSYTTNVVNGNIQVEDHQIKLPKLKWIRMKKHRDIPEKYCLKSVTISMEPSGKYYASLLYEKSDCENQAEEFDYEDAKILGIDYAMHGMAVFSEDIQKENEGYFRKSEERLAREQRKLFHCVKGSNNYYRQKKRVALCHEKIRNQRKDFLHKLSHEMAETYDVVAVEDIDMKAMSQCMHFGKSVMDNGYGKFRELLEYKLTWRGKKLVRVDRFFPSSKKCCKCGSVKKELKLSDRVYFCTCGNRIDRDLNAAINIREEARRMLLAG

SEQ ID NO: 23831 - protein, 399 aa, Oblitimonas sp.
MIIGKHSATVLRNKDQVSMKLKNAVSACSICIVFSHRPNIIESMKQTKTLKVRVKDKHRPLLNNMARSVNFVWNYVNELSHRSIKERGVFLSAYTIQKYTQGVHKELGLHSHTVQKVGAEYATRRRQFKKSRLSWRKSGGVRRSLGWIPINTGMAKWKNGQVYHNGHYFNVWDSYGLSQYTFKSASFNEDARGRWYFNVVVEVDVVMPKGQDCIGIDLGLTDTATCSDGTKLEAGRFYRGFEEKLAIAQRAKNKTQVKTIHAKIANRRKDALHKFSRDLVNRCGEIYVGNVSSLKLVKTKMAKSVLDAGWGQLKTMLDYKCAHAGIVFKEVNEAYTTQTCSCCGALPDSRPRGIAGLGIREWTCNECGVTHDRDVNAAQNILAVGHGRLAVGIAVSLGR

SEQ ID NO: 23832 - protein, 490 aa, unknown
  TnpB Polypeptide
MRQTTRYSQSVIPTFILICHIILYVSDRPQRTNTYIAEPATERYQQCLFDWLAAQPPLWNQINYRRRQQYFSDGGDVWDAEYTDLYDEYAPIIGKATCQQITRKNSEAWRSHFRLLDQYHDDSTMAVTEKPSPPGYWGNRKEGYELHGLVRNDLYTFDWDEDRSTLEFGVGDVLKDRYGLSGNERITLEVRGNPQWNGDDSRLELIYEEHADQLRVQHPVRIQPDTLREQRGDAFTHTLDTENTTQVAALDVGANNTLAVVTENGDTAVYHARPEFDRFQRYSERIATLQSELPDDEYTSALIRRLYAAQSGSRDHSRDAAVKHAADWLLEHNVDTVYVGDLTDVLETHWSTDVNTKTHNFWSHRQLVDRITLTLSDVGIAVVEVTEADSSSTCPECGSSDVTRTGDSFRCHDCRLDAHSDVAGAWNILQSEVGPMARPAALSAERGRDAPSDGAYWQWNEHDWTPADFGELSRSLDQPSLSKPASSQPG

SEQ ID NO: 23833 - protein, 389 aa, unknown
  TnpB Polypeptide
MRKLKKAYKIELNPSEKQKIKIHQTIGVARFVYNFYIAYNKEVYEKEGKFVSGMDFSKWLNNEYIPSNQEMKWIKDVSSKATKQAIMNADKAFRDFFKGTKGFPNFKKKKNQDVKAYFPKNNKTDWAIQRHRVKIPTLGWVRLKEYGYIPTNSVVRSGTVSQKADRYYVSILVEEKDKEVSRANNEGIGIDLGIKEFAICSNGYQFKNINKTSTVKKVEKKLKREQRKLSRKYENLKIRNKKEGGKATQRNIQKQVIKVQKLHQRLTHIRSDYINKTIFSIIKQKPSYITIEDLNVKGMMKNRYLSKAVAQQKFFEFRKKLTSKCKEKNIELRVVDRFYPSSKTCSQCGSIKKDLKLKDRIYKCSCGLIIDRDFNASMNLKNAKEYKIA

SEQ ID NO: 23834 - protein, 382 aa, Azotobacter sp.
MKTKRAFKYRFYPTPEQESLLAQTFGCVRFVYNTILAWRTEAYRSEQKRIGYAAASAQLTALKKTPERAFLNEVSSVPLQQCLRHQQKAFQAFFEKRASYPAFKSKKQRQSAEFTASAFQYRGGQLFLAKCKEPLPIRWTKQRETLPSTPSTVTVTRDTAGRYFVSLLCEVEAQPLPVSPRTTGIDLGLKALFVTAEGERIDNPRHTAKYAARLAKAQRALCRKQRGSKNRAKARQKVARLHAKITDARLDGLHQLSRRLIDENQVVCVESLAVKNLIRNRALSKSIADAGWGELVRQLEYKAAWAGRQVVRLDRWFPSSKRCSCCGHTLASLPLKVRDWTCPACATEHDRDLNAAVNIKAAGLAVLALGENVSGIGRVSLS

SEQ ID NO: 23835 - protein, 404 aa, Kribbella sp.
MSEATDYVVQVSRYRLAPTGAQAEGLLEQCSHARFVWNLALEQWSMWRPGRRLSAPGLVVQMRQLTEARRQHDWLRAGSQTVQQQALRDFDHAVKAFFTGARRRPTWRKAGRREGFRVVGSQAGRVERLSRKWAKVLVPKVGWIRFRLSRTLPAARSYRITRDAASRWHIAFAARPEPILAPGNGRVVGVDRGVAVSAALSTGQLLVCPAPRPAERKRLRRLQRRLARASPGSNRRIRTKAAIAKLKARETDRRKDWVEQVSTDLARRFDVIRVEDLDIRSMTRSAGGTTVAPGKNVRQKAGLNRAILANGWGRLVERLEQKAVGRVQKVAAAYTSQTCSRCGTRDRKARESQATFRCRACGYTANADVNAAINIAAGRAVTARGAERVLPAMKREPQLSTSSP

SEQ ID NO: 23836 - protein, 594 aa, unknown
  TnpB Polypeptide
MFVSDGTLRTHYRASGRVYWQAPQDFAGARPQGNSSSPSHGNQQALLVERRVGRLSWQNIRQSSSTFGRLLPGEFTGTAARFKEPAPHRRAVLRSQRTCQCGVHRRDRRWPELQASEVHSLSGCYPHRSDRDSDLGAPGPLSQVRIRPVAAPLPDTRLHFACHQCGRGLSRAGNGGGLDGDNSLFLGASLRITQLPQGAEGGFEMILAQRIRLNPTADEESYFRRAAGTARFAWNWALNRYKAIKQAGGKANWNDIKKDFRQAIDREFPWVREVTKCAPEQAIADLRQSICTYYKAKPKGQKVKFPGYRKRSKKIGGFGLANDKFSVSGNTATIPKLGPVNMAEALRFAGKIMSGRVSEKAGHWYLTVAVEVDAQRVPSLSGSVGIDFGLLRFATLSNGEVCETQACFRRSERKLAALQRGLTRKKKGSHNRTQWKLRVARLHERIRNQRQDFIHKFTSTLATLFAVICVEDLDLKALAKTRLSKSFADAGVGEAVRQLEYKSGLRGSLVQKVGRWFASSKLCSACGWKNGDLMLADRMWTCANCGCVHDRDMNAARNIELEGLRLLAGNGYLGVTPVDSSAPLSVSAGSVATG

SEQ ID NO: 23837 - protein, 464 aa, unknown
  TnpB Polypeptide
MSKVTRIAFSHNLNAGKLDSLSEIASRLGNLRQEVWHRLGSIAGIGLIHRQIRDSWLAENRQFDVPARLWKETLRDTFDDICLYREAAKVKVRQAMKKRTKDESERKRLFTWLKNNQWTEDKYLQRMMRKHFKHGKTKVDNQIILDTGSYSAFERNGQAWIKVQGLERGKRIAIPLNTNLLPSGTLRLIVRDGRIEVHYAVASDVCCTKPCGEKEVGIDKGYSEVFVDSDGQVHGSGLGDLLSAESDVLKVKYQRRNQLKAFAETKPHKAKAILKNNLGRKKLDERKRIHTQRVRDKVFKAVHSVVDSSKTIVCEDLSSPIASQKRYGKDQNRRLSGWVKGLIAEALNSVSQRRGSTLVFVNCAYTSQMDSRHGVLWGHRHGETFHCFDGVVLDADENAARNVLARKDDLEIRLWTPYKRVKSILHERTELFQKRLGLLNQDTSCNEKQLLLFPLSTVSELPFT

SEQ ID NO: 23838 - protein, 401 aa, unknown
  TnpB Polypeptide
MSFYAYKVRIYPNKTQKELINRTLGCTRKMWNLMLNERKEVYEKLKHDKQALKNYKYKTVEEYKEEYPYMKECDAQAFKYMLLDLNSAHKRFFNKTSQFPKFKKKFIEESYSSFQSTIKLNRNDKTIQLVKLGNVKYRNSNDKNIIGKIKRATISRDASGNYFCSLLFDVGDVAKTPKIAIHNENQIIGLDMSLGKFYVDSNGKSPNYEKLYRKSEQRLKYLNKMKSRKKKGSREYKKIARSIARVNVNIKNKRNDFILKTAQRLTTDYDKIVVEDLNMKGMSQCLNLGKSVHDVGWGTFISKLEYYCNKKGKKLEKADRFFPSSKTCSSCGKIKKELTLNERIFICDCGLSIDRDRNAALNLLKFGLKGSPSMLVEPLGYQNYEASNGISYVQQTMKNVF

SEQ ID NO: 23839 - protein, 487 aa, Vulcanisaeta sp.
MLRRAVAVEFEVTKELNKLLYSVETTYLNIVREVVEYAVVNNVLSATQLQRLFYHRYRQEYPSLNSQLTIQAIRQASEIAKSFMEERRKGLAYKPYPEVRSVSLRFTEKAWNYGKFIGSTAPVRLELSLLGGRRVVWLRLHKRFWQYWWRILNGEAELASTLIVKRRANKWYAIFVFELKPRVEEPESIVAFDINENTVAVGKIDLPSTVGKVVDWNRQYATPQLYMIRTDFGRLARRYERVRNAIIERLKPHFALPNGKYVNVTNTREYRKFVKRLRERDRKVGRVRQIANELTKTPAIIITEELGDNPQESMIEDVGKDELRHRIKQIPFKNIEKAIEDKALERGSKPFRVSSYRNSRVCPIHFVKLESTNDWHILQCPLGHLVDRDYASVTNMAWKLTPESWTKSVWWNMKREMNWRKHEDKSNPIIPHPIMQYIHAVLKTFKASEESPAVLARGNPMNHHRIQNEGGGEETSHTLSRQGGGQL

SEQ ID NO: 23840 - protein, 485 aa, Microcoleus sp.
MTTLTYCKGLPTPIDELTLLGLTDFELFLFDYSAISYRATVETVNHLLGLEGKLDKSKWNTHLQKAYGISKRHAGGIIAHSEGKVSSAKKCRIDQIEQLESKLKSARQWVSKAEKKVKLARKFYAKKNWQNSKIGCIFPLAISLESKKTNWHQLKFTIHYKQRYIHKLAQQIKCLKTARLRVKVSRSEVFIVGSKDESYGNQVCQWDGNIIKFRVPYSLESKYGKYVESKIGNFDRNINRLSELGAKTWHFYRKDYRWVVALLFTPAPVERVSRPIQYGCIGIDMNPGSIGWAYVDTEGNLQASGTIPLLKGLSTGKQDAQIVAACLQLAVLAATFACPIVCENLDFTAKKTQLRERGKKYARMLSQWAYSRFYHLLESILSNRGISLFKRNPAYTSLIGLVKYARMYGLSSDIAAAIAIARRGMNLSERLPRPMSAYLGVNPRKHVWSALHQLNKFIDRCDMVSRRHDYYSVSNWGSVVKLNIE

SEQ ID NO: 23841 - protein, 308 aa, unknown
  TnpB Polypeptide
MSVITSVSITKKQGWSSILTGTIRKKAHKEDLWYKQLPSQTAQEVCRLLDKAWKSFYALKRSGGIETPRPPRFKQESIPITYLQMGIVHERDTDRVRLSLPKALKKYMEETYQIHENFLYLENKIFRGMDQIKQMRIYPPEKGSCKIIVVYEVPDQEELPQNGHELSVDLGLHNLMTCYDSENGKTFILGRKYLELERYFHKEIARVQAQWYGQQSGKGVKHPVTSKHIRKLYKRKQDSVTDYLHKITRYLAEYCREQGITCVIAGDIRNIRREKDLGHRTNQKFHSLPYNRIYIMLEYKLKRYGIRS

SEQ ID NO: 23842 - protein, 415 aa, unknown
  TnpB Polypeptide
MRVTQAFRFELDPNRTARVALARHVGAARFAYNWGLDRCLRAVQQGQRLPTAARLHREWNHWKRQHAPWWVEVSKCAPQEAFRDLERAFRSWRRGLARRPRFKRKKSWDDNTARLTGSIRVLPRHVQLPRIGRVRTKERTGKLLTLLAGGRARVLSATVSREADRWYVSLTCEVERPDPPVREGEPVGVDLGLGWFLALSDGTRGQAPRPLGRALCLLRRRSKQLSRKQKGSRNHARAALRLARLQRRVRCIRRDFLHKTTTWLVRTKPVIVVEDLNVRGLVRGRLSRPVADAGWGAFRRMLEYKARWYGSQLVIAPRGFPSTRLCSRCGCLGPRMALSERVFRCPGCGLEVDRDLNAALNLRSYGLAHLTGSTGSSPGSDACGDPSGGGTATCWSTSHGSKKQEVTGHLSCFPR

SEQ ID NO: 23843 - protein, 184 aa, unknown
  TnpB Polypeptide
MKGGLVYDACFITRGVIPLPLEARSQKKLAKLQRQLSRKSKGSNRREKARIQVARLHEHVANQRQDMLHKLSTSLVRTYDLIAIEDLAPSNMVKNHKLARSISDASWGEFRRQLEYKAAWYGKQVVTVDRFFPSSQICSACGAQWPGTKDLSVREWTCPKCGAVHDRDVNAAKNLLNEGLRLLA

SEQ ID NO: 23844 - protein, 382 aa, unknown
  TnpB Polypeptide
MWKTVDDYCFQAKNIYNAANYIVRQEFINNKKWIRYYELDRIMRENSDYYKLGSQASQLVLRSLDKNWKSFFNGIKLYSKGNKNNFLGKPNLPKYKNQNGRSALMLTNNLFKIKNEEIYFSWKPLNKFSGIKTRVNKETLQIRFIPVGACYYMEIIYKESVKEVRNCKNIMGIDLGINNFATISNNIGLQSIIINGRIIKSMNQNYNRLKSKIQKETGIKWCNKLQNINDKHQRKIDYFMHCSSRYIIDYCLQNDIDTIVIGKNDRWKQLSKMGKKNNQNFEYIPYEKFISKLKYKCENQGINFMQTEESYTSGTSYLDHELPIKENYDKTRRKKRGLFVSNDGIKINADLNGSYQIIKKVFPNAFEQWDRGCSLHPVRINI

SEQ ID NO: 23845 - protein, 468 aa, Butyrivibrio sp.
VYRTRQYRIAKNNTLYSYCQDICRASAVLYNRANFIIRQYASATEAFDSYRPLFPNQMQVYKLVSETLEGTKYHVVGSWLSYNAIDYLLKSTRDKAYYGLPSQANQQILKLLLRDYKSFFEAVKTYAKTPSAFTGRPRMPGYVCRGKYKTAILTNQICRIKEDSYIRFPGTTKALRLGRDFPQGKLKEVRIKPHGKDFVMDVVIDALTVGIEPLDDREVLKFLSSKDDISDIRVMSIDPGTDNIAAVANNFGADPFVIKGGLIKSVNQFYNKEMGRLSSCAMKCNNRYRTRKMSILTEKRNRRIKDEFHKISRQLADYAMDNRVDVVVMGHNVFQKQEADMGHISNQNFVQIPMLIFADMLRYKLAEYGIRFALTEESYTSKADFLAMDEIPVYKKGSKSDYVFSGKRIKRGLYRHYDGTITNADINGAANILRKVFPKVTQWDRGIVDMPCSLGCVKHPKGSCRSAA

SEQ ID NO: 23846 - protein, 286 aa, Escherichia sp.
MKRLQAFKFQLRPGGQQEREMRRFAGACRFVFNRALALQNENHEAGNKYIPYPRMASWLVEWKNATETQWLKDAPSQPLQQSLKDLERAYKNFFQKRAAFPRFKKRGQNDAFRYPQGVKLDQESSRIFLPKLGWMRYRNSRQVTGVVKNVTVSQSCGKWYISIQTESEVSTPVHPSVSMVGLDAGVAKLATLSDGTIFDPVNSFQKNQKTLARLQRQLSRKVRFSNNWQKQKRKIGLRLGNGKYCTLRLFFVLTDINCSQRTILPFSQLLIVFPDIVPCQINVLPA

SEQ ID NO: 23847 - protein, 367 aa, Gemmatimonadetes sp.
VDYITYKFKLYSVCDRNKYLHYEIDAFAGVYNHFIALHKRYYQRFNKYPNKYALKKHLTKLKKTERFGHWSALPSQALQDVVFRIDFGYQKFFARDNKRPPTFRSRFRYQSYTLAQAGYKFLSGNKVRIGKRVFRYHKSRNFDVDSIKTVTIKRDRVGDLWLCVVAKAEGIKSFIAKNGKTAGFDFGLKTYLTASDTTRTQSPLFFSRNARQVKKANRNLSRKQKGSNNCHSARVNLARVHRRVASKRRDYHWQLAYHLCRQYDVMCFEKLNIKAIQQLWGRKINDLGFADFLTILKYVAQKTGKTVRQLDQWLPTSKTCSACGMLQENLELRERTFRCGCGLEIDRDLNAAINIHRWGRPPLAEAA

SEQ ID NO: 23848 - protein, 180 aa, Escherichia sp.
MGLEHYAITSDAVKVPNPRHLINVSRNLRRKQKALSRKQKGSANRKKARIRLAALHERVANARADFQHKLSRAIVDENQAVIVETLKTANMMKNHNLARAIGDAGWHSFITKLEYKAATKGVHLVKLDQWFASSKTCHCCGYKMPEMPLHKRIWRCPECGAEHDRDINAALNIGKKEYWN

SEQ ID NO: 23849 - protein, 394 aa, Mycobacterium sp.
VSRYRLLPAAGQVVGLAEHCRHARYVWNLAVEQQQFWQPGRRVPGYHEQCAQLTAARAEYGWLAAGSQTVQQQALRDFAQAMRSFFSGTHRRPRWRKAGVHEGFRQVGVKPQHVEKLNRRLGRVWVPKVGWVRFRLTRPVPDGVKSYRVTRDRAGRWYVCFAHVPEPIIGPADGSVMGIDRGVTVAAALSTGELLCVPGLSRGEAVRLRVLQQRLARAQRGSNRRARTKLAIAKLKASEAARRKDWVEKLTTDLARRFDTIRIEALDVRAMTRSARGTIEQPGRHVGQKRGLSRGISRSGWGVLAARLQHKAYGRVEQIPAAFTSQRCSACGHVAAGNRKSQAVFDCESCTTGPCNADVNAARNIAAGRAVTARGDLGTSRSMNREPQHCAPAA

SEQ ID NO: 23850 - protein, 406 aa, unknown
  TnpB Polypeptide
MIYQVAHKIELVPNKKQEAYFVKACGVARFAYNWALEQWNKQYQAYKQDNSLPKPNELNLRKQLNDIKREQYPFLMEVTKCAPQQAIKNLGKAFVGFFKKRTQYPKFQKKGKNDSFYMDNSVIEVVGKRIRIPKLGWVKMRENIRFYGNIISATISRTADKWFVSIQIAIEINPQPTAIKNQEAVGVDLGVADLAILSDGTKFSGNKPLKKSLKKLKRLSRSLSKKQWVEEIYTDKNGVERKRKVPSKNHLKAKTQLARLHAKVANIRKDSLHKITTYLIQKYDIICIEDLNVKGMMQNRKLARAISDMGFYEFKRQLLYKAKMCGKYIILADRWFPSSKTCSECGHKVEKMPLSVREWECPNCHTNHDRDINAAINLKKYGLEYHYGATPTPIENENNTASSAEI

SEQ ID NO: 23851 - protein, 420 aa, unknown
  TnpB Polypeptide
VKIFRAYKTELDPNNRQRTLLKKHAGAARWVYNWGLARKIETYKTTGKSISTGDLDKELNHVKKVELPWLREVSAVMVQQALWNLDAAYSNFFVELAKGTKHSLPKFKAKKNCTGGFSLVGRIHAFPTHIQLPKIGKLRLKEHGYLPVNNPKVHILGATVKEHAGRWYAILRVEETIVDPVPKQEATGVDLGSNSLATLHDGTKFENPKPLKKAQRKLKRLQRAVSRKQKGSRNRRKAVFKLARAHKRIADIRLNQLHHVSAVITKRFGLVGLEDLNVAGMLKNHRLAGALGDASFGELRRQIEYKLKWSGGRVVLADRFFPSTKRCSSCGVVKESMSLSERVFRCESCGFVEDRDVNAAENLRQVAVSCTETENACGDGKLQTREGQCLSVKQEPNAVSVDAKRVGFGLRKPVFIFRNN

SEQ ID NO: 23852 - protein, 406 aa, unknown
  TnpB Polypeptide
MKIFRAYKTELDPNDRQRTQLKKHAGAARWAYNYGLARKVESYKTTGKSPSAIDLHKELVQLKKTEVTWLSEVSKWAPQEALRHLDVAYDKFFANVKAGRKPGFPRFKSKKRGIGSFSVCCVKPTHVTATHIQLPKIGKLRLKEHGYLPVNNPKVHILGATIKEHAGRWYAILRVEETIVNSISKQEATGVDLGISSLATLHDGTKFENPKSLKKAQRKLKCLQRAVARKVKGSRNRRKAVFKLAKAHKRIADIRLNTLHHVSAAITKRFGVVGLEDLNVAGMLKNHKLAAALVDAGLGELRRQIEYKLAWKGGRAVKVDRFFPSSKRCSRCGVVKESILLSERVFRCEFCGFMMDRDTNAAENLRQVAVSCTETLNACGDGKLQIREGQCLSVKREPNTDSQAQS

SEQ ID NO: 23853 - protein, 348 aa, unknown
  TnpB Polypeptide
MSLVKLQRTIHAKLVLDREGKRDAVEREYHAWQRQLRGKNEQLYSATKQQAERFKQQVKKQNHHGIKTQEYPIILRHDCVKVQYQKDSVFKWWIRIPVNPKSIWVPMQFPYEQEPLLAHELRECKLFRGEDGEWYVNICVKKQARLKRRYATVLPVDVGVRKLATTIENGKPCFYGKQVRTIRGHYFHLRRSVGKPRIIKHWRNGERRSVRHEVHTITRRIVDHAKRMNALIVIGDLQGIRNKDCGRSFNRRLSGQPFYLFKQLLTYKANWEGIRVLTVPEAYTSQTCNRCGVRGQRVAGRFSCSNCGLRVDADVNGAWNISKRAHGMLSHDAGAALTPPITLAVCEP

SEQ ID NO: 23854 - protein, 398 aa, Pleurocapsa sp.
MTERAYKYRFYPTLPQENLLRRTMGCVRLVYNKALAAKTEGWYQRQERVGYNQTSSMLTDWKKEEDLVFLNEVSSVPLQQTLRHLSKAFENFWAKRAKYPNFKKKRNGGNAEFTRAAFKYRDGKLWLAKCKEPLHIVWSRLLPDGTSPSTVTVKLEPSGRWFVSLLIDDPTVQPLPPTDKKVGIDVGISSLLTTSDGEKIANPKHFNRLYQKLKVAQKLLSRKTKGSNNRYKARLEVAKIHAKIKDARTDFLHKLTTGLVRANGVIAIEDLAIRNMVKNHKLARSISDAAWGEMFRQLEYKCEWYGRKLVKIDRFFPSSKRCNHCGFVMDSLPLDIRSWDCPSCKTIGIDRDINAGKNILAAGLAVIVCGSDIRPNRHSSKGQLSKTRNAGRKQKPKS

SEQ ID NO: 23855 - protein, 441 aa, Caldanaerobacter sp.
MPQLHGFTKTLRYNLLMLANVEKQTLYTTTLYRQVVSYYLQVFQEHQEIIGHSKWLKEAEKLTHQTKDNPDPEYSFDREFPNLPSGFRRSAIAEAHGKALAWKTSYEKWQERKRKHEEKNQKRVAEGKRPIEFKERPPQYPKDNNCWLSYYDTEYKWLDSHHIMLKMFSGKSYVYRKVTLLQPFTVPAGYAAGSPMLVKKPTGWELHVPIVRVAKLDLRKVEELVKNPSLKICAVDLGMNRHAVMTIQDTEGRVYAVKFISAAKDNHLRKRCLEKIVNLQKETKIIPEGERFAKHLWNKVSNLNDDIAHRVSKQIVEFAKIHGAKIIVFEYLDDLKPSKGTKSHQLNQKFIFWVKGRIFRYTRYKALHEGIIICRVSPKETSSRCPYCGFPTIVRYNKGKSGMETEGVDLAKCTNCGIRDVNSDFIGSLGIGRNFRLKYCI

SEQ ID NO: 23856 - protein, 408 aa, unknown
  TnpB Polypeptide
MKLRYRYRIYPTTQQKRLLSQLFGCCRVVFNDALAYCKQEEQNGNKKPSSIELSKRLTEIKKTEGKQWLTEVSSIPLQQSLRDLEQAYSNFFKSCKGQRKGKKVKPPRFKKRKSKQSAKFTGNGFKLAPDSDYIYLAKIGEIKVIWSRQLPAIPSSVTLIKDSADRYFVSFVVEFNPQQLPKNDNSVGIDLGITDFATLSNGEKVKSPKPLKKQLKRLRKLQRNLSRKQKGSKRREVARKKLAKLHAKISDTRNDFLHKLSTKIIRENQTIVLEDLNVSGMMKNRRLSRAISDLGWRSFRTMLEAKSVMYSRDFRVIDRWTPTSGTCSCCGFRGGKKELNVREWICLNCGSSHDRDVNAAINIKVAGGLSETLNGRGGRRKTTAKVAVAIEASTQPEFKQLSIFDLLK

SEQ ID NO: 23857 - protein, 518 aa, Clostridium sp.
MHKTYQTKLCRTVEYPTNNLLFAYLDEWSMYFQSIERKLYVDMVHKKASVSKLKNQYLKKYGITARQFNSIRAQLQGKISSVRELKKAELQTKTAKLKSLEDGMPVLLSDKKSYVYLIENTKMNDKNFQRLVKRYKKLKHKIHHTKRKIQSLKHDLVMLKSDMDKDIVRICFGSRALFNTQFNLEQNGFNNHAEWKEKWVHARSNQSMCLGSADENFGNQNCQYDKDNNLTVRVADRFEGVYGKYIVATNVKFKYGQTNIDHCKDTYEGYTKGGNPHKYHNGAMTHRFYRNEFGWYLYTSVEVEDAPVITDRRVGGIGTDFNVNFAQICFVDRFGNPLDELRIKYSMYGKTTDQIDAMLGDMSRDFCELGKYYKVPVFIENLGLENAKKASDNGPKYNRMINSFPYKKFRDALESRGRKTGVEIVAVNPSYTSVIGQFKFMKKYGLSSHGSAACVIARRGLKLKTERLSKKNKNYILNSDVNADMNKNNYRLWTKLSSSIKNKYNFNDRINMLYAGVL

SEQ ID NO: 23858 - protein, 429 aa, unknown
  TnpB Polypeptide
VVIVQAYRFALDPAPGQERALRSHAGAARFGWNWGLAACLDRYRVERRWYSGAELHKRWNAQKKADPALAWWDQNSKCAYQEAFRDLDRALREFTRSVKGERRGRRLGFPRFKKRGRCRDSFRLTGTLRCGRGTVTLPRLGVIRTHESTRKLARRLEDGTARILSATVSRRAQRWFVSFTVEVDRAVPDRHPRPGTAIGVDLGIRSLLTGADDMGTVITIPGTKPLKAGLRRLRRAARAHTRKRPGSAGRRKAAARLARLHARVANIRADALHKATSMLAGRYESIVAEDLNVAGMTRNRRLARAVADQGFGAARRMLAYKTAWHGGTLVTAGLWFPSSKKCSGCGAVKAKLALSERTYRCEACGLVLDRDVNAARNLLSLAASGAERRNAGGGTVRPRPRGARPAEPGTRHPARGETGTAARQQAAAA

SEQ ID NO: 23859 - protein, 158 aa, unknown
  TnpB Polypeptide
LSRKYEDCKNKKKGGATYKNINKQILKVQKLHKRLNDIRTDYVNKTVSELVKTKPAYITIEDLNVSGMMKNKHLSKAIASQKFYEFRAKLKAKCEVYGIELRIADRFYPSSKTCHNCGKVKKDLKLSDRTYICECGYKEDRDLNASLNLRDTASYVLA

SEQ ID NO: 23860 - protein, 394 aa, Thaumarchaeota sp.
MTVTYNAIHHAEEQGIDDRRGMKEFYQTLKNVELPSCYKVASITRACAVVYSRKKSAKRGVKVSHPKPLRGAVCIISGFFVTIKGRLFVPLRRDKYFDVQLNHYVFETLEGKKVRSLTITPNSLCFCYSEDIEQAPVKTVYGVDRNEKNLTFGDASMVVQVDMTETVQVRQTTREILGSFKRNDARVRRRLARKYWKRCNDRTGNLLHVATNFIVDVAMRGGAALALEDLTGIRRLYRKGNGQGADFRFRLNSWPHRKAEEMLGYKSAWKGVNVIPLTRSDTYGSSSTCSACGEKLHSPAKGDVEHVRMLWCPNCRVWIHRDVNGALNLSKRGLARFASSPPRSEAKEGQSKRHSFEHSEEEGLAGEAVTGNGTKTLILRVDASKLIRRRESKS

SEQ ID NO: 23861 - protein, 394 aa, unknown
  TnpB Polypeptide
MIKAHKIRLHPTPEQATYFAKAAGTARYTFNWALTEWKRQYEAGEKPSALTLRTQFHALRRSELPWTYDVTKCAIEGAFMDVAAAFKNFFEGIASGRKTGFPKFKSKKRSRYSFYLANDTFTVGDHWIKVPKLGRVNMAESLRFSGKILSARISKHASWWFVSITVELPDDIPLNTHPPVGVDVGLNRLATVNDGRRYENQRPLIHQLKKLRRLNKELARRSSGGKNWQKTRDRLGRLHYTIGCHRLDWLHKLTTELARTSGFVAVEDLHVKGLIQNRCLSRSFSDAAVGKLLDLLESKVPHQGGMLVKVDRFFPSSQLCHCCGARKEDLTLADRVFVCPNPDCGYIGDRDENASWNILVEALRLFGLNLNEPSRVVATTRRKTAWGPGVRPKK

SEQ ID NO: 23862 - protein, 386 aa, unknown
  TnpB Polypeptide
MLFATMERYNAVCNAASPIAFSERQFSNIGLQKRLYYSIREAFGLSAQMAQLALRKVASGYRSTKEAIREQNKVLAALGKPLKALTEISFRAHGAICYDARVLSLGRNRVSIWTLDGRIHLRYSKPDHFPAVATVKQTDLVYRDGAFWLYATVETPDVEPAEPTEYLGVDLGVVNIATTSEGEVFSSAATETVRQRYGRLRGILQKTGTKSAKRKLRQISGRERRFKTDTNHVISKQIVCVAQGTKRGIALEDLKGILLRTTVTKVQRERHHKWAFHQLRSFIEYKAYGVGVRVKVIDGAYTSQQCSACGFVHPDNRPTQAAFLCHACGHTENADLNAAKNIAARALVNEPIAVCSPDIGGEVESQAYKEHAAIHGSMPPTLVGGS

SEQ ID NO: 23863 - protein, 427 aa, Chlamydiae sp.
METVRIFHLKNLSRKTYSLAREGQVESGRVWTFCRDTHKKARDSGEKWPKRDALQKLTKGKFSLHSQSVQMVCHAFLANVDTACKLKKINPRARLPYKDKYFYPLLWPKQAVKWEHGALTLPMGRGRESLRLKVDLESIDFGACKLIWDGNYQLHVTIDTPTPKQEPAPPLCATVDLGQIHLAAVTTETGKSLVVSGRGIRTLKRQRTKAVGKIAKKQIRCAKGSRRWKKLQRAKKKTNSRAKKRVRDLRHKATTQVIDFCRQEKVTHLYVGNPEGVQRKNSGRYHNQRMSQWEFGKDISYLEHKSEKMGIVCSNGSERGTSSHCPQCDLRKKIKGRLWECPQCGLKLHRDVVGSVNMFPLGFGIKVEIPNHITYLRPGELRLFRCSSSLGTGQSSFAKPSKSSRQESCVVQATGPFRGSLQEAHPL

SEQ ID NO: 23864 - protein, 517 aa, Chlamydiae sp.
MEKENLLTFETRTELDLLSLEILDEFSDLFSHLQHRLFADIACGNIAGEVKNDYLIAYDITARHFNALRVQVEGKISALKTQLVNRIADTKEKIASLTKTIAKFIKRQAKPHVIHQKKRRLAHLEQKLAKALEDQKNGTVRCCFGGKKLFHAQYNLEANGYSSHEEWRKDWKKARSGEIFFLGSKDETAGNQTCTATLQPDETIQLRIRLPKALEKYGKYLVIQGIKFKYGKEELQALLKSETPQAITWRFKRDEKGWRIFSTFAVEPAVCTSKQDIGVIGLDINADHFALVETDPNGNPISTETIPYNLHGKSSAQAKAIIGDAAASAVAFAGSKNKPLIIEELDFRKKKSELREKASASYARMLSSFAYNSLITHLKSRASKQGVFVSQVNPAYTSIIGRVKFAKRYGLSIHHAAALTIGRRYLRFSEKVPSPLGEIPDGKDSHVTLTAPVRKRDEHEWSVWSRLSKKLRTALAAHFRTAKSRSKSPPKTAFETEPISDDVGETPTRESLEPLFA

SEQ ID NO: 23865 - protein, 370 aa, Shigella sp.
VKRLQAFKFQLRPGGQQEREMRRFAGACRFVFNRALALQNENHEAGNKYIPYGKMASWLVEWKNATETQWLKDSPSQPLQQSLKDLERAYKNFFQKRAAFPRFKKRGQNAAFRYPQDVKLDQENSRIFLPKLGWMRYRNSRQVTGVVKNVTVSQSCGTWYISIQTESEVSTPVHPSASMIGLDAGVAKLATLSDGTVFEPVNSFQKNQKTLARLQRQLSRKVKFSNNWQKQKRKIQRLHSCIANIRRDYLHKVTTTVSKNHAMIVIEDLKVSNMSKSAAGTVSQPGRNVRAKSGLNRSILDQGWYEMRRQLEYKQLWSGGQVLAVPPAYTSQRCACCGHTAKENRLSQSKFRCQVCGYTANADVNGARNI

SEQ ID NO: 23866 - protein, 499 aa, Shigella sp.
  misc_feature (371)..(396): Xaa can be any naturally occurring amino acid
VKRLQAFKFQLRPGGQQEREMRRFAGACRFVFNRALALQNENHEAGNKYIPYGKMASWLVEWKNATETQWLKDSPSQPLQQSLKDLERAYKNFFQKRAAFPRFKKRGQNAAFRYPQDVKLDQENSRIFLPKLGWMRYRNSRQVTGVVKNVTVSQSCGTWYISIQTESEVSTPVHPSASMIGLDAGVAKLATLSDGTVFEPVNSFQKNQKTLARLQRQLSRKVKFSNNWQKQKRKIQRLHSCIANIRRDYLHKVTTTVSKNHAMIVIEDLKVSNMSKSAAGTVSQPGRNVRAKSGLNRSILDQGWYEMRRQLEYKQLWSGGQVLAVPPAYTSQRCACCGHTAKENRLSQSKFRCQVCGYTANADVNGARNIXXXXXXXXXXXXXXXXXXXXXXXXXXLVEAGTHRNDSGDSLNVAGNHVFQGVEDVNYPQSSPCGELENPASRSSVNIGVCRTGRSFTSVSVKRSLGSRRSAVVSAWKISGASNSSFSCQTSIFLPPCAR

SEQ ID NO: 23867 - protein, 451 aa, unknown
  TnpB Polypeptide
MLSKEAFPIKKSSEGEDPTLRVEQHVLKPSHLAYAMLEEFCHLSKNLRNQGNYLLRQQFFAHEKQSSYEQLDKILKAKTDFPDYRNMPTAQSAQQTLRRLVKDWKGFRSALKDWKKNPSKYRGRPKPPHFLKKDGKHVLTLTNQDCRIRDGKIVFPKVFKGFTVEPQFIRERVNSPRAIKSFQQVRFVPKGAFITLEIVYKIKEVPLRQPNGRYAGIDLGVNNFAAMAFSTGDAPIIINGRIPKSINQFYNKRLAELRAMSEHMNGRKTTRRIQRLIDKRNARLKDYLHKTSRFIVDHLVALNIPTLIIGLNRDWKERTPFTAKENQHFVGLPFAKLIEMIQYKAYEHGIAVVVTEESYTSGTSFLDEEPPTREFYNKKRRIHRGLFRANDGTRLNADVNGALQIVKKVVPNAFANGVEGVVLRPIMVAPTRIACAGLAVFPTDSPRRESA

SEQ ID NO: 23868 - protein, 354 aa, unknown
  TnpB Polypeptide
LKINTYKETGKNLSQFDLNNSLVGLKQEHKFLKKVHSQALQNINQRISFAFNGFYNRVQKGEKPGFPRFKGKNRYESITYPQSGFSLEQKLYVSKIGKINIVQHRAIEGQIKTLTIRQTSTGKWFATFCAEQDKKKAFRNDFVMAGIDMGLYHFYADSLGKIADNPRCLRKSEQKLAYIQKCHSRKKNGGKNKLKSRLKVALVHEKISNQRQDFLHKESRKLARLYSVIAVEKLTIRNMMQNRHLSKSIADTAWNKFLQMLAYKVEETGGKLLKVNAQGTSQYCICGNEVKKTLAVRIHKCNKCGIWIDRDIMSAMMIKKVAINGTTAGSAGSNAWEDERALFSMNQESLTSAI

SEQ ID NO: 23869 - protein, 338 aa, Streptomyces sp.
VSGSASPAASILEDRHAAAVADRQAGRVRVVRGGKRLLNTRHHLTQAQLTEDQWRERREAERWFLAADGESGKRFGNETIRVTPDGEVSIKLPAPLAHLANTQHGRYTLTSHIAFAHRGQDWADRIEANRAVAYRIHLDVERGRWYLTASWQRPVVQTIPLETARARGMIGVDSNADHFAAYRLDRHGNPAGEPHRFGYDLSGTAGHRDAQIRHALTRLINWAQRVGVAAIGIEDLDFTPEKTREKHGSRKRFRQLISGMPTGKLKARLVSMAAEQGLAIVAVDPAYTSMWGSQHWQKPLATARRKMSRHDAAGIAIGRRALGHPIRRRTAPPPTRPE

SEQ ID NO: 23870 - protein, 413 aa, Janthinobacterium sp.
MERYQAYRFELRPTGEQERAMRRFAGSCRFVFNKALALQKENHAAGNKFIGYVDMSKYLTAWRNCCETPWLAAAPRSALQYVLKDLEKAYANFFAGRAKFPRFKCKGDRISFRVAAKGAIRFEQTNSRLRFPKLGWLRYRKSRDFVGEPVSASISQAAGKWFISIQTRREVDPVVPIATSAVGIDVGIARFATLSDGSFIAPLNSFKRHQQRLARYQRRMGRMVKFSRNWNKAKAHVQKIHTRIANARKDFLHKSSTTICQTHALVCIEHLQVQNMSRSAKGTVEQPGKRVRQKAALNRAILDQGWGEFRRQLNYKMEWSGGMLLAVPPHHISQTCPTCRHISKDNRQTQAKFLCVNCGYANHADVVGAANILERGHRLLACGEMAQSGRSKKQEPLEACSNSSRRAVEIPVL

SEQ ID NO: 23871 - protein, 294 aa, Moorea sp.
MIILEFKAYGKKNQYSAIDEAIRTVKFIRNSCIRLWLDNKGTGKYDLSKYCKVLAKQFPFANELNSSARQAASERAWSSIARFYDNCKKKVPGKKGFPKFQKRGRSVEYKQSGWKLSPDKKSITFTDKKEIGKLKLKGTWDLWRFEKKQIKRVRIVCRADGYYVQFCVSVDVNEELESTGKTIGLDVGLKDFYTDSDGNTEPNPRFYRTGEKRLKFYQRRVSRRKKGSANRKKAIDRLGRQHLRISRQRVGVACAKRIEHAKRLARCVIRSNDLVAYVRAACRSRSVAYGQGKI

SEQ ID NO: 23872 - protein, 352 aa, unknown
  TnpB Polypeptide
LEQANDACNYASEIAWGTQTFGQFKLHKLVYRDIREKFSLTAQVAVRVISKAADGYKLDRKTQRAFRPHGAITYDDRILRYLPDDRVSIWTLAEKARQTIPYACGPKQRELLAYRMGETDLVYRDNTFYLNTVVDVEEPPLLETEDVLGIDLGIVNILADSDGETYSGGQVNGLRKRHAKLRARLQKTGSRAAKRLLRQRGKKEHRFAGWVNHNISKRVVLKAERTKRAIALENLQGIRSRTRVRKSQRRQHHSWSFFQLRSFIQYKARLTGVLVVLVPPAFTSQRCARCGCVDKANRVSQSLFSCVRCFFAGNSDTIAAENIRVLGRAAVNRPDLAASATPGLKLAKSRLL

SEQ ID NO: 23873 - protein, 391 aa, unknown
  TnpB Polypeptide
MLTHKFRLYPSKTIEQKLLETLEICRRGYNTFLGELNEQKEIDKSQIQGIIPDMKICDAQFSKVHSKSLQYECYKLFSNLKTLSKSKGKRKVGQLRFKGKGVFKTFTYNQSGFKLINTDKRCQTLWLSKIGNVSIRCHRPIQCNIKQITIKKMQSGKWFAFIIEDGNRQIQYRKTNRVVGIDVGLIDVAYDSDGNSIANPKHLKQKEDRLKHLQRLMSKKRKRSSNRNRFRIQLARQYEKLTNSRDDFLHKLSTYYVANYDVIAMEDLAIANMAKGYYSKSILDACWGRFRQFVSYKAGSADKMLMLVDHRGTSQRCSQCGETVRKGLGERMHCCPKCGFTVPRDYNSALEIRRLCLERIRQELPEYKHLEMEALPIRQLLSVKNEAPCES

SEQ ID NO: 23874 - protein, 373 aa, unknown
  TnpB Polypeptide
MILGKKVRVFPTKEQEQKLWQSVGTSRFIYNWTLARQEENYKNGGKFISDGDLRKEITQLKKIEQYQWLNDVSNNVAKQAVKDACDAYKKFFKGLTDKPRFKSRKKSKASFYNDNIKLKVKESSVLIEKVGWITMKKNSIPMNCKYTNPRISFDGKYWFIAVGIEREQPIVELTDESIGIDVGIKDLAICSNGMTFKNMNRTRVVKQLEKRLRRLQRRVSRKYLKNKEGSKFVKTSNIIKIEKQIRLLHRRLTNIRNNHNHQATNMIVKCKPSRFVMETLNIKGMMKNRHLSKAIAKQCLYEFKRQTQYKCEFYGIEFVEADRFFPSSKLCSVCGNINKDLKLSDRTYKCECGNSIDRDFQASINLSRYELVV

SEQ ID NO: 23875 - protein, 480 aa, Aneurinibacillus sp.
MYRAQQIHIKKGHRFYAYCEDLCRKANYLYNVTNFYIRQLFSGLPKEENERHTLEQEAIDFIYRHLPALNQIQIDYVQKRRRKEATKPEEERKQIPDANLYAMPTLEKPFLPYGLLEGILKLTKHPDYIALPGQVNQKVMRKVYDNWTSFFASLKAYKANPEAFTGRPRIPKYKKKNGVTAVFFSNQVCKVKQEKYLQFPKTSQRLNLGKLGMRIKNLQEVRIIPSYGAYTIEMVCKQEETPSLSEKPTRILGIDLGVNNAATLANNIGQPPVIVKGGVVKSINQFYNKQRAYYTAILRKGKQPNEGPFHSKRLLRLDQKRQRKIKDFLHKASFRIIEQAKAWKIDTIVIGKSKGWKNEVPMRKGAKQTFAFLPFESFIQMLTYKGEQAGIRVLTTEESYTSQADFLANDPLPVYGEFTAAPLFSGKRIARGLYQSGTGIVWNADVNAAYNIIRKAVSDAFRGGNRGVVCVSTPLVVKVR

SEQ ID NO: 23876 - protein, 359 aa, Nitrosococcus sp.
VVTQRGYKFRFYPTPTQKRQLAIEFGHARYVWNWALETRTKAYQAQGESLNTISLSRQLTALKQTECPWLSEATASCHTQKLRDQDRAFKNFFAGRGKYPRFKRRHQTQSVRYQLDQRHVAKNFNAESKLLKLPKLGALKLKWSRRMMGIPKMVTVSKDPAGRYFVSMACEVEIAALPARKNAVGVDVGVKDVGVTSSGYKSGAPKYTYQYARQLKKAQRRLSKKKKSSQRCRHQQQKVARIHARIADSRRDFLHQQSSKIVNENPVICLEDLNITGMLRNRRLSKAVADCGLYELKRQMEYKAAMAGKCLSWTAGHPPARGALSAGLFKSPCRSKFASGNARTVERSTTGILTRPRMF

SEQ ID NO: 23877 - protein, 349 aa, Nitrosococcus sp.
VVTQRAYKFRFYPTPTQKRQLAIEFGHARYVWNWALETRTKAYKAQGESLNTISLSRQLTVLKQTECPWLSEATASCHTQKLRDQDTAFKNFFAGRAKYPRFKKRHQTQSVRYQLDQRHIEKNFNAESKRLKLPKLGTLKLKWSQRMGGIPKMVTVSKDPAGRYFVSMACEVEILPLPVRRNAIGVDVGVKDVVITSDGYKSGAPKYTYRYARQLKRAQRRLSKKRKGANRRRQQQQRVARIHARIADSRRDFLNQQSSKLINENQVICLEDLNIKGMLRNRRLSKAVADCGTIQEPMPLKVREWVCPDCNTSHDRDINAAKNVLMLGTAGSAETDKARGAVKTPRAVA

SEQ ID NO: 23878 - protein, 263 aa, Nitrosococcus sp.
MKTTLQIKLLPDEAQRSALKETMQVFNDACNAIAEIAFKEKCASKFALQKLVYEDVRKQFGLSAQLTIRAIAKVVEAYKRDKSKPCFFKPTGAVVYDQRILSFKGLDKASLVTMQGRLSIPIQMGQYQRVQWHRAKGQADLVQVNGTFFLLVVIDTPEAPPIDPSSFIGVDLGIAKVATDSDGESFCGSTVERVRQRLQSRGTRSAKRHLKRIRRKEAQFRRNQNHVISKRLVEKAKDTGRGMALEELKHIRERTTVNGTEIR

SEQ ID NO: 23879 - protein, 391 aa, Nitrosococcus sp.
MLKATKIRLYPRAEQAAFLNRQFGAVRFAYNTGLRIISHRYKRHGQSLSAKGDIKKLLPVAKKSRQYGWLKEADSVALAQACLHLDQAFQRFFDPKQKAGYPRFKSKRGKQSSYHCMSVKVGEDWIKVAKLGPIKAKVHRPIDGKLKSITLSRTVTGKHYASLLYETEQVAPPPLMDVDVAKVVGLDMGLSHLAIDSAGRKIANPRFLKKAQKNLKRKQQGLSRKSKGSAKGAKARLRLAKAHERVAHARNDFQHKLSRQIVDDNQAVVVETLKVKNMMKNAKLAKHIGDASWHALTEKLEYKAKEQGKPLVKIEPWFPSSKTCPLCQHKMDSMALNERDWTCPSCGTHHDRDINAALNIKHQGILKLKAEGLSVSAHRGSRKSGMSPVAA

SEQ ID NO: 23880 - protein, 181 aa, Nitrosococcus sp.
MKLKANIKTLKVRVKDKHKPVLERMAFEVNQVWNAANEITADYSYHAKIKNRRLDALHKFTTQVVRENALIVVGNVSSSSLATTKRAKSVLDAGGFMLKTQLDYKSKAMQAEFVEINEACTTQACSCCGCISNGSPRGRAGLGIREWSCPGCGVHHDRDVNAAMNILAAGHRRLAEGIPVL

SEQ ID NO: 23881 - protein, 380 aa, Nitrosococcus sp.
MTKRAYQERFYPTAEQAELLARSFGCARFVWNNTLKHRTDAFYQNGEVIPHWALEKRLVQLKQDFSWLNEVSSVIFQQLLRDQQQAFKHFWEKRAGYPRFKSKHRGQSIRLTKAAFRFKDGQLFIAKSSEPLNIHWSFKDGLPSEPSAITISKDAAGRYFVSMLCEFESEPMPVVNKTVGIDLGLKDLFVTSDGFKSGNPKYIKQYEAKLAYLQRKLAKKRKGSRNRNKLRLKVARVHTKIADCRRDATHKATRTLINENQVVCVESLAVKNMIKHPRLAKPIADANWGEFVRQLKYKAQGVGRTVVEIDRGFPNSKRCPTPGCGHINETLPLEVREWRCPSCGSVHDRDIAAAINIKTAGLAGLASGATGTGATTGVVA

SEQ ID NO: 23882 - protein, 373 aa, Nitrosococcus sp.
LIKAFKYRLYPNTAQVRELEIMLETHRRLYNECLAQRKERYETAQESVKYTQQSAWFKSARGANDWYARLNFSSAQATMRRLDKAFQAFFRRIKTGDKPGYPRFKARGRFDSWTYPAHGDGARLLDGKLRLQHIGVVRVRQHRPAQGTIKTVQIKIEAGKWFVIASCEIGDAPPPRTEDTAVGIDIGLEHFLSTDQGEQVDNPRYQKEALRRLRVVGRAVSRKKKGSRNRGKAVSKLRSIHARVSNKRRDHHHKVARDFVSRYAFIAAESLTVKNMVRNRRLSRSISDAGWSQFLNILRAKAESAGSVFVEVPPQGTSQACSGCGAVVRKALSVRQHRCPECGLSLQRDVNAARNILARGQARMEPVWLNVAH

SEQ ID NO: 23883 - protein, 220 aa, Nitrosococcus sp.
LSQQALRSGSFSQDARGRWYFNLVVEVAIEQSTATGQVGIDLGLKDTATCSNGLKLEASRFYRNGQAQLAKAQRANKKKRVKAIHAKIKNRRLDALHKFTTQVVRENAFIVVGNLSSSRLAKTKRAKSVLDGGGLMLKTQLDYKSKAMQAEFVEINEAHTTQACSCCGGISNGSPRGRAGLGIREWSCPGCGVHHDRDVNAAMNILAAGHRRLAEGIPVL

SEQ ID NO: 23884 - protein, 384 aa, Nitrosococcus sp.
MLLAHKIELRPTLEQAAYLDKARGSRRHCYNKLLEHFFKPENNWSKAAAYQHYIKVIRPEFPWYNEVSSRVTRNAIDDLDNAFKHFFRRVKKGEKPGFPKFKKKDINDSFALRERTKFEVRGRKLRIEKLSTLIPMRQRLRFEGTPKQVTISKRAGKYFASILVDTEDYKDYSQKRAPSVGVDFGVKSLAVTSDGQVFPANNKLKRSLKKLKRLSKNLSRKQKGSHRRAIAKQRLAKLHYRIAKQRSAVLHELSHQLTASYDRIALEDLNVKGMVKNRKLARSIVDAGFAMLRQFIEYKAYLRGCTVERVDRFFPSSKMCSGCGQLHDITLADRALACDCGLTIDRDLNAAINLNQYRRDTLKPDVKRTQESSKTALAASVLTV

SEQ ID NO: 23885 - protein, 223 aa, Nitrosococcus sp.
VVPECGGSPQNGHGQQRPRWPLFRQHGLRGSRSPLACAKERDWRGCGRQGLGVEDVVITSEGYKSGAPKYTDHYARQLKRAQRRLSKKRKGAQRRRRQQQRVARIHARIADSRRDFLHQQSSKLINENPVICLEDLNIKGMLRNRRLSKAVADCRLYELRRQIEYKAAWYGREVFIVDRWAPTSKTCSGYTAQRKSPCRSKFASGPVAVALPTTGTLTRPKMC

SEQ ID NO: 23886 - protein, 385 aa, Nitrosococcus sp.
VVTQRAYKFRFYPTPTQKRQLAIEFGHTRYVWNWALERRTKAYQAQGESLNTISLSRQLTVLKQTECPWLSEATASCHTQKLRDQDRAFKNFFAGRGKYPRFKKRHQTQSVRYQLDQRHVAKNFNAESKRLKLPKLGTLKLKWSQRMGGIPKMVTVSKDPAGRYFVSLACEVEIAALPARKNAVGVDVGVKDVVITSDGYKSGAPKYTYRYARQLKRAQRRLSKKRKGANRRRQQQQRVARIHARIADSRRDFLNQQSSKLINENPVICLEDLNIKGMLRNRRLSKAVADCGLYELRRQIEYKAAMYGREVLIVDRWVPTSKTCSECGTIQEPMPLKVREWVCRDCNTSHDRDINAAKNVLMLGTAGSAETDKARGAVKTPRAVA

SEQ ID NO: 23887 - protein, 300 aa, Nitrosococcus sp.
MDACRAVKAAKVKTKQTGNPHKVRFRSKREPTQTLFIRNDMIRKGTVYPTKLGVLSFSESLPEHPRDSRITWENGRWFMCVPHEITLSPGARTKPYYAVGVDPGVRTFLSFYTDGAVGDLGEGDFGRIARLCAYLDDLMSRLDPKRKENRVNAAKRQRMRKAANRLRWKIKDLIREVHWKCARFLCENFEVVFIPDFETQQMASRTKRKLRKKSVRAMLTWSHYQFRQRLEWMAKKLGTTVISVNESYTSKTVNWTGEVNHKLGGARIVKGSDGNSMKRDHNGALGIYLKGFVGYGLTKC

SEQ ID NO: 23888 - protein, 365 aa, Nitrosococcus sp.
MKLKANIKTLKVRVKDKHKPVLERMAFEVNQVWNGANEITADDSYVPVPGVGYIRNSFTAYELQKQLKSIKLERGFIIHSTTVQEVIAAHHKSRRQFKTDKLRWRVSGGPRRSLGWIPFKKGAAKWKKGQVYFASHSFKVWDSYGLSQQAFRSGSFSQDARGRWYFNIVVEVALEQSIATGQVGIDLGLKDTATCSNGLKLEAYRFYRNGQAQLAKAQRANKNKRVKAIHAKIKNRRLDALHKFTTQVVHENAFIVVGNVSSSSLAKTKMAKSVLDAGGFILKTQLDYKSKAMQAEFVEINEAYTTQACSCCGGISNSSPRGRAGLGIREWSCPECGAHHDRDVNAAMNILAAGHRRLAEGIPLL

SEQ ID NO: 23889 - protein, 669 aa, Mycobacterium sp.
MAAVGTDTTPAISDGVVGPRRRGKSRAPNFRYEGVVSAIRLELDANDPMVRRRVERQWDAVFRLRRALQRDAANRCRAYWVAHNERAIDPKALRERLGLTRKGIEAAAKAHIEASGWMRNHLTKAIGLHVADEVWQTIERHLFPDASGRRHGPPRVGSWRQFTRIPGRARSHTKATPTWETYRLAGTVDGHLNTYRHPALANEIGTAAAAAGQPAGSSILAQPAQLPAPARPAGGRWWEHSGALAVVFTGLPAGDLVLPVRLPHGAGQWAYLAHFLVNRDIWHKIDLVRVRDRKAPGGWRYYAHLLVHRGGYQSPTTRARRAQIPAARHAGVDANVSNLSVASFPVDEPDRLVVERIACTAEQQNTAARAAKKARARQKALDRSRRNTNAEQYGPSVRQHQRAQRRADQGLPAKQLLNPAGARHARPDGAPLVAYRHDTLSGAYQRTRADHAAATRRASQAKQARATAVAGRIVAAHGHTLTVEYTNISTWARLWGKRIALFSPGILVAALSRECRATGGALPRAGTGSTALSQHCLCGARVPKTLAVRTHDCPHCGLRGDRDLVSAALAACVRFADPDDPRTARVDYQLAHTLRQGWEASQQEWEGSVNRHQPPPSPDGAKAARTGSHHLVAPAEQAALGPPPNRSSQKPGRRGTSRKQPAPKLTGAA

SEQ ID NO: 23890 - protein, 416 aa, unknown
  TnpB Polypeptide
VSYPVRGEEPAVVEALKVRALPEGSCDRLLEFLRLYRDAVQMVVDRIWGISERLSKKRLHGLFYDDLVRLGFRAHHAKEVYVYADSLVESARGNGGRKPVLRRLSARVDRYDYRLDLDSMTLTLKLHSNYEVRLRLVTSKERVERFRGWSNYELVVKYEDGEFWVSIYFKRTVKLLKPRTVMAVDLNFDNVTLAVFTLSGKPVKLKRFKTPHRKVLTHRIWIERIQRRYPRSWKFIRGVRRAIERHGERIRSISWDYAHKLGELVAELALEYRSLIILEDLEKLKENGKRDRKFNKRLGLWFYRRVQFCVEYEARERNLEVVKVNPRGTSSRCPRCGGRLAEGGYRVLRCGKCGFVGDRDVIATLNLYGKYVSRYSRCGVSGVALNAPKPDEVPSGMRGNGDDAMTASSYVNLYES

SEQ ID NO: 23891 - protein, 319 aa, unknown
  TnpB Polypeptide
VPASITVRIHAGKWFLSFCNDDLSVYPTEAEIMAELATWSADELMPVTVGLDRGVVVPLYTSNQQQFVLKSSEQRRLKRRGRWIKQWQRRAAKRTQGSRRWKKARHKMARYQAYAGNVRKNFAHQVSHQLVTLSDIKTRLFVFEALRVKNMTKKPRAKQDEHGRWQKNYARQKAGLNKAILASAWGQMVIFSQYKALKMNKLVVKVDPAGSSQECDPCGHTHPDNRLTQSEFVCLRCGHTDNADHNATQILKKRGVAYVLSGKKAKVSKKTLRMKKRDSGTELAALATGLTDEGDAVRLSTVVDSQKHASLNLSDAAYH

SEQ ID NO: 23892 - protein, 386 aa, Lactobacillus sp.
MSKIIKGIKIRLYPNKHQQAQLWQMFGNDRFVWNQMLAMARSRYQNNPSSHFVNGYQMDALLKALKQEYPFLRESDSTSLQVVNHNLDQAFKMLFKHQGGYPRFKSRRSYHQSYTGKSKLFVAAKRYLKLPKLGYIKTSKTSQLQNVKIKRYTVSHDPTGRYYLSLQVEAEVNQLPRTEKTVGLDVGIADLVISSDGIKYGTFNAKWLEKQATKWQSRYSKRCHRANVAVRQWNHNHKTVKLELDDYQNWQRARVMKARYQQRIANQRKDYLQKLTTNLVRQYDVIVIEDLKTKNLQKNHHLAKSITNASWYQFRTMLEYKCQWYGKRLMVVSPNNTSRICSTCGHNDGPKALEIREWTCPQCGTHHDRDINAAVNILKRGLKLIG

SEQ ID NO: 23893 - protein, 380 aa, Lonepinella sp.
MLIRKAFKSEIRPNGEQIRKIKQFCGCSRFVFNQALAWQNEQYEQDNQFKFSYTKIANLLPTWKKQWEWLKDCHSQVLQQSLKDLEAAFKNFFQKRADFPKFKKKGLKDSFRFPQGCKLEQGNSRLYLPKIGWVRYFNSRKVIGEIKNVTVSQKCGHFFVSIQTEFEAEIPTHKGGEIGIDMGIARFATLSNGVFFAPLNAFKTYKGKLAKLQKQLKNKVKFSQNWQKLKAKIAKLHHKIANCRKDFLHQTSNQISKNHAMIYVEDLQVANMSKSAKGTVEEPGKNVSQKSGLNRSILDQSWFEFRRQLDYKTQWRGGFLVAVTPQNTSRTCPCCGLVAKENRETQSHFECIECGYSENADVVGAINILTKGRTRLNAVI

SEQ ID NO: 23894 - protein, 674 aa, Streptomyces sp.
VAVVRAEGTRRRFRGRNKAPKWKKPDDGQVSVMVLPLAVTAPADLARLEKLFGAMRSIKRAVQRDARAKVDAYWAAFHERERDGAKAVRQRLGLSREDLERYAYKHLEASGHLKHHVSKALAMHMADEVWSGVQRHLFPDTTGKRHGRPKTGRWYDFTRIAGRARSHTTERKWETFRLVGSLPGHVMACTGGDPHTLMQPRRMPVPVAPSGAVNTGKATASGKPGTRKATWWDHTGPLAVVFAGGPASGRGDLVLPVRVPQQPGQWARVAHFLTDPGRWHKVDLVRRRKASAPGGWVYEAHLMILGPGYTAPAVQQMREQAAALDRIGGVDGNVSNVSVVSLPASLDPADSKPASTEITLSPQERALLEREARKRRGRARALERSRRATNTAQYGLSKKQTRRAEQRAAKGLEPKAVTVPGGARAARVDGVPKQAFRHDRISGGYRDLRAHQAEAAASAAEHRRHRARQVARQIIATHGPLLVIEDCDIHTWYRLWGKRLSQTTPGLLIAALDRECQAAGGRLVRASTWSTALSQHCLCGEPVRKTLRDREHECIACGLAGKRDLVSAALAVFVRFTDVDDPKTAYLDTIASRNAQITFAQGLEEALRESTAPCQTTTSRGAGHAAVPRQRRATSAPRTAGRRYRATPDETRPVRDHTGMPGHRPGRNPQLALW

SEQ ID NO: 23895 - protein, 402 aa, unknown
  TnpB Polypeptide
MMTYKYKLYRTHRTKYLDAMMNEACFVWNHALALYKRYYRLFGKYISLYDMQKHQAKRIKRKLLSAMAVQEILERLDESCKRFFNHIASRPPKFKKAKDFSSIVFKGVCNHGKWSVNVCDLKENSISFVQLGKSFKYYKSRQYEGRIKRVVLYRSRIGEYYIFIVTDAEPSKYGKTLKGASVGIDFGLKKYLTLSDGTAYDNPQFLKGSLVELRRRSRNLSKCKKGSSNRERKRKDLDHLMNDICNRRSDFQWKLAHELCRKYDTIFIEDLNLEGMNRRWGRKMHDLAHADFVQKLEYIATKYGVVVHKIDRFYPSSKTCECGYINKELKLSDRQWVCHECGTIHDRDLLAANNILRRGIYELESDGKTSEVIQSGSHDCIQQSLRRVCHDYAQKEKQEKKE

SEQ ID NO: 23896 - protein, 376 aa, unknown
  TnpB Polypeptide
MKYICSMKLILKIKLLPNQAQSNLLLDTIKEANAACNRISDMVWNDKVFTQFKIHHHCYNVIREDFNLSAQMVVRCISKVADSYKLDRKAKRSFRELGCISYDSRILSYSENIVSIWTVEKRQRIPFVCHNTNYLPYIKGEADLVFKKGKFFLFQTVEVPEEDVEDIEEFIGLDFGITDIVSTSDGETYSSDSLNRYREKQRKIRGSIQSKGTKGRKRQCKRGCSRLLKRLKGREKTTATIINHTISKHIVSEARQRGVGIAIEDLKNIRKTSKRRNNTFKRKLNSWNFRQLREFLAYKCKLSGVKLVVVPPAYTSQTCHKCQHIGTRNNKSFKCHYCGSDMDADINAAKNIALLGAFVNQPEKSGMLSCALHTSA

SEQ ID NO: 23897 - protein, 339 aa, unknown
  TnpB Polypeptide
MKQGYIKAFDMCSEIKGLYIEYPFLKEVESCSLRCAVFNLEDSFKNYFSKRTNYPRFKSKFNKQSFRTTCIKSTYKGKEYSNIILDLKNKKIKLPKLGFVDVRGYRKLEKINGRIINATVEKETTNKYYVSIIFDEVEPVLSKITPSNIVGIDLGIKDLVVTSDGEKYSNPKEILKREKKLKRLQRKLSRQERGSNNYYKTKIKIARLHSKIKNSRKHNIINIVNKIVKEHDIIVSEKLNVKEMSSNHNLAKNILDASFNKICQMLKWKSNLLGKYYYQIDTYFPSSKKCSHCDEITQETNNLGVRNWTCLNCGCENDRDINASINIMFEGLRIHCQNN

SEQ ID NO: 23898 - protein, 363 aa, Nonomuraea sp.
LHDGVPELLRIGVGQAQGPEARPAPVPVPQGQPAGDPVHQECPVQGEPERETRPAEDRRGRGALVTGPACRPVLGHGVKDAAGRYFASFVVEVTAQRLPGIEAETGIDLGLGHFAVLPDGTKIDSPRFLRRAEKRLKKAQRVLSRKEKGSKNRDKARHKVARAHARVADARREFHHQLSTQIIRENQAVFVEDLAVGGLARTRLAKSVHDAGWSAFVNMLEYKAKLYGRTFAKVSRWFPSSKLCSACGNVTEAMPLQVREWTCACGAVHDRDINAAINILAAGRADRLNACGGPVRPSFGMAQPREAGSHGPESSGFSPESSSTVVHRAGQADTPARMDAVPSAAHRASLRAPAPRQDAGGRR

SEQ ID NO: 23899 - protein, 434 aa, unknown
  TnpB Polypeptide
VSEVTRTVIVRSAPLPRRTFRIFVELEGMYRNMVEQLVLYAVNNNVTKFTRLKAEKYREVRSLYPRLPSHYAYTACQDAAERAHSFLRMRKMDKARKPYPEVRNVSIWLDDHLWRAEGLTLVSLATHRGRVRVSVELNKHFLRYVNRGWRLASEARVKLDHKERKLIFYITFKKEVSEYKPKDYVTVDVNENAEAVLIDGVVYLFETDLSRVTLGYYYRRKRVQERYDRVYGSGSRPARRVFRRLSNNERVLKREIRWKLAALIVREVARRQTAIVLERLGREPANHMIEHIKNPQLRHRVFQAAFKGIQRAIEEKAREYGVPVIYVNPSNTSKICPIHGAKILYGKDRHGVCSKGGETWHRDVVACYNLLLRALGGDGGHAPSRLRALTPVDGGPVPLGPTAAHEPTPIARGAWARWKSLGATSEHKLMRVST

SEQ ID NO: 23900 - protein, 351 aa, Gallibacterium sp.
MLLRKAFKFEIMPNGEQSRKIKQFCGCCRFVFNRALAWQNEQYQQDSRHKFSYSKIANLLPQWKKELSWLKECHSQVLQQSLKDLENAFKNFFQQRSDFPKFKKKGVKESFRFPQGCKLEQNNNRIWLPKIGWVRYRNSREVIGEIKNVTVSQKCGRFFVSIQTEFESQIPIHNGGEIGIDMGVARFATLSNGEFFEPLNAFKTYKGKLAKLQKRLKNKVKFSQNWQKLKAKIAKLHHKIANCRKDFLHKISTQISKNHAMIYIEDLQVANMSKSAKGTAEQHGKNVAAKSGLNRAILDQSWFDFAVSWTTKPNGKADFWLPFRRKTAVGLALVVVISQKKIAKRKHILNA

SEQ ID NO: 23901 - protein, 384 aa, unknown
  TnpB Polypeptide
VNVLTIFQKGIRVRLYPTEEQEVLINKTIGCARLVYNQTLTDCKQSYEQTQHFPSKKERSANIVKMKEEQPFLKEIDSHALQYSVKDFDYALDNFFKNRSHFGFPQFKSKRRGKQSYRTPYNNGKANVLDNKHIKLPKLGIVKTKRFDMPEVYKIFNITVEKTNTNKYYASICIETEVQPLPKTGKQVGFDLGLIDLLIGSDGTRYERPKFSYAFKAKLTQEQRKLSKMRTKLERVNANFDECRNYQKQKHKVAKLHEHIANCAKDFNHKLSRKLVEEYDFIAMEDLNVSSLIRNHRLAYSIADVRWSQLLNFIKYKCQWYGKEVRQVDRFYASSKTCSCCGIVHKDIVNSLNIREWTCPDCGTHHDRDVNAAKNILIKALSVA

SEQ ID NO: 23902 - protein, 369 aa, unknown
  TnpB Polypeptide
MKRNKAFKFRLYPTHKQEVFFNKTFGCCRFVYNKMLAERKESYESTGKSTSRTPAELKTEFPFLKEVDSMSLAGEWMNLNKAYGNFFRDKSIGFPQFKSKKNDRKSYTTGLSKTRPFDVSGKFIKLPKIGFVRCKIHREIPSNWRIKSATISQTPTGKFYVSILCEYEVEIQPIIPDRNNATGIDYKSNGFGVTSEGEILSNHRYFRENQSKLSREQKRLFRKKKNSKNYKKQKMRVALVHGHIANCRLDQAHQLSHFLAEKYDVICLEDINLQDMAQSLRLGKSTNDNGFGMFRSFLKYKMEERGKYLIYIDKWDATSTVCSECGAYHKDIVNSLSIREWTCPDCGAYHDRDVNAAKNILRLGLERLQ

SEQ ID NO: 23903 - protein, 299 aa, Escherichia sp.
MKRAYKYRFYPTTEQAELLAQTFGCVRFVYNSILRWRTDAYYERKEKIGYLQANARLTALKKEPEYIWLNDVSCVPLQQSLRHQQAAFANFFAGRAAYPAFKSKRHKQVAEFTASAFKHRDGELYIAKSKSPLDVRWSRELPSAPSTVTISRDSAGRYFVSCLCEFEPVSMPVTAKTVGIDVGLKDLFVTDTGFKTDNPRHTAKYAKRLTLLQRRLSRKQKGSRNRIKARLKVARLHAKIADCRMDNLHKLSRKLINENQVVCVESLKVKNMIRNPKLSKAIADAGWSELVRQLQYKGK

SEQ ID NO: 23904 - protein, 435 aa, Natrialbaceae sp.
MEVRRTAPVKLVVPDEYHDDLHETADQFLYCANEASDYCWDNTNYEDCITSNVKARNGLYDRLREETELTANLVQEAIRRAVHAVDSGVDRWKKGKRTNKPEFTSWSMVYDKRSATFYRNKISLSTVNGRVECGFELPADSPTPYEEYVLSENYEFRTSTLQYDQATDEFYFHVKTRKIDTDGGAVEIEVSDDSEHQTVLGIDLGVNSLAVASTGTFWSGDEYDHWIQEFEKRRTEMQQRGTQATHNALLRLGKRERPWRKQYIHTVANEIVEEAVDNACDVIVFEDLTDIRERLPHADWHHIWAFRRLVEYVEYKAPERGVVVKDVEAEYTSRQCSHTDCGFTHEDNRDGEQFKCLKCGYEINADYNGAKNVGLRYMRKRQHRLRSSPTSGSADVLENEVFQWPGNRNFPSTPVDVRINGGTLNGDGYRSTADS

SEQ ID NO: 23905 - protein, 277 aa, unknown
  TnpB Polypeptide
MKYVGGERYRGAKKRAELLWDKARERWYLKYAVEVADKVIHGSNRGAAIDLGVRIAASLSIEGVEQARHFVAREMLKDWDDWGRRIAQHMQELAGRGRKCSHPLSQLYAMRAARWRHAWRAIAREIATTCRRQCVGTVYIGWPKGIREERVYSKRWGARIHNFWGFDASSRILQAALERQGILVKRVGERGSSSTCPVSSCASKKVTRKPRHILSCRTCDTTIHSDQAGSRNILAFNHPGTSWDAVKTTARPDTLRWNKQRWVDAENRNDRTLLKAA

SEQ ID NO: 23906 - protein, 368 aa, unknown
  TnpB Polypeptide
MINISHKIYPTKKQEQVLNDFLWSAIGIENWVINQIKYELDENWFAYMFMSDIQLRSILSKKIIGHSKKCGIPSALINCCIQAVLTSFKKHGIHRLHYKNCRQKKSFYFAGDIKFDKSGRLKIPGLKTTLKISESGKFTGKLKKCTLIKKFDCWYVSCCYDQTREKIEITDGKEAGIDPGLKTSLTLSDGVQIDFPKFYQDAEKKIGNLQRKSKNSKKLKYLQRKITNQRTDHHHKLTTYLAAIYVKIFWSDDNFKGLIQKYGKQYANLALGKIRELLKNKLASRIDGFGELVLVSNRNSTKTCSNCGDLTGPSGFDGLAVRQWSCSCGATHDRDINAAINTLLLGKGIASEKRNHISRTVEELDCCA

SEQ ID NO: 23907 - protein, 366 aa, unknown
  TnpB Polypeptide
MLKAYKFRLYPNKEQEIYFSKCFGSVRFIYNKMLNDKIEYYKKNNKMLYNRPAQYKKEFPWLKEVDSQALANTQMDLDKAYKNFFRDRNVGFPKFKSKKNNYYSYTTNNNQKTQILRIVDGKYIKLPKLKTLIRIKQHRQIPKDGKIKSATISKNPSGKYYISILVEQEIKELPKNEFAVGIDLGLTDFAIISDGVKYSNPKWLRKQENKIKKLQRDLSRKKKGSKNKNKARVDLAKAYEKITNQRKDFLHKLSSELINENQVICLEDLQVKNLLQNHKLAKAISEVSWCEFRRQLEYKANWYGRTVVIIDKYYPSSQICSNCGNNTGKKELSIREFDCPYCGKHHDRDINASINILYEGLRILNK

SEQ ID NO: 23908 - protein, 376 aa, unknown
  TnpB Polypeptide
MIKSFTIKLYPNKQQELLFYKHINCQRYIYNWALNLNNELYKKDKKKYSSTELGKILTQYKKQEIWLNEVSNATLKEAIRNLDKAYTNFYKKKANLPKFRSKKKSKLSFYSRYDKIKFYENNRVNLEKIGKVKYKSSYNIDFVKETSFKNPHVSYNGRCWILTFALDIENKIETLTNEVIGIDLGIKYLAICSDGVVYKNINKEITVRKLEKRLKRLQKQVSKKYEMNKKGECYVKTNNIKKLEKDIKRIYRRLKNIRLNHLHQTTADIVKTKPYRVVMEDLSISNMMKNKSIAKQVSNLGLYEFIRQMKYKCEWNGIEFIQVSRWYPSSKKCSNCGNIKKDLKLSDRIYKCDKCGLDIDRDFNASLNLMNYGLSH

SEQ ID NO: 23909 - protein, 358 aa, unknown
  TnpB Polypeptide
MMLTYKFRIKDATVSKRLNRHAWACNQVWNYCNRIQREAERRWRAGGVSKWPSAFDLVKLCTGSAADLGLHSDTVQTICREYAAKRDANRGHMRWRASGGPKRALGWIPFIPRAVKIDGAHCTYLKRRFYFWKSRDIPVDGFKAGSFVRDARGRWYVCFQCEVPDVLPTGNGRIGIDLGIKTLATCSDGTTVPALRHYRQYEATLAVAQRANNKRRVQAIHAKIANARRHHLHEWSSRIARENELIVVGNVSPSKLAKTKMAKSILDASWAMLRNQLRYKASRHGARYVEANERWTSQTCSCCGVIPDSSPKGMSALGIRHWACSVCGASHDRDVNAARNILNVGAERRPLAGEISCH

SEQ ID NO: 23910 - protein, 388 aa, unknown
  TnpB Polypeptide
LQAVKAVRQNYHPTEEVLSLLEDFRCMVNDCIRIGLKENLTSMKSLSVKAYRQLSAYDVPTCYRLTAISRAAGILRNYRKELKKRGRSAKVPYVTRPSLTDCYGFRVVHRLVRLPIRNGEYAFIVLNDHTLCTISGHTPRSLTLTANGLSISYSKEIAEIDPVGSIGIDRNLDNVTTADSNGNILRHDLSRATEIRARCRETKSHFKRNDARVRRVLYGKYGRIQRNRVGWILHNVSASIVRRAKEKRFGIVMENIRGIRRLYRKGNGQGNEYRSRLNSWSFYELQRQIEYKAKCEGIPVAFVAARGTSANCSICGSKTTEYPNGRRTLYCPRCDISIDRDVNAARNILAKGGVRFTPDGPPGTTEAMKGNKTTTPILRADGGKVTQG

SEQ ID NO: 23911 - protein, 350 aa, Halobacteriales sp.
MAEMSVETTFRNPTCSRRREWQQATHILRECKQWLVDGWEDGTLTSSVTTGDIDNPLYSALQNQAIRSAKSDYEDEPIEYTGEQPIEVNNQNWEIHTTENESVVIGFPCISDWWYTPIHVHDSIQESVQTLLDGDAEKTKLSVWREGDDWYCSFTVEYDEEQVGEETPIGVDVGHNYILAATPDDPSTESFLVSGKEYKFVRRYYRSLRDSLQEAGALRARNHIGNKEYRRIEDANHTLSKRLVEYASQFSNPVIKLEDLENIRAGSEWNDVHSWPFYELQEFITYKAEKEGIRVEKVDPENTSQECSQCDGLVGRDRSKFECPHCGYVRHADLNASENISQREGDLCTA

SEQ ID NO: 23912 - protein, 362 aa, Blautia sp.
  misc_feature (202)..(202): Xaa can be any naturally occurring amino acid
VRKINRAVKIRIYPNKEQITQIEKTIGCSRFLYNRMLADKIRYYQEEKKMLKNTPAGYKKEYPWLKEMDSLALANVQLNLEGAFRKFFREPGVGFPHYKSKKHSRKSYTTNMVNGNICLQDRFLKLPKMQPVKIKLHRMIPEGWKLKSVTVSREPSGKYFASLLFDCENQTAEKRQAEKFLGMDFAMHGMCVFSTGERAGYXPWLKEVDSLALANVQLNLEGAFRKFFREPGVGFPHYKSKKHSRKSYTTNMVNGNICLQDRFLKLPKMQPVKIKLHRMIPEGWKLKSVTVSREPSGKYFASLLFDCENQTAEKRQAEKFLGMDFAMHGMCVFSGNFSGNREWDFRIINQKNIRGNPIQRIW

SEQ ID NO: 23913 - protein, 237 aa, unknown
  TnpB Polypeptide
VRFRRYRFSKRYEKLRSELAEMLRLSAATRKREHGEVCNWLLGHAGHIIVEDNSYKAFQRGRFGKTIGRHAPAALYAQLTNKAESAGLLVEVVSPKKLKPSQHNLLTDTFVKHELWERRVRLGNDDDDRWIDRDAAACLNLLYADLEKQTYAPERIREAVLAGVTAWLDAGVVVIQAREGITEREFGRFRRRGIPSLTVQGLRQQGFRGRSDSKSGATPRRKASTVSKPSHFSGEVV

SEQ ID NO: 23914 - protein, 628 aa, unknown
  TnpB Polypeptide
MVKKKNEEPAIIKPKEKVVRNDVSLRKEANKNTDFTCIKSSWKSFCKNNLLADTIVEDILPKINTICFLSYKLINFHFTRLLEEHKPLPEIKQNLFYQSCCMVSQLKYTKDTTDTTTELYESFSQMSEYMTDALPARDYLCLGYITNLNKLQLTMANNHLKLNFYNRFRKYLKLRTGETDNAVVYHWLKDIYEPKYEGKNTFILYMREWLKYTPTEVNIVKHSNHFVKIYYSILKEFEKYPETKGIRTFTLLPHKHGFTQSHITICNAGLENTLKYIAKKLKVENSEVESGLDVKKFAENSEEYWRELFNINRYETKNKKFGFTILTDGKSIVLQMRKPKQPDTPVREYTEQQYDNFIGIDPGIRALITSYDTNDKIIQVNTREYRHKSKMIYACKKRVGWYKRWVHYDEWKLIPTIKTSKTSVMKEYFKYVFPRMRTFTEFHIEKGFRNLNFTSYCRSKATLAKICERIGGGKNVKTLVGFGDFSQQHGLVKSHPTTPILRLKRELRKYCRVVGIDEYNTSKTCSSCSNPIELYRNRIRRKKKGVLEPIARMSNIHSVIRCKTNECKLCCLDRDINASKNILGLLLNQYRGEERPVCFKPAKIGVIPRLRKQSDKRPKACDSPLQPC

SEQ ID NO: 23915 - protein, 404 aa, unknown
  TnpB Polypeptide
MQRLQAFKYELKPDGGQQRLMRRYAGSCRFVYNKALALQQANHEAGGKYINYVAMAAWLPAWKREAGLDWLKDTPAQPLQHALKDLDKAYQNFFAKRADFPRFKRKGSGGSFRYPQPKQIKLDQANSRILLPKLGWVRYRNSREVLSELRNVTVSSKNGKWFVSIQTQREVEQPVSTTTTAIGIDLGIARFATFSDGSYIAPLNSFKTQQAKLAKYQRRMAHKQKFSNNWKKAKAKVQKLHTTIANARRDFLHKATTTISQNHALVFVEDLQVRNMSQSAAGTAEKPGKNVAAKSGLNKAILDQGWGEFRRQLDYKLAWNGGMLFAVPAHYTSQECPECHHVSADNRQTQARFVCVKCHYENHADHVGAINVKERGHRLLACGDAALSRSMKQELAEVSQLIFS

SEQ ID NO: 23916 - protein, 373 aa, Anoxybacillus sp.
MMVNKAYKFRIYPNKEQEILINKTFGCCRFVFNHFLAKWDNTYKETGKGLTYNSCSTQLTQLKKELTWLKEVDSIAIQSSLKNLADSYSRFFKKQNNRPRFKSKKNKIQSYTTKHTNGNIAIVGNRIKLPKLGLVRFAKSREVEGRILSVTVRRNPTGKYFVSILVETEVQELPKANSAVGIDVGLKDFAILSDGTVYSNPKFFRRLEEKLAKAQRILSRRKKGSSNWNKQRIKVARIHEKITNARHDYLHKISTEIIKNHDVIGIEDLQVSNMLKNHKLAKAISEVSWSRFRTMLEYKARWYGKQVVTVAKNFPSSQLCSCCGYKNKDVKNLGLREWECPNCGTHHDRDINASLNLRKEALRLTVGTTGIAY

SEQ ID NO: 23917 - protein, 381 aa, Zobellella sp.
MTKRAYKYRFYPTPEQSELLARTFGCVRFVYNSVLHWRTEAFNQRQEKIGYIQANARLTALKKKPELAFLSEVSCVPLQQCLRHQQTAFKNFFEGRARYPVFKSRKRRQSIELTRSAFKYRDGKLFLAKSKTPLAIRWSRPLPGEPSTITVSRDPAGRYFVSCQCEFEARTLPVTPNMAGIDLGLKDLFITDQGERIGNPRHTAKYAARLALAQRRLSKKKLGSANRAKARQKVAKLHANISDCRLDNLHKLSRRLINENQVICVESLTVKNMIRNRKLSKAIADVGWGEFVRQLVYKAEWAGRSLVAIDQWFPSSKRCSGCGHTLSSLPLSVRTWDCPECGASHDRDINAATNIKAAGLAVLALGENVSGMGSVSVSGFR

SEQ ID NO: 23918 - protein, 368 aa, Bacterium sp.
MIRSHRIRLNPTPEQAEYFRKAAGTRRFVYNWGLAEWKRQFEAGEKPSALALKKQFNAIKGEQFPWVYDVTKCAVEGAFMDLAAAFKNFFEGRTAGRKVGFPKFKAKKHSRDGFYLANDKFDVSGHWVKIPKLGLVNMAEKLRFQGKILSAHITRTANWWFVSIQVELADEPKMQRDGQIGIDLGINRLATMSDGSVLENQKPLRSLLNQVKQLSRSLSRKQKGSKNREKARRKLARLHYRIACIRDDLLHKATTDIAEQYGFVGVESLHIKGMMQNHALAQALGDAAFGKFTGFLSTKVAARGGKVQAVGRFYPSSKTCSCCGHIKPDLALDERVFICPACGFELDRDYNAATNILNEALRLAASSR

SEQ ID NO: 23919 - protein, 418 aa, Richelia sp.
MSKSQKIKNTLAATKLRRQNQKCKVFELKIDESKLSTEKRKKLNDCFIQAKWIYNNLISQNDEVSFHSSQKEIAVKVFNPETQECDKTEIRKLTIGSQVKQAICDRFVQNIVNLSKAKAKGRKIGRLKFKKDVFSVPLKQFGTTYKILDNQTISIQCVGKLRARGLGQIKNAEIANAHLTKDATGFYVQVTCFEEKTKAETSGAIGIDFGIKDSIALSDGRKFSWNFEIPAKLKRKQKKLSRKKRGSKNYVKLSKKIRKNYKQHCNKKDDAANKFVSSLKGYSKVVMQDEAIHGWHAGLFGKQVQQSILGRIKSRINQLETSVVIDRWLPTTKISPITGKKIKIGLDERMFIDGNFTEDRDIKSAKTILYFGLYNPNLTAKELSGLPPEEITAVFKQFYCFESKLLPLNEEASPFKAG

SEQ ID NO: 23920 - protein, 367 aa, Caloramator sp.
MEKAFKFRLYPNKQQIELINKTFGCVRFVYNYYLDKRTKTYQEKCITLNYEKCSKDLTNLKKEKEWLKEVDKFALQNSLKDLDKAFKNFFEGRAKFPKFKSKKYNYQSYRTTFTNNNIEIKENKIKLPKLGWVKFVKSREVEGKILNATISRTPTGKYFISICCRIEKTIKKPKINKVIAIDLGIKHFLIDSEGNKISNPKYLTKLEKRLIKEQRKLSKKQLGSNNFKKQAKKVAKIHEKIRNQREDFLQKLSSKIINENQVIILEDLRVKNMLKNDKISKSISDVAWSKFVSMLEYKALWYGRTVVKVDTFFPSSQICNVCGYKNEEAKNLNIREWECPICKTVHDRDVNASKNILKEGKKILGIA

SEQ ID NO: 23921 - protein, 422 aa, unknown
  TnpB Polypeptide
MLIRKGGVERVTQRAYKYRFYPTGEQERAFRRTFGATRKVWNRGLGLRSEAWRERQERVSSYDLIKMLPALKKELPYLGEVSAVALQQALLNQDKAFKNFFDGCKGLRPRVGYPRFKTRNSRKSFRLVGTALKFEAGRVSVVGFKDAPLNVTWSRPLPAGVKPSSATISLDASGRWHISLLCDETVDELPVAEPARAIGIDLGLKTFAVLSDGTEIAHPKLLAKKAARLARYQRQMSRRQGARKGETQSNRYKKAKLRVARQHAKVTDARRDFLHKASTDIVRRYDTIAIEDLAVKNMVKNRRLAKSISDSGWAEFRTQLEYKTDWYGKRLVVIDRFAPTSKTCSECGEKSTKLALTDREWVCAGCGTLHDRDLNAARNILAAGLAVAARGEDVRPKRKPRASALGGRLSSLKREPAEVTAA

SEQ ID NO: 23922 - protein, 490 aa, unknown
  TnpB Polypeptide
VPLRITRHQEQILNARFEAGRQMYNALLAEAQKRLALVRQSVWYAKAKKSTDKKERQAHFAAARQAHGFSAYALEAVADEMRRTTWLGEHLDSHVAQKLAHRAFEAVQKVAFGWAKKVRFKGKRGLHSLEGKTNAACIRWREDCVLWNGLELPMMEAARRDPVIQHGLSSRIKYVRLVKREIRGHNRYYAQLVCEGMPYQKPEHIIGNETIGLDIGPSTIAIVGDTQAVLTMFAEEVARDHKKIRRLQRKQERQRSANNPDCYDEKGRAIKGKRPTKKSRHQGETEARLRELFRREAAHRKTLHGHLANQIMAMGVQIKTEKLSYKAFQKRFGRAISVRAPKLFLSILTRKAESAGGKVDEFSTYHTALSQVCICGRKHKKRLSERVHACDCGVVMQRDLFSAYLAKHVSNQRLQAADASRHWQGAEPLLRTAWQQAKNQPASGRPVPSSFGTFRSQSGSSEKGSLPEHEAQDVVAAAKVIARACESATV

SEQ ID NO: 23923 - protein, 417 aa, unknown
  TnpB Polypeptide
MKSMKGALKMEINLTSKLRIVFQSKKDRKSAYDTLIAYRDACNHTSQYIFNHDFVLKQSDLQAALYHELRNRFGLKSQMTQSVFKTVIACYKTVQTQLRKQRVWDGYKKDNHGKDVPNYTNKDLTFLWKPIVFKRPQLDLVRNRDYSFKDNLLSMNTINGRITVKVYNLSENPYFDGSWKLGTGKVVRSGKHWFFHVAVSKELPEFELPQLKHVVGIDRGLRQILTTYDEKGQTRFVNGAFISKKRKHYAKLRARLQAKGTKSAKRRLRALSGRESRWMSDVNHQLSKTLVQIYGKQTLFVLEDLTGVTFDTVHSRKKKNRYEHHSWSFYDLEQKLRYKAHLNESEVVLVDAHYTSQRCPKCGVIDKSNRNKDIHQYTCSNCSYSSNDDRVGAMNIYELGKWYVSGVEKPAFTLANK

SEQ ID NO: 23924 - protein, 426 aa, Halorubrum sp.
MAKKVVTRTYSASIRNQSRVRDDLDSLGFAASKLWNVGRWTCGRIWDEIDHIPNHNELTTYLKTHERYDDLHSQSSQRVIQELAEAFNGWYGKRRNGDTKANPPGYRKHGDEHPRSTVTFKAAGFKLDTQYNRVRLSKGSNLKEYWSDFILCEYQTRPDVDLSTVENVQQVRTVWTGEEWELHFVCKVELDVAEAPGEKTVGVDLGINNFAALAYEDGHSALYPLNCLKQDDYYFSRQIAQCDDSNSEQASRLNQKKSARRTHYFHTLSKHIVERCVEEGVGTIVVGDLSGIREDHNTNESKNWGRHGNLDLHSWAFDRFTDLLEYKAEMDGITVEEASEENTSKSCSCCGRKRDANRVERGLYVCDECGTTANADVNGAENIRQKVSPSSPSLSVNRSNGWLAQPSTFLFDKETGAFAPQEQVTS

SEQ ID NO: 23925 - protein, 415 aa, unknown
  TnpB Polypeptide
LIRTNVVILILDKDAHGRLKELGIVTAKCWNEINWLRIQQYKNGERVDFATSEKKVYEKYKHVLKVNAQQVARKNAEDWRSFFSLIKDKDKKEGKLPKWFKPKPPGYWKDERGNYKLMVIVRNDRYRVDEENRTIYLKDFGLTLKFKGKLKWRGKQGRLEIIYDEARRSWYAHIPVEVENRAKVEGKLRASVDLRIINLATVYVEDGSWYVFKGGPVLSQYEYYGKRIAVVQRTLARHKQRRSRHLKLLHDKRRRFLKHALNSMVRKIMEEMKEKRVGEVVVGYPKEISKNKGNKLTVNFWNYGYIIKRFEEIGEELRMKVIKVDESYTSKTCSLCGEAHEGGRIERGLSKCPHIGKVINADQNGAANILHIPESQGSRRRGQPLVRDRGNGLKAQPAVYRWTNGAGWQFPPAVR

SEQ ID NO: 23926 - protein, 379 aa, unknown
  TnpB Polypeptide
VRRTITVRLEPSEAIERTVRIFNEATNFFLRLGFHNRTHSKRKLQALGYYEARDRWPALRSSLVQEARDCAADMLKRERCRRLPIKKPNSSARFDQRAFKAFLDSGSLSLTTVEGRLKVPLRIPEYFRKYAGVKVNALRVRKVDRKLVADLVVKLPDVPIKEVANPRVVGIDRGINNIAVTSDGGFFNSRHLRNVRGRYAYLRGELQSAGTRSARRHLKRLSGRERRFQADVNHTSAKEVVGADFEVLALEDLSIRKDRRLGKEFNRKLGRWAFAQFEAILRYKSEECGKRVVSVPPYYTSQMCSRCGNLGIREGHSFRCPVCGYSLNADLNAARNIANLGKALVGRPTVNGPIVATGDAENRTSVEVSYKPSVSMDGS

SEQ ID NO: 23927 - protein, 647 aa, Caldilineaceae sp.
MIIYSNHGQQAGQNRQGRGDAGDHPGGSAQVGKDRRTAAGPQDPRRHALLRRGGPARKCQRGGPHPLPCPCVRTRPEGRPGPAAGGLGSLLCGQGLAGGDDPGPGQWPALPQGRATATAGPDHETPDQTSGDHPQGPAAAFGSRTGVCHVRAARHRDCDHSQGRTSLLRGGAGTGRAREHHRVLCPFVRQPLAQVAQVDRCAEVGAGTDVIRSHRIALDPNAQQASLLAQHCGYARVAANWARDEFRASWFTGDGKSGEWLSDMDLRKRFNAVKFDLFPWCGCLPQAAAKNAIIHMGTGLDGWGDYCKARKRGEQPRKVGFPPHRKKHRKMAYTASNGRNTVPVDGRKIRLPVVGWVRMREALRFEGDIGEVTVSKSGQRWFASIQVHTADEPAPPRPGPTVGVDMGVKTLAVVWDGDATTEVANPQALASKLKSLRRLDKAIARSLNTHGKHNPSKRRDDLYAKRRQLHIDVANLRADHHHKATTQIAKRGGTVKVETLNIDGMKCNRRLARAISDAGMSEFVRQLEYKCGWYGTAFEKVDRWYPSSKTCSACGAVKQSLLLSERTYRCNRCGFECDRDENAARNIQAYTGHTEPARTLNALPGPARSAGEERDVETRKSHCREVRARSVKRLPDSQPSWFDYPGP

SEQ ID NO: 23928 - protein, 295 aa, Geobacillus sp.
MTVRAIGKVSESYRLDKKTLHNFKETGAIVYDERILSFKGLEYASILTLQGRMEIPMVISRYHQGLLCGNRVRGQADLVLQNGIFYLLLVVDVPEGQPNSENGFIGVDLGIINIAVDSTGEVFSGSKVNGLRRRHAKLRAKLQKKGTKSAKRLLKKRSKKEKLFARDVNHCISKKIVEKAKALGCGIALEDLKGIRQRTEKTVKKQQRRQHSSWSFYQLRKFIEYKAAIAGVPVVLVHPKNTSRTCPVCGHVAKENRPSRDQFCCRACGYAAPADNVAAENIRRAAVNQPNAAAN

SEQ ID NO: 23929 - protein, 353 aa, Acinetobacter sp.
MKTLKLRIKDKYCKVLDQLASEVNFVWNYVNDLSFKHLKRTGYFFSAFDMSKYTKGTSKLCGLHSQTIDAIREEFVTRRIQFKKAKLKWRVSNKKSARRSLGWIPFKKVGIKYADGYVQYGKHQFKLWDSYGLSKYSVRTGSFVEDSRGRWYVCLVVNSLKQEKPMATKAIGIDLGLKNIATCSDGIVIANPNFYRKYEQKLGIAQRARSKTRVRALHAKIANCRKDHLHKASSKLVKENALIILGDLSAKKLVKTKMAKSVLDTGFSALKTMLKYKCENAGVLFDEVNEAYTTQTCSCCGEITASSPKGRTGLGIREWECASCGTAHDRDKNSALNILALGHKRLAVEIPVL

SEQ ID NO: 23930 - protein, 484 aa, Nitrospirae sp.
MYWRTMEIGAPPQLDAMPSVPNIVVIAHRPNYTRPMQRLQAYKYELRPDGEQQRNMRRFAGSCRFVYNKALALQKKRYEQGEKKLGYAGLCKLLTEWRNSADTAWLADAPVHPLQQTLKDLERAYTNFFAKRAAFPRFKKKGHSDSFRYPDPKQVKLDQSNNRVFLPKLGWMRYRNSREVLGTVKNITVSQSCCKWFISIQTEREADAPTHPATSLIGVDMGVANFAALSTGEIIAPVDAMKRHAQRLARYQRAMSRKQKFSKNWMKAKARVQKLHTRIGNIRRDHLHKLSTTLSKNHAGVVIEDLQVRNMSGSAAGTLEQPGRNTRAKAGLNRSILDQGWFEFRRQLEYKQAWRGGVVVAVNPRNTSRTCPVCGRMAKENRTSQSRFECVHCGHAAHADVNAAVNILAAGHAVMACGGDVSPYLHLKCRQGGPGEAGTPEDSLQCTAMSAVGILRPSGRGGCQDQQRLGLPAGVLLEPFQHGF

SEQ ID NO: 23931 - protein, 402 aa, unknown
  TnpB Polypeptide
MIVSKSFKYQLRLTQEQQSLCNQITGSCRYVWNRGLALKKKLWEEKKQRLSRFDLDGLLTEWKKELDWLSLPPSQSLQQINKDLDQAFKNFFRGRGYPKFKKKGKHDSFRLPQGIALTNQLSKKVGQVQLPKLGIVRFTKSRELEGKIKHVTISKTCGNWFIAFNCELDIPKPEPKPQSVIGIDRGIKTFAQCSDGQAILGVSPLKKNLKKLAKLQRKLAKKKKFSSNWRNTKQKIEKLHYYIANVRKDFLHKTSTQLAQSHSLIVMEDLKTKDMAKSAKGTKENPGENVKAKAGLNRSILDQGWQMFQNLLSYKLTWRSGKLILIEPKNTSLKCRICGHIAKENRIKQAEFQCVNCGHTENADLNASINILAEGHSVIACGVPKAFGTVKQELQIRKPATV

SEQ ID NO: 23932 - protein, 329 aa, Escherichia sp.
APSQPLQQSLKDLERAYKNFFQKRAAFPRFKKRGQNDAFRYPQGVKLDQENSRIFLPKLGWMRYRNSRQVTGVVKNVTVSQSCGKWYISIQTENEVSTPVHPSASMVGLDAGVAKLATLSDGTVFGPVNSFQKNQKTLARLQRQLSRKVKFSNNWQKQKCKIQRLHSRIANIRRDYLHKVTTTVSKNHAMIVIEDLKVSNMSKSAAGTVSQPGRNVRAKSGLNRTILDQGWYEMRRQLEYKQLWSGGQVLAVPPAYTSQRCACCGHTAKENRLSQSKFRCQVCGYTANADVNGARNILAAGHAVLACGEMVQSGRSLKQEPTEIIQATA

SEQ ID NO: 23933 - protein, 238 aa, unknown
  TnpB Polypeptide
MKAGIDLGIANLATVAVDDGSWMLVKGGSVLSEFKKITKRISKEKKKLAKHGLKTSRKLEMLYNRRALLLKNAREGLAREVVESLYDKGVGEIDIGYPKGIAQDNGNERNTNFWSYLSIIKRIKEVAEEYGIKVKLVNEANTSKTCSLCGEIHENGRIERGLFKCPHTGKVINADLNGAINILHIPESVKDRGKWLKAQPVVYRWTSEAGWVTASYEVMKMIAINHEPMISLEGTIAF

SEQ ID NO: 23934 - protein, 277 aa, unknown
  TnpB Polypeptide
MGAWKSFFELSKMKKKGELPKWMKPKPPHKKKDDLFLLIRNDRYKIEGNEIYLLDFKLRLKFNGKLKWVGKQGTLEIYYDIVRRKWYARIPMVVKLDNKPRGKMKAGIDLGIANLATVAVDDGSWMLFKGGSLLSEFKKITKSISIEEKRLAKHGLKTSRKLEKLYNKRSLLLKNAREGLAREIVESLYDKGVGEIFIGYPKGIAQDKGNERNTNFWSYSSIIKRIKNVAQEYGIKIKPVNEANTSKMCSLCGEIHENGRIKRGLFKCPHTGKGNKR

SEQ ID NO: 23935 - protein, 477 aa, unknown
  TnpB Polypeptide
MKRTVKIKTNCSNNEEEILLIGTVQRNIKNYVWSRYSGIGSLLKQSGWTIRDELIQKHLLSNKIPKTFSRAAIEKSASTIKVNWTATKKKVKKAIAQNENLTKDDKRYLFLCLKHTPTLYNILNYKKVDYAIDYLKDLKVDVHRLNNLLRRYIRRYKTKSYTNKANIILTSSLYKFDLNNNTFSFAGKKKNSRIVITLIGNVPKSNSILELVKSQKDNQYYLHVPLDRIIAKKDMTEQSEILGLDVGITDLITLSNGSVYGANSAELFYTLSDNLVNKNRSRLFSYKRKLEQKIVIEQDQSKKSLLEEKLKNLEDNNLGLQKRNSKITKYKSRIASHINHELNKMIKGEDIKEIVREDLNWSSKKSKKKNKRNVSRKQQNRFSTWTKGVLLERLSVKLAEKGIKETIVNPAYTSQICCKCNHLGNRKGKEFKCSNCNLSIDADFNASINIKKRKFIKEIDIYTPYKDVKKYYENLPV

SEQ ID NO: 23936 - protein, 376 aa, unknown
  TnpB Polypeptide
MQRTVSLKIEAPTEFLDYLKTCADIFNRYVDWCFDSKTYNKNKAHKELYEKFRQEYPTIPSAIIQSIRDTALESVKAVKFKFRPTKRPTSHVRYDKRTVALRDNILMITWSGKRIKQEVKLPKFFSERYSGWKFKAATIGYDKINRCFKANLIFENKAATQPAVKCDNRVLGIDRGLYNIISTSDGFRYASNLIRKVKREILFLKKQLQSKGTRSAKRKLKKLSGYERRFSLNINHNISKMLVNMPYDIFVLEDLKGIRKQKSKGRILNKWISNWAFWQLEQLLIYKAEALGKKVVKVDARYTSQKCSCCGEIEKQNRKGSHYFCNRCGYREHADINAAKNIRNNHLISTAEKQKVEQALCQYAERSSPELQCVEP

SEQ ID NO: 23937 - protein, 624 aa, unknown
  TnpB Polypeptide
MNNTKPTVKLKTLQFVIDKKHNNILSDMTSISKNIFNCCIYSNNIFYLFKNKVYQELYLFLKTIKNSDLEKSHKKILIDLNNTDILLTKLKNYYDFYNENNHFMISNNKIIYNHIKSKATNIILTSSNIKQFYETTINELEQLVSYNVINKEYVFINVVDKIIKSFYDKKYFLTKYQMMNNIPFTYKNSQLKDDIVSKYYYYDIFKKVDYKQKILKKFDIELKSEQYLFKLFVYKYCLSTNKDKLPADIILNLIDKYSESIASYYGRINKKLPANKPKYLKKEDKFNLYYFPSSYKLQGNTARLTVGKYTASNNYNNKLYKITDRKYCYKHNLCSNIKNKIKKNYIKTPHGYINKCEILDGYYLNLKLPNVVKNKKIKQIQIKSYGNIYTAYLIYEEVNNDLKLNEPVTCINSISIDTGMKNLMTIYNPTGDQHIIKGGKIKAINEFYNKKISKLQSINKKSLNINKFNRLYSLLNERKNKLNGEINKIIDKLIKTYYDKKYFIVGYNEGWKTKVNMGHNNNRHFYNIPYSKILIKLKEKLLSNGKSLIINEESYTSKCDSLSLEKLGKNKIYEGSRIHRGLFISSIGKAINADLNGAINIMRKVINLTKISGNKIFNPTILGA

SEQ ID NO: 23938 - protein, 414 aa, unknown
  TnpB Polypeptide
MLHIRTEKILVREGHPEYKQYRNVCKISTAIYNCANYYIRQNFFNGYFNINWQSADKYLRQKYNSLYNALPNQSTQSIIKKLGDDWNSFYKANNAYKLDSSKFNSKPKPPKYKKGLGIFISSFQSMSIKNSEIHFPKKMNLNPVRIHCCDNQILKAKQDEQVVTEIRILPKNKAFYIEVVYNKEINNDILLDKSNVLGIDLGLNNLLTITTNQSDLTPILINGKIIKSINHKYNKSKAYYQSNGNHNMINRIGLSRHLSIKDYFHKASNFIKEYCLKNNIGKVVIGNNKQWKDKINIGKVNNQNFVSVPFCLLISLITYKCEEYGIEVILQEESYTSKSDALACDILPIYDEANKTEYKFKGKRKSRGLYQSSKGLLNADVNGCLNILRKVIGDGFIRNLINSGCVFQPVRVNL

SEQ ID NO: 23939 - protein, 155 aa, Clostridioides sp.
  misc_feature (147)..(150): Xaa can be any naturally occurring amino acid
MYCGQHIKLPKLGMVKIRDKQVPQGRILNATISKEPSGRYYVSLCCTDVDIEVFENTNNHIGLDLGIKEFCISSCGEFIENPKYLKKSLNKLAKLQRELSRKTIGSLNRNKARLKVARLQEHIANQRKDFLQKLSTKLIKENDIICXXXXSKEYD

SEQ ID NO: 23940 - protein, 245 aa, unknown
  TnpB Polypeptide
LRLPKIGQIRLKQHRIIPDEYRLKSVTVSQTPSGKYYASILFEYEDQVQEKELQKFLGLDFSMHELYRDSNGKEPAYPGYYRNVEKKLAREQRKLSRMQKGSNNRNKQRLKVAKLHEKVSNQRKDFLHKQSRQITNAYDCVCIEDLDMKAMSRSLNFGKSVSDNGWGMFTTFLRYKLEEQGKKLVKVDRFFASSQTCSVCGYKNAKTKDLALREWDCPQCGTHHDRDVNAAVNIRNEGMRLIIAS

SEQ ID NO: 23941 - protein, 503 aa, unknown
  TnpB Polypeptide
VESVRRAVAVELEDPPPELYAVEEPYRRIVEETAVYVAERGRLEREKYSELYRRFRELYPWLHSQLIQQAMNQGVEAGRSFLEARRDGRVRKPRPEVRRVSIRFAKDSWSYRKAAASIAPIRLELQLFSRGAKRQRYELWIKPHRRFWLYWWKALRGEAELASTLMLKRRRGRWYAIFMFDVKTRKEPPAEVVAFDINENTVAVARINLLATVDRVASWNRQYTYPAVYSIRTNFGRLAKRYRRIRNAKLEELKRKYPYAGRDDEEKVQNVTDTREYKKFARRLREKRRKEARVRQVARDVMRNPAVIITEELGKNPQEEMIGVKKKKVKKRELRHRIKQIPFRKLVRTVEDKAAEVGSSIFLVSSFRNSRACPIHFAKLEDGGDWHTLWCPHGHEVDRDAAAVLNMLWKITPEGVTRGVWWRSLRGMKLEREELVPEGLTKRKTPLVKIPWPVVYAVWISLRALKASPQWPAVLARAASMTPAGGANEGGARAPVNRPGGTL

SEQ ID NO: 23942 - protein, 540 aa, Verrucomicrobia sp.
MTITIEARLHDETLFPILGQCAALFSRLERLLFVALYARGEALAEAKRRFLIEQRITARQFNAIHKQLSAKVDSWREVRKLNLATVGKQIAKAELAIAKARSSFVAHQKKRRLNRLFDCKAGIERDLAATVPSLCFGSRKLFREQFDLKANEHVDHAAWHEAWGAARASSFFILGSADETAGNQTCQFRDGALHLRLPDALGGGIQAIPVAFRYRGIDLLAALTPTRQSITRGPRKGDAIERHSAISYRFLCREGRWYVQAMFGVAAAPITTSRQNGCLGIDLNPWGLALNRIDRAGNPVESHDLPWQIAGRCDDQAKATIGDAVRDAVLQAKAQGVPVAVEQLDFTAKKHDDRGARCNLMLSAFAYASFAQMVRGRCAREGVELIEVNPAFTSIIGEAKFAAGYGLSIHRAAACAIARRALNFGEQLRTRSAGSALALPARNRTRHVWHNWGLWAKARRPRRSRFANPKGSRGSQPPNGREAPPDPSPPNDRASGRAGGVTPRFNAVPVVCGAIPQANGRSRCSDGLVATPSRTALRAP

SEQ ID NO: 23943 - protein, 390 aa, Aphanothece sp.
MEKAFSYRFYPTPEQESLLRRTLGCVRLVYNKALHERTQAWYEKQERVGYNQTSSMLTNWKKQEELSFLNEVSCVPLQQGLRHLQTAFTNFFVGRAKYPNFKKKHTGGSAEFTKSAFKWKDRQITIAKCSEPLPIRWSRQMPLGCEPSTVTVRLHPSGRWHISIRFDNLTVKPLPATNKVIGIDLGISSLLVTSDGNKISNPKHLKKHYRRLRRAQKSLIRKQKGSKNRDKARIKVANIHVKITDTRKDHLHKLTTQLVRENQTIVVENLAVKNMVKNHKLAQAISDASWGEITRQLSYKCRWYGRNYIEIDRWFPSSKRCSSCGHITLTMPLRVREWDCPNCGIHHDRDINASKNILAAGLAVSVCGASVRPEQSKSVKATAMKQKPKS

SEQ ID NO: 23944 - protein, 186 aa, Aphanothece sp.
MVVVVDHVDESEIKSTTGKIAGFDFGLKTFLTCSDGTKIESPQFFKQSLKAIKKASSQHSKKLKSSSNRERARKNLVRKHEDISHCRRDWFWKLAHELTDKFDVLCFETLNLKGMQRLWGRKISDLAFGEFLQILEWVAKKKNKLVIFIDQWYPSSKTCHRCGHVLETLELSASRVALSILSIGQW

SEQ ID NO: 23945 - protein, 298 aa, unknown
  TnpB Polypeptide
MKLNYQVRLYPNNTMKHVLDSLCDYRRYCWNKAISCWNDQYESRLIGLPESVLDKLKNDVNSLTMEEQELVNQYPIPSHYSVQNELVSQKEDWQYGLSSRVLQQAVKDLSKSWKLFFNNQDTAGRPTFKTKKSPKQGFKTDRASIRGGKLLLDKPRGYQGKWYTIKFKGLTIPDSKITFCSVTRVNNKYIATFTLDVESTLLPKTGKKTAVDANVDHFDTTDGRTTLKPETLNPLYDRVKHYQRVLSRKRCKNPKAIHSKSYQVTRTKLQRTYERIANVQKDLLHKFTTDLYKQYDRY

SEQ ID NO: 23946 - protein, 426 aa, Haloferax sp.
MAKQVVTRTYTASIRNQQQVSDDLDSLGFSASKLWNVGRWICDRVWSEIGHIPGHNELTSYLKSHERYDDLHSQSSQRVLQELAEAFTGWYGKRRNGDTRANPPKYRKHGDEHPRSTVTFKAAGFKLDTKYERVRLSKGSNLKEYWSDFILCEYQTRPDVDLSTVESVQQVRAVWTGDEWELHFVCKVKIEVAESPGEKTVGVDLGVTNFAALAYEDGHSELYPLNCLRQDDYYFSKRIARCDDSESDQATRLNQKKSARRTHYFHTLSKHIVQRCIDEEVGTIVVGDLSGIREDEENGESKNWGKHGNLDLHSWAFDRFTSMLKYKAEMEGISVEQVSERDTSKSCSCCGRKRKANRVERGLYVCDDCGVVANADVNGAENIRQKVSPSLACDGGDRSNGWLAQPSTYLFDQESGCFAPREQATS

SEQ ID NO: 23947 - protein, 346 aa, unknown
  TnpB Polypeptide
MSEMQMAVKGYSNLHAKGVYHVYRKYMFARDAMFRSIKAKHENSNKVKLPYKQKKYFNTGWDYQSIQIDYEKRLIKLARKDIKDENGKRKRQGQIICHAKTIPKNIVEIELLYRNGLKLAIKYKEPDIQTVIQSDNVAAIDLGEIHSITSIDNKGNAIIITGRKLRSIKRLRDKEQAKIRSKMSKCQKGSRQYKKYNRALYNIKYKSEKQILDSVHKTTKLYLDFCLENNISKVYYGDLDGCTRDTHGRTNKLIGQKLNEWNYGLIMLQIHNKLERYGIELIKVGEFYTSKKCPVCGKLNKPKGREYVCSCGYRQHRDIVGAINILNDNTSTQISKYTNKKYLRIA

SEQ ID NO: 23948 - protein, 363 aa, unknown
  TnpB Polypeptide
VEKSYKFRIYPNREQELLIQKTFGCTRFVFNRYLAKRIEAYQSEKQTINYNACSADLTLLKKDLVWLKEVDATALQSSIKDLDSAYQNFFRRVKNGEKAGFPRFKSKKNNRKSYKTKQNGNTIQVFDKCIKLPKLGIIKCRASKQVEGRILSVTVSQNPSDKYFVSVCCTDVEIEPLPSTGAIVGVDLGIKDFAITSECLSKSEKKLSKLQRQLSRKPNGSKNRNKARIKVARLHEKISNQRTDTLHKVTTELIRNYDVICIEDLNAAGMVKNHKLAKSISDASFGEFRRQLEYKATWYGKAVSVIGRFYPSSQICSECGYKNSETKNLAVREWVCPACGSAHDRDVNAAVNILNEGIRLLAS

SEQ ID NO: 23949 - protein, 439 aa, Palaeococcus sp.
MLRARKNEASSNPQAQPSKEQEKALKELILTSSKAWNRVNYLRRQEFFEGKPVDFLKTEKIAYEEFKAEIGSATVQQIARKNTESWRSFFSLIRNKRNGELPKWFKPKPPNYIKEGGLIVLRNDQYKIEGNKLILKGLGKFKRLEVQFKGRIHLKGKQGRLEITYDPVKRKWYAHISYMVEERLYGQEWVELPRQPSGNLSAGIDLGVNNLMAVYVENGESFLVNGRPLKSIAFYWRKRIANYQSRLNKSGAKKSRKLSRMHQKAKLQVKHYINTAVRQTVEKLYPLGVSKIVVGYPKGIARNSDRGKKQNYLLSHVWRFNYVIKRLREVAEEYGIRVLVVDEAFTSKTCPVCGKPHEGARFVRGLFKCPATGLIFNSDLVGAFNILKKAVKTITPNLGGLFAQGRGNGGETVPEGFEEPVSVRVLMKTPRTSPSMARG

SEQ ID NO: 23950 - protein, 342 aa, Palaeococcus sp.
MRSYRFRIYPSKAQQEKMLRHMELCRWLYNELLRAIRENPSLRRTDTQRLIVELKKENPELKEVYSKVLQMVNHQLWNNLTVLKVLKKNGHKVGRLRYKTSPNSWKSLNYNQSGFKLDEEGKRLHLSKVGEVPIKLHRKIKGEVKGVIIKRTKTGKWYAIFQVEEEPEPLPKTGRAVGIDLGVANFVVDSDGNAFENPLFFEKSLERVRKIQRRVSRKQKGSKNWEKERIKLAKAYEKLTNQRTDFLISSPFTTSGITTLLLWRNWKQRIWLGTVIEVSTAICSIPLPVLSSGYSPTRLRELVGGWFSSNQPTLRGLAPAVGSLWRKCLFRRGFFAVRSVGW

SEQ ID NO: 23951 - protein, 367 aa, unknown
  TnpB Polypeptide
MLKAYKYRIYPNNEQKIQIAKTFGCCRFVYNQTLAYRKEVYEKEKKSVSKTDCNNYCNRQLKKEYEWLKEVDKFALTNAIYNMDAAYQKFFKEHVGYPKFKSKHNNHKSYTTNFTNGNITVDFENNRVKLPKLKNIKAKLHRNFSGQIKSATISQVPSGKYYVSILVETEHMELAHTNQNTGIDLGIKDLCITSDGKKYENPKIIRKYEKKLIKLQRQLAHKEKRSQNYYKIKKKIALCYEKIKNTRKDYLHKISHEIISENQVIVSENLQIKNMVKNHHLAKSISDVSWYELTRQLEYKAKWNGREYIKIDTFYASSQLCSVCGYQNTETKNLSVREWICPVCGTNHDRDINAAKNILEEGLRQIA

SEQ ID NO: 23952 - protein, 493 aa, Caldilineales sp.
LDALHGSLTGRLTVTTPTATLDSTTDTVIRSERYRIRFDSPRQAQACAGLAGATRFMWDALLADQEARYRLWQANPLGPKPVSTFFTLGKRALALRNGTCLHGVQGDTDTGFLQDCPAACLRYTAKYLADAYTRYFQAKKEAEDRGEKLPIRRADGQPVTFPRRKSKHRTVAGFTIPQAVHMDGTRLHIPKMGWVRLSGGHQYLGCQARQVRVLKEGTDERPKWYAHVCYTVPVDRVKPPAATDALGLDRNVGQATDSDGRVYTVPDTSQLDANIRRKQRQADKARERSRRNGQPLSNRGRRICGQLTRLHRKQKRTREATAHRHSRTLADTVHTVVIEDLHTKDMTRSAKGTAEEPGRNVKQKSGLNREILQSNWGRMEQYLSYKAGELLQVDPAYTSQTCAVCQHVDTENRKTQSLFQCTACGHTANAAINILVRGCPWTRPARGVGASARREAFPLGTSTTREPGRQGIPPPARAGPSGPAPVPSVNHSV

SEQ ID NO: 23953 - protein, 770 aa, unknown
  TnpB Polypeptide
MRPRKGRCRIEVTKANIAYKFELMPTREQKRIFAQAAGCRRFVWNKAIELQKRCLEQEVPFLKYTELAGRLVLWKKEDDMLWLQEAPSQALQQCLMDASAAIQAFKAKKKGFPKFQARGDRDSFRIPQVRPTDWDEANGRVRIPKAGFVRFRKSRPIQGKIKQMTVSVEWGHWFEGSAQAPAAGIRNACVLHGGILDLRDRAATVVPEGAFLLRIKEAHDVGGVVGERVEVDLKEFRGREVLVHAFACAEEHPARECPVGLPAVENADVLALLKNARRHPGIGRGHRALDHRADLALGDERAPFGRGAAVLSIDRHGPEVRLLQALKKLLMAVERGKIALVGVERHELINGDRVERGRDGVPGFAKAHAGKRRVGERGRTGARDHVSGLGHLAFFVHLTCDGVKKKHSPVACVDFLHLFCGGGNREHGQLDRFGVFVRDRSGDFGLSGINYMLHRQVGHGDDAHDVLVHRMRADHDGGAVRVRDHAFDLEVRLVELSDGALVEEILDGVVILENGFNNREVPTKHVQLGLGAVIPLRLGLLDLVPGVFVEELPRLGCDLFRLVVVFGKNQAPEHQEEPVGIPALFGQGFKKAPGLFHAVFLAAEATLEDLTCGRHGDELAKHAPLRLDVIDESVNHRHVTILLETFDDVREEQQPRVDGKMLLNVPVKEQARSQGCGMARLLPVTLQLEQTADEREPDEVAVLVVAGNIQNCLKLLLVLHVKCGTRDEIKLDAAEVVGDVTSRIARLPSSPRSYWLRIHSMRSAFVKSSA

SEQ ID NO: 23954 - protein, 406 aa, unknown
  TnpB Polypeptide
MTIIMRTYCAKLEMTNEDAQKLRHTLELHSLAWNEISKTLFESGVVTQVVLHKKTYHRVRKMFPDMPSQVAIKARMDCRSAYKTVKSNKIKLDEPMTRKNLAMRLDMWLFKLKRDENGNLLAMFTVAGNKRNRIKARIITYPKLDEMMKYELADPLVFERDGQFFLAMSFRNPEPAHISNNCIGVDLGVKRLAVTSEGQILNLPILARAKRKVRYLKSILKALKHRQGRRRNQSARRKLRSVSKKERNISKEMCHVVVNQLLKTKSNTLVLEDLTGLKKRSNGKRNNNRRSQVPLFEMRRILTYKAQALGKRVETVNPRYTSQDDSRGLPRGERKGCRYYAKDGVVLDADHNAAITIAKRWTIKNQLPISSSAPIRGRQNIWAGPGQRADCGRPLCHKPTTLVVGS

SEQ ID NO: 23955 - protein, 505 aa, Moorea sp.
MPTQHDNIDVYEEVLGMPKKVGVTKKISTQVVPIVGMVKSVELELLSTMKKLGIVRSETYNKLGSINHWGIDWKKAYPEVRSFRTPESLGLPSKLMEWTVSDVAKSITASQAACTDAVIKKIYKRLPGKDNQKVRKDLCKQLKTLAFIDNPLLHRFVRKEYQRGHSWIRNQIVYQQGGYTCNRLSRNTYQLELAGLRRGKRNKIIVRSNRKLKGQIRLIYNKSLQRFEIHFLVDHGTVEIPSERRSIGVDKGYTETFYDSDGQAHGKNLGKVTTKKSDRICTKNRNRGKLWALHRKLEKLNQAKSARILKNNLSRKTENKRYRQNQSELTAIIGAASKSLFNGESLLVFAEDLTQPIRNKRQSKAMSRKLNSWMKGQMRDSLEKWANWTGSVVTEVQPSYTSQVDSVTGTLLGKRNGDNFTRFNGVVLQSDHNAAKNILNRGTDQEITRYMNKTEVQAVLLRRTARFLEGMGLSLLDAVELGWLDSKHELCSGFQATPGRDARNV

SEQ ID NO: 23956 - protein, 396 aa, unknown
  TnpB Polypeptide
MYTTLIGVVKNLKEPQILYNFIHSYRQAVKTIFKKLLNNYKGKKNVYAIRHDNIDILKAIGVTPSEYLIVTNEAFNLFKAKAKKLNITAKISEVSLVVDDKGKICPPGRKKPPTINRILHFTDDGFHAILTLKKGVVLEHDIYLGKRTTQYAKSLANRGLIPVFLNYMTTSDGIKVAITFKGKEPEYTPLTAIGVDIGERNIVTLVALDIKNPEKPMRGTFINRKIKEIRYRYYLHQKKMMTETKKPRLDLVKKMRYKTKLNYEIHKLAIDVVNYAKQFPSPIIVMEDLTGIRDRFNKGKELNRRFHSLPFRKIQNAIENCAYKNGIIVTYVDPRYTSQTCHRCGNINRVNGRTFICSKCGLKYNRDLNASINIARRFITSLDNNNKCSEKDEHGV

SEQ ID NO: 23957 - protein, 408 aa, unknown
  TnpB Polypeptide
MKNSDNIQLSYKYKIYPSREVEKKLLRVMQIEASVYNALLDAVEKARKERKQITSRDTQNMLKYLKIDGKELVYSKVLQMVNNQLWYNINALYGLKKKGKKVGKIRHKKIMNIINYNQSGFKVQGNKLILSKIGEMKVLFHRPLEGEVKGVIIKKSAKGWYAIFQVEVEKKPLERTGKVVGIDLGVKNLVTTSDGIVIENPNIFDMVENRIKKLQKFLSRKKSESRNYEKVRNKLAKIHEYVKNLINDYIHKVTSWLVEQYDEIYVEDLGVKEMVERGKSKTLRKHILHSNFSKFVSYLSYKAERAGRRVVKVDPYNTSKRCAKCGYIKKDLTLADRVFVCPKCGWTVDRDYNASLNILHTGSGLPVEPVDRKPMLYIPFSEGVYSKFPARSRKFSPQGGDTPSVRTG

SEQ ID NO: 23958 - protein, 383 aa, Nonomuraea sp.
VQLRYNVRLYPTAGQRQELAKAFGCARTVYNDGLRARQEAREQGLPYVPDAELSKRVITKAKQTPERAWLGEVSAVVLQQALADLNTAYRNFFASITGKRQGLKVAPPRLRSRKDRRQAIRFTRNARFRVTAGGKLRLPKIGDVPVRWSRSLPAEPSSVTVVKDAAGRYFASFVVEVGDEPLPRIASEMGIDLGLTYFAVLSDGRKIDNPRFLRRAERRLRKAQQNLSRKAKGSANRKKAAVKVARAHARVADARRDFAHKLSTKIIRDNQAVMVEDLSVKGLARTRLAKSVHDAGWSAFVSMLEYKAARRGRTFVKVDRWFPSSKLCSACGALAESMPLDVRSWVCPCGAAHDRDVNAAINILAAGRAERLNACGGTVRPAA

SEQ ID NO: 23959 - protein, 402 aa, Nostoc sp.
MRITYQYRLRLTQKQIDTFEHWLELCRRQYNYRLAERFNWWEQNRCDVNRCSIVCCSITPLKEQPNRWSQQKDLANTKARFPEYKKLPLHTLQNVIARVDKTYTRWLKGDKNGKKSGRPRFKGKGRYRSLTFPDPIKPEHIQGKFIQLPKIGKVKAILHRPIPDGFKIKTATITCKADGWYIGLSLENMTVPSFIPDTIPTPDNTVGIDMGLKSFLVTSDNKVITIPQYYRKAEKKLKRLQRQLSRKKKGSNRCKKVIRRVAKAYLKITNQRQDFHYKTAQWLVSQYRFIAYEKLNITGLAKTRLAKSILDAGWGQFLDIVNLKAANAGGAGLPQNSYKTSIECSDCAAEVPKTLSDRWHNCSCGASYCRDHNAARNIKYRAVGHPALIKAREMSDAIAGVT

SEQ ID NO: 23960 - protein, 370 aa, Nonomuraea sp.
  misc_feature (230)..(293): Xaa can be any naturally occurring amino acid
VKRAYKYRFHPTPEQAVELARTFGCVRLVYNKALEERTRAYRLEGRGVSYAESSALLTAWKRSAELRFLGEVSCVPLQQALRHLQAAFAAFFAKRARYPVFKSRKKSRLSAEYTRSGFRWRDGSLTLAKMDEPLDIVWSRPLPEGARPSTVTVSKDAAGRWFVSILVEEMISPLPPVAQVVGVDAGITALVTLSSGEKIVNPRHERADRRKLARAQRALARKEKGSNNRXXXXXXXXXXXXXXXXXXXXXXXXXXXXXXXXXXXXXXXXXXXXXXXXXXXXXXXXXXXXXXXXASWRELCGMLEYKSRWYGRRLVVVDRWFPSSRLCSVCGTLQPSMPLNVRTWVCACGACHDRDVNAARNILAAGLAES

SEQ ID NO: 23961 - protein, 510 aa, unknown
  TnpB Polypeptide
VKYYDTVTRHRFTTGDGVNAEQVERDLAQMVSWMAEAERDVLASQEFHDLTVRALKGERPTGSLSAWGRKKLSRYPFSFQKHNMNEMLVSNVASTLELYAMSVGLFQVMSTHPKETKPEKILFHYRSTYPKAPQPTSGMVRAHLRRYHVKGERKASLPGVSAKLNLAVCDTHFAPKVSRDNNNPLNVIVQVKTPSYGITKIFLGLPDNESRFGEGKVCRPTIRLNNKGQIVFDVAIEHETKQRDTNKFVGVDLGKIEPFVSTVIDSEDKHRSAPYHTNYKRRLGLLVKKEQERCELASYLYERAEVCSTHNRTDHADVLRTEANRVSAKATRIKHEISQCIASQVVSIADQNDSHVSLENLSWLDSQGGRWPHAEIQQRIENTAKRYGLSVVKVSARDTSRTCSRCGGKVSNNLKSRVGACDVCGFSLNRDVSASREIALRATSPSSRSRERMRCLLRQRQEKQSSAATRQSKPVTALGGIQGHTGTSSTSLEATLMMVRDNLDSRGSPT

SEQ ID NO: 23962 - protein, 402 aa, unknown
  TnpB Polypeptide
VLKSYKYKIKPNENQIVLLNKHFGSIRFVYNYYLNERKSEYETNKQTLNYYDNANSLTKLKRQEEFKWLKEISSQSLQYSLKCLDGSYNSFFKKRTGFPNFKSKHNRNSFCVPQYTKVVGDGKLIIPKFKEPIQMIQDRKFKGEIRQCTLSKTTTNEYFVSILVETDHKKFEKTGKSVGIDLGLKDFAITSDGFKYKNNRYTKTYDKKLKENQQHLSRKVKGSNNYKEQKLKVANIHKKITNSRMDNLHKTSTDLIKKYDTIFLEDLNIKGMVKNHKLAKHISDVSWGKFITMLEYKALWNDKNIIKIDRFFPSSKTCNSCGWVNQNLKLDMREWTCPSCKTKLDRDLNASKNILKEGIKIISVGTIDYRCGDDIRPTLVGTIGETSKKKELVSGNLSVFSR

SEQ ID NO: 23963 - protein, 403 aa, unknown
  TnpB Polypeptide
VLRRTVCLKLDVPDDRRDDLHETTDRFRQAAQIAADRAFEGDDDGNVITHKTKLHHLTYQQAREATDGLNSDLVCTARNLAVDAAKGVVSRWENGKRASKPEFTAPTVVYNKNAVTYNDDHCTLAAVGDGRVRAEYVLPPEGDNPQTEYLRGDKWELRESTLHYRPESGDYYLHTTVAKDEDTSEEAENGTVLGVDLGVENIAVTSTGRFWSGGLLNHRREQYEAVRGGLQQTGTESAHRTMQQIGERERRWAEDLLHCISKDLVNEAVAHDCSRIAFEDLTDIRERMPGAKRFHAWAFRRLFDLVSYKADERGIRTVQVDPAYTSQRCSKCGHTARNNRPSQAEFRCGKCGYENHADYNAAKNVAMKHVRAGQKSPRGRANRHLALKTGTLDGNGEFSPADA

SEQ ID NO: 23964 - protein, 380 aa, Jeotgalibacillus sp.
MKTIKRAYKFRIYPTAEQEVKIRQTIGCSRLVYNHFLAECDTSFQSTGKRLSYGVTSKGLTSLKKVKTFLKDVDSIALQATLEDLDDAWKRFFNKQNKRPVFKSKKRPRQSYTTKNVNDNLKVVDVDGVPKLKVPKLGLVRVAWSRQLKEETHIRRATIQIRPSGKVFISLLVEETISPLPTTNEAVGIDLGVTQLATLSDGTMALNPRNLKSMEAKLIQAQRVLSRRIERAKKDGRPLRDAKNVQKARMKVARIHETIANRRNDTLHKLTTEWVRRFDTIAIEDLETSKMLKNSHLARSISDASWSTMRQMLTYKCDWHGRTLILVKPNDTSRRCHECGHIDALNRPTQTEFACVSCGHTAHADVNGALNILARAQGVW

SEQ ID NO: 23965 - protein, 166 aa, Crocosphaera sp.
VLGNRRAGIDPSKNAVKYYQKLRKKHKRITNIREDFLQKITALLAKTYQHILVEDLNIKGMMANHKLSDALSNLGLYRFRELLSYKQECFGFLFTIVDRWFPSSKTCSVCGNIQDMPLSERVYHCQNCGQVMDRDVNASINLESWTNNADGLSVNACGQEGAVSLG

SEQ ID NO: 23966 - protein, 379 aa, Turicibacter sp.
MIIAKKVRLKPTKEQEQKLWQSIGTARFVYNWTLNRQEENYKNNGKFISDNELRKEITQLKKGELSWLNQVSNNVAKQAVKDCCVAYKNFFTRKAKKPRFKSRKKSKPSFYNDNLKLRVKEKSVLIEKVGWIKTSEQIPMSVKYINPRISHDGKYWYLSVGVEQPLEDIQLTDVSLGIDVGVKDLAVCSDGQVFKNINKTKTVRKLEKRLRRLQKQVSRKYEMNKKRLKGGESRCQFAKTNNIIKLEREIRLLHRRLKNIRSNHIHQTTNQIVKTKPSRIVMEALNIRGMMKNRHLSKAIQKQGLYEFKRQIQYKCEKRGIEFVEADKWYPSSKTCSCCGNIKVKLSLSERTYHCEACGLSIDRDLNASINLSRYGLVL

SEQ ID NO: 23967 - protein, 397 aa, unknown
  TnpB Polypeptide
MITLEYKLKGKPAQYRVIDDMIRTAQFIRNKALRYWMDHQNVKLSDLYKQCAILAKEFEWARKLNSMARQASAERAIFAVQRFFANCQAKKPGKKGYPQFKKFTGSVEYKTSGWKLASDKRRLTFTDGFAAGTFRLVGSRDLHFYAPSEIKRVRVVRRADGYYVQFCVNVKRTEEVSPTGKTIGIDVGLNHFLTDSNGDTVPNPRYLRKSEKALRRAQRKVSRKKKGSANRKKAINKLGRKHLKVSRQRKDFAIKTALCVVKSSDFVAYEDLQVKNMVKNRKLAKSISDAAWSQFAQWLQYLGKVYGKTVVAVAPQYTSQDCSACGNRVKKSLSVRTHICGCGTILDRDQNAALNILAKALRQTGIEINTAGHAEINAWGQTDLYSLVVTSTSKPTG

SEQ ID NO: 23968 - protein, 365 aa, unknown
  TnpB Polypeptide
MEIIKGYQFRMKPNRKQQNQIEQNNGCGRFVYNHFLNVRSEAWKESKTSISYNKTSEMLTELKKELPWLKDADSMALQESLRDLDKAFQNFFNKRGKYPRFHSKHDHDQSYRTRNQKNGIRIVGKYLVLPKLGPVKIRQSRPVEGTILNATIRKTPSGKYFVSLCVKTEAEPMPNKGGTIGIDVGIKVFYKDSNGNEVENPKHLRKSEKKLKREQRKLSRKEKGSKNRNKQRIRLARVHEKIANQRTDFLQKQTTTLVRENQTICVESLHINNMIRNHKLAKSISDVAWGMFFRMLEYKAPWYGAEIRKVPTFYPSSQTCHQCGYINQDVKKLKVRKWTCPECGAVHDRDKNASDNILSKGLQIA

SEQ ID NO: 23969 - protein, 418 aa, unknown
  TnpB Polypeptide
MTELTKTLELKLVDPNAHKRRKLRETREAYQHALRDAFDAGCTTQTEANDIVVNYDLSGYAKNALKKYVPQLTTTYNAGDLHDDHPVRFTNEGVRLDHQPENAIEWYVKIPHHEDYHLWIPARANPDHREWLEAVYADDAEMGESRLFERDGMWYLHVTVTRDVEDQSEASADERTPVGVDIGEASLVTVCHRDGSGSPVRPRLWADDGKAVRRLRKTYFTAKRRLQKRGSERIADSFGDALWDQIDDVFHRVTGEVVVYAESVENPVLVLEDLTYIRENMDYGEYMNRRLHGWGFAKLYAQIRYKAAEKGIPVETVNPRNTSKACHACGEHGSRPRQATFSCSNDDCWVGEYQADVNGAINIADRYRSGESHRRSDRSSRQKAGDDGSATDGASLTGSQDSHADAEPQQTTRGTYAS

SEQ ID NO: 23970 - protein, 406 aa, unknown
  TnpB Polypeptide
MVVKRLQAFKFELRPNRAQRQQMRCFAGSCRFVYNKGLALQKARFDAGEKKLNYAELCKQLTQWRSDTETSWLKDAPTHPLQQALKDLERAYINFFAKRADLPRFKKKGRHESFRYPDPKQIKLDSMNSRLFLPKLGWLRYRNSRPVLGTVKNVTVRLSCGKWFVSIQTEREVEQPLPRGDAVGIDLGVVRFATLSDGTFYAPLNSFKRHQTRLRKAQQAMSRKQKFSHNWKKAKERIQRIHARIGNARRDYLHKTSTAISQSHAMVCLEDLQVRNMSKSAAGSTEAPGTHVRAKAGLNRSILDQGWFEFRRQLEYKLSWTGGSLILVPPQNTSRRCPQCDHVSGENRRTQERFHCMACGFEENADRVGAINILRAGHARCACEVSDADRQQQEPPEAFQEHVRAA

SEQ ID NO: 23971 - protein, 287 aa, unknown
  TnpB Polypeptide
MIILEFKAKGKPCQYSAIDEAIRTVKFIRNSCLRYWMDNKGVSKFDLNKYSAVLAKKFPFANELNSTARQSSAERAWSSVVRFFDNCKKKVPGKKGFPRFQKHCCSVEYKQSGWKLSPDKKTITFIDKKGIDLRSRYANGKLKLKGTWDLWRFDKKQIKRVRIVKRADGYYVQFCVSVDVVEELEPSKSTIGLDVGLKEFYTDSNGNSEPNPRFYRTGEKRLKFYQRRVSRKKKGSSNRKKAINKLGRQHLRISRQRVGEACAKRIEHAKRLARCVIRSRSVGESRI

SEQ ID NO: 23972 - protein, 327 aa, unknown
  TnpB Polypeptide
MKHIAKVRKRRADWQIVGSQCVQGIIEKLDLTYQAFFKWVKNRTGRKYGTPKFRKSAGAGSVTFTQAGWAYLGGNKIRFGKYQYKFIKSREIEGAIKTVNLKRDSMGKLWVVFSCIKEEFIPQTAGSTNTAGFDFGLKTFLICSDGTTIDSPQFFKRSLAEVARCNRELATKKKGSKNRKKAKHRLSKSYERIANRRRDWFFKLAHALCDRFDRMYFETLNLCGMKRLWGRKVSDLAFDSFLNILKWVAMKRGKHVGQIDQWFATTKTCSQCGHVQDMPLDVRVFECSGCHCSVDRDLNAASNIKALGHQRDGLGDVSHNFGCAVPV

SEQ ID NO: 23973 - protein, 395 aa, unknown
  TnpB Polypeptide
MARCRTFRYQLQPTSRQRQALEALLGRQCELYNAALEERRGAWKWNARGVRYVDQCRTLTELRLVRPELLQNGVAVCRGTLRRLDRAFLAFFRRCRAGETPGFPRFRPVSRFDSVQWEDRSGWKLDEAQHRLRLLGIGHVRCKLHRPLKGVPKAITVKREGRRFSVSIRCIDVPADPLPASGRSVGIDLGVANLLATSEGDMVFSERFGRAGAARLAAAQRDLARKQRGSARRRRAVERVAAQHRAIRNRRQNLAHSVSRRLVDRYDLIVHEDLRVCSMVRRPSPLPDGEGGYLPNGAGAKGGLNRSIHDAGWAELLTMIAYKAESAGRTVIAVPPHHTSTTCPECGHVDRGNRRSQAEFHCLACDHRDHADVNAARNILRAGRARQASVCGGSR

SEQ ID NO: 23974 - protein, 431 aa, unknown
  TnpB Polypeptide
MLRRVERHIITKSNKNYEAIKEICHKSKNLYNYANYILRQSFFETRKLPNEYDLIKILTAQNQDDYRSLPAQTAQQTIKLLFKNWKSFFKAVKAYQQDKSKFKARPRIPKFKPRAEKGFLATIFTDQQIKIQNDKIYLPKLSNLKPITTKVSSIKQVRLIPDTACFIVEIVYEKDVRQIETTKGSVAAIDLGLNGFVTFLDDQGNQPFIINGKGAKSYNQLYNKRKANLQSQLPLNVYSSNELRRLSFRRNMFMQNFLHQCSSLIIKALIERKIETLIIGLNEDWKQNINLGKITNQNFVSIPHKELVNQLIYKCEEIGISVILTEESYTSKIDHFIGEEMRHHDKYAGKRIHRGLFRSSLGFVIQGDVNGALGIMRKVFPKKAFALAELIRNRGVAFTPVIVNPISLSAVFRERKASNNRIGISAIKKVC

SEQ ID NO: 23975 - protein, 525 aa, unknown
  TnpB Polypeptide
VTAQDEAVLRAVGTHLGSLAGRDLAARIREGRLDGKGKAASRATRKRALTAASSSRWAGAITRTSEDQWGLAERNLRANKASLKIRIRRIETRLPVPSGGKSGRVRGYATPAERHAKMIRLHALKARLARAERQLAVGTVSVVRGGRALLRKRANLTAAGLTSARWRAEWESARLFLTADGEKDKPWGNETIRWHPDEGWLEVKLPAPLSHLANRPHGRYRLACPARFTYRGDEVAAQATSGAVRYDITRDPVRDRWYIDASWKTSPAPAATLDELRASPVVAVDVNAGHLAVAVLTADGNVVRSPVTIPLDLTGAPTATRDGRLRAAISTLLATAKEHGARAVVVEDLDFAQARSQGREQHGNRPSRGRRGRGFRRAIAGIPTARFRDRLVQMAANVGLSVIVVDPAYTSRWGAEHWLGPLREHHPEATGHHAAALVTGRRGLGHRARRRATGNHTAPAEAARPAQARPRTTTRCTPAHKGSPPPHETPGSHQAPRPAGLTGSRQATRRPTTVRDRRPARPMSC

SEQ ID NO: 23976 - protein, 422 aa, unknown
  TnpB Polypeptide
MSNYGCQQHLINTTPNVTAVLEFLCGESAKLANCGTYYARQLYLKTGKIPSKFDLHRLFKSNSHFQAMYSHVAQQCLTTVAESFKSYIGLLKGIKKGTVDQRPKLPGYRKGGLALVTYPKADVKYKDGFLRFPLGGKVKTWFGLDAFHLPMPSNLKFSDIKEFRIVPRNKYFYIEYVYKQSDVVSPNLDLSKVLGIDHGVNNWLTCVSNVGTSFIVDGKHLKSMNQWFNKRVSTIKEGKPQGFWNEKLAHLTEKRNRQVRDAVNKAARLVINHCLDNRIGTIVFGWNKGHKDGADMGKKNNQKFVQIPTARLKDRIAQLCEQYGIQFVETEESYTSKASFLDNDVLPKYGEKPEQWQCSGMRVKRGLFRTASNFFLNADANGAANILRKVAIKLGLDLSGISRVSLIAPLKVRLWTLQESHG

SEQ ID NO: 23977 - protein, 266 aa, Streptomyces sp.
MGERTVSIWTVTGRMKHIAFTGSPVHLAVLEAYRKGESDLLYRDGRWYLIATCEVAEAELDAHPASFVGVDLGIVNIATTSTGARHSGRRLNRRREADRTLRAKLQRKGTKSAKRRAKKHAGKEARRARDINHKISKHIVAEAQRTGRGIALEDLGGIRERARLRKPQRVTLHSWSFHQLGAFIAYKAKRAGVPLVHVDPAYTSQECSQCHHIDRRNRPSQARFACQVCGFVEHADPNSSHNIAARGWWTWVRGAESQAPALTLIA

SEQ ID NO: 23978 - protein, 528 aa, Natronolimnobius sp.
  misc_feature (35)..(35): Xaa can be any naturally occurring amino acid
  misc_feature (326)..(326): Xaa can be any naturally occurring amino acid
  misc_feature (403)..(403): Xaa can be any naturally occurring amino acid
LKTHPKYKGLHSQSSQRVLEELAEAFNSWYSSDDXKYKGLHSQSSQRVLEELAEAFNSWYSSDDDRDNPPGYRKENYYDDEGRRVHEEHPRSTVTWKQNGIRHDTKNNRVRLSKGANHKEHPRATWKQNGIRHDTKNNRVRLSKGANHKEHPRAWEYILVEYETRPGVEVENLQQIRAVYDQSKERWELHLVCKGEIETPDAPGNETAGIDLGKERWELHLVCKGEIETPDAPGNETAGIDLGISNFAAVAYSTEDADLYPGNRLKQDGYYFPKEIANCDDSGGDRATRLHHKWSERRTHFFHSLAKHIVERCVEKGVGRINVGDXRRTHFFHSLAKHIVERCVEKGVGRINVGDLEGVRDDENGESKNWGTDGNLDLHGWAFDRFTSILEYKAKVEGIEVVXGNLDLHGWAFDRFTSILEYKAKVEGIEVVEVSERDTSKTCCVCGREDDSQRVERGLYVCETCEAAFNADVNGAENIRLDSNASNSESAPSLGEDRSTGWVAQPGVYLHDLSRGFQPRTAVVDSKP

SEQ ID NO: 23979 - protein, 501 aa, Natrinema sp.
LFEPPLSSATQDVVQLLVVVLIHPDVFAGAQSAHEAVVDAAEQLLFLVRDADNRYAADRRRLSRILHFHSGRLLLINLAYNRLSVANQVTRTYVASIHNHQQVCEDLDSLGFAASKLWNVARWTCDRIWDETGTIPDHGALKAYLKNNEHYADLNAQSSQAILEELAEAFDSWYTLRGNGDKKANPPGYRKHGDDHPRSTVTFKEDGFKHDPDHDRIRLSKGRNLKDGRQDFILCEYAVDPDVTVQNVQQVRAVWTGTDWELHIVCNVERDDPDPPGDRVAGIDLGICNFAAVAVGDDALLYPGGALKEDDYYFQKQRAKCDDSSSRKAQRLDRKRGERRTHFFHAVSKDIVAECAARNVGTIVVGDLTGIRENTDWGDHGNLDLHGWAFDNFTQMLEYKAAEYGISVERVDERGTSKSCGSCGTIDDSQRVERGLYVCDECGLVANADVNGAENIRQKVLPSLACDGGDRDNGWMAQPAVRLFDTSTGRIAPQEQVTCEP

SEQ ID NO: 23980 - protein, 390 aa, unknown
  TnpB Polypeptide
LLKSFKYKLLPNQEQTILLNKHFGCVRFIYNHYLNERKKEYEINKQSLNYLDNAKDLTFLKKKEEFFFLKEVLTASLQHSLKHLEGAYNGFFKGRTSFPKFKSKHDKNSFHIPQYISVEKSYLNIPKFKEGIKMIQDRKFNGEIRQCTISKTPTNEYFVSILVETTHKKLEKTGLFVGIDLGIKDFVITSDGFKYKNNRYTKKYSTKLKVNQQHLSRKIKGSNRYNKQRLKVAKIYKKITNSRKDNLHKVSTDLIKNYDTIFLEDLNIKGMIKNHKLSKHIQDCSWGMFINFLEYKATWNDKQVIKIDRFFPSSKTCSKCGYINQNLKLDLREWTCPSCKTKHDRDFNAATNIKQEGFKIISSGTDDYRHGDQIRPSIDGTIYEMSKKLS

SEQ ID NO: 23981 - protein, 608 aa, Deinococcus sp.
LSKAKVVKPAKVVRSTPLRVNQAWTADGLPLDRVLVEQRCHWLLDLTAEVGTLTAASWWTPGHFDQLATGESPDGRPLPKCGHAAARRMGWHTVVPDEVYLPDRFKRGVRVRLMALWQARLGDVDLFPVMREEVDLAGEFDAGQVRATSAGQWATNQQLDRLAQSLTRFRKTAEHDPQHLTEVFLPPVIRRPVLPLSCMDDQFVEMTVDEDRLELKLKLPVVARPVRREDWVWHRICLSVPASRRNLGEWSLPDLRRDEEKILFSAVQTSQGAMWKQPTAALGVDWSPSALVVAAVVKTHAGRLLTTGEATGFDEAGRISKLLRLQREEEFTRRKARRIGALLAGQACEVLSDKHQTLSAHQDALSRKRMYLGRDLAWHAANHLVTLAGQCGAGLIAFEDLRDFDPSGRGAFQNNRSSQSVRGQVYAATEQLAARQGIEVVSVPPRGTSAQCAGCDAPLERPEGYHSAHCPACGLSGGRDVMAAVNIAKRAVLGSAEIKRPKGRAKRIRSALHDRVNVLNTKPVTPQLTAPLPPTRSAELPPRTQRIPKGGLSREMRLAWRKVEQERREKKIFPARLSSWGMVERTRLRVVSSHVNPVLPLMVVLPDG

SEQ ID NO: 23982 - protein, 439 aa, Deinococcus sp.
MTFTAKLKLNHTRAQKAALDAATLAYRDALNYTSVRAFEMNKCSGAAKIQKEVYAHLREVIGLPSQMACSAPRQVAASYKGLWTKCKDHHTRQHFIQSVKPGYQPRSFRGFERPAKFVSRTLEYQYGKDYSWKKDGRVSVLTLEGRQVMTYAGYSKHLDLIQSGCEVGAAKLYYQKSKKQYFLLVSVEVDLPDPQPQDHTNVVGVDVGQRFHAVVTDTRNRTQFFSGKHTNQIKDGFARIKSSLQRKGTRSATRRLLALSGRERRFIADRNHSLASQILKTYPKAVIGLENLKDIRTRTERRTNPKASKQAKRNRRRRSQWSFAELQTVVAYKASLVGSMAIQVDAQYTSQHCVKCGHTSKANRPAAGLMFMCEVCGYQVHSDLLGARNITLRTLAVRQDWTATGALSVRPDVSSVEAKAERLHRYSELRWSSDTSPRL

SEQ ID NO: 23983 - protein, 293 aa, unknown
  TnpB Polypeptide
VSARVDLAYLGFFRRLKDKSGKAGFPRFRSVDRYDSFTFPQLGFKLSKNKLWLSKIGDIKINLHRPIEGKVKTLNIKREGNHWFAIFACEIEITPEVKTTRKAVGIDVGCIDFATLSDGNTVANPHFLKQSQIKLSSIQSKCSKLKNRPKNDKQKIKTKRQLVKLHFKVKNQRRDFLHKLSRKLVTDYSHICVEDIKPSQMLNDNWRALNRSILDSGWTTFRTMLHSKAVEAGCEVVDVNPAYTSQICSGCGDKVKKKLSERTHKCKVCGLELSRDLNAARNILRVGMDSFPS

SEQ ID NO: 23984 - protein, 293 aa, unknown; identical to SEQ ID NO: 23983
  TnpB Polypeptide

SEQ ID NO: 23985 - protein, 461 aa, unknown
  TnpB Polypeptide
MPRKRIVRNPRRAAIAKKRKKMNAVRSAKLKDMRERVAKYSNFIGLPVEKNKIPINGKLVNTIDSNSFFNIYETRYSGQIMEGIIKTEKPSIVKKSVRIPLNLTLNQQNIILQWMKAAECMYNETLNYIKANRFVGIKSTINARKLRSIMKNEKDIFAKKYNTPVHILDGAIKRLVQGLKSAFSNLKNGNIRHFNIRYLKHNKPIKVISIEKMYFKENTFYPSYMGEDVDSGEIDFKTHITSDCTLQYNKKGNRFILYTTKNCDVKIYDTADTISIDPGIRTFLSCISDFNIYEIGKDKEIPEKIKYHLETMDNIKKKSIPQKIKKRYEISHDKKIHGLVTELHWKSIDFLVKRFKTICIGKWSTKNILSNQRSVLSPMTKRIASRLRFYEFLTKLKYKCDAFGVNLMIVDESFTSRVCSHCSWEHKKLGGEKVFKCENCTLLIDRDLNGARNIYMRALNQ

SEQ ID NO: 23986 - protein, 390 aa, unknown
  TnpB Polypeptide
MILAHKIQLDPTNKQSTYFAKACGVARFAYNWALDRWKKQYEAGEKVTEAKLRKELNAIKRTEYPWMMEVTKCSPQLAIMDLGKAYQNFFAKRAEFPKFKKKGQKDSFGISNDQFSIKEKTIRIPNLGYVRMTEKLRFNGKIMGAVISRRADRWFVSVQVEIPESIPIHNSESQAVGVDLGVKELATLSDGTKISGAKPHKALLSRLRRVNKSLSRKQGAKKGEKKSKNFRKAKMKLSKLHARIANIRNDETHKLTTMLAEKYGTIGIEDLNVSGMSKNHRLARAVLDMSFFEFRRQIEYKSKMKGGHVVIADRFYPSSKTCSNCGNKYAELNLSMRDWTCPNCTISHDRDINAAINLKNYAVSYTVSACGELVETVTSMKRELNITNQV

SEQ ID NO: 23987 - protein, 194 aa, Okeania sp.
VHQGQALRDLERAFKNFFTVPGRGFPKFKKKGKKDSLYLEGSIKILKGNYIKLPRIGIVKTYCILPSVPVKNVRISKRAGDWYISFKYDECQPRPLTKKRAIIGVDVGINALATCSDGTTYPNVKAYKQAKKRLTRYQRRVQKKEPGSKNRAKAVKKLAKTHKKIADIRADALHELTTWASFKPQHHSDRSMTM

SEQ ID NO: 23988 - protein, 548 aa, Streptomyces sp.
LARTDPRGRARAGDPGPSRGDGPVRRAAATAGRRRASERRLRVRAVRPRHRARRERPGTRREPAQGRLRPGPHGPAPAPVHREGREGGPVRLQGTTDVRGGPGRGRRLASLRPRGHRLLRVLPAALGLPPRSRRLPPLRQARRRHGVRLLHLRGRAGARRHGLGRRRPHEGTSGARGGPRAQRARPGPVSDGRTGGVRGHGAVLGDGVHLRLPRRTAPPVRPAPRPRHGELQHREDRRGPPRRPCLRRALGAQGGLPRPGPAVRARPPRLTSGDGAAPPSCRRQYRQAKDALSRTLPSAPSTVTVVKDAAGRYFASFVVQTGPSEVLPPATTELGIDLGLGHFAVLSDGTKIDSPRFLRRAEKRLKKAQRNLCRKQKGSKNRDKARIRVARAHARVADARREFHHQLSTKLIRDNQAVAVEDLAVKGLARTQLAKSVHDAGWSAFVNMLEYKAARYGRTLVKIDRFEPTSQVCSQCGLKDGPKPLHVRVWTCKACGAVLDRDINAAVNVVQAAGLAVAARRAQVRPGPVPAPRSGAGTHPTPQPSTAR

SEQ ID NO: 23989 - protein, 485 aa, Streptomyces sp.
MNAAQGRSDVQFRAAFVQARASTRTHLSTSVALPVGCDLSPRAAMKHPYGDRHAAPLQLPGLPGRPAGPRAGQAFGCARVVWNDCLRDRKEAHAAGLPYVKSAELSRLRITQAKHTAERAWLADVSAVVLQQSLRDLDTAYKNFFDSILGKRQGRKVGPPRYKSKKDTRQSIRLNTNAFSLPGDGTVYVAKVGNLKVKWSRRLPAAPTSLTVTRDSCGRHFLSFVVDTEPNILPEVEAETGIDLGLSALAVLSDGRKIDSPRFLRRAEKKLKRLQQDLSRKAKGSKNRAKARIKVARQHAKVANRRRDFHHKASTQIIRDNQAVYVEDLAVSGLGRTRLAKSVYDAGWSAFVGMLEYKAVKHGRTFAKVDRAFPSSQVCSACGFRDGPKPLHVRQWTCGECGTVHDRDHNAARNVLFEGRRIVAAGRAETLNACGAPVRRAHVPAQRCEAGSHRKGQSTQAGIPGLQSREHVKIGSCQTQGASAK

SEQ ID NO: 23990 - protein, 560 aa, Bacillus sp.
MLVKQNEIPFTVVGEFFSETIPEYSETWSLGNETPLETEMRLFSACVRWAFNRLQEGVSREAIKKQGQALFGLNSRYVDDARLQAQGILESQKTLLARRIEETETKLSRARRKLSWAEKKLRRAEKKGVAVEERRRLAIAVQGRRYRVSALEKKLRELKMHEQNGTVPKVIFGGRKLWRKVSRKKVPREAWRAARRNVLYARGDRTKGGNPNLKITDDGMDFRLSVTLSHRSEQVGTDRLDRPKMTRAPRVEGRLWVSGKHRELLRRVLTEKIPYTVELKRGPDGRYRAHITFSLSAPMPTTETLRGFLGIDTNPDGLAVANVGRDGNPEPWPEELAVPFPKNLGKYDGEFQILLKPHGFFYLRVPELAHARGNRRTYLIGTLGRVIVDMAKALGKPIALENLAFAQGRMDTDRTFNRMASNFPHEKVLEAIFRRAQKEGVLVRFVRPEFTSTIGWYKYRKRFGVTVHEAAALVIGRRALGFREQIPQSLRRAIVERLKGSSAPVEGTRMTRKAGSGHARKVDLLKLEEQLERHNGLALWQQTSFASVWRTLRRLAFAFR

SEQ ID NO: 23991 - protein, 428 aa, unknown
  TnpB Polypeptide
MKQSTHVAKTKDSTTRTFEYKIKPNKKFVAACEQALNASRFVYNCALEQRIRVYEASGKSIGFYEQSRQLTEARQEIPELKACLRTIQSDALERLDAAFDAFFRRLKNGEKPGFPRFKGRERYDTFSQKIEAQRACPLKGDKLTVPGVGFCRVRLSRPIEGRCKQLRITRRADGWYALLVCELAKPDPLPQTGQTVGVDVGLTHFATLSTGEKIENPRQLKQASGALTKYQRRLSKKKKGSKNRVKARQKVALRHLKVQRARKDFHHKTAADLVKRFDRIAVEDLNVKGLVKNHHLAQAISDVAWSQFFGILQSKAAEAGRQFERVNPRYTSQDCSGCGQRQKMPLAIRTYKCGQCGLIICRDVNAAHNILGASGPDENKSPWRRDSVSKKRERDGRNERRPSGAKRVARPVCDANVASIAVRERRAH

SEQ ID NO: 23992 - protein, 429 aa, unknown
  TnpB Polypeptide
MCDDSHIMKIFCSFKFELLANEVQRSALSRNAGCRRFVFNKALELQNERKAQGRKLLSYCEMASELVRWKKADETSFLKEAMSQPLQQALRDLDRAVRDSFRPKSDPAHKQWPKFKAKDIGDGFRIPQFKPDDIDDANGRVKLPKIGWIRYRRTRPIAYKNADGSLSSGTVKQIHFNKDCGRWFVVFTTEFDVVRPEMKALDVGIDIGVVHAVATSCGRFYDLDTDTLKDIEKRIAKLQRKLSLNRSSRKKLEEKGLAEPFDKTKPSRKRRRLKERIQRLFRRMRGIRQDFYQKTARALAQEYGCVYAEDLKTKNMTKSAKGTAENPGKNVRQKSGLNRAILRTGFYGLSQALDWQLTKAGGTLEKVPPAYTSCTCPICGCRDKRNRPKQAVFHCTACGHNENADIVGAKNVLKKGYEKNFIMKLLQHM

SEQ ID NO: 23993 - protein, 405 aa, unknown
  TnpB Polypeptide
MIVYEFKLKGKKQQYQAVDDAIRTSQFIRNKCLRFWMDNKGINKYDLSAYTAVLAKQFPFANELNSTARQASSERCWSGINRFFENCKKKIAGKKGFPRFKKNQRSVEYKKSGWKLSSDRKRITFTDRKGIGSVKLIGTYDLHFYQIEQIQRVRLVKRVDGYYCQFCISAEVKQDLQPTGKAIGLDVGLNHFYTDSQGEKVDNPRFLRKSEKKLKRAQRRVSKKVKGSNNREKAIDRLGRTHLKVSRQRKDFAVKLARCVVMSNDIVAVEDLPVRNMVKNHHLAKSISDAAWSQFREWLKYFALKFGKIAIAVPPHFTSQNCSGCGQVVKKSLSIRTHVCKCGVVLDRDENAAINILIKALRLLGYISNTVGQTEINACGEMTLYLRLETVLKQDHSLKQESPSL

SEQ ID NO: 23994 - protein, 431 aa, unknown
  TnpB Polypeptide
MAKNNKSMGAQQVRLSPDEETKALLEYLCQQSGKLYNTGVYFARQILFKTGRILTGKFDLVYEPSVAKSLLAQSMPSIPMQQTLMSVTETFRSFKQLRDLYIKGQLHFKPKPPNYLKGSKLFKVAYPNSSGQKPKLINNQLRFALGLTVKRWFGVAEFFLQMPTNIDYSKVKEFTILPKNGAFYLEMSYEVEKQKHELDINQALSIDLGTTDNLAACVDTLGNSMLIDARALKAMNQLWNKKVSTRKEGKPESYWDNWLDRVTRKRNHQMRDGINKAVKLIINHCLTYQIGTLVVGWNEGFKANANMGRFHNQKFVQMPLGKLKDRLEQLCDLHGIRFEETEEAYTSKASYLDGDSLPKYGEKPEGWKASGRRIKRGLYQSSQGFLINADLNGAANILKKVARNLSLDLALLGRRCLTTVARIRLWELPKV

SEQ ID NO: 23995 - protein, 436 aa, unknown
  TnpB Polypeptide
MLVYSAKLKGTEAQYRILDEMLRTGLFVRNKVLRYWMDNPGVNGMDLNKYCKVLADNPEFPWVKKLNSMARQAMAERAWIGISKFFDNCKKKISGQKGYPKFKQLQTRASIEYKTCGWKLSDDKRYITFTDKFGAGTFKLWGTRDLHFYQISQIKRVRIVRRSDGYYVQFCINYERKETHELTGRMLGLDVGLNYFYTDSEGNQIENPRFLRKGEKSLKRAQRQLSRKNIGSKNRSKAKNRLGRKHLKVERQRKDFVIKLARCVIQSSDLVAIEDLQVRNMVKNHRLAKSISDASWSMFRQWLEYFGQVFGVPVVAVPPNYTSQDCSNCGVVVKKTLSTRTHQCPNCGHIQDRDWNAAINILNIALSILSKMLKNTVGQTEINAFGENDLCLVGETQLSKPTRRKRKPKEQSLESPAIFGTPTLRWEDVKCQVSID

SEQ ID NO: 23996 - protein, 463 aa, Mycobacterium sp.
MAKFEIPEGFSVQAFRFTLDLTEDQARSLARHFGARRKAYNWAVAALKADIGAWRETGVETAKPSLAVLRKRWNTAKDAVCVNAATGDVWWPECSKEAYADGIGGAVDAYWNWQASRAGTRAGKRVGFPRLKKKGRDADRVSFSTGAMRVEPDRRHLTLPVIGTVRTHENTRRVERLIAQGRARVLAISVRRNGTRIDASVRVLVARPQQPNVALPKSRVGVDVGVRRLATVASADGAVLERVPNPGPLDAALKELRHVSRARSRCVKGSRQYRERTTEMSRLHRRVNDVRVHHLHVLTTRLAKTHGRIVVEGLDAAGMLRQKGLPGARARRRGLSDAALGTPRRHLSYKTAWYGSQLVVADRWFPSSKTCHACGHVQDIGWAEHWTCDRAGGGCGTTHQRDDCAAINLARYEEPDSVVGPVGAAVKRGADRKTGPRPAGGREARKGPGHPAGKQPRDGVRVA

SEQ ID NO: 23997 - protein, 440 aa, Methanosarcinales sp.
LFKIFSYIIFKNLAPIFRAKNDMIVSVKHRTSGGFGFHKLLIYTTSTNVSIVLRRTFKYRLYPTKDQVQILTHCLTTCRYLYNEMLEDRKNAYDRCGVGLNYNEQAGQLKYLNLGIYSQVAQDVLRRLDKAFQNFFRRVKNGENKAGYPRFQGNNRYDSFTYPQTGFKTKDGKLHLSKIGAIRIFQHREIVGKVKTCTIKQEGNQWYVCFSVELLDSEKKEINTSVGVDVGITTLVTLSDGTEIENPKTLDKYDSKIRKAHRNLSQKKKGSSNRNKQKIVLTGIYRKVRNARKDYLHKVSRILADAYDRIIFEDLQIKNMVKNHHLARSIHDASWSMLISLTTYKAEEAGGTVELVNPRNTSKQCSVCGCIQSMPLSQRTYRCPDCGAVVGRDHNAAINILNKHVPADCGELTPVEKGCMSNRYESGSPATCSGEEVTSP

SEQ ID NO: 23998 - protein, 484 aa, unknown
  TnpB Polypeptide
MEKENVIAKTQRIKINSLEFPTQDWDEFGKIFEILQKETILASNKIISACNVYNALGKENGGKWLFDTYGTDKIRSATYQAAKRSCKFYYSGSFGMISESIYKNYFSGKNSWKKKIDAGEGNPPMTYTDTIPLFVRGDQTKVECLNYERGFYSFQSSFLSPIAKKEGFDYVTYEYDENNKKKKIKHHIDVNETRLKFRFTVKKNSRLEELISSFMKENSEYKFGDSQLLRKKNKKTKRWDYWFMLAYSCPKQDPGKKLDENRVMGVDVGVVVPAYASINDMTYKKIPIGDNTIHKQKILDEKLRAEKQSAITYNLRDGHGRKTKLDGFDGEIYSFEYNNPVRGDVDVAEVIMDKNGNFTIKEKLFGHSAASSREVWGVKTNQFTPVSVISYSPNYFDEQNGIGNKHLFFFLNGCVNPEQPNGFFVEYLKNELVPHRKVFEALGAKCSVTDVDDQLSGVGFSLTQRNELVVKVKGATERIMKIKF

SEQ ID NO: 23999 - protein, 528 aa, unknown
  TnpB Polypeptide
MDLNGVLLESAPILSQLVTEVRGISAYATFIARNDTELEDGLARATAVQAATAGRQAGIVMPEFLAADKKDENGELLKDEHGNPIKSKTGRSRKEWLVRHNAVTAFRSWQERVAAVNGESSKHISQGWKRTMDATPPSYGEDFINLGITDQQYAVIENDPFVDGEIVLKMVIQGVRYRLIFPFNNTRFPEGKVTLPLVKIENNQPVFIFTVATDNPVIQFSGDYVIGVDVGINNYATIVVRNTKTGEITYKTTLSQRVHSLWNSVRASERQVRALRKKAKPILYDRPARRAALEEAQLHREAASRKKRELAILAAQEIAYLSHFFDNAVVAVEDLSWIKNTMQNGRWNRGAFVQWLTHYVAQNGGWVVAVNAANTSQVCHECGSEVTHPEHKVSLCPKCGAMDRDVNAAANIAARAVPKVEKAREKRGNNSKLQEQAPLKTPVARRSLKYPGQDRTKNVPTPKRKKKGVKPPISPARVQNISTPVSTTPVFTSMTSVLADCLTYGVAGTPKAAIKQGTIANYRLCSPI

SEQ ID NO: 24000 - protein, 505 aa, unknown
  TnpB Polypeptide
MDLNGVLLDTPHIMGQLAAEVRGISAYATFIVRNDTKLPGELARAGAIQPTTAGRRAGVKMPNFLVTGKSGKSRKEMLIQHRVVTEYRSWEERIKAANGESSKHISQGWKRTVNTSPPSYGEDTVNLGAVDKQYAAIENNPFADGEIVLKMVIKGNWHRLIFPFDNNRFPVGKVTLPVIKIQDSQPVFIFSVATDNPVVQFSGKYVIGVDVGINNYATVVVRNTKTGQIVYESTLSQRVHSLWNSVRASEKQVRQLREKAESLSLYDRQGKMAALDEAQLHREAASRKKRELAILAAQEIAYLSHFWDNAVVAVEDLGWVANTMQNGRWNRGTFVQWLTHYVSQNGGWVLTVNAANTSQVCHECGSKVAHPEHEVSDCPKHGKMDRDVNAAANIAARAVPKVKTARNTRAKSKKLQKKTSLKTPTAREALKHPGGSRNKNCPTPKRKKRRSSKGVNLPLRPARVRAICVDTKVLADWGTYGASETNTAALKQGNTAYECRLCNLN

SEQ ID NO: 24001 - protein, 531 aa, unknown
  TnpB Polypeptide
MAKNQTYKAFSVRPSHVMDLNGVLLDSALILSQLAAEVRNLSAYATFVARNDTELGTRLAQVGAVQPAEAGRRAGVNIPDVLVVKGEVRKNKAGKLVEEKVSGKSRKERLFRHRVVTEYRAWEERIKAANDESAKYISQGWKRTVNASPPSYGGDTINLGAVDSRYAVIENNPFVDGEIVLKMVILGKWYRLIFKFDNARFTRGKVTLPLIKLEDDQPVFIFSVVTDNPVIQFSGDYVIGVDVGINNYATVAVINSITGHIVYETTLSQRIHSLWNSIRASERQVKELREKAEPILYDRQAKMAALDEAELHREAASRKKRELAHIAAQEIAYLSHFWDNAVVAVEDLGWISNTMQNGRWNRGELVKWLSHYVGQNGGWVVSVNAAKTSQVCHKCGSKVTHPKHEVSACKEHGEMDRDVNAAANIASRAVKKVETARNTRTNNRKLQPQEPLKTPVARASLKYPGQDRTKNTPTPKRKKRVVREVNLLHSPARVNPTSVLADCLTPGDAGTSQAAIKQGTITNNYRLCSPI

SEQ ID NO: 24002 - protein, 91 aa, Clostridioides sp.
MMKNKHLPKAISSQKFFEFRTKLTAKCKQNNIELRVADRWYPSSKTCSQCGEVNKGLKLKDRVYKCECGLSIDRDLNASINLKNAKKYKIA

SEQ ID NO: 24003 - protein, 295 aa, Oligoflexia sp.
MSMLLRGYKYRLKPTTRQKRMLQRWMGSCRFVYNCGLIHRSTNYQQWQKSVSYFDQQNALPEAKSDPELNWLKEVPSQSLQMALRNLDTAFKNFFKGTGRYPQAKRKGVHDSISFPQGSVLKIQKKSKKISKISLPKLGEVEFGHHRKFAGKVKSATVSFSQGDGWQMSVLVEELLLQHENTSLETVGIDLGVAKTIATSGENEDHCLPTDQIKRIENRIATLQKRKAKVEKFSDRWKHFGRIVSKLHSRIARIRKDFLHKTSCQLSKNHGAIVMEDLRVKNMSKSASGTKEWPQ

SEQ ID NO: 24004 - protein, 361 aa, unknown
  TnpB Polypeptide
MPVVVRLTAKFKVEGQVDNEIFKMYREIVNQLVDYAVSKGIVSFKRLRSEKYYEMRAAYPSLPSHYVYTACQHACMMCNSYRRLRGRAKAGRPRLRKDAVLLDAQLFRLDMDRWILSLATPGGRVKLRVYHSDYHGKFRGWKQGQAWLVKKGAETYLHVSFSRAVRLRACRDVLGVDVNENNVTVASGKLFVRFETRERAIRTAYYLKRRRIQSRIRCRRARAKVFAKYRGRELNRVMDVYHKVAKSIVALALETGSAIAMENLKHIRRGVRFSRALNGRLNRWSFRKLQQTIEYKALEEGVPVVYVDPRGTSKKCPRCGSRMLRDNRRMLKCNCGLRMDRDLVGSWNIRLKGLKALGIGV

SEQ ID NO: 24005 - protein, 377 aa, Petrotoga sp.
MLKTYKFRIYPTNEQIEKLNQHFGHNRFVFNLFLEFTNNAYKNTKTYTNYYVWAKVLTVLKKTEKYQWLNDVNSQSLQQSIKDLEIGFERFFKKLSKHPKFKKKSSRQSFRVPQHIQLYENEGNDKYEILFVPKFKEGIKVRVHRRIDPNAKIKNCTFIKTPTGKYFVSITFQVEGSYPERDIDYENSIGMDMGLKDLVVLSDGTKVEAPKVFRKYEKKLKHAQKKLSNKVQGSKNWEKAKLEVARIHEKIKNIREDFLHKLTKEISENQADVFVVETLNIRGMLKNRKLSKSISDASWYQFKTFLKYKVERLGKKIIEIGMFEPSSKTCSVCGYKNEDLELSDREWVCPECGTVHDRDINAAINIRQFGIEQLVTV

SEQ ID NO: 24006 - protein, 453 aa, Emiliania sp.
MKVTHVTRQLLADTRGIDVDDPNVPGMVYYMKVKPCEFIYAIATLSSRLNALTGGGYALYPIRSSMVPKYLHLDELILSDIAPGIARSSANAAAGKKRTADGSELSNKDKLTARRMIVFKHVMTPKAFNKWKNQLDWSVDTDGYGCSLHTKKKVHERPPSESPSIHNGLFKIDEFKDKFSGRYSIDDISAVGIDPGKREIVSAVDSTDYTSKYTFRKTHQDHLTGTVRHRKAMERVKSQTIFETEQDLATTSKKVVPVERFMNYATKLATSISSSSGFYEQGVYRKRKWKRHLRLQKAYSSIVNNLKKVSCYPHKPIVLAYGSWGMSTSGLPFRGLPPTIGIGMIRYLARFFPVVITPEYYTSTICPCCESNVTRCTHVEQQRASPFFENGKLKEIRGLKHCPGCNTYFNRDNMGAWNIARNFTNMYQGMAPIRVRNAAQAAEQELTNRTEVD

SEQ ID NO: 24007 - protein, 426 aa, Halorubrum sp.
MAKQVVTRTYTASIRNQPRVQDDLDSLGFAASKLWNVGRWTCSRIWDEIDHIPNHNELTTYLKTHERYDDLHSQSSQRVLQELAEAFNGWYGKRRNGDTRANPPGYRKHGDEHPRSTVTFKQKGFKLDTQYNRVRLSKGSNLKEYWSDFILCKYQTRPDVDLSTVENVQQVRTVWTGEKWELHFVCKVEVEVAEAPGEKAVGVDLGVNNFAALAYEDGHSELYPLNCLKQDDYYFSKRIARCDDSNSEQATRLNQKKSARRTHYFHTLSKHIVERCVEQGVGTIVVGDLSGIREEDDSDESKNWGKHGNLDLHSWAFDRFTDLLEYKAEMEGITVEEVSEEDTSKSCSCCGRKRDANRVERGLYVCDECGTVANADVNGAENIRQKVSPSPATDGGDRSNGWLAQPSTFLFDKETGAFVPQERATS

SEQ ID NO: 24008 - protein, 556 aa, unknown
  TnpB Polypeptide
MSEWWTKELSSLFPMPTDNDFNSFLISNFGLIKHNNNYMENFYFKDLTFNNLILNNITHIDCDDELKKININYNKNVNKINNNNNLINKIKQIKIKTLETKKNRAVNEINCITKTRKIEIHPNKKQIKILNKWFKECNKIYNCCVSLYYNDNDFFECMNVYDKIKIFDKIYGDNDKKAPYDMLSDEVRIFFSNYKSCKTNLKNGNIKHFELKSKDTSKSQSVFLPKTCVNKNGFYTSYLKNMKGFEKIDIDLKKINDSRLIFDKKNKKYYLCFPYQEKIKEKTNKIRIVSLDPGEKNFLSYFSEIGYGILGKNIRTKILPLEKQIRIYQRILSTKRNSTYERYGKSVSKYVLSKIKSKYSKKKRIFIERKIRKNGLLKNKNKIKKKIRRCYKKIKNLVKELHNKSALYLVKNYERILLPEFKTQNMISEKKYNKKYFNNLLIEKGLEECKKEIKSVTKKRRLNGRVKFVLSQLSHYRFKEHLKKKSIEYGSEVIIVTEEFTSKTCTNCGCQGTLYDKKRIKLCKCGVKIDRDINGARNILIKNINKVVKPKGFDIS

SEQ ID NO: 24009 - protein, 372 aa, Clostridioides sp.
VIAVKKAYKFRMYPNKKQQELINKTFGCCRFVYNKYLAKRIDVYKNDKETFTYKQCSSDLTNLKKELKWLKEPDKFSLQNALKDLENAYEKFFKEKAGFPKFKSKKTNRFSYKTNFTNGNIMYCGQHIKLPKLGMVKIRDKQVPKGRILNATISKEPSGRYYVSLCCTDVDIEAFENANNQIGLDLGIKEFCISSCGEFIENPKYLKKSLNKLAKLQRELSRKTIGSLNRNKARLKVARLQEHIANQRNDFLQKLSTKLIKENDIICIEDLQVKNMIRNHKLSRLISDVSWSEFIRQLEYKANWYGRKIVKVGKFFASSQICNKCGYKNEEVKNLNIREWICPSCNETHDRDINASINILKEGLRLITIQNK

SEQ ID NO: 24010 - protein, 153 aa, Clostridioides sp.
VYSLTKNLFFNRNKARLKVARLQEHIASQRNDFLQKLSTKLIKENDIICIEDLQVKNMIRNRKLSRLISDVSWSEFIRQLEYKANWHDRQIVKVGKFFASSQICNKCGYKNEEVKNLNIREWICPSCNETHDRDINASINILKRRIKTNNNSK

SEQ ID NO: 24011 - protein, 372 aa, Clostridioides sp.
VIAVKKAYKFRMYPNKKQQELINKTFGCCRFVYNKYLAKRIDVYKNDKETFTYKQCSSDLTNLKKELKWLKEPDKFSLQNALKDLENAYEKFFKEKAGFPKFKSKKTNRFSYKTNFTNGNIMYCGQHIKLPKLGMVKIRDKQVPQGRILNATISKEPSGRYYVSLCCTDVDIEAFENTNNQIGLDLGIKEFCISSCGEFIENPKYLKKSLNKLAKLQRELSRKTIGSLNRNKARLKVARLQEHIANQRKDFLQKLSTKLIKENDIICIEDLQVKNMIRNSKLSRLISDVSWSEFIRQLKYKANWHGRQIVKVGKFFASSQICNKCGYKNEEVKNLNIREWICPSCNETHDRDINASINILKEGLRLITIQNK

SEQ ID NO: 24012 - protein, 372 aa, Clostridioides sp.
VIAVKKAYKFRMYPNKKQQELINKTFGCCRFVYNKYLAKRIDVYKNDKETFTYKQCSSDLTNLKKELKWLKEPDKFSLQNALKDLENAYEKFFKEKAGFPKFKSKKTNRFSYKTNFTNGNIMYCGQHIKLPKLGMVKIRDKQVPKGRILNATISKEPSGRYYVSLCCTDVDIEAFENTNNQIGLDLGIKEFCISSCGEFIENPKYLKKSLNKLAKLQRELSRKTIGSLNRNKARLKVARLQEHIANQRNDFLQKLSTKLIKENDIICIEDLQVKNMIRNRKLSRLISDVSWSEFVRQLEYKANWHGRQIVKVGKFFASSQICNKCGYKNEEVKNLNIREWICPSCNETHDRDINASINILKEGLRLTTIQNK

SEQ ID NO: 24013 - protein, 402 aa, Escherichia sp.
VKRLQAFKFQLRPGGQQECEMRRFAGACRFVFNRVLARQNENHEAGNKYIPYGKMASWLVEWKNATETQWLKDSPSQPLQQSLKDLERAYKNFFQNRAAFPRFKKRGQNDAFRYPQGVKLDQENSRIFLPKLGWMRYRNSRQVTGVVKNVTVSQSSGKWYISIQTESEVSTPVHPSASMVGLDAGVAKLATLSDGTVFEPVNSLQKNQKKLARLQRQLSRKVKFSNNWQKQKCKIQRLHSRIANIRRDYLHKVTTTVSKNHAMIVIEDLKVSNMSKSAAGTVSQPGRNVRAKSGLNRSILDQGWYEMRRQLEYKQLWSGGQVLAVPPAYTSQRCACCGHTAKENRLSQSKFRCQVCGYTANADVNGARNILAAGHAVLACGEMVQSGPPLKQEPTEMIQATA

SEQ ID NO: 24014 - protein, 330 aa, unknown
  TnpB Polypeptide
LHHKCYQAVREQFVLSAQVAVRAISKVTDAYKLDRKAKRTFKKTGSIAYDDRILSWRLRDQTVSIWTVNGRLHIPFVCGERQLELLQMRQGESDLGLSKEMFVLSATCEVDEQKPIDVEGALGVDLGITNVAVDSDGQFHSASHINNVRHRHRRLRSKLQAKGTRSAKRKLKRLSGTESRFTKDTNHCISKKLVAKAKDTNRVIALEDLGGIRERVTVRRAQRATLHSWAFFQFRSFVTYKAKRVGVPVILVDPRNTSRTCPACGHVDKANRPSQSKFSCVVCGFAGLADHIAAINIGRRAAVNPPIVARDEVKAILKELRQSAATSHPL

SEQ ID NO: 24015 - protein, 416 aa, unknown
  TnpB Polypeptide
MVTISVKFKLELTKEQKQKILDLAKKYRDAFNEISEYAFNNRVFDHISLHKALYYKLKEKYGFQSQIAISVIREVAQHYDSVFNQLAEKFNISKRNRKKLIELFYKEIGKPIRRKKLIVKLVKRRSYDLKLNPRVCSISVIGERLKKIPYYGWNKHYEYIEKYGYGDAILYYERSNKLWYLIVSVDVPDKELKPKKVVGVDINEPSNSFVALHDSLGKSKLIEFSQQVLRLKSHYQKLRSQLQAKGTRSAKRRLLSLSGVEKRLVRNFLHVVAKKIVVENSPCVFGLEDLEGIREFRENNAKFKGEKRRLFSQWCFRELQTLIEYKAKLYGSKVVYVNPQCTSISCPVCGYTAKENRNGKEFECKNCGFKEHADIVGAKNIMLRVLKSLQNGAFVSRPDAPSPLGEVEQAPPFRAG

SEQ ID NO: 24016 - protein, 416 aa, Halogeometricum sp.
MAIEATRTYVGSIQNHRQVGDGLDLLGDSASKIWNVARWTADRIWNATGEIPDEGSLKSYMKNQSCWKDLNAQSSQKVIEELSDAFQSWFDLRHKDETANPPGYRIHGDTRPKSTVTFKADGFKHDPENNRVRLSKGSNLKEYWSDFLLCEYQTRPGINLSEVESVQNVRVVWNGDEWELHFVCKVSLETNDSADDGVAGIDLGIKNIATVAFSDNYVLYPGNSLKQDKHYFKRAEYDTEGDNGPSEKSMWARRKLAERETHFYHTLTDTIITECVERGVGTLAVSWPEDVRESDWGKTGNKKLHTWAFDRIYQYLAYKGEIRGVEVLKENEWDTSKICSRCGDNTKGNRKHRGLYVCSSCGLVGNADCNGAENMRQKITPSPHGEDRSNGCMAQPSVHLFDSKSGVFAPREQVVS

SEQ ID NO: 24017 - protein, 616 aa, unknown
  TnpB Polypeptide
VLHTFETRLAVDQETAALLAANAAHWSWGLRKAWSLLYRQHLPKAQVYASLTKCDFTSEQVGSLLITVEMRHAGLVELKRYEQGQLELAIAKRERAVRDKQKKIATLEKKQEKLRAKRDKLAPKPGKSRSKKYLAVLAQLRDIPSELAFCRNWVRQKERVLNAKRAALKHLVADIEADRYSLCFGSRKLLAQRPMAHNWETTPFASLEGWRKAWDVARSGQWWSVGKTDKPQGNAEVQWLPESKQLRLRLTDKLAHTRMDALGVPRAGGKQSDMPKRMQCRFLVLDNVDFTSHKGLASAAVKGAFGRLPVTMRVLSRLQEDGTVAWYVQASVDVPTGFAVETARSRESGVMGLDLNARGVAWGVVKPDGNQQVVDGWPQRGFVAWNLKDKSDEERRQIVGTVVLGLAEKAQQLGVAVAIENLDFATKKLTMRAGAVSKRYNEMLSSLASSQFAEMMARACEKRRVKLYLVNPSYSSLGGYAKYGRLNRCNADEAAALWLGRQALLGAVWKTEGALNYVKKYDERLVFPHLPATRMQSMKALAGAQWKDVARGLGKNRRLWGAKLHEWFLCQVEAISQPAQGEPGLAMSPPEMKRGFQPGSTSAPGDAAEAALVATC

SEQ ID NO: 24018 - protein, 446 aa, unknown
  TnpB Polypeptide
VKKSRFLYFHEKTNKGKIQALESLQIEYKRYLQSCINHMTSAKRMKIPNKELLSFFPKETILSTNIVTACQHHANEIVLSWVSSLYTRKIKSHIKKLHREDKISETTKIALFTIGKYNIDRPTETISQEALNFYWALLLDPGVSGKSPTVSNRIGIRTSIHTSTIVKLEGTKLVTWWLGFSNLKKGKKIQIPLKANPHLNSPDEIVDGCLIRKDRRGRWTVGVLEKKVIEEPKLLPNMPQIGVDVGLNVLAATSNGVLYGEKVKPKFDKLYNKIKEVRANRQRQKLKENSPKLDYLEDKLSGMIKTSTGEVANKLVKAFLDHTFVIEDLDLSGCKGQKRFAYKALHRSLSRKAPIIEVNPAYTSQTCPSCGFISRSNRQGTKFTCKSCGAKFHADVVGAINLLGRSKDKQINGCDNPSEVKILLRERYLRKRNSSLRELEVNAPYG

SEQ ID NO: 24019 - protein, 489 aa, unknown
  TnpB Polypeptide
MRAKPPSFIAEFPLRTSAADERVLAVRLEAARQIYNACLDQTLRRLALLRQSKDWQAAHAMPKGKERTAMFKATIARFGFTSASIQKHAETCRDSCWIGQHLGSHDTQTTSLRAFTAVQMHAFDKRGRPRFKGRNRLHSVEGKGDAVIRLRWQDEKPVVLWDGLVLPLQRDPRDRDGWQEQALSCRTKYVRVLRRNVRGRTRWYAQLVQEGQPPRKERRPVGEGVVGLDLGPSTIAAVSEADATLELFCPTVADMDRVIRRFQRAMDRSRRATNPDVFNPDGTYRRVARIAVRSRRYRRLQARKADLERRLAAERKRAQGELANRVLAQGNRIKTEKISYRSFQKAFGRSVKRRAPSLFVSILKRKAASAGAAVIEFATRTTRLSQFSHDTGEYVKKPLSQRWHQLADGTTVQRDLYSAWLARFVDRDRLDASQCIPHWAAAEPLLRRAASGFQQSASGTGFALPHVRKGVGADRPSKRVGRRNEAADV

SEQ ID NO: 24020 - protein, 414 aa, Cyanobacteria sp.
MKKLLEKEGSWLQKSWSASWMITRSNRLTPNSGEEVPITKGQVIEEPCDEKLSSTVLKGRWGAVMPPSTPNALSRFFKGNGGYPKFKGNSRYSGWTYPCKAGWKAESNGKNGYLNITNLGKIQMRGQARTWGIPTTCTIMFRNGAWFASITVQCEPARSTSTDSVGIDLGCKDAVTLSTGEKIAKPDFIKEGQRQVKTASKKLRRKRSPNRNKKIKASRRWKRERSYVSHCQRKVARQREDWLHKITSHIVSSNSLVSSEKLNVKGMTAKAKKGKRKAQKSGLNRSILDVGFGMIGQMLDYKLAEAGGFYVESPTQKLKPTQRCAKCWELTPKTLADRTHICSNPNCNHTEDRDVNAAQVNITWAWGQELTSLDAESPSSTACGSMRQLGAKKRQKRQSVAEARYSGLSDSRPE

SEQ ID NO: 24021 - protein, 527 aa, unknown
  TnpB Polypeptide
MNPRMPKGEAPKLYLGVHARLVFLKKEDEQAVLDLMRRFSSAVRFAYRRLLEGQDRKELKREDGPLCRLFGLNTRYADGAIEKAQATLDSARELGQDPRKVVFGGRKLFEQLTRGHLSGKALLALKREWKEKRQGLLYSRGDAAKKGNANLRLESRDGALWLRVNLGNGSRVQALVKTSHPHLKALLQRAYASLPYNVTIRLKDGKVYALFTWSEGLPPPVHTKANGVLGIDANGDPYHLALAVVSPDGNLVRYLTLSLEEVDSAPNKGAQELALWKVAHQVVAVAEEHGVAIATERLKYLRKSRRGDGSGRSFRRKQHRFAYRSLLEKIHSLARKRGVEVLEVNPQDTSTIGMLKYAPQHHLSKDVAAALVIGRRALGFEEKLPKGYKALLKDNAFLAHVQGFYENRLQELQSLRSAEKNPYLRRKLSRDIGKAKAALTLVSSLQGSPGSRKGSTNGRNPSGANPWRVLRVGLFLPLLGLEVPRDLSPLKPILNLGSLTHGSWKGWKVGSGPSPGGGPECTNVHFC

SEQ ID NO: 24022 - protein, 471 aa, unknown
  TnpB Polypeptide
LPSTDGAVKTERTSHSWFGFEETTWENHHPNSKLVREVKRVSEVNRLDIEEETKAKLRPPKKKRKTDDGAVDTGKENAEPTETKSEKWRIHPTRRQRAVFRLWFDATDRIYNRAAKMINSNKKTSMEMMRPIIKDEVWRSETTVRMWKIPYEIRDLPLRDLMKACKALRAKEKILKRKFKLKEKMGATCSVTLRSRQLNAKKTSGGNRVWPRVFGTLRDRSAMRTEKGKTLPLVFKHDCRLIWERKTGFYYLCFPVDVDRSAPSDVKAVVSIDPGVRTFATCFDARHGKVTEWGCSHTTKILYWLIRKAARLEKKSKEARGRHRRRIATVAARIRKRSTDLVNELHRKLAIWLCKNFSVVLLPKFSTQQMTEHQTKPRRLARKTSGGMVRLSHFKFRQFLIHKAREYGTTIDICDEKYTSLTCGSCGTLNGKLGSSKTFKCPRCGYEADRDHNAARNILLRYVWKNDSETP

SEQ ID NO: 24023 - protein, 317 aa, Geitlerinema sp.
MLVLEFKVKGKPHQYAAIDEAIRTAQFVRNKALRYWIDNRGVNKYDLNKYCRVLAREYGFARELNSTARQASAERAWSAISRFFENCRKSVPGKKGYPRFKKNSRSVEYKTSGWKLLDPKHIVFTDKKNIGRLKLVGTWDLAFYSTEQIKRVRLVRRADGYYAQFCVSVEVRETLEPSGNTVGLDVGLKEFYTDSNGECEPNPRFYRNAEKKLKRAHRRVGKKQKGSTNRKKAVNRLGRVHLKISRQREEHAKRLARCVIRSNDLVAYEDVRIRNLVRNHYPPFAPLSKGGWGDDAGWYQFRKWLEQFGEGLRSLWL

SEQ ID NO: 24024 - protein, 497 aa, unknown
  TnpB Polypeptide
MPQFTYRTNLTHALLDENKQQLLDFMQEQGRYFRTVFNRFYFLELSSKDKLTLWKEYCSSQFLQEKGYPFGTKYANSLFQEAYNKAVLHQEEYCFRIQQIEDRIKVLTLKKEKLVDKLAKTFKSVNKLDKKDTRFKTLRFNLLKEARAIKTSIYWVNRKLEKQESLLKSSSLRSVTFGGKDFQRKLSRKQITGMKWQSLRNKFIYAIGKSERKCGNDSIQFDVKNKTLKIELDRGKDYKNYLCLENIENQYDSPFFKENNLLAEVHKKTQRIILTKFSSNIAKCKFELHTTVEKEESLALQEIQAKIRAFSDNLNEPNQDEAKKTIKDYVKTLYQEKRGEACLGIDFNYQHLDISSNLVNNQLQNTEQENQEYYDFEQTIHYAISQHNRYQNKENLRQAIKTVVSLAKQHNLNIKIEDLNFNRKKAKLFSAYSEYNKVYNRMLSSLPYSTYEKMMEIECDKAGVYLIKVNPKNTSQKAIENGWERHIGAARIIAQQI

SEQ ID NO: 24025 - protein, 370 aa, unknown
  TnpB Polypeptide
MSLVKKVKSKKGFWLSPAAAQKYILRWSSTIDIHTHSKQAIVQQYFQALNSYFTAFKANPQLKPPYKKKRFMPFIWKDTAIRLSPEGVLKLSMGSSQEPILIQTTLPADTKIRQAKLFYEDEKYYLHLAIEVKNEHEEKHSFNVMSVDLGILRPITCFDGSEVISYHGGVLNSLIRYRNKKLADFQRTLSKCKKGSKRYRKLLKAKKRTLKRTKHQITDILHKITSNFLKMCLQKGYGTVVIGDVTNIRERVEGNGNFNQKVHQWCFRKMVDMITYKAQLLGIEVRLASEEYTSQVCPVCGSKNHAVGRNYECKSCGFSYHRDGVGAINIWQGYLGKKSQVVAGLAPVRGVRFKPHLCGHGVSNAPWKAA

SEQ ID NO: 24026 - protein, 409 aa, Cyanobacterium sp.
MLNLSYEYKLKPSKFQIEQIEHTLDVCRSIWNFALLERIDWMRSRKSPVNACSIQQEYILSPETKYPNYNEQAKSLTLARKQNKKIADVNAQVEQQVLRTLERAFADREKKNLGFPRFKNRNRMRSFVFPQMLKNCIKGNQIKLPQLGWVKFRQSRPIPDGFLVKQARIVRKATGYFVILSLQSDVDIPQPIPHGHPKGLDIGFICAVVTSDNESIPRPRFLNKYLRELKRLQRMLKKKQKGSCEWKKLQKRIARLHFKTTSHRKDYHFKLSHHLVKDAGMIFVEDINFRMWQRSFLSKSSADFGFGQFIDILEWVCFRTDTYLCKVDHRYTSQECPECGARTGKKDLKERVHQCPHCGYITGRDHASALVIRNRGLDLVAVGQPVQEKASGDGRGGGEFTRLATNLRS

SEQ ID NO: 24027 - protein, 458 aa, Cyanobacterium sp.
MNYKTIRILLKNNISDECNDYLQFTCEQSNKLYNSTVFLIRQSHFEDCPRNIYFDKNDLLRSSFKLRKVKANYPNLCKELKTNVHYQAIGGSQGQQTIKSVAEAFKAYNQLLSLWFKGEIEHKPKMPSYRKNGLYAVSFTKQQIKITIDGYCRLPIPKTQKDELVTKELIIPSAKGVNSHNIAEVRIVPSLGKLWAEFVYKTPEVKATELNYSQALGIDTGVSNLITAVSTKGKSFILCGKRLKFINQKYNKTVAQYKNGKSEFYWDEFLDEITHKRNCQVKDSINKYARFIINYCLNNRIGDIVFGWGQGVKSNANLGKRNNQNFVQLPTVRLKNRIKELADEVGIRFTETEESYTSKSSFLDNDLLPKYGEKPREYKFSGKRINRGLYKTAKSYLINADCNGAINILKKVSTQLGITLAEVSKEALTLPKRYNVNSLTKVYRKRSEQVLTCVATSA

SEQ ID NO: 24028 - protein, 409 aa, Thermoplasmata sp.
MLSSMLHRAVVFHIHGELPFEARMLIEDFRMAVNCAIRAGLNAKVTFRNALVKLAYKDFRIEHPNMYAQHLVSSFEVAGSILKNLRRRWGKGPIHRIPYVRRLMMKAENQAYKLDRENGVVDLPIRAGCHVKLRLVLSDYHRGFLNDASLSLGSMTLLPEKVIIAFRKSAPRSYTPETVLSLDTNERSLDGVFLSKGESTPVQAAFPDVAVIQARHHDRRKRLQKKKAHDRRTSRRLCNKEGRRERYRIEHRMHQVANAVLGYAEEHRAAVVLEDLNGMTGLKRCKSFNRRLSSWPRRKLHNIIEYKAAWNGVPVIKVDPYNSSRRCPICGRIKHSRMGTEFECECGWRADWHVNAGINLLQTAFPEGMAGGLRFSPGAFQHDVVMTLYDPEMDARSELNGTSRLAGRS

SEQ ID NO: 24029 - protein, 343 aa, unknown
  TnpB Polypeptide
MLKAYKYRIYPNTEQRIQIAKTLGCCRFVYNCTLAYRKEMYEEKKKSVSKTECNNYCNRELKKENEWLREVDKFALTNAIYNMDAAYQKFFKEHTGYPKFKSKHDSHKSYTTNFTNDNITVDFERNKIKLPKLREVKAKLHRNFSGQIKSATVSLTPSGKYYVSLLVETEHEELPHINHNTGLDLGIKDLCITSDGKKYINPKIIKKHEKKLVRLQRQLAHKEKRSQNYYKTRKKIALCHEKITNTRKDYLHKISHEIISENQVIVSEDLQIKNMVKNHHLARSISDVSWYELTRQLEYKANGELMRMHRHPLKSLRMVRTLSHLQSLLYFRISFLQSQVQAL

SEQ ID NO: 24030 - protein, 461 aa, Microbispora sp.
LGGKSTSRCTWLASPLNSASSVSKSAQTSRMICSMRSRCAPVNTRCRNLVTKTKWARGTKTQFLPVLMSQYSITGRLVWSRCAAQVQLPPLSDAGPASRSGPCVRVCAGGVQRRAARTAGRSGTRRAVHLGRGVVQAGHHAGEEDPRSCLAGRGVRRGVTAGSGGPEQGVLELLRLGHRKAEGPEDRPAPLPVTQGQPAGDPPIGDIPVRWSRDLPTEPSSVTVVKDAAGRYFASFVIETGKAPLPETAAEVGIDLGLSHFAVTSDGRKVDNPRFLRRAERRLRKAQQELSRKEKSSANRQKARAKAATAHARVADARRDWAHKLSTQIIRDNQAVYVENLAVSGLGRTRLAKSVHDAGWSQFVAMLEYKAARYGRHFAKIDRWFPSSKLCSGCGTVAESMPLAIRSWTCPCGAVHNRDINAAINILAAGRADRLNACGARVRPGPAPAQREEAGSFRGAA

SEQ ID NO: 24031 - protein, 325 aa, Blautia sp.
MQIISSYGVELRKQNIPIRQTLEIYRSAVSYLIGIYVQVWEELAEIPDAKRRFNAAEHLVHTTKKNHACFDFDIRFPKMPSYLRRSAIQHALGTVSSYKTRLDLWEKTDGKSGKPKLVYENHAMPVFYRDVMYREGAEGKDEAYLKLYDGHDWKWSCVRLDHTDMEYLRKCWSGKKASAPTLEKRHRKYFLRFSYKEEVTLTKTPVKEQIICSVDLGINTDAVCTIMRADGTVLGRRFIDHPSEKDRMYRTLGRIRRSQREHGSAQTQGRWAYTKRLNTELGKKTAGAIVRYAEENHADVIVFEYLEMQGKISGKKKQKLHLGNT

SEQ ID NO: 24032 - protein, 459 aa, Micromonospora sp.
VKTIQAYRFALDLTPGQERDVLAHAGAARVAFNWALVKVKAVMDQRTAERSYGVPDEALTPSLSWSLAGLRKAWNVAKPGVAPWWGEVSKEAFNTGLDALARGLKNWADSRGGARAGRSVRFPRFKSRRRSTASVRFTTGAIRVEPDRMHVVLPRLGRLKLHESARKLARRVDNGTARIMSATVRRGGGRWHVSFTVDVERAERFPARPRSVVGVDVGITHLAVLSTGELVDNPRHLAAAQHRMRSLGRALSRKTGPDRRSGRRPSKRWERAAARAGRAHARVAHLRRDGLHKLTTRLAREYATIVVEDLNVVGMLANRTLARCVADAGFAEIRRQLAYKTRWNGGRLLLADRWYPSSKTCSGCGTRKTKLALSEREYTCQACGLVIDRDRNASLNLAALAAEFDTAGSGPVAARGADQKTRVRGQVATKREPGTASAGQTGTVPPQGRTTNHVFTKAH

SEQ ID NO: 24033 - protein, 446 aa, unknown
  TnpB Polypeptide
VKLFSTYSVKIKHYNHIFQKTTALYRDAVDFLIGVCLAEWDAISVIDLDMFRQQYVEHLCHRTRKNLNIKYPEFDQKFYKFPSYLRRSAIREALGKVSSYRSSLANWKASEPESHGRKPSYPKAGYTYPSLYRTGMYEQTGDYEMKVKVFTRNTWDWITVSVKKSDMDYIARWCADRKRCSPTLQKRGKEWFLDFSFEETVNLPETGVSDQTIIAVDLGINCAATASVMRSDGTILGRHFCRLPKEYDSLNHAANRIKKAQQHGNHRIPRLWARAKGINRDIAVKTAHFIMDVAALYHADAVVFEHLDRAGKKSGSRKQRLLLWRSQYVQAMVTDKAHRLGMRISRICAWGTSRLAYDGSGPVLRGKQTGLPTYSLCRFSNGRVYNCDLSASYNIGSRYFIREILKSLPARERLALEAKVPQSVRRSTCTLSTLINLNAELMSLAA

SEQ ID NO: 24034 - protein, 232 aa, unknown
  TnpB Polypeptide
MNNKYSNPRISFDGKYWYISVGIKSKKSEVELTDESVGIDLGIKDLATCSTGKIYKNINKTKRVKKFKKTLKRLQKQVSRKYEKSGEVNNRYEKSQNIVKLEKKIRLVHRKISNIRNNNLHQITNEIVKTKPSRIVMEDLNIKGMMKNRYLSKAIAEQNFYKFITYMKYKAEFNGIEFIQVPRFYPSSKTCSKCGTIKKDLKLSDRIFKCECGYIMDRDLNASINLSNYRAS

SEQ ID NO: 24035 - protein, 334 aa, unknown
  TnpB Polypeptide
VYRQAADIYQTLWAQYKELNRRKPDSKRFKEFWDKPPKAKSLHAKYTFNRTFGIKLEEQTVSLTALNGRLKGIKYTCWNEHQKLLSQGEIGDATLWYDKSSKAFYLLVPVTIEVQEQTVKQIVGVDVGERNLIAVASTTGEKYIVPTLESWKRIKERYHRQRSELMSKGTRSANRKLAKLSRREKRFTENVLHAVSKQLVLRHKDAKFVLEDLTQIRQNRITYRGKDKEARRQAEQWSFASLQNNIIYKAQLYYGIAPVKVDPHYTSKTCPVCGHVSPDNRPDNGELFVCRNCGYSEHADIVGAINIALKELVKDQETNLKGLLVNQPDAPRQG

SEQ ID NO: 24036 - protein, 181 aa, unknown
  TnpB Polypeptide
LGGYKLKINGHFSSKYNAWLRRRGIRRRMKSLHMKARNIIDDWAKKVSRKIVSLAKQYQYTVAREDLTGLVENLRKLPKEHKVSLLILSYRRLEHWIDWQCEKQGVPAAVINPRGTSSTCPICGSKLVENSYRKLKCIKCDFEADRDTVAILNIEKKAYKKMGGSLATPTVPQITDVIPNR

SEQ ID NO: 24037 - protein, 521 aa, unknown
  TnpB Polypeptide
MFVSLQFRLELKKEDKEKLIKLMRKQSSAIRVAYNMLKDLGEEKTKKPHTQIYHKLRQIFPGLPTKYIDSAIYKAKQYPRDKIVVFGSKRLFEKLCKNHLTGKVREKLKNQWRELRQGTLVSIGSKLDRGNRLTRFEDLNGQLHLRITIGNREFIYAKVLRELSNSKDKWITFMAMLLESWQTQSYFPYTVELKLRDGGVYGSVSFEIPTPEAKYTKENGVIAIDTNASPIHLAIAEVSKTGELLSYQTISLHHLLGISQNAKDHQEWILAHRIVDLAIQKGKAIAVENLKKIKKGVRGDGKATLRKRLHQWNAKKFLQKLKRVAMLKGVELVEVNPAYTSIIGMLKYAPQLSIDKDIASAYVIGRRALGFKEDTPENYEKLLKDGAYLEFALKNYEEREKELRELMEKESNEYKRNALKSELKVVENAKNLLVNLIQSLQSKSSSCEGANGRNPEQGETKKVSHVAWQVLKVALLFPILGRILPRDLSPLKPVLVEGVWDRVRSRLVPLEAGGTVPIRDF

SEQ ID NO: 24038 - protein, 375 aa, Glycomyces sp.
LQKLLITQAKQTPERSWLAEVSPVPLQQAVRDCDQAYRRFFAWIRGGRPGPKMARPKFKKRSHRQTARFTRTAFRLRDNGALYLAGIGEIKIAWSRTLPAVPSSVTLIKAATGKYFVSFVVEEPGEPMPPRDADEDTGIDVGLACFAVMRNGRRIETPKFLRKQEKRIAKAQRALSRKQKGSNNWHRQRVRVARLHERVGNQRRDFLHKHSTVIVRENQAVYVEDLDVQSIQERFGRLANDQALSAFLRMLEAKCARYGRDFVKVDRYFPSTQLCSSCLEPTGPEGVAGLNVRKWTCSNPRCGATHDRDENAEANLRAFGREVLAAGRKGPTDAGPGGELKRLRSADESGISRHGAASRSPRGERTEPVTTAAVR

SEQ ID NO: 24039 - protein, 388 aa, Glycomyces sp.
MVPVVHLRYSFRVYPTGPQRQSLARTFGCVRTVYNDAVAARRAAYEAGAKYPSAVALAKSLITDAKRTPDRAWLGAVSAVPLQQVLRHCDRAYRNFFGSLSGKRQGARVGPPRFKRRSGTQTAEYTRRGFRLKANGRLYIAKVGDLKVAWSRELPAEPSSVTIVKTPTGKYYASFVVAACDGADLAEPLTDPDAETGIDLGLKSFAVLRGGQTIDSPKFFRQMERKLKKAQRALSRKQKGSKNRAKARLKVAKICEKTRNRRDDWLNQQVAAIIGENQAVYVEDLNVRGLSRGRSAKSVHDAALGMFLNRLESKANRAGRTFVKVDRFFPSTQLCSACGALTGPKGLGGLRVREWACECGAEHDRDANAELNIRREGKRLVAAGHADT

SEQ ID NO: 24040 - protein, 538 aa, Glycomyces sp.
MIHEFSERSSASAARLASSCRSSGSLRFTCFMVSILCYYGTMSRFRMYPTPAQEQQMLRHCAHARYVWNLAVEQRSYRARHKGPTPQYVELTRQLTEARAEFTWLREGNAEIQQQALRDFDQAVSRRFASGFGEPTWRKRYRHEGFRVIGTERVPAFESDGSPKLNAKGRQVMSRSVRVERLNRRWARVSIPGCGPVRFRIGRKQRLPEAKTFRVTYRRGQWHTAFAIIPDPKPAPGTGAVVGVDRGVRITAALSDGRTLNCPQLSPKELARYRKHQRRAAKAPKDSVRKAAEYAKAAKIKTAEVNRRKDWVEKTSTMLAESFDVIRFEKLNITNMTASAKGTAKQPGRNIAQKSGLNRAILAQGWGALRQRTAQKALSRVEDVPAPYTSLRCSVCGWIDKHSRKSQAEFVCSSCGFTCNADTNASLNVAAGHVGGATPRQRSSVREPQLTASWNPRILDRGGCQSNMLRIESPPLSAAAGAACGAVWGAVWSPCAVGPAAAKAAAKAAAKAAAAAARRTAPTAAVALPRGAFRWGVT

SEQ ID NO: 24041 - protein, 423 aa, Euryarchaeota sp.
LWCCGIYNILLSRAREAYKKDGTNLCGKAEMCRIIKEVKEENPEFSGVYSQVLQNCADRLAKAFDNFFGRAKRKKRGEHIKAGYPRFKKRVRSITYPQSGFGIDGNRLKVSRIGRIPVVLHREIEGKIKTLTLKRMPSGEWFAVLSCEVPAENTDLPKANLDSPEGESVNREHPNREKEMGIDVGISSFATLSDGTKAGNPRFLIKAEKRLKRAQRRLSRKKKGSKNRRKARHKVAILHGKVGDQRSDFLHKTARICADSYGFIAVEDLNVSGMVQNRHLSKAISDAGWSEFLHLLSCKAERAGGTIVKVRPNNTSQTCSECGHELEEHIPLSERVFRCPYCGHEEDRDVNAAKNILERAREARPICQRQIMIRPKGESVSYTVGHTGINAFGDTASTSGASPEASCVGEQGTISGRAVAPQL

SEQ ID NO: 24042 - protein, 371 aa, Paraclostridium sp.
MILSKKVRLYPSELQEQKLWQSVDTARFIYNWTLAKQEENYKNGGKFISDNELRKEITQLKKTELIWLKEVSNNVAKQSVKDACDSYKRFFKGLSDKPRFKSRRKSKKSFYNDNCKLKVKEGNLVNIEKVGWIKTNEQLPIGVKYSNPRVSYDNKYWYISVGIEQEEIKEELTDVSLGIDLGLKDLAICSDGTVYKNINKTYVVRKIEKRLKRLQKQVSRKYEQNKKGKEFVKTKNIIKLEKQIQQVHRRLANIRNNYLHKTTTNIVKTKPYRVVIEDLAISNMMKNKHLSKAISKQGFYEFRRQLEYKCKFRGIELVIADRFYPSSKTCSQCGEIKKDLKLKDRVYKCNCGYICDRDLNASKNLSNYKLA

SEQ ID NO: 24043 - protein, 393 aa, unknown
  TnpB Polypeptide
MRAYKFRIYPSKKQQRKIQETFDICKNVHNQLLELSIKKYKKEKKGLSKYQMDKINSGKHQEVYSQVIQNVSNRVSKSFKNFFRRVKDKSCKEKGFPRFKSSVKSITYPQNNGSFKIENKRLSVSKIGNIPIIKHREVKGEIKTLTIKGNKSNQYFVIFTCEEYPSKKVKTKGNVGIDVGLETYATISNGKTIENPRFLRESEDRLKWYHRELSRKKKGSNNRKKAKLRLSRQYQKIENQRMDFLHKTTSDLSKTYRNCKVEDLQIPNMMKNHHLAKSIADASWGTFVNMLSYKVVTNGGQLIKVEPKYTSQTCSSCGHRMKMPLHLRIFCCDNCGLEINRDLNASININGREGHSRTYTLVGDCVRPTETKATLDEARTIFRGDTIGSPHHL

SEQ ID NO: 24044 - protein, 432 aa, unknown
  TnpB Polypeptide
MIVRKAIRIPVHYATTQSKLNILDKLTARITYGIRVISGHVDKDAGLDRTSIRKAARSSGVAEITGLSSGFIQQCEDKVLWSWKSYKALHRDWEKRLAYHQECLLSVDDNKRGRKEQYIQKLIKKEPAPPGFLDKTPCRIDNRTGKIQKSGVKLTSYWMHISSLRKGVTIDIPLNPSYYHIKHLEDWSVSDFEVIKREGKYYAHVSLHKEVVEKQTCSIGGIDQGLNRSIATVLLQDVPCEELIKNSKEALIEKYDDLIAILQQSKNYRKLRQLRSKRADVSLNHDRHLAKQVAEFTEGYYIAIGNTRFGQTQYRGNGMTKMRKRIGKWSYSRQRTLIVLKRAELGYPTMLVDERFTSRTCHCCGSRLTVRKWVYGNSYILCHGCDAKIDADINAAYNIALRCRDDWLKAQMNFPQKEASVQDGCPRLKSWE

SEQ ID NO: 24045 - protein, 420 aa, unknown
  TnpB Polypeptide
MDMLLLFSEGTKAMGKRKERESAMTMRKVAQRIPFTPSKTQAALFEQCFGDRRFAYNQQVAAFNTYDKESNPNPAYPNVTDMKEANEWLKDSPIPSNSLSNAIMDFRKARSAYFRKAQYGKNRPRFAMKGDNIQSFRNTMPTRRMDGNRYPLSKKLGSVRVRKRDRLRYPIESLSSWTVKRENQTYYLVLLFNVDIQPKPKAKGQVGIDLGVKNLLTLSTGEKIDYSDRLLQLEKNIRKEQRRLSRKKKGSNNYCRQKVIVAKAYAKLRHYRDDFQHQLSHRLIEDNQFIGMETLAVRNMTRKAKKKLDADGTPVQNGQSRKRTLNRSILRYGWNALVDKLSYKAEWYGRTLIQVDRFYPSSKLCHVCGHKYKELRLSEREWVCEYCGRRHDRDVNAALNILDEALRLNQKKQKSKKQEK

SEQ ID NO: 24046 - protein, 294 aa, Lactobacillus sp.
VVIGFFSKKINASSPALYTLVDQNQNTKETYVMNIIRQKNTENELHNIVRQFTSLIGLSKLAKLVNYRRHSEISLMKVIEWLLTTKFLGRSLYRARETPNFTSRTVRNNLNDVANPRYYRIIKGRLAKAQRILSRRARRAKQEHRPLRTSKNYQKQRLLVAKLHAQVFERRRDFLHNVSTTLIKNHDFVAAEELRSKNMLKNHALAMSIADVGWRTFLGMLAYKAELYHRQFLTVNPKNTTQACHECGFVMGTAGTEKLTLADREWTCPKCHAHHVRDHNAAQNILTKGIIKLA

SEQ ID NO: 24047 - protein, 319 aa, Lactobacillus sp.
LGECKIKRYTVSYGPTGRYYLSLQVETVAPEALPKTGKTVGLDVGIADLAISSDGEKFGTFNAKWLEKQVTKWQSKYSRRKYQATVAVRQWNHNHKDVKMDLNDYQNWQRAQKQKARYQQRIANQRQDYLHKLTTALVKKYDVIVIEDLKAKNLQKNHHLAKAIANASWYQFRTMLEYKCDWYGKQLITVNPNNAPTYDQAVERRDQLVKDWQTEFPKVVKKLENSFDELMVIYQLPEELRKRLRTNNTIERVNQEIRRRDRVIRIFPNDLSVLRLMGALLIEQNEKWAAGPRYLNMTVYHGIEKDDNSEEAGMLKLVK

SEQ ID NO: 24048 - protein, 332 aa, Lactobacillus sp.
MVLKAVKMRIYPNSEQCDRLMQTFGCARFVWNQMLNMQIERRKNNPDAKFVNAFGMNNLLKRLKEEYPWLKQAESTSLQSANRNLADAFQRFFKGQNKFPHFKSRKYAQSYNSKCVNHNIKVIDNHHIKLPKLGVVYFRSGRLPQGKIKNVTVRLTVANQYYITVLTECENQTLAKTGRRVGGDLGLKSLLNLSDGYKEPIHHFEDKYRKKLHHWEKLRSRRYLLAKQAIAWDYHNKVLAPRQLDDFKNYQKARVMVAKYRQKIANQRLDQLQKFTTKLVKQYDIIVLEKLNIKGMLKNNKLARAITNASWSKLVGILQYKCDWYGKKNHSG

SEQ ID NO: 24049 - protein, 275 aa, Burkholderia sp.
MILVYRYRVKSLNGLLNKQSRAVNYVWNFCNDTQKHALKWSKKWPTGFDLNVLTTGSSKALGIHSGTINATCEQYAKSRSQHRRPYLRYRGGKSLGWVPLKGRDLKREGDAFRFAGNTFRVFHSRALPEGKIKDGTTFAQDARGTRADFQHKLALDLVRRFDYIAVGNVSAVKLARTRMAKSVYDASWSSFRNKLRYKAIAHGATFEEVDESGSTQSCSACGSKDSTTRPKGIAGLRIREWACSDCGVEHDRDTNAAVNILRCGRASPGVGITCL

SEQ ID NO: 24050 - protein, 359 aa, unknown
  TnpB Polypeptide
MEVNQVWNWANATSFKAARPFAGRGKFLSGFDLCSLSAGASACFEHIGADTIQRVCTEYVTRRSQFKKAKLRWRVSTGSRRSLGWIPFKAASLRRRGKYLRFCGKTIRFFEAKRFAELAKWGCGSFAQDAVGDWYLCLPVAMPDESPAPCKARVGIDLGLKDTAVTSDAERLRAGEFYRSLEQRIGQAQRRGHKAQAKRLHRRAARRRHNALHQFSRRIVNTYQKIIIGDVSSLKLAKTRMAKSVLDSGWGILKAQLRYKGQWAGRSVTIVNESHTSRAGSSCGSLTGPQGVNGLRVRLWICQGCGVTHDRDVNAARNSLAVGRLPPSVCGNEQSQRSAPSRRASRPRKIRKALSDAAA

SEQ ID NO: 24051 - protein, 401 aa, unknown
  TnpB Polypeptide
VFAVKSVWQYYVPVAGVLRLLDLFRRMVNDSLRIGLLYDALSLRKLSLLSYNQLAKYDSPSYYKLCAISRAAGILAARKKSVRRGYVTRTPYAVRPQLVSCYGFKIENGGLRIPVSRGKRFSIPLTNHTLQIISQSGVKVRSFTLTRNRLSLCIARDAPTVNCASTVGVDRDLRNLTFGNDQETSHYDLSKCVGIAKTSVRIVASFRRNDDRIRTRIASKYGERRTSRTSNLLHNATKTIVALAVQRRTAIVLEKIEGIRSLYRKGNGQGRKYRGRMNGWSFGEAQRQIEYKARWAGLPVIRLSRSETRGSSVTCPRCGERLQSDTQLERKLWCGKCRVVMDRDRVAAVNLSRRGRVRFARSRPPILLEAQGGAFEAVKGNPMPTVIPGVDAPKLTHQTKS

SEQ ID NO: 24052 - protein, 366 aa, Methanosarcina sp.
MKRGNRYRIYPNKEQKVLLEKHFGCTRFIYNKLLNIKSTLYKKFRISISEFELNNHLLVLKEVYPFLKEVNSGALQQASRNLNSAFNHFFKDGFGYPQRKKKKDHHFSFQLPQNYNLNVEKSEIQLPKLGWMKIKVHRNIQGEMKTLTVSRTPTGKYYVSILTDDGEKYPEPIPFSHATLIGVDVGLMTFATLSTGEKIDNPKFLKTSLERLKFLQRKVSRKVIGSKNRRKAVYKLAKLHEKIANQRHDFQHKVSNKLISDNQAIAVETLNIQGMMKNHKRAQSTGDAGWYSFVLKLQYKAEWFGKTILKINQWLPSSKTCNVCGYKHPNLTEDIREWQCPDCGNIHDRDINAAINIKNFAVGTTV

SEQ ID NO: 24053 - protein, 396 aa, unknown
  TnpB Polypeptide
MIVLEFKLAGAAGQYAALDEAIRTTQFIRNKCVRKWMDERGVKPYDLNKYCAVLAKEYDFAGKLNAQARQAAAERAAAAINRFYDKCRAKTPGAKGYPRFQRDGRSIEYKQTGWKLDGARRALTFTDGFMAGTFRLKGTRDLGCYALARIKRVRVVKRADGYYSQFCIDVERRVAAAATGCAVGIDLGLTHFYTDSEGATVENSRHLRRAEKALTRLQRRVSSKVKGSKNRTKARGKLARKHLKVRRQRRDFAVKAARALVMSNDVIAYEDLRVRNMVKNRRLAKSISDAGWRAFVTWLGYLAQVYGKIVVAVPPAYTSQDCSGCGERVMKALSERTHVCPRCMAVLDRDHNAARNILALGLRHLEGTTAGHAGSHAWGQSALYPPDASSTDKAAG

SEQ ID NO: 24054 - protein, 410 aa, Okeania sp.
MKQITTISCKLKVSPEVAKEIEATMEMFAHACQYVDKNSDKKLTNNVAMQALMYGTVREKFQLSAQTTIHAIRRVCSNRKTSITNHIKKELTFAPTSVDYDSRTFSLDTKKWIVSLKLLSKRTKFELLIGNYQRGILKGSKATSAVLTKRKDGTYYINIHVHHIVPEPEPTNKIIGIDLGRTDIASTSEGESWSGKNITSKRNHYSQIRAVLQKKASKGTRSSRKRCRQLQQRLSGKERRFQKHVNHEITTYLVRKAATDKNSIAIEDLTNIRQRTNQQPRSKKERRLSNSWAFYQFRMFLAYKCVLHGVKLILVNPAYTSLTCHKCLHISPTKETTYRKGKNYHCFHCGWKGDADYNGAKNITALGLSVNLPGGPWLSCEVSSLDFVPRQRTIWDILEGYEKPASNQRL

SEQ ID NO: 24055 - protein, 272 aa, Okeania sp.
VQSIKTKLKLNNKQKTILAKHAGVARHAYNWGLAYCISEYQETKKRPSAITLHKRLVAEVKPINPWYYQVSKCAPQQALRDLERAFKNFLTIRGHGFPKFKKKGKKDSFYLEGSIKIIQGNYIKLPRIGIVKTYEILPSVIVKNVRISKRANNWYISFKYDNEPTHTAKKRDVIGVDVGINTLATCSDGTPFANPKAYQQAKKRLTRYQRRVIKKEPGSFNRAKAIKKLARLHKKVADIRADALHQLTTWASFEPQHHSHRRFECKWNAQKP

SEQ ID NO: 24056 - protein, 331 aa, unknown
  TnpB Polypeptide
LFCKTGWKVHTTGDNGYLNLAKIGSIQMRGKARIWGTPTTCTIVYRNGKWYASITVNLTELQAATRQTDFGAVGIDFGCKSALAITDGKNHSFVEAPKFLRKAEAKIKHLSKGKRRKTAPNRKKKQKGSRRWKKTQTKISKVTRKVANQRQNWVHQVATDIVRCNSFVATEKLEVSKMTRKAKKGKRKKQKSMLNKSILDVGMGMLRSAIEYKVKDAGGVFIEVPTRKVKPSQTCPNCGNQQKKTLDERVHHCHKCGFTMDRDLAAALVMLLWALGILPGFGTSLVDADASSSTSETRSSQQTGSMKQLGQMKRQKHSPAGLVVETQTSTK

SEQ ID NO: 24057 - protein, 426 aa, unknown
  TnpB Polypeptide
MITTQVIKCRIPEQQADNLNRESGRIYTAVMVEHWRIYRRKGVWLKQSQAEKLNDLYDADAPNLLHAHSRDAAQQGFYKACKTARTLRREGNAEVRYPYRRRRFRTTVWKDTGIRLRNGCLLLSLARGFEPVVIPLPPRFTYLPEEAFREVRLVYNHKRKKYQWHLVIDDGQEPPEAPGDHVVSVDLGEIHPAVASDHSQAVVFSARELRAVIQYRNKTLAEITRLQSRCKKKSRRWWRLQRLKNEIRAYCERKIRDILHKVSRAVVDWAIERKARFIIIGDVRDAGNGKRLARKSQQKISQWPHGKLRRYITYKAAMAGITVLLQNEAYTSQTCPNLECGHQHKPKGRDFKCPKCGLRAHRDVVGAANILSKYLYGLIGGICPQDVRFVQPFKIEREKYRGRSKHPFLSRMPVSFHTVVLNRLRR

SEQ ID NO: 24058 - protein, 388 aa, Nocardiopsis sp.
MKVVVRVKLLPSPEQARALAATLHACNRAANHASQVAQDSGARHKYALQEKVYHQLKSDFGLSAQPAVRVIGKVADAYTTRAANLEAGNLGPKGSASRQRVEATPIAFRADAAQPFDDRCLSWQMDARTVSIWTVSGRLKNLGFTSSPDQLKMLAEHRQGESDLIFQDRAWFLAAVCEVPEAPLNEAPEGFIGVDLGIVEIATTSTGQRHAGRQLNRYRRRQMRLRAKLQAKGTKSAKRVLKRQRRKESRRARDVNHRISKSIVGQAERTGHGIALEDLKGIRGRVRQAKRNRSALHAWSFAQLRDFITYKARRAGVPVVVVEAAYTSQTCSECDHTSRGNRPSRARFVCRGCGVILHADVNASRNLAHRGEAVWTAGRPSTAPAPSR

SEQ ID NO: 24059 - protein, 458 aa, Kouleothrix sp.
MKLTRAVTHIRLSDANASKLTQLDALADAYMRLCQQYVTAFCTDVEPDKYADAWLPSPLLARWQRAVIQHAAGVAQSWRTNRDRAYQAYLDELTEYQAQADPQRAGPTWKEWQIPTLKQTVIQANANVVALEPSEDSTFDYWLRISTLEMGQPIRLPLKLAAYHRRMLDGKRINTSMTLTRKPSGWWLTVSVHEQIAATTTDESPVVGVDVGIVNLLTTSTGKHYGTFHGKLARRHKLDREKRRRKAKLGACLKKKGVSELPSLTNQRLARHVRQEINRAVNQFYADHAGHQVAYEDLDVRTMRFRARRMNAYLYASNLAHLPRQIAWGAKKRGQTAQVGWAAYSSQECSRCHFVSRANRPEQQTFWCQACGLTIHADENAAINHQSRFYDREMRACRSKEAVKDLLDARHVAYLQSSDARSASARREPAFGCESISGQSGVGQHSGSCRRKHPSQAL

SEQ ID NO: 24060 - protein, 354 aa, unknown
  TnpB Polypeptide
MMRSKLIGSKEASDNFQFVTINGRVEFEDVERISRIAYYYSKAVKAGINLALKGVSLNDAVKELYKIIPYAFYAETAYKQALALVENKGSKVEIKKRWIACRGNKSDKGNRGIKFHVLEDHILIKVKDPWGKWVHGKAYFGKKYLPLLSELEELSRRKEEGYGAVISFKHYPMIHLQVPLWLYLKHFSSPKPNGYGLFAGFDLNSDRLNVVVVNEEGKVVTNKTWRYSDVTRPGFPKGKAMALRLNALSESLNFLSRVGVDYVVFEDLFLVKRRKFTRSKSGNRKIMRFAKKQLLIHGVIKALRLGFNVILVNPKGTTNSEYHDRIMREKGFDRHTASAYLIALKGLEVIKNNE

SEQ ID NO: 24061 - protein, 259 aa, Leclercia sp.
MNYNQLASELVNWKNEECLAWLKMAPSQCLQQSLRDLDRAFKNFFSGKSQYPRFKKKGRNDSFRVPCQRVRLDQEKHLVSLPKLGWVKYRKSREITGVLKNVTISRKLDKWYISFNTETVVPEPVHPSVSKTKILLNDEYFKQLSLNENQAAQFTNIEGDKKLRNLSNILGRKVKYSSNWLKTKKKIDGIKAKSSRRRLDALHKITTTICKKHAIVEFVNLKDPVSDKSNTSRNMIYEFVRQLMYKQEWLGGKVIKLGD

SEQ ID NO: 24062 - protein, 431 aa, unknown
  TnpB Polypeptide
MNMKEDRPMHLKAYRYRIYPNKQQEGYLSKVFGCVRFVWNKMLDEKMNARNETGHIPQITPAQYKEEYPWLYEVDSLALSNAQLHLEKAFRNHFSNPKRFEKPSFKKKRYEQSFTTNSVNGNIKIDFDEGTIKIPKLDMPIKVKFHRKFEGHVKSIIVRKKPSGRYYVSILVHENIEPLKPVYSACGIDVGIKDFTTITQGNGIDKKRLHIPNPKYLEKTEKMLKKLQRQLDRKAHPRRKGDKTKKSKNYIKYAKRVAKLHERITDQRMDFLHKLSYVVIHENQVIVAEDLNVEGMLKNHHLAKAISSVSWSKFIDMLKYKADWYGREFIKEDRFFASTQNCSICGYKNPLLKDLSVREWTCPVCGTHHDRDENSSDNGYEIGLTHLKQLVGQELPEFTPVEKSSVDDRAAMHPKSTSSLKQEATTSTSGR

SEQ ID NO: 24063 - protein, 637 aa, unknown
  TnpB Polypeptide
MDDDNHNFTVVKSTLNRFCNNDFIKSHLQDYLFKTNLLLNETYLFVNLHINRILENNLTSNYKTLNETFFNNVFMGLKTDVKNESKRFKEMELTDTYHLYKQSLPTDFQHANTKKKSTLLKELSLQLSTITDNHLKLNFYRRFSKYLQLQHPDTDWKTIYKIVNHILLSKKKFDESTDTEIKQHPLVIGYRLKFLNKTLDELLKYDVWIILKQLREILISNETHLMNEQETGLEYKLRTRNARLFSMLPIKQLSNLSYMILTRQPLYYLLSNSLGDEFTKIINENDKPLSNVNYFTETTYKQVCNEIFNIKYFETQLKEFHYFMTDGKTVSIVLKKRNFKPTKRRTKKEIDKDKKEPQTKRENKNVIKKQVNTESELDMKNLELIGIDPGLRMVFVGCRNTIDPTTEKNHITKLSSKQYYNDIKSTRMSMKLKKLIERNNLSNLFSSTTPSRRTSKIDQLCLCIRTITEKLHKLIRTLMESKVREWKFDKYRFQQKKIVEICKMLSGKTRREEERNVIIGWGNWSNPNNSIIKGHKRGPVKRIVKELRRWCRVETIDEFNTSKKCSKCLSDTEKMKYHYSKAEKMQTVNDVLRCKNELCRTYFDRDINGARNMLKKLKIKLGLEIEVEELSRKTIEV

SEQ ID NO: 24064 - protein, 401 aa, unknown
  TnpB Polypeptide
LKLIAQVKLVVTPDQSEALRETLEAANAVCNELSEWAWRSKVFGKYAIQKERYHSVRSESRLTAQVVVRCIAKVSNAYKAAFALHKEHVKRTERTNKNRAEKNLPPKPMPVMEDCKFRAHGSAAYDDRILKWYVAKQEVSIWTKQGRLKLPFLCGLFQKKLLQSRQGESDLVFKNGKWFLLAVCEVDDPPLKEVEGFLGIDLGLVQLASDSEGNSYTGAECMALRRRVAKHRRKLQKRGTKNAKRRLQKFNQRQSRYVAWSNHTISKRIVQTATQSRKAIVVEDLEGIRERASAFRRDMRWQIGNWSFFQLQTFLEYKSKAAGIPFVCVPAFYTSQTCSRCGHCERANRKSQSEFFCKQCCFRANADYNASVNIARRGMEAQGRTVSGPESWDTRQSLALL

SEQ ID NO: 24065 - protein, 390 aa, unknown
  TnpB Polypeptide
MASESKLVTRTVTRKAYLSKAGHRNLGQLLGQLTWLWNIALHRRRQAWTEREESVSYYDQCKVLTKARRDPVWSRFPVMAQRSVLQRLDRAYGRFFDRVKAGGEKPGHPRFKPGARGIRSFEVTTPVRTNGRWSWVVVKGVGRIRFRGRPPEGGVKLVRVCRTARRVKVQLVVERQIEVTPDRRPKVGIDMGIRARVALSTGESVPGVKLDRRELKRRQRRLSRARRGSRNRGKRKAELAREWQRVREREHGALHEITAAIVRDHSANLAVEDLRIPNMVRNRRLARAIHEQQWGAIVRMLGYKAESAGGSVTVVPPHHTSRECSACGHRRDITLSVRVYRCTACGLVLDRDVNAASNVLQRAIGLNPGGDTPERAEHQRRAGAVLPASA

SEQ ID NO: 24066 - protein, 397 aa, unknown
  TnpB Polypeptide
MSFVGERQMILSHKIRIYPNREQEQFLKKSCGVERFVYNWGLAEWQNQYKNGEKPNWMKLNKSFNFIKKQEFPFVCEVSKCCAQIAFANLGKAYKNFFDRRSKYPNFKKKGIHDSFGLDNLNFHIEGNHIKLAKMPPMRMAETLRFDGKIMSGTVSRVADKWYISIAVEIRRDLTLPKTGKFAGVDLGVKDIAITSDGCKFANPRWIQKSEKKLKRLQRELARRQRASKRCEKTRLRLARQHDRVANKRKDWLHKITTYLVRKYDVISLEDLNVRGMTKNHSLAKAITNVAFGEFNRQIEYKAQMYGKQIYRVDRFFPSSKTCSNCGCVQEKMPLNVREWTCPDCGAHHDRDVNAATNLLRRATPEVTHGERSALVISEISDVTKLDSLNRESYKFI

SEQ ID NO: 24067 - protein, 415 aa, unknown
  TnpB Polypeptide
VVFQNITKNQRIIKNKERSSVLIRSSSLTLQFATDKKLNTLDMVFDEYARVVNLYVNEYAQSKILPKFTPMKVNTWLSARLQQCAGKQALEVVRSTRKKDFELRQKRYKKVYKYFVKNNRQLNFLSKKMSELRLNYKIKPYFNGKTINMDNRFWKINQSTNSFDFWLLLSSIGNKIKLILPLKNHKHNKKFNDWRQLSSCRLLRNNGKFKIDLIYEKETPVIQKQKKELAIDAGINCLLSCSDGNQYGLKLKQLINELNNKKQKSHSYDRKLRQIHDYIRMCVNQLDFASLSDLILEKLKYIQIGTKSRVNKTTRKLLKSWNLGLLHTAIEQKCEENCVHLHYVNPKYTSRTCPVCGRIDKRNREGTVFKCVKCGFEDNADVNAAKNILKRFHQENSMLSDIVPDSTKTNFIVFH

SEQ ID NO: 24068 - protein, 303 aa, unknown
  TnpB Polypeptide
MKQAIRQMDGAYQKFFKQHNGFPKFKSKKDKQSALFPYEAISKHNTFETRHISLTTLLKNIRFRCSDLYFSRLQKYNKNIRSATLSKTKSGNFFLSILIEMEDAELKRFGHTNKQVGIDLGVKDFVITSDGEVFENKHFFRKEERQVKKLHRQLSKKVKGSNNRKKTQVRIAKLFERITNKKNAYIHYVTNELLTYFDTIFMEELNVKGMLRNHHLAKAIQEVGFYKFKETLVNKAFVNDKQVVFIDRFYPSSKTCSVCGYKKQDLRLSDREWVCPKCGTKHNRDINAAVNILLEGQRMLTAG

SEQ ID NO: 24069 - protein, 468 aa, unknown
  TnpB Polypeptide
MYYQQDENKVYQAQTIVVNKQKEAKLFHYCEEQCHAAKLLRNATVFRGRQLLFAYNKDYNDLKNHQIEVINEFNTYTSDKYGKISKEHYLPYSQEFEYLYKKSNNPDYFNPILTSQTRTRVVKQAMEDFSSFFKSAKKYYTDNTNYTGKPNYPKYTKSETITVDYSNQDCVIYEINNITYLKLPHMKKNKNAKIKPKKWGYINLGKLKIGKLMNLKISPYYDTYKISLVYEIEKSTHSLDNTRILGLDPGLNNFLTSSNNCGLSPFIINGRDMKSYNQHYNERLVYLRSRLPKKQYTSKQIKRLSKERDCYFNNKFHKIINYIVNYCVKNNIGTIVVGHNKLQKQNYNNGKIQNQHFCFMPNSKFLKMFKLKCAVYNLNIIETEESYTSQASFLDMDKMPTYKKGKNNNCQFNGKRKYRGLFESKDAICINADVNGASNIIRKVFPNAFDDIKDFTYLIKTVTKITIK

SEQ ID NO: 24070 - protein, 439 aa, Nonomuraea sp.
VRRSCKFLLRPTSKQAAALTQCLEDHRQLYNAALEHRRTAYATAGVGVRYGEQSAELKHIRADDPGGQGRWSFSSQQATLRRLDKAFGAFFDRVRTGRTPGFPRFKGRGWFDTVEWPKDGDGCRWDSQPEHPAASYVRLQGIGHVRVHQHRPVKGRVKTISVKREGSRWYVVLSCDDVPDEPLTATGAVVGVDLGVASLATTSDGEHLVNPRHLATSADRLATAQRNLARKKRGSERRRKAVARVAALHAKVRRQRLDGAHKAALALVRAYDVIVHKALRITNMTRSASGTMEAPGRNVVQKSGLNRSILDAGWGVFLTVLAHKAESAGRELIAVNPAHTSRTCARCGHCAKENHLTQAEFACRACGHATHADVNAAVNILRAGLALRQAAEAAQREAAPCRERRSHHVAGSTVGVVTASTMGGTGVSAARTRRGPRGP

SEQ ID NO: 24071 - protein, 376 aa, unknown
  TnpB Polypeptide
MDKIKLKLNSIQIKTLQMWNYHHRYTYNKTISLLNEGTERPLYKDVKPENSNTYYSKLELRNLIVPESCCSRIKWILETPKAIRESAVFESYKNLQSAISNLKNGHIRYFNLRYKSKKLLKWTIGVPKESIKVYQNGDLGIYEERTTNFRLRTTEKIKEIKNDCTIHFNGLHYYICVPKEIKMKRNDESNWICSLDPGIRKFQTIYSPDNDSYITIGEGSSRVLYAHLLRLDKLLSKKNSKNVLKIKKLRERIQHLQNELHYKSVNFLCTNYKNIYIPKLTKGNDIIKCSNRKISSKTVRNMVVLGHCKFIERLKTKAEEFTNVKIHIITEEYTSQRCLACNTFTKTNSEMFICKDCNFTIDRDILGSTNILLKNW

SEQ ID NO: 24072 - protein, 368 aa, Kitasatospora sp.
VDVVVVAVELHDLALEVRWYVSHDLLHAREDARAAGLPFPKAAELSKRLTRAKKTPERAWLGEVSAVVLQQSLRDLETAYGNFFASLNGTRKGPKIAPPRFKSRKDNRQAVRFTANAFVVETGPDLLPTTDSAVGIDLGLTHFAVLSDGRKIDSLKFLRRAEKKLKKAQQSLSRKARGSSSRDKARVKVARAHARVTDARREFHHQLSTTLVRENQALAVETMSVKGLARTRLAKSVHDAGWSAFLNMLEYKAGRHGRELIRIGRFEPTSQVCSHRGVKDGPKPLRVREWTCGDCGTVHDRDVNAACNIAKAAGLAVSACGARVRPGLLPAPRRETGTHPDAAPSPRSVEGSPAFRPVEEVNAWPSPR

SEQ ID NO: 24073 - protein, 440 aa, Streptosporangium sp.
MLYQSYEPYDSCGKGLGVKIQRGMRYRLYPTPDQVATLDEQGHAARSLWNLLHDWWTWGGRNRRPTLKQADQAIRQARQDIDWLGALPAQASQQVLKNYARAWKNFFEGRAKPPTFKSRLRSRAAVDVPQGRDLDVTKLSRRWATVKIPKVGVVRLRLHRTLPGTVTGARLLREADGWHIVFRANWEQPDPAPHPGPSVGIDRGIAAPLALSDGTMIGHGPWLRPKEAERLLRLERRSARQRRTRQRGEPASKRLRRTYDAIAGLRARAARRRADWQHKTTRTLAGTYGLIGVEDLNIAAMTRSAKGTVEAPGRNVAQKAGLNRSIQGEAWGQLVEQLTYKTAERGGAVVRVPAPHTSQRCHACGFITPGSRESQARFACKNPQCGWGGNADVNAARNIHHAAKQAASTTAPGSGVAGRGALQPSGGAKKRQPKRKDPVP

SEQ ID NO: 24074 - protein, 389 aa, Enterococcus sp.
VKRSLISREGKNDSRKKIRLCPTNEQLMKLWQSAGTARWVYNYTISMQRMNYRFNNGGFLSDQVIRKHITKMKKRPKYYWLSLVSNNIAKQAVKDACDAYKKWFHVIDGSSNLYVEIPKYKTKKKTTPSFYNDSTRIKFKDKSVLLEKIGWVKSNVNLPVNKKVYNPRISFDGKYWYLAVGLEVDQITYPISGTLGICLDGTYPVVLSTGEKFTSINQTDTMRKLEKKLARLKQQHRRKIRMNEDKLFVEKKNLHKLEIRIQLIYRKISNIRENYWHYVTMTILRKRPEKIVISYLPLHELMKKQEHQKRLSKECYYELKRQLHYKCEELNIDFTEVAPTDPCSKICYRCKSMNFNLLESGVVYQCLECNNTILKDRNTSLNLIDYSIN

SEQ ID NO: 24075 - protein, 399 aa, unknown
  TnpB Polypeptide
MSRYRLLPTPAQEAVLQDHCAHARYVWNLAVEQHAHWHPGRAGAPGYLEQCRQLTAARAEYPWLAAGSQTVQQQALRDFARAMAAFVGPANPAGRPSWRKAGRDEGFRIVGRRGRQWDVRRLSRKTGEVWVPKAGWVRFRWSRPVPPGVKSYRVTMDRAGRWHIAFAVIPGPVPAPGNGQAVGIDRGVAVSAALSTGELLHAPGLTGRERTRLRRLQRSLAHAKRGANRRGRVKHAVARLRARETDRRKDWAEKVSTDIVRRFDVIRVEDLRIKDMTRSAKGTRDNPGRNVGAKAGLNRGILRSGWGLLVRRLQDKAPCRVEKIKPALTSQRCSACGQVDRDSRESQAVFRCTACGFACNADVNAARNIAAGHAVTARRGDGVARPVNREPHLLLPSAQ

SEQ ID NO: 24076 - protein, 510 aa, unknown
  TnpB Polypeptide
MELVSNRSEVYQAAYHAEWCPKYRKPILTGRSATGLRKLLDKICEERKWRIAAVEIQPDHLPLFLCLPPSVAIAKAVTILKGTTASLLFRDFPAIKQKLWNGALWSPSYYFGTAGHVNAETIQRYIERTEHIRGRRQMKLTAKVKLGPSADQCTALLATIYRANQCCHWLSEQAWNTKKFRAYDLNQVAYRRARQKFSLGAQMVVRCMAKVADAYKSDRDRKRSFRLLGSVAYDARILKWRVENQAISIWSLSGRLNIPFACGPRQKELLRWQRGESDLIYSRGAFYLAATCEIEESIPAETTDALGVDVGVVNIATDSDGQRYSGSQTRSVRHRCRRLRAKLQKKQTRAAKRRLQKLSGKERRFATYTNHVISKQIVACAKRTQRSIVLEDLRGIRLRIRARRKQRAVLHSWAFSQLRFFITYKAALAGVLLVLVDPRDTSRECSRCGHIAKENRPNQSTFCCAVCHYSATADSNAALVIRSRAAVNPPRASARLSDVCSSTHTLVKSL

SEQ ID NO: 24077 - protein, 223 aa, Okeania sp.
MNETYKNTGKGLSGYEVKKLIPSLKKEHEWLKLTYSQCLQQVCLNLGVAFNNFFEKRTKYPRFKSKHGKQSIQYPQNVTILKQGLKLPKIGEVKAIVHRLVEGKIKTVTVSKNQCHQYFASILFEDSQEKPAERTDGKAIGIDVGLTHFCITSDGSKFDNPKFLTKYENNLKWKQQQLCRKKKGSNNCNKAKKKVAIVYHFLCGFNTPPSTRCSKLLGVRIPM

SEQ ID NO: 24078 - protein, 571 aa, Paraliobacillus sp.
VLKLTTKAYFSNRVYKNVTTKAAVEDTQHTLFVFNQAKHYRVQSEVREKRGSKEKGKSSIHQQVKARFNLTDYYANSAVQEGKALLSAQQELTKMYISNKEAQISSVKKKIKSTKSRLTVLNKIKNSFIKGNPKFNKISPEQQKGNFFVVEFKSKIDLYYNAYDFEHLYLDVQIKHLTSRLGRLEFKLDRFQKQITSLKIGVKSVCFGSKKLAKARTTTEKYQNNPGLWKQDWYLARYGKMTISGRKDAKTGNFVFHYNTNTNQLIFKTINGNVITFDNVVFPYGQENVDNAINTQMGLKNKKQFGKPIAWSVEDHGEYFVFKCLVDVLPNPYVNYSKSEGVIGVDCNVDHLAISNVNSIGQLIESFSLDFEVEGKTSGQLSKIIEAEIIALVDYAAKHKKPIVIEKLNTTKSKVKHAYGNKKANRRMSQFAYNKMVMAIKSRADKAGIEVYEVNPAYTSQIGKMKYMKRFGISIHESASYTIARRAMGFKEKLPPALHSLVPEQKQGLHHWVQWGSVSSCLSFARVHVFYKIEFSSQNKLSSWSSLFPKGATTDFEKMGLSRLENRKSKA

SEQ ID NO: 24079 - protein, 176 aa, unknown
  TnpB Polypeptide
MLHGRRWVMLRLFHGKYHDKFRWIKLDEAQLVLKRDSNLYMNVSFSQMVTLLEINANVKIIAVDVNENVIIYGNEDFIERFETNEGIIRTRYFLKRRRLQTKIRGKELRKKLLEKYKGREWRRIREIYHKAAKKIISRALEIGATAIVMEDLMIHKKDLCSEELNGWIHRWSYRRF

SEQ ID NO: 24080 - protein, 355 aa, unknown
  TnpB Polypeptide
MRAIGTKPNANKVKVAWNAFRVSIPWSYDVTKCASNQAILDLGKAFTNFYRDCKKPKKDRRFRYPVFKRKELNEGFALWNDQFEIEGKRVRIAKLGWVRTRESLRFEGKIMAARISFSGGRWFLSVQVDTDVHRDAAPEGSIVGVDLGITTLATLSNGEKMEGPRPRKQLLGSLKRMARRVSLQKHRAKEFQKHSSRRQYKRQLRLSRLHARLADIRNDAAHKLTSLLTSRFQTVVIEDLNVSGMSKNHALAGAILDCGFGEIRRQLDYKAAMRNGRILVADRFFPSSKLCSCCGFKASGMSLSVREWTCENCGESHDRDINAAMNLEQLGRATAEVTRGDMRPLSSAQAQRKVA

SEQ ID NO: 24081 - protein, 355 aa, unknown; identical to SEQ ID NO: 24080
  TnpB Polypeptide

SEQ ID NO: 24082 - protein, 386 aa, unknown
  TnpB Polypeptide
MVNDCVEIGLSYNVTTLKRLSILSWERRRGYNCPTYYKASALSRAVGILSARKKSLRRDIRSRNPYSIRPQITAYLGFRVKDGCLQIPVGGRRFEHVPLTKRTLSLLSDPALRVRSFTLTSTKLSLCISKEIPEVECVGAVGVDRNLRNLTVGDEHQVVHYDLSDAVRIARTTMRIVSSFKRNDSRIRKLISSKYGQRRRNRTQHLLHNATKRIVAEALRKRKAIVLENIEGIRRLYRKGNGQGRKFRSRLNVWSFGEAQRQIEYKARWAGIPVIHLSRKETQGTSVTCPRCGERLQEDKRLRRKLWCSGCRVMMDRDAVAAINLSRRGRLRFYRSQAEHGPQGGAAEAVKGNVDNGQPLLPRVDASKSRNRRSTDDLAEPGTPLA

SEQ ID NO: 24083 - protein, 328 aa, unknown
  TnpB Polypeptide
LTWHSRHSSGGCAQVKPPGFPRFRAAARYSTLEFPHGNRALKLSSAQSKVRVPGVGSVRMRGGREVPAFGRAMIVRNPRGWYVLFECKRETAPLPPTGRSIGLDVGVATLYATSDGDFAPHAALGEKRSAALASAQRRVARRRRGGSRRRKAVMLLARAHDALRWARRDWHHKLARKLVQAYDSITLEQLKVSNMTRSARGTVENPGHNVFAKATLNRKILDAGWRQFASMLLAKAEEAGRTIVFVKAYYSSQTCAACGYVAPENRRSQASFVCGMCGHSDHADVNAAKVILQRAELPPAGSGAELSDHKDPRSELSRARTPVAHYVA

SEQ ID NO: 24084 - protein, 380 aa, unknown
  TnpB Polypeptide
MLKTLKLKLHPTPDQQRALLATMERFNAACAWIARQAHRRHTTNKRALQKLVYYATRERFGLSSQLVIRAIAKVADAYKRDPTTLPHFRPQGAIVYDERVLSFGPGRETASILTLQGRIRVPVGLCPYHAAILATAAVRGQANLVYQQEQWYLLMVIAVPDPALTSSADFLGVDLGIINLATDSDGGVYSGAAVERNRRRQSHRRRNLQRKGTRAARRKLRRVAGQQARFQRDTNHVISKRIVQTAKDTMRGIALENLTGIRQRVTVRRRQRARHANWAFYQLKTFIAYKALQAGVPVQTVDPRNTSRTCQVCGHCAKNNRKSQSAFVCVQCGFAAPADANAAVNIRQRALSARAAVMPPMVSVAVDAVSGGDQGQAAGL

SEQ ID NO: 24085 - protein, 397 aa, unknown
  TnpB Polypeptide
MYLTKKIRLLPTKEQEVLFWKSVGVARWSYNYFLSESNRVYQEWLEDNSKPKYISEQEVRKYINNVLKKTTHVWLKEVGSNVMKQGVKDASESLKRFFNKTSNYPKFKSKKRSKPSFYVNYESLKRTLNGFHGERIGVVKTRESLPKIPKGQKYVNPRITYDGKFWFLSVSYKVELKQVKLTDEKIGIDVGLKDLAIVSNSNNSSFYTKKYRNINKGYRIKLLEKRLKRSQRRLSRKILNNIESYGKNRVPTYTRPLKDCKNIQKQKHIIQGLYRKLSNIRTNYIHQVTTEMVKNKPSRIVLEDLNIRGLVRNKHLSKSVSDSKWFEFRRQIEYKSELYGIEVVIADRFYPSSKTCHNCGHIKKDLKLSDRTYRCVKCGLEVDRDINASINLARYQI

SEQ ID NO: 24086 - protein, 402 aa, unknown
  TnpB Polypeptide
MLKSYKYKLKPNGDQIVLLNKHFGSMRYVYNYFLNERKKEYETNKQTLNYYDNAKALTKLKNQEEYSWLNEINSQSLQVSLKCLDDAYNGFFKKRTGFPKFKSKHTKNSFKVPQFVKLEKGKLRIPKFKEPIDLILSRSFTGIIKQCTISRTPTNEYFVSILVETTHTTLPKTGKSIGIDLGLKDFVITSEGYKYKNNRYTKKYQTLLKKNQQHLSRKTFGSHRYENQRLKVAKLHKKITNSRLDNLHKVSTELIRKYDTIILEDLNIKGMIRNHKLSKHISDASWSKFIELLTYKAAWNEKQIVKIDRFFPSSKTCNCCGYINQNLDLSVREWTCPSCHTKLDRDLNASVNILNEGYKQISSGTDDYRRGDEIRPTPVGTIAEASKILNLVSESQPSLVVG

SEQ ID NO: 24087 - protein, 444 aa, unknown
  TnpB Polypeptide
MDINTLYSIKIKDCNSIFKDSVAVYRDAVDFLIPVCIDHWDEISGQADLQHKKMYVEHLVHKTDKYPHPLYDFDGKFYKFPSYLLRGAIAEAVGRASSYMSNLASWESADSAARGRQPGIPKAGYIYPCLYRSNMFVRTGTYEAQIKVFIRNTWDWVTVRLRKSDVDYITHHCSDRKECAPVLQKRGKQWYLDFCFKEKVALKDTDIYHQTIIAVDLGINNACTCSAMCSDGTVLGRHFLKLSKEYDCLKRKTDRIKRAQRHGSRCVKNLWRYADGINHDISVKTASFIEGIARMYDADVIVFEHLDTSDKKHGSKKQKLALWRKMEVQRIAADKAHRLGMHIAHICTWGTSRLAYDGSGTVLRGGKSTRTNGTYSICEFKSGKVYNCDLNASYNIGSRYFVREILKSLPVTEGQRIQAKVPGCVKRSTCTLSTLISLNSALYA

SEQ ID NO: 24088 - protein, 657 aa, Streptomyces sp.
VSRKLPLAEGETSRTACARGVLRTGLDERTGDLLSTAVLAERVGWCAGLVSGMAGELTVEHWNTADVDTLASGEDTGGRKLPSNAWMALRRLGWAVAPPRGVKVNDRIVRMAQEQAGRVLRSAKWRADLTAGVLKTWPGDPAKRTAAEWEAVREAVPGGQFLPSSVIKSRTRQAAAFVGKHGRMPVDVFETEPTPRIARMLLLSACDGQQATIERADEPGRALLRLQLPTRADPASYKDWTWVACPISLPPVIPAGAVLHLPTLRIHQGRVRADLAYTHAVPKAARTGHTVALGVDWGLNTLLSAGAVRLHADGRISALGSGGQFRAAGVLAKQHRLRRLSEHLHAKADHYQRLTGGDGHHPLAARHTALSDEIRHVSDRRSHLNNALASAAARWTVDQAITFSATVIYVEDLRSMEAKGMGRTMNTRLSQQVRGQIVDRMRHLAAEVGITVVTVPARNTSKHCPQCLTPLRHREAPDRPTTPGWKWALCPSCRWQGDRDNGAWRRIAARGLTHQTKTVTDRTSGAMAIRTVVDTLEAGAVVTPSTDKTSRNDRSKTGPTRHHATRPTPRRRRTPSPVRPSGPAGQRPEGHAHTDRNRLPRAAHRQQGVATISKPTTAGHRPRGAALGAGFHLHAHATPPRWAIPLPDTTSDTGSLS

SEQ ID NO: 24089 - protein, 252 aa, Photorhabdus sp.
ISQSAGKWSVSFQVEIEASESHHGSTTMVGLDAGISKLATLSDGTIYEPVNSFKTRRCKLAKRQRQLSCKVKFSANWQKQKRKIQCLHSHIANIRRDYLHKTTTKISKNHAMIVFEDLKVSNMSKSAKGTAEQPGRNVRAKTGLNRAIRDQGWYEMRRQLEYKQRWRGGQVLAVPPAYTSQRCACCGHTAKENRLSQSKFVCQVCGYTANADVNGTRNMLAAGHAVLACGGTEQSGRPLKQEPDAERSAVAH

SEQ ID NO: 24090 - protein, 483 aa, unknown
  TnpB Polypeptide
MGRRRTFEIPEGWVACGFRFEVEPTAGEQQELIGRHFGARRFAHNWALAQVKANLDARKADPTVPALGWSLPTLRRAWNQAKQEVAPWWRECSKEAYASGIADLVAALRNWSDAKHGHRVGQQVGFPRFKARHKDRGRVRFTTGAMRLEPDRRHLVLPVIGRLRSKENTRRLQRLVAKGRARILSMTLSEHGGRLYVSVATIVCHPPCTPAEPDARCGIDLGIGGEWAVIAHHDDTIQRVAHPAPWIETHKQRRRVARQRSRRIVGSRGHRQASAKLAALDRRAANLRTNKAHTLTTILARRYGTVVVEDLDIAAMGRGMSRRAFRRSVAQAGVGAVRPTLAYKCSWAGGRLLVADRWFASSKTHHGCGGYLADLRLSQRAWTCPVCGAIVDRNANAALNLRDWTGPVTDRDVQRGGVAAPVPRVGDHDGQAHVVRRGRAKPQKPTLVAAGANDTRTKPRRELRRGRGTPSRGATQRTVTDAH

SEQ ID NO: 24091 - protein, 389 aa, unknown
  TnpB Polypeptide
MLKQRKAYQFRMEPTDLESDELLRMAGTPRFVWNWALYRCQTFYRQNKKSIPPSQLSRELTEFKSQQPWLYDFDSQSLQQVLENLRQAYRNHFNPKMRSGFPKFKTKKNPRQSFRIPQRVVVRESKVYVPKLGWVKIRQSQPIEEATKSATFKRTATGQWYVTLISEFEVSEGKQPVTQVVGGDLGLETFLTLSDGTPPIENPRFLRQYAKRLRRAQRHLSRKQKGSRNRAQARLGVAKVYERVANLRSNFCHQLTHQLMQYPAVCLEDLSILGLAKTKLAKSMLDAAFGEVIRQWKYKSVWNGTYALQADRFFPSTQLCSACGYQNPKLRLCDREWICPGCETQHRRDQNAAQNLEDEGIRQLVAMGRIETVNACGRYVRPAVAGHVG

SEQ ID NO: 24092 - protein, 349 aa, unknown
  TnpB Polypeptide
LLLTFKVKHGRDFSQELAKARKIAEFAVRTRSRSSRDVKHLGLKSAIANQILRKYSCDRKAKKVNKTVLTVPGQSIRTDKTERTIKVSCLKLELQYRFRNDFEKINQIELDGQYAYVAVSVPEPKTVETEQFIGVDRNTTGHCVVVAHPQTGKVWKLGKSAEHVHKKYMAIRRALQRKHKLRKLKTIRRRETRKVRDLNHKISKRIMQIAAANNCGIKLEDLEGIRGNRKHARQFHYSLNSWSFHQLQTMVEYKARLQGIPVVYVEPAYTSRKCSRCGHVGNRNGKTFKCSGCGHVEHVDVNASFNIGMALGPRDVARLRADRDACKGSTDTPRGATPMNDGDPRTPWL

SEQ ID NO: 24093 - protein, 404 aa, unknown
  TnpB Polypeptide
MILRAIKIRLYPNKKQEQTLNKVLGCYRFVYNQMLARKQEAYNADKTNLGLCELSRFFHRELLRDEQYSWLKEQNTKVKKQAIRQMLSAYDGFFKLGKGFPKFKSKHYNNSALFPCEAISKSNTFETRHISLIKSLKNIKFHCSNLYFNRLQRYKDNIKSATLSKTKSGKFYLSVLISMNEEEFKQFRHTDNKVGIDLGVKDFIITSDGEVFENKHFFKKSEDKIKKLQRQLSKKVKGSNNRYKTRLKLAKAFERLTNQRLDYIHNVVNSLLKTYDYIFMENLNVQGMLRNHHLAKAIHEIGFYTFKSILKNKAMLNDKFVIEVDRWFASSKICHCCGYVYKNLTLGEREWICPVCGELHNRDVNAAINILIEGNKILVGGRTTELTLADYPTMDDRCEKQPKK

SEQ ID NO: 24094 - protein, 373 aa, unknown
  TnpB Polypeptide
MLRSYRYRLYPTKKQAVVLKDILFTACRLYNHALAFRRKKWKESRYSVTYYEQSAMWRDWRNEEPENNYTRILNMTAGQQILRRLDKAYKEFFKGKRGKPRFQKSSRFSSVAFKPGDGAQVKNSFLYIQNVGLIKIRWHRLLPECQLKNIIVLRKPSGWYVLLQIEIPDRQPIQNNNPAVGTDVGITHALALSDGAIIDSPRYLDNSIKKLRRLQRAISRKKKGSNRRKKAVKKVAALHEHIGNQRLDFWHKTTHRLVNDYGIFYLEDLNLRFMLRNKHLSRVSHDIGLGFFRLLLSYKAVEAGALIKTVNPKNTSQICSDCGCIVQKSLNIRIHACPECNLILDRDVNAARNILLLGRSSQALTQPTRVFVV

SEQ ID NO: 24095 - protein, 448 aa, Bacillus sp.
  misc_feature (330)..(330): Xaa can be any naturally occurring amino acid
MTKQNKAYKFRLYPTEDQAHLMRKTFGCVRFVYNRMLAERKEAYEKHKDDKDQLKKQKLPTPAKYKAEFEWLKEVDSLALANAQLNLQTAYKNFFRGQNDFPTFKSKKDRKSYTTNVVNGNIMLLNGHIKLPKLKMVRIKQHREIPQDHIIKSCTIFMTPTGKYYVSILTEYEKEIVQKKVETVVGLDFAMDQLYVSSEDERANYPKFYREMLDRLAKAQRVLSRRTKGSGRWNKQCIRVAKLHEKVANQRKNFLHHKSKELATHFDVVAIEDLNMKGISQALHFGKSIADNAWGMFTSFLAYKLNEQGKQLVKIDKWFPSTKTCSSCGXNFLHHKSKELATHFDVVAIEDLNMKGISQALHFGKSIADNAWGMFTSFLAYKLNEQGKQLVKIDKWFPSTKTCSSCGNVKNMSLSERVYSCICGVNLDRDYNAAINIKNEAIRLLALA

SEQ ID NO: 24096 - protein, 380 aa, unknown
  TnpB Polypeptide
MLRAIKVRLYPNKRQKQTLNKVLGCYRFVYNQMLARKQNTYKADKTNLSVTDLSKWFHGTLLKDEQYAWLKEQNTKVMKQAIRQMDGAYQKFFKQHNGFPKFKAKKDKQSALFPIDAISKKNTFETRHISLITSLKDIKFRCSDLYFSRLQKYNKDIRSATLSKTKSGNFFLSILIEMDDTELKRFGHTNKQVGIDLGVKDFVITSDGEVFENKHFFKKKEKQVKKLQRQLSRKQKGSNNRKKAQIRIARLFERTTNKKDAYIHYITNELLAYFDTIFMENLNVKGMLKNHHISKAIQEVSFYKFKETLVNKALVNDKKVVFIDRFYPSSKTCSQCGYKKRDLKLSDRFWSCPECGAEHNRDINAARNILLEGQRMLTAV

SEQ ID NO: 24097 - protein, 497 aa, unknown
  TnpB Polypeptide
MRAQTSSYVVSVKLKLTESVKNRLEKTFLVTSSAYNEALSFGLRRFEDLKQNSRYQELLELRRNNNHQVKEYEKELLKMRKMYSLTEFGLSAHLGQQRKKLNSPYQQLNSGELQVIAGQAYKTLEKVLFYRIKSSSIRFRSKYDLNVSYRNRVNTTGTRIIPSDRNDCAYRLYIHKSTTFVDIPIKALNNHQQMSLLKSEKIKYVQIIRKTIRGKHVYILQIVCQGFPLTKVKRGVGTMGIDPGISTVAYVSKTSLALVDLIPKDVNRKEKLMRYLDGAIERSRRINNPKCYNSNGTIKKGSKFKHPSNRQVRLQVRRIKSYRSLSEERKKIQGQLVNHLVSQASLIKMEDLNIKGLQRRSKEIRINPKTNRPFSKKRYGRSIFRAAPSLFRQLLQTRARQLGVDVEIIQPKDLKPSQYNHITQTFEKKTLSTRLYDLSDKWTSVQRDLYSAFLIGHIENGSYQQEKLTEDFPDFYKQMKKFLQKPRKTNRLDWYLN

SEQ ID NO: 24098 - protein, 509 aa, unknown
  TnpB Polypeptide
VKFYDTVTRYRFTTENGVDAEQVGADLAQMIAWMTEAEQEVLASQKFHDLALEALKGDRPTGSLNSWGRKRLSRYDFEFQKHNMNEMLVSNVVSTLELYAMSVGLFHVMSTHPKESKPEKILSYYRSTYPKAPQPTSGMVRAHLRRYHVKGERRASLPGVSANLNLAVCDTKFSPKSFRDENDPLSIVIQLRTPHYGLTSVHLRLPDNESRFGDGKVCRPTIRLNNKGQVVFDIAIEHEVDTQQTKKVVGVDLGKVEPFVATVIDPETKHRSAPYHANYKRRLGSLVKKEQHRRDLSHYLYERADLCDSHNRNQHAQVLRTEAKHVSAKATRIKHEISQCIASQVVEIADQNDAYVSLENLSWLDSQGGRWPHAEIQSRIENTAKRYGLKVVKVNAKDTSRTCSHCGGQVSHNTRTRVSSCTSCGFELNRDVSASREIALRAASNTRNREIMRSLLRQRAKMRSSAATRQSKPVTALGGIQGHTGTSSNGLEATLMMVRENLDSRGSPT

SEQ ID NO: 24099 - protein, 289 aa, unknown
  TnpB Polypeptide
MSSKTIVSRTYPRVPYASFNKNGESLDLKEVMNGVKADAELVAHYALQEMTEQNLALSTYFDRYKPAEAGRQMNLKLPVEVKKQFRSGASRLEKMFQEQVVTNLRSWAARVEVMTQTYPKYVSAGWKRTASKSKPTSMSPRMALSATDKGYHKNFSVTPERISLDMVVQGKWVTLHFPTPPQLLEKGCEPGVPDIWVDKDNRVVFGFHGKTDPGRPEFSKRYVVGVDLGITNPAAYVVWDTENKEVVEKSLLGQRSRSLNNKIKRTQTQVSSLKRKGKDEEAALHREHL

SEQ ID NO: 24100 - protein, 509 aa, unknown
  TnpB Polypeptide
VKYYDTVTRHRFITDDGVDTEQISADLAQMVSWMAEAEREVLASQEFHDLAVKSLRGDRPTGSLSAWGRKKLTRYPFSFQKHNMNEMLVSNVASTLELYAMSVGLFQVMSTHPKETKPEKILFHYRSTYPKAPQPTSGVVRAHLIRYHKKGERKASLPGVSAKLNLAVCDTYFAPKTSRDDNDPLNVVVQVKTPSNGVTKIHLRLPDNKSRFGEGKVCRPTIRLNNKGKVVFDIAIEHKIDERQTNKVVGVDLGKIEPFVATIIVPKDKHRSAPYHTNHKRRLGSLVKKEQKRRKLASHLYKRADVCSIHNRTDHADVLRTEAKRVSAKATRIKHEISQCIASQVVSIADQNDSHVSLEDLSWLDSQGGRWPHAEIQQRIENTAKRYGLKVVKVIAKNTSRTCSRCGGKVSNNSKTRVGSCASCGFSLNRDVSASREIALRAASNTNNRERMRCLLRQRAEMRSSAATRQSKPVTALGGNQGHTGTSERKTEATLMMVRENLDSRGSPT

SEQ ID NO: 24101 - protein, 215 aa, unknown
  TnpB Polypeptide
MSIFIAQELADVSWHYGNAIVSFEDLSHIKNTMKHGRWFQGEVFRRTRDMVEADGGRVMKVNAAHTSQRCHVCGKNLDMSDYSSPVCHSCSITHHRDLNAAANIAQRANVKKACETRKNHATKTKRVRRSKCHSKPLKHPGTKNKPTPKAPQNQKKTKTHTRLSLPKREVSKGMCPADNRVSAVDHMEWFQTTSGTTIPKENLSINTVDWVYPKE

SEQ ID NO: 24102 - protein, 450 aa, unknown
  TnpB Polypeptide
MSNVFTITTELKLNKEYNQLAGRYISDYIELFNKIQRLTFHRIKNYYIKNGKITLEDRNIIHAQLKEEFNLTSRAIDAILSNMLGRYEAIKELKEFERKSLERKISTLEKDLTRLKDERTLQRVSLNNNSKDFNFVKYKNLKIKIYWKQNRLNTKKQKLKNLESEIETGKYKVCFGTKELLKKDYSKFIKKRDSEIYFLGRAGDSSCNLNFQVEYNSKINQFYFKIRKEIDLDNDKFVYGQFNFNNKIYTNLLKNLLRTKESALTYRIKIKEDKVLLQIIYNFKHNKDLCITRNSYGVIGVDFNKGFVSVSEIDKYGNLINTFNIDYQYSKGNQTTNDFQYIATKLKDYCLNTGKDLVIEKLNFTKKKDNLISKRGKKYNEMLSSLAYSKFDSIITSKCAKNRIFLHKVNPAWTSWIAKQKYCPKMKLNVHSGASYVIARRGMFLKDKVK

SEQ ID NO: 24103 - protein, 580 aa, unknown
  TnpB Polypeptide
MGVNPTGSRNGSEIYIGWRTKMARSKGVTIAVKIPINWEDMTERTRQRLRQTVGRDTRVIRAFLGIIEQNENNLLTGKSRDRIDDVKLSQLTMTALKVRSGYSQRTTVPHDLKVRFSRISQNEMAECRQTAVALYESYLKLRKKKGWNASRPTSTNGSRRIPRWVYSQRFKLIEKVTSVSRWWLDIRDAFDSVQEERTFHDRLSVPLKISPFHLNQIQRGEVKAVQLFTDRRKKWWIAIAVRVAVDESPEETLPIAILGIDLGIEKAACSTLLTPEKTRETRYFVQREKVENIKKYDKHVAELQSKMHTRSNNRLESDRVAEKLRLMRSKRENVAKEYDRVLAHQLLEYIFELSKKYTLYVAIGRLKNIRMRAKRGNNQGRRFRGMIHSWAFARITDSLKHGLAQQGWKVKGPDARFRAVPEDWTSIMCWKCGSKGTRPKQNYFHCSSCGLDLNADRNGSINIAARMLTLTKSLHSVRGLGLWTRPLEKVRRAPLKAQKKMNSSRGKSLLSQKEQTSGSGESAAVHFVQSDLTSYSDGTGESDNDPAVVKTVETLSVVGSDGPTSVQEKEAKSSGGIPSR

SEQ ID NO: 24104 - protein, 409 aa, Cyanobacteria sp.
MLNLIYNYKIIPTKEQIDQIEHNLAVCKSVWNYALAQRKLWYNSRSCPVNACLIKFEYIVPPFEYPTYHTQSANLTQAKKTNDFLKSGNAIAMQQTLRKLDRAFNDMKAKGCGFPRFKKRMKSFNLLAKKFEVNGNRIKLPLLKEVRFVKSREIPEGFKIKQVQIIKKASGYYANLMIELDVDVPTPKPHGHAIGIDVGIQSMLATSDGLTIKRPKFLDNVLRQIQLLQRKLRNKERGSNKYLKLQRRIALLHEKVANKRKDYHFKLAHQLCSQAGMIFVEDINFTAWSKGLFCKQSLDMGLGQFFSVLEYVCSQTDTCFAKVNKDYTSQVCPNCGVHTGKKDLNQRLHVCPECGYEQDRDVAAAEVVMKRGVAEHFGRLSVSLVEALTAVGAPVDKQPSHGGLPGTTV

SEQ ID NO: 24105 - protein, 330 aa, Streptomyces sp.
IRHPPRQLDQRTAYKNFFDSVKGKRQGRKVGPPRYKSKKDTRQSIRLNTNAFCLRSDGAVYVAKVGSLKVKWSRRLPAAPTSLTVTKDSCGRYFLSFVVDTEPDILPGLDDDVGIDLGLSAFAVLSDGSKIDSPRFLRRAEKKLKRLQRELSRKAKGSKNRAKARVKVARQHAKVADRRRDWHHKASTQIRDNQAVYVEDLAVSGLGRTRLAKSVHDAGWSAFVGMLEYKAALHGRTFAKVDRAFPSSQVCSACGLRDGPKALHVREWTCGECGTVHDRDHNAARNVLLEGRRIVAAGRVETQNASWSAGKTRTKVPAQRGEAGSPRKGQ

SEQ ID NO: 24106 - protein, 467 aa, Streptomyces sp.
LGTPPGSRATGLRPRPCSPNAAPHGAALPSSSPTDRRPPWPGDSSSASASRYCSSPISRHLRTSSASAKSARTRSSSAASASTRTTAAFRRASRTARIDGIRHPPRQLDQRTAYKNFFDSVKGKRQGRKVGPPRYKSKKDTRQSIRLNTNAFCLRSDGAVYVAKVGSLKVKWSRRLPAAPTSLTVTKDSCGRYFLSFVVDTEPDILPGLDDDVGIDLGLSAFAVLSDGSKIDSPRFLRRAEKKLKRLQRELSRKAKGSKNRAKARVKVARQHAKVADRRRDWHHKASTQIRDNQAVYVEDLAVSGLGRTRLAKSVHDAGWSAFVGMLEYKAALHGRTFAKVDRAFPSSQVCSACGLRDGPKALHVREWTCGECGTVHDRDHNAARNVLLEGRRIVAAGRVETQNASWSAGKTRTKVPAQRGEAGSPRKGQPTQAGIPGLLGQGARQVSTRVSAGSRGSTWSGLDAAV

SEQ ID NO: 24107 - protein, 531 aa, unknown
  TnpB Polypeptide
MPKAEPSKVFQGVHARLVFPDHRDEAAVLDLMRRFSSATRFAYNRLLEGQDRKELKREDGPLCALFRLNTRYADGAIEKAQAALDSARELGQDPRKVVFGGRKLFEQLKRKHLSGKALLALKREWKERRQGLLYSRGDSAKKGNANLRLEPKGGALWLRVNLENGSQVQALVKTAHPQREALLQRVYASLPYNVSLQLKEGKVYAHFTWSEELPPPVHTKANGVLGIDANGDPYHLALAVVSPDGNLIRHLTLSLEEVDRAPNKGAKELALWKVAHQVVALAEEHGVAIATERLKYLRKSKRGDGSGRHFRRKQHRFAYRSLLEKIHSLARKRGVEVLEVNPQDTSTIGMLKYAPLLHLSKDVAAAYVIGRRALGFEEKLPKGYEALLKEDAFLAHVQGFYGNRLQELQKLKEAEKNPYLKRKLSRDIGKAKAALTLVSSLQGSPGSRKGVTEGRNPSGANAWRVLRVSLCKIGPTGLTLPLLGLEVPRDLSPLKPILNLASLTHGSWKGWKIGSGPHPGGGPECANVHFK

SEQ ID NO: 24108 - protein, 315 aa, unknown
  TnpB Polypeptide
LTNHKKENEWLNYTSSYALQQSLKDLEDAYKNFFRGIKQKKKVGYPKYKSKKNNRQSYRVPNNCNIIRVYDNKINLPKLKLVKCKVSKKVEGRILNATISRNPAGQYYVSICCTDVEIKPFEKTGENVGIDLGIKDLAVCSNEIRYPNHKFYNKSEKKIVKLHRQLSRKSKGSNNRNKARIKLAKVYQKIADQRKDTIHKMTTELVKNYDVICIEDLNVGGMVRNHKLAKHISDGSFYEIRRQLEYKTKWYGKELVVIDRFYPSSQTCHCCGAKYGGTKDLSIREWICPECGTVHDRDTNAAKNILNEGLRLLDR

SEQ ID NO: 24109 - protein, 541 aa, Gammaproteobacteria sp.
MPLVKRVLSIRIAGKERKQKVRKLILDLVHFKNLLILLIRRYRELYGYYPLNESLLYGLLAKEYKGKYQCEFNELLQNIKNDKKLTEFLENLKDQKEKVENPHLVQSVIRNIVRDFNNYFKSLDKYREKPKRFRAKPKPPKPKKLRYLIDFSVEGNANIFKVETDKFLCKLRNGRWLKVKLPKNFGYKITSFRLKLLADDLYVDVVYKYPLEIKEPKGNFKAGIDLGLDELLAIVSDNPNLKSFIVSGKELKAFNQWFSKEKAKLQSEIDKLKNELKKKGEDLTEKQIKAIRKQIRDLEIKLKILSAHRRRRLNNDLHKIARKVVDLLYETGHKAIYIGINALESKNGINLGKKLNQEFVSIPFRKLIELIKYKAKEFGMEVKEVDEAYTSKTSPFADVLKNQKLGKKLKKEIEKLERLKREDNQEKIAKVEKKIGKLTKEIKKKLLGKRKGNIFRDFISGKIFHSDLVGALNILRVGAKLLRLSFYGNLKVLFVKLCNPRRFKLMEFFYKVSPESVKWIGGSRHALERARMNGERAFTIA

SEQ ID NO: 24110 - protein, 391 aa, unknown
  TnpB Polypeptide
MEIVKTIVCKLKVSKKNKEILLKTMELFRDACNYISEIAWKQKCFNPVALHHLTYRKVREKFKLPANLAIEARDRVAKSYKTDKSKLHEFKSLSMDLDDRLFSIKQKEDKFLVSIATIKGRIKCELDIGDYQRQYLENAKPTYATLHYRNKTFFLHIAIDKEIPEPKGSNPVGVDVGIKHLLVASNGFKVKGGKIVKQREHFRKLRQELQKKRTWSAYRKLKQISGKEKRWINTILHQISREFVDSLKEGDVVVMEKLNGIRERVKLRKEQRYFFHSWAFRKLQQYIEYKALERGIPVVYVNAKNTSITCPRCGYVEKRNRRTQSLFRCVKCGFQHNADMVGALNLANKFRSELARAEWGVVNRPNAGMNAMSFCEHHDSPANHSFLTGGG

SEQ ID NO: 24111 - protein, 451 aa, Mycolicibacterium sp.
LQVTQIDDVTRRSLCGELQLSDGSSVCCGVETPGISRGRKRRSSFRDLVGGGGYGVDVSRYRLLPTAEQATELAEHCRHARYVWNLAVEQQQHWRPGRRAPGYNEQCAQLTAARAEHDWLAAGSQTVQQQALRDFAQAMRNFFGGTHRRPTWRKAGMHEGFRQVAVKSHHVEQLNRRYGRVWVPKVGWVRFRLSRPVPDGVKSYRVTCDRAGRWHIAFAHAPAPIDGPGNRAVVGIDRGVAVSAALSTGEMLHVAGLSRGEAKRLRVLQQRLARAERGSNRRARTKLAIAKLKARETDRRKDWIEKTTTDIARRFDTIRIEALDVRAMTRSARGTVENPGQRVAQKRGLNRGISRSGWGLLAVRLQHKACGRVEQIPAAYTSQRCSACGHIAPGNRKSQAVFECEACTAGPCNADVNAARNIAAGRAVTARGDLGASRSANREPQHCSPAA

SEQ ID NO: 24112 - protein, 385 aa, unknown
  TnpB Polypeptide
MGTRRFVTYRYRVKDAASGTRNALRRQARAVNFVWNYCCQIDREAQARWKAGRQVRRPSAFDLANLCRGVTKELGLHSDSIDAICRKFADARESIFPKTPKFRSRKRNLDFIPFSNFVRPAKLETQGLTFLGRTYRLWQSRPIPKTGKPKSWELSTDARGRWYVNIQVELAQPEKREGQAVGIDLGLKDLATLSTGEKIAAQRHYHSEERKLATFQKRGQKARARALSAKIANRRRHSLHVATTQIARRFAQIYVGDVNASSLKQTTMAKSVSDASWAAFRTQLSYKAIALGGSCEVVSERMTTQACSCCGSLSSTTKPKGIGGLGIRHWDCSDCGASHDRDVNAALNILRVGLERQPLVGGIRQKAEDVNPHPLSRIAQAERAA

SEQ ID NO: 24113 - protein, 534 aa, unknown
  TnpB Polypeptide
MAKKLKKVKDYQDVVMSYYINNTDRNRLLFQFLKPLSEVSVHIYNQCLYFAKLMYNNNQAMPSIETIDHNCRYAEAPFDYYKQIQALASDDFAGKTIRLHYTPIQSFVGLKETDKELNGTPQLPRYKNTQEDPTRSFATRVRLNDKKGETIRSMIKEKQLGNKSYYYLQILKTKNIWIPIPKCCQTEELLISKGMKEFQINFIPISCMKYKIQILYRKPIQESCLDRSRMLFIDLGTRNFATCITNDPSLYPVILNGNELLNLNRYLVNSQNTHSRICQIQQKIDTLIDAGTISENIVPSKTRIVKDIREYRKRVIREIFLKYKNFLLTYCQRHNIGTIVIGENKGWKQNTKQTKGQDGNRKFGKTATREFQNIPYDQFKFQLEYSAKILGIQYIASPEAYTSQVDHLAQESLEFHPSSKVEGMKRNYIMRNNGQEIILKNGKKKTNNKLFISKSGIVINADVNGAMGIGRKYCLENNIPEPDFNQHVQTRSLFTPIRIKYHQLNQPKTQFNWNQFHISTQNSTSLTPIASPIK

SEQ ID NO: 24114 - protein, 370 aa, unknown
  TnpB Polypeptide
MIKTFKYKLYQSKNNKHLFDKMDTACWIYNHCISLNKRYYKIYKKHLNKFKLQKHLTKLKKLPKYSKWKTLGSQSIQDVTDRIERSYQQFFKKKAKSLPNYKGRYKYKSFSLKQAGYKLSDNNQIIINKRKYKYFNSRSIEGVIKLLTVKKDNLGNIFLYFVCQVEKPEPILKTGKTAGIDFGCKTFLTLSDNTTYDNPEFLKNSLNKLKEVQQVLSRKSKGSNNRKKAKHKINKIHQKITNQRTDYLFKLSRQLCLAYDELYVEDLDMKSMTTSKCDNKQLEKNYHRKVSDLSYSEFLNILKYYCNKTDKKLKKVDKWYPSSKTCSNCGWYNKDLTIKDRTFKCEICKEEIDRDLNASINIKREGASSR

SEQ ID NO: 24115 - protein, 506 aa, unknown
  TnpB Polypeptide
MTETKKCAWFSAKVRELSGKMWNPLTEHKVIPENKNGTIMERHVNTNAITTFENIKIASDAKIKTAKIAEEHKKKISELSSVAPTYEARKAELNTKYERKQINADKVIRAKMIKIYPNSAQRATLKLWFAECSRVYNKCVDLYNENPSNFPLNFKKSKLIVFSALYPAEQDKGCPYDILTDEVKTFCANVKSCLSNLAGGHIEGFKMKPKNTSVNQCIGVPKTAVKKGSFYPSYLGRMSGLDAETCECDSRVSYNHARDNYFMFLPQYREKTIIADRADFVALDPGERIFQTYYSPSEWGKIGEDSRGRILKYESKIRKFQRILSKMEKDKCKSKTRGKIKNKINRAYCKIKNIVKEMHNQTCNFLCKKFDTILIPEFKTQGMVRRDGKKKIKATVSAMKTNDAAKSQFREYSKKVRLTGRVKFVLNMQSHYKFRQQLLAKAEEYGCRVEVVGEEYTSQCCTFCGFLSSTYSNRIKHCDKCASTINRDLNGARNILLKNYKKIIRL

SEQ ID NO: 24116 - protein, 453 aa, unknown
  TnpB Polypeptide
MQAKWACDDDDTISVSSDVLVSAIKRNYDRGMQLRYNYRLYPAPGQRAALARAFGCARVVFNDGLRARQEAFAAGRPYLTDAELSKRLTAAKATRERAWLGEVSAVVLQQSLADLNTAYRNFFASIRGERKGPKMEPPRFKSRKDGRQAVRFTANARFKITPGGKLRLPKIGDVLVRWSRPLPCDPASVTVIRDAAGRYFASFVVEHGPAADAARFPAADAGVGVDLGLTSFAVLSDGRKITSPKFLRRAERKLRRLQKALSRKADGSANRDKARVRVARQHAKVADSRRDFHHKTPTAIIRDSQAVYAEDLCVAGLARTRLAKSVHDAGWSAFVTMLEYKARRYGRVFGKVPRSYPSSQVCSACGRRDGPKPLHVRSWTCPGCGTLHDRDINAAVNVLTEGRRIVAAGRKPRAGMPGEAETLNACGDGVRPPLAVAAVRETGSRPKPRRDAA

SEQ ID NO: 24117 - protein, 407 aa, Acidobacteriia sp.
MLLYKLVIQYTTYSVRCSLSPAGYRHLDNILVRLNWLYNQALEERKTAYAERKETLRLYDQHKWLTGLRARNEQGLGEIALGPARGMLKRLDEAFQSFFRRVKAGQAPGFPRFRPLSRCVTIDLTKISGGTVKPRGGHYELQVKGFPRIRLYGSRELPDAVAKSVRLTKRGRHWEASLVYAVERAALPASVKAVGIDLGVRKRMTLSNGKRYQRATRDRRRKRRLQRAVARCRKGSQRRRKRVRALARFQRREFVRERNACHRATTEIIRDYGLVAVEQLQVAKMTRSARGTEEQPGRNVAAKAGLNREILSQNWSLLRRQLEQKAEWAGREYVEVDPRYTSQDCSRCHARNKPRAAETYRCRACGLVEDRDVNAAINILAAGVIAAGASTWAVGPCVAPESYARAA

SEQ ID NO: 24118 - protein, 281 aa, unknown
  TnpB Polypeptide
MRISLDKLLEGNSDKRAYLSWQTAHQVVEIAKRERKAIVVETLEKLPKGKRGDGLPKLRQKLQKWIYKGVLQKIEIVAKRNGIQVIKVNPAYTSIIGKLKYAPLYNIDKDTAGAYVIARRGFGFKERLPNNYRKLLEDKEFLSYSVARVEDRIAGLRKEIEAEENEYKRNKLRSDLRRLKGELKLLLGSLLDSGESETAAQQAVNRELKPMRGRVKALQKSWQVLSVALALSCIESLKDFSPLKRVILLRDWVGAAKRKGLVPLPHQEANALNMYSFVQFE

SEQ ID NO: 24119 - protein, 653 aa, unknown
  TnpB Polypeptide
MSDKLNQYIKKYEKSLTNYKSVKTSLNSIIKNKENIVEINKIVIVVNKLITHTYIFLKLYCIYMYDKNKEQIPVINVKLIKSIIKIIGSKDNRGTKPSKTTQLLMKDLQDFYDKEYKQLLNNNDKLSFTHLNTLLDYEAVDIITNIENHIKEHYTDFLFRYINVKLNKKNMEKQIKEDFSNVKLRKRTLTGYRKILRQFKNDLINQTNKCQLFNDLRQYIIKNIFPENITTESIQKQIETNPYLFVNGMIKMNREIEKLGNTTFNCFPIRRSCIPKYIRLDTTSLIHILFPKELNKNQYLTKGNTKIYQSVIWSMFFRTERKVFKDKSYTFNNSIVTDGFGCSILFIKNSLYNPLKRVKPKVYRKPFNYSSDKYLDTLTIEEKETYDSKCIIAIDPGKEDLIYATNGYKNDKGKLITFRYSQNQRRKEIKSKKYMKMLDAIKLTRKVNDKTIKEIESSLTGYDSKTSVYELFKSYIKKKNEVNELLYKYYEEELHRKLKWYSYINKQKSESWMINNFKQKFGDEKNTVICIGDYSQQYNMKHKEPTKGKSIRKLFKRAGYKLFLINEYNTSKKSFIDGSDMEKFRIRSNPKPWLKYQLKQVHGLLRSKNVTENNNNPKHILVNRDMNGSMNILKKAICIMYNIPIPDYLCKTN

SEQ ID NO: 24120 - protein, 382 aa, unknown
  TnpB Polypeptide
MRTYEYRARPNKKQETQLRAVLIASRRLYNDALQELVEHYKATGKHMNLFEQDKRHGAKEHPDLPAIVVDTTLKRLHRSFANFFRGRKDGKRIGFPRFKSADAWNTIQFRDAANCLDGNYLKTPKICGGKLRVNVHRPLEGTFRFARLVLRPSGWYVQCVTDYDGERLAPSSKSVGLDMGITYLVADSDGGFVRNQKSFRASAEKLASAQKQLAKCRKGSRRRHKAKKQVARVHERIVSQRKDKLHKVSRSYVNGYKTIVVEDLKPANMVRNNSLALSISDASWGLLRFFLAYKAESAGREFVTVPPRYTSQRCSHCKELVQKSLSVRTHICPYCGYVADRDTNAALNILRIGLDETFAERTRGAGFASESPSPLKREAIGL

SEQ ID NO: 24121 - protein, 359 aa, unknown
  TnpB Polypeptide
MLTMKYRIYPTRKQQSLLWKQSNLLTRLYNQFLEQKIKAYKEKGINIKRFELQAQLPKIKKENPEYAQIHSQLLQQVPKRLNETYNSFFSRGYGFPKFRSSRFFFGLVFPQDTGCRIANKKLVVGKEKIKMVQHRPVPESIKTRTIARTTDNKWFLCLSYENQTNPQINNKKILGVDLGLKNIVYCSDGHSIKNKNHTRYFDREIAKIQSKQSKCKKGSRQYKKYQKIINRLYGQKVRKTRDFLHKVSHTLVHKDFDTFGLEKLEPKRMTEQSNWKKLNKSMRNSQLALLTSYIQYKAENEGKRVVFVNPRHTSKKCSACGKKNEMELWNREINCECGNRMDRDYNASINIMNLAGAQL

SEQ ID NO: 24122 - protein, 495 aa, unknown
  TnpB Polypeptide
MGKQKAKVKKRAKTLHKAIVCTTPANHIKAKRAKTVLVPYQNAMTFFIHHMNQQLLMGEDIVSHTSLKPADLQSPLSARYVQEAYTQAHAAFTSYLGWLTRKVRGLITGSSLDDDTKTLFYRLNAQQKWYKKTVELDWDITPDGERLVPFGKTPQMGNIRISKAVDSKDLWLLRRMVKKAKQWLNLPNLSRVTSINLSAQTMELQPSGNSFAFWLNLATLEKGKRVLLPLTRNSYLEQELKKGKLNKQVQVKFKEDGTIAVSPIIEQETSQLRTEGDAIGLDWGMVNLFTTSDGRRLGGKMLQKLRIYDKLLMEIQAELQRNNESLKRNPEYQRLQSKIRNFVKNEIGRILNNLAKEDLKELVIEKLNFAGGGMSRTMNRLLTRAGRKALQAKLARLNEEQGVTTTEVQSAYTSQMCSRCGYTDRKNRQSQAKFKCQCCGHTCNADVNAALNILQRRSLKIGLSNRSDKRKTLKDRLPEYHTKIFSSGRHLLMVH

SEQ ID NO: 24123 - protein, 422 aa, Oscillatoriales sp.
MLKVVKVRLYPDIQQQQLLAQAFGSCRWLWNYCLNLMNQTYKETGKGLSGYEVKKIIPELKKEYEWLSQTYSQCLQQVCLNLGVAFNNFFEKRAQYPSFKSKHRKQSIQYPQNIKVNETTLTVPKIGNIKAIIHRPIEGKIKTVTISKNCSNQYFAAILFDDGKDKLEQKIEGSAIGVDVGLTHFAVTSNGSKFDNPRFLTKHEKNLKQKQQQLSRKQKGSNNRNKARIKVARVHRKITNCREDFLHKLSRRIVNENQVIVTENLNIKGMIKNPCLAKAIAQVGWGMFCTMLKYKAENEGKTYQEVDRFFPSSKTCHVCLNQVGANGHSPLPLDIRHWTCEKCHTKHDRDINAAINIRDEGLRILRLRSVQVFNLSAAEGLTSGTGDKACRPDVSRSNRGRKKSTTELSVGQEAYCVREASL

SEQ ID NO: 24124 - protein, 251 aa, Halobacteriales sp.
VEYRRTAVIKLDTPESADAHLRETVEQFKYCANTASRWCWHGDDGYHVTSKAKAERALYDQLREDTELTANLVQKGIRQAVEAVTSGVERLKNDQDTSRPTFTADTTVYDKRSATFHRDHVSLSTVNGRIECDYILPDDADTPPAKYVTDEDYEFRRATLHRRDGDWYLHASMLKADDTDTTTGHRTVLGVDLGVNQLAVASTGRFWSADEFNHWKREYENRRGDLQQCGTRAAHWPKPSNTTVRISCSRT

SEQ ID NO: 24125 - protein, 377 aa, Streptomyces sp.
LDVRRTAEVTWLTRSLDVWAEIASVQNFNVGVAERRFLQADGESGKRYGNETLRVTPDGEVSTKLPAPLTYLANAPHGRYVLAVQVSFAHRGEQWADRVTANRAVAYRIHQDTTRGRWYLTASWTLPPVRTVPLDTARARGLVGVDTNADHLAAWRLDRHGNPIGEPPRFGYDLTGTTDHRDAQIRHALIRLLHWARRQGLAIAVEDLDFTAETSREKHGGKKRFRKLISGMPVTRLLVRLVSTAAELGVPVIAVDPASTSRRGAQHWQKPLTSKNRKTTRHDTPAVAIGRRALGHPIRRRTTPPRTHQSDGCGHRTVQARPGTPGREGHRPRIPGPRTRSAGAGRGANAVDQNAQHRSGCSAEHDSWQQDSLPLSL

SEQ ID NO: 24126 - protein, 314 aa, unknown
  TnpB Polypeptide
LKVRDKRIEKGSDQHANKAYKFRIYPDDVQKVLFARTFGCVRMVYNHWLARKIRQYEEDKTAVTYTVCAKEMAEMKKTEAYAFLREVDSVALQQSLRHLDTAFQNFFKQPKTGFPKFKSKKQNKKSYSTICINGNIAILNGYLKLPKAGQVRLKQHRAVPKEYKLKSVTVSQTPGGKYYASILFEYENQVQEKEMQSFLGLDFSMHELYRDSNGNEPAYPKYYRNVEEKLVREQRRLSKMQKGSNNRSKQRIKVAKLHEKVSSQRKDFLHKLSRQLANAYDCVCIESLDMKAMSQMLNFGKSVSDNGGECSQGS

SEQ ID NO: 24127 - protein, 464 aa, unknown
  TnpB Polypeptide
MKQKRWRGKKTVKPHTTTKAVPHIRLLEANSGKLAALDALAPVYLALCQQYTTLFCTNEAPNKLRTPLFQTPLSERWHRVAIQQAAGISQSWWTNRAQAYQDYMEELEEYREQKAEGSLKEGAKEPQWREWDVPTLRQICIQANVNVVKLQPSEDSTFDYWLQISTLELRKPLLVPVKLADYHRQALEDKTINSSVQLNKRADGWWLTLSYDELVMIQTEVDAPVVGIDVGITNFLTTSDGKHYGSYHKKLKERHRRDREKRRRKAKLRACLKKKGVQKLPSTSGTSSQRLSRHVRQEINRAVNQCFDEHPDAQLAYEQLSVASMKFKARSMNAYLYASNLGHLPKQIEWNATKRGRRATKVKSAYSSQQCQVCSYTHRKNRPDQQTFCCQVCRFQTHADTNASQNLATRLHDEELRACSNRQEVKALLLRRHESWKQQFGLVVVQPAVQLGLWDIPKASTDVA

SEQ ID NO: 24128 - protein, 543 aa, Aromatoleum sp.
VRRRSFQRSRTASTAHRPTASCGGLGSSSCGSCGWRRLSNCSPAPKRILLAGSSPAGEQGRLRRRLCQLRLGVGADAGEDATQVVEDSLGEHLAAVFGHEDQMYMHQKDAMSSAPNVVVVARGSSHTEVMQRLQAFKYELMPTGGQRRDMRRFAGSCRFVFNKALALQKERHEQGEKKLGYVGLCKLLTEWRNGMETPWLKDAPTHPLQQALKDLERAYANFFARRADFPRFKKKGQRDSFRYPDPKQIKLDQADSRIFLPKLGWLRYRNSRDVQGTVKNVTVSSSGGKWYVSIQTEREVEQPIPQGGAVGIDMGIVRFATLSDGTFYAPLNSFKRHEDRLRRAQQAMSRKTKFSSNWRRAKARVQRIHSRIGNARRDFLHKTTTTISQNHAMVCIEDLQVRNMSRSAAGTAEAPGRNVRAKSGLNKAILDQGWFEFRRQLDYKLAWSGRYLIAVPPHNTSRTCPCCGYGSKDNRRTQVQFLCVECGFEENADLVGAINILRAGHARCACEVSDAVRSPAAGTHRSDSSEHDAGVSTVGIPRL

SEQ ID NO: 24129 - protein, 328 aa, Streptomyces sp.
MIRAYTFLMRPTVGQVAALGEMLRDHCSLYNGALQERRDAYRHASKASITYGQQSAQLKDVRAFEPERQGRWSFSSQQATLRRLDKAFAAFFRRVKCGDTPGCPRFRGVNWFDTVDFPKDGDGCRWDSTPHDPVTRVSLQGVGHVKVNQHRPVVGKVKTVSVKREGHKWYVVLTAEQAQPDPLPATGSVVGIDMGIASFLTTSNGEHIENLRHARKAAAKLEAAQQKLIRFGRVRRDKRTANHNRAVQRVADLHRTVRRRRLDHAHKAALGLVRDHDLIAHEDLKVRNMVKTVAPRPDPDRPGSFLPTGAGAKTGLNRSISDAGWGCS

SEQ ID NO: 24130 - protein, 375 aa, unknown
  TnpB Polypeptide
MQVQVSVPIKLKVTEIIVDTIDLYKQGLQYCIENGWNLRIKNNVKLHPFVYSELRNLGLPAQLSASCIKMACGILKKAKSKPFIKKTSIRYNAPRSFSFKNNILSIGTICGRVKIKINIPGYALKYFNELDLRESLLTKSFKGDYYFTFTFLKDIPANLNLQERVLGIDLGINNLAVTSDKQFFNSSKVKQHKRKFKFLRSKLQAKGTKSSKRLLKKISGREKRFMTWVNHNISNEIVSSFSGNKIVMENLKGIRKIRRGKRMNYWISNWSFFQLQTFIEYKGNMKGIEVVKVKPNYTSQICSRCGKLGSRRGSSFVCIHCGYSLNADLNASQNLASPMLEKRQVAVTQPYISTDEHEGVLSPIECEVRDKYPSL

SEQ ID NO: 24131 - protein, 450 aa, unknown
  TnpB Polypeptide
MATVTQAYQFALDPTPRQRRALASHCGAARVAYNWGLELFKTRLEQRQIDPTVVVPWTLYELQREWNRAKDQAAPWWPENSKEAYKSGLDSLARALRNWSDSRTGRRKGRPMGFPRWKKKARGRQACRFSTGAIRVLGDRKHVQLPRIGVLKTHESTRKLARRIEKGTARILAATISRTADRWFVSFTVEVERHIPTRDSMGSAVGVDVGVRHLAILSTGAVIANPRALEAVLPKLRRLNRELARRKPGSSRRNASRRRYARLHARVASIRRDALHKLTTSLATQCGTIVVEHLNVSALSRNRRIARAISDTGMGEFRRQLTYKATWYGSRLVVADPFYPSSKTCSACGWVKAKLTLVERSFRCEVCSLVLDRDLNAARNLAQLVLPVAQSGWETRNARGADIRPGPAGRTATKREASGPSWREPGTVSLQDEATRNAPLGCVPGNGSPI

SEQ ID NO: 24132 - protein, 410 aa, unknown
  TnpB Polypeptide
MSRYRLCPTAAQEAALLDHCASARYVWNLAVEQRGFWQPGRRPAPGYAEQCRQLTDARAAFPWLAAGSVIVQQQALRDFHQAWANWFAAVRVWRARAALLPQSAAPPGPPSFRKRGVHEGFRIVAVSPQDVRRLNRHWGEVAVPKLGWVRFRWSRPVPSARSFRVTCDRAGRWHVTFAAVPPPIPAPGTGEVIGVDRGVAVAAALSTGELLAAPRLRPAEVRRLRLLQRRLARAKRGSTRRQRVKRAVARLHTRATDRRKDWVEQTSTDLARRFDLIRVEDLDVRAMTKSPKGTVERPGRNVGQKAGLNRGILANGWARLVTRLEQKAPGRVEKIHPAYTSQRCSVCGHIAAESRKSQALFACVACAWTGNADVNAARNLAAGRAVPARGGGPLGQPANREPHRVASSAA

SEQ ID NO: 24133 - protein, 382 aa, unknown
  TnpB Polypeptide
VKKNNVPDGYTVRYTTIKVRLYPTPEQAELFEKTFGCCRYIWNRMLSDQQRFYLETGAHFIPTPAKYKAEAPFLKEVDNQALIQEHNKLSQAFRVFFKNPETFGYPRFKRKKDDRDSFTACNHVFESGPTIYITKGGIRMTKAGTVKAVFPRRPRNGWKLRRVTVEKTKTGKYYGCILYEYTVKKPETVTPSPEQTVGLKYSMSHFYVTDTGVAADPPKWLKQSQEKLAKIQRSLSRMEPGSKNYQEAVQKYRLLHEHIANQRRDFIHKESRRIANDWDAVCARADELQAISKITTRGNPLDAGFGMFREMLRYKLEREGKRLVLLDRYTPTTRTCSACGVVQEKVDYTSSVWICPECGATHNREVNAAKNIKLEGLALLSA

SEQ ID NO: 24134 - protein, 397 aa, unknown
  TnpB Polypeptide
MFKATKVRLYPTSAQRRALAFQFGAMRWAYNFALHWRREAWAERGERISKRMTLDRLVELKAAEETAWLKEADSQALQQSVIHLDDAFQRFFKELGRYPRFKSKHCKQSMSYPQRVKVVEGRALYLPKVGVVKAVLHRALVGKIKTVTVSRTKTGKYYASILCDDGQPHPEPIKALEEENVTGLDMGLSHLVIASTGEKQNNPRFLKRTAANLRRKQKSLSRKKKGSANRNKARVLVAKAHERVANARNDFQHKLSRRLVDENQAICVETLKVSNMLKNRRLAKPIADAAWGGLVRKLDYKATWEGKHLVRIDPWYPSTKTCCHCASKMASLPLSARQWTCPTCGAGHDRDINAALNIKQQGILQLKAEGLSVSACGGMHKTGTLPAAACEARSPVL

SEQ ID NO: 24135 - protein, 251 aa, unknown
  TnpB Polypeptide
MLLSKKTSIKVSREYANLIGHMCYAASKLWNVCNYERQHYKETGMEQYPDWYYQKKAHKEDLWYKQLPSQTAQEVCKLLDKAWKSFYALKRSGGIETPRPPRFKQESIPITYLQMGIVHERDTDRVRLSLPKALKKYMEETYQIHENFLYLENKIFRDVDQIKQLRIYPPEKGNCKIIVVYEVPDQEELPQNGHELSIDLGLHNLMTCYDSGNGKTFILGRKYLALERYFHKEIARVQAQWYGQQSGKGVK

SEQ ID NO: 24136 - protein, 372 aa, unknown
  TnpB Polypeptide
MEYSYKFRIYPTTSQRQQIQKTFGCARFVFNHYLAERIETYKNNKKCLNYFEQNKDLTSLKRQEETMWLKEVDKWALQNSLRDLDVAYKNFFRRVKNGEKPGFPKFKSKHNHRQSYRSQFSNGNIKVFDKSVQLPKLGKVKCRVSKQVKGRILSATVSQNPSGKYFVAICCTDVEMKPLPKTGATVGLDMGIKSFAVTSDGGEYLNHKYLAQSEKKLAKLQRSLSRKAKGSNRWNKARIHVARASEHVANQRRDTMQKLSTQLIRENDVICIENLALKNMVRNHRLAKSISDAGWGEFRRQLQYKADWYGKKVVAIDRFYPSSQLCSCCGTQWAGTKDLSVRDWTCPVCGARHDRDVNAARNILNEGLRLLA

SEQ ID NO: 24137 - protein, 403 aa, unknown
  TnpB Polypeptide
MKVRRTYKYRIYPNREQKSILERWLETCRVLYNDCLTERRNAWDVSRKSISYYDQANQLKEIKTFDEDLKEVHSQVIQDVLKRIDKAFKNFFRRVSGKRKEKAGYPRYKQKQRYSSFTYPQTGFKFSEDSKKIILSKIGSVNIKKHRDIPEDAEIKTCTVEKDLDRWYACFTVEIEVEEPDKDKEITNPIGVDLGINHLLTLSNGDTEDNPRYLSKSEKKLKRKQRKLAKAKKGSNNRVKRRFEVAKTHRKVRDQRTDLLHKISRSFVNTFDLIVFEDLKVKNMLKNHHLAKSISDVSWSKLTNFVSYKAEEAGRKVEFVDPKNTSQGCSNCGKIVKKPLSQRVHRCPFCGLKMDRDENAAINILKRGLANLNLNVGQELSEFKPAEFSKRTMNQEAPSVRVE

SEQ ID NO: 24138 - protein, 556 aa, Rhodococcus sp.
MAGRVVRRAFKYRFYPTAVQAEQLARTFGCTRYVYNRALAERTRAWSQERHRVTYADTSKMLTGWKRDAETEWLAEPSKGPLQEALRQLQGAFDRFWRKQAGYPKFKRKGQSKESATYYSNCFTYRGGQIRLAKQSEPLDIRWSRPLPEGAVPSQVTVSRNARGQYHVSILVEDTIAEPPSTGRVVGLDAGITSLYTLSTGEKITNPRHEGRDRARLAKACAGQEAEGIPGPGQGPTEGRADSWSDRRSAPRLFAQTLHSTGARKSSDRHRGSECAEHGEESVVVSGDLRCELVRVPVDARVQGRLVRAAGGGDRPVLSVGEDLLGVWGGRLGDAAERAGVDVPMRRRSRSGCERGKEHFGRRSDGGCLRRRCETTSHITCGVATVGETGTSGPESRGDSRSFTAERKSTSETTQQNAMTLSASAITASVADRLARESIVWLTTVGRNDTPVPTPVWFSWSGTEFLIFSQPGTAKLANIGRNPQVALNFNSSPTGGDVSVFTGKARVDADGPSPEEWETYVEKYHEDMAGLDYTPEKFRQDYSTLVRVTPDGLRGW

SEQ ID NO: 24139 - protein, 435 aa, Rhodococcus sp.
VTPRRHRSGEGSSAIKGVECEVKRIVVVKLVPSPDQSAALESTLVLCHEVANEFAGWAHSRGLRSRRALQVALYPMVKTRGLSAQPALHVLRKVADAYTTRQANLSNGNYGRPGSTRYTAVAGTAVEFRPHAAQPFDDRCLSWQVDSSTVSIWTTAGRMRGVRFVCAPWQRTLLAARKGETDLVYRDGLFYLYATVDEPAPEPVEPPDTAAGWLGVDLGIVNLAVTTDDDPTALDVRWSAGAVTARRKKNAAMRASLQRVGTKSAKRKLKTRRRKEQRFATDINHQLSKTIVARAQRTGRGIAIRDRRPVRYPRPGTASPTATDPTPLVGIRPATGTDHLQSREGWGARRCRRPPEHIADLLTMRVLRQSEPGLASNIPMPILPVDRSRRPQCGPQHRRTRTSHLQGRPINRAHSSHPSHSQWEREQQTRPLTAE

SEQ ID NO: 24140 - protein, 408 aa, Rhodococcus sp.
VSLSAQTLSFRSGIADLVLSDRVASVWVMAGRVVKRAFKFRFYPSAVQAEQLARTFGCTRYVYNRALAERSRAWSQERRRVTYADTSKMLTGWKRDAETEWLAEPSKGPLQESLRQLQGAFERFWRKQTGYPQFKKKGRSKDSATYYSNCFIFRDGQLRLAKQSEPLDIRWSRPLPEGAVPSQVTVSRNARGQYHVSILVEDTITELEPVDRVVGLDAGITSLYTLSTGEKITNPRHERTGSCAVGEGATSTRQEAEGIPEPGQGPTEGREDSWSDRRSGRDYLHKLSTRLVRENQVIAIEDLSVRNMVKNRSLSRVISDAGWSEFRSMLEYKADWCGRRVVVIDRFCPSSKTCSVCGEVASAMPLNVREWTCRCGVVHDRDVNAARNILAVGLTVASCGDGVRPPRT

SEQ ID NO: 24141 - protein, 80 aa, Rhodococcus sp.
MLEYKADWCGRRVVVIDRFCPSAKTCSVCGEVASAMPLNVREWTCRCGAVHDRDVNAARNILAVGLTVAACGDGVRPPRT

SEQ ID NO: 24142 - protein, 311 aa, Rhodococcus sp.
LARKTIAGTARIRSATLSFRRGRWQVSFSVEIALPARALPPATTGTSAAVGDCGVVVGVDAGVKHLAVLSNGEMIENPTHARKHAKQLRSLGRRASRRVGPDRRTGQQPSRRWLRTQEQIRAVRIRIANSRRDHLHKLTTRPVRDFDTVVVEDLNVAGMTRSGGAYKRGLNRALQDAAFAEIRRQLTYKCEWAGTGLQVADRWYPSSKTWSNCQVVKAKLPLKVRVFTCDACGFRADRDHNAALNLAALAAVDGGASSASCGRDVKDARQKPTIRPAARWADGIAAGTPLSGERDRGNPDTHAECTKQHSA

SEQ ID NO: 24143 - protein, 601 aa, Rhodococcus sp.
MADTGFTALRQFSFTTRPYLAVDDATGAPIGLDDLDVRVGWMLDLISGAEAHLLSRLWQPATFDVLVAGCDSRGRKLPMQGHVAAARLGWTPHYPDGVYVPSRVTRVVTAQAVGTLRALAYRDTAITALSARFDPATGRIAAPTTAAEYVPCGYARGVVRQLTARSHRTAGVAAERLRITDVQAPPQTSAMARLSAADRQLAHITVTDAVMTLTVTLPTTPAPEGRAQWRRVRVTAAIPPHLHARPISEWHLPTLHLDHRGLLLRCAANEAVPVADMRSGTTAVGVDWSPSTLGAAAVATETPDGLVSDYRGFTYDDRGLGAKLARLQTEGQMLHRKAARLTRLAATAPPEVRAELEAKIAVLDEHRTAVGAKRGKINRELAFHFARQATDYAVDAQAQLIAVEDLTTLETRGHGHVNNNRAAQSARRQAVVALAHTAAEVGITVVSVPARGSSALCPGCDEPLARPGGYHDAWCTRCKVGGNRDHIAGVNLAKRALLGKNNVTPRRGQLPAIRVAEHAPVRQCRHKKSPTPRRPRHRRVRHSLPIAPQRMGVTPKQHVPAPQASVWDTVKPVPPHGDAGSRDTRPSPTPATQVVDSVRST

SEQ ID NO: 24144 - protein, 626 aa, Rhodococcus sp.
MDDVTAVPASLSGVVSGRSGRHGINDGVSTTPRQFSFTTRAHVAVDDATGERIGLDDVDTRVGWLLDLIAGAGAELVSRLWRPATFDVLAAGRDRQDRRLPAQGHVAAARLGWDPFYPDGVYVPSRVSRVVTAQVLATLRSLTYRDTAIAALSTRFDPATGRLTAPTEPGDSVPSGFARGVRRQLAARARSSGGAPAGRLRITDLQGPPQIAAMARLSAADRQLAQLAVTVAEHELVLTVKLPTCPALVGRAQWRRVRLTAAIPAHLCGRPVIDWHLPILVLDRRGLLWRCAATELVPAGDLDSAAVAVGVDWSPSTLGAAAITTDSPEGLVSDYRGFTYDDRGLGIKLARLQAEGQLLHAKAARLTRLAATAPPEVRAQLEAKIAVLDEHRTAVGAKRGKINRELAFHFACQVTDYATTAGAQVIAVEDLSTLETRGHGRVNNNRAAQSARRQAVAALAHTAAAVGIAVVSVPARGSSAWCPGCDEPLARPGGYHDAWCPGCRVGGNRDHLAGVNLAKRALLGKGKVTRRRGQLPAVRVAEHAPVRPSRDKTGPTPSRPRHRRVRRSLPTVTPRLGVTPKQHVPAPQASVWDTVQPTPPHGDAGSRDTRPSQAPATPVADSPRST

SEQ ID NO: 24145 - protein, 507 aa, Rhodococcus sp.
MRATAVFADRTADIAAPDPSRKVIRAFVYVLDPTPEQVEALRSHCGAQRFAYNWALSQVKANLDQRAAERSYGVPEAELTPAMSWSAYSLRKHWNTVKDDIAVNPETRQPWWPENSKEAYSSGIANCAAALSNWSDTRSGKRKGSMGFPRFKSKRAALSCRFTTDAFGLVTDGGDRRHVKLPRIGAIRTCESTRKLARKTIAGSARIRSATLSYRRGRWQVSFSVETTLPARALPPTGAAAVADRGVGGWLVGVDVGVKHLAVLSTGEMIENPKHARKQAKKLRRLEHRASRRVGPDRRTGQQPSRRWQRTQDQIRAVHTRIAAGRCDHLHKLTTRLVRDFDTVVVEGLNIAGMTRSGGAYKRGLNRALHDAGLAEIRRQLAYKTEWTGTGLHVADRWYPSSKTCSNCQVVKTKLPLKVRVFTCDACGYRADRDHNAALNLAALAAVVDGCASSASCGRDVKEARQKPTIRPATRRADGIAAGTPHSGERGRGNPDTHAECTKQHSA

SEQ ID NO: 24146 - protein, 165 aa, unknown
  TnpB Polypeptide
VFHEKIAYQRNDFLHKLSRKIVDENQAVYLESLNVKGMMQNRHLSKSIADSGWSEFARQLTYKGEWYGTKVVQIGRFVSSTKTCCICNAVNHDLSLKDRVWTCPSCKTVHDRDINAAIVIKKVGQDMPDIKPVEKRASILSFKRKGKPASVKQEAHVKMHGVSTP

SEQ ID NO: 24147 - protein, 408 aa, unknown
  TnpB Polypeptide
MRISYQYKLKPTKQQTVQLNRWLGMLRAQYNYLLSDRFNWYEFNRCPINACPLIGSLPDLREQPNVYNQEKRLPQLKVTHPWYKEIYSQVLQNVVKRVDKTFERFLKGDSNGKRSGRPRFKGEGQYKTFTYPQIKPDCLVGNKIKLPKLGDFKVVVHRLIPDGFKIKTVSVTKKADGFYATLSLDDATVPTVKPDFNAEKIIGIDLGLKDFLTDSNGEAVPIQQHFRKSQKRLKLLQKRVSRRKKGSNRRKKAVNQVARQHKKVADTRRDFHFKTANNLLKKYDVVVVEDLNIKGLSRSMLSKSVHDAGWGNFLSILTNKAENAGLLVIAVNPNNTSQNCSVCGVKVPKKLHERWHDCPVCKCSLSRDHNAAINIKNRAEGHPVLKAKSLLSSSRIVLEAYTEPLRSV

SEQ ID NO: 24148 - protein, 381 aa, unknown
  TnpB Polypeptide
MRAYKFRIYPSKKQEEQMRQHLWLAKNLWNEMLEHSKQTYKDFGYFPTRNTMQLIVKDYGLYSQTQQEVAHRVFNSLMRVFKLRKKGVECGFPRFKSFDRMKSLNYPQSGFSLDKKLKVTPFGEISIKKHREIKGRIKTLTLKKESSGKWFAVFTAEEEILLPKENKGEAVGIDLGLKTFATLSNGEMIKNPRHLMKHEDRLAFIQRKFSKKKKRSSNRKRAKVRIARLHEKVADTRKDFLHKTTTDLVNIYSFIALEKLASQEMAEQHYGKQINDAGWNMFANMLAYKAEGAGCRMVFVDPRNTSKTCSQCQSIKEDLTLWDRIYTCPACGLSMDRDLNAARNILIRATPGQGGSNACNSLQKERDEAIASSMKQEAHTL

SEQ ID NO: 24149 - protein, 432 aa, unknown
  TnpB Polypeptide
MRGEISPKNKTMLRAIKIRLYPNKTQEEYIAKLLGSYRFVYNQCLALKKDKYIEDKSNLGLKELGGYFHNDLTKNEEYIWLQEHNTKVLKQSILNLMEAYKKFFINGNGFPKFKSKQDSKQSCRFPIEAISRKNDYSTFKLTLIKQLKNIKFSCSDKYVEYLNKHKVNIRSATLIKNKSGNYFLSILVDGDLMKRLDKPINDFIGIDLGIKTFIVDSKGNEYENIKTKRNNEKKLAKLNRELSRKEKGGKNRDKARVKLARFHEKLNNKKQEYLHYVSNKLLNENQVIAMEDLNIKGMMQNHHLARAIQELSLYDFKSKMLYKAQWYNRYVIEVGRYFASSKLCHKCGYKNVNLTLSDREWICPQCGAKHNRDHNAAINIENEGIKIFNNKIEKENLSQIKQIGHRLPEFTPLETSGYAVDELGNRNLRNIT

SEQ ID NO: 24150 - protein, 432 aa, unknown
  TnpB Polypeptide
MHYAYRFRLKPTTQQRELLDYHRDSCRQLYNHALGEFTEIPESAGTLNQRVRQVRDQLTDLKDWWDDLNDLYSTVAQAAVMRIEDSIKALSELKEKGYNVGSLNWKAPTDFRSFTYVQSGFEFDKKNGQTVLSLSKLADIPIECHRDIPDEETVKEVTLKKEPTGEWYVSFAVDDKEEPAKPSLEDVDADDMVGIDVGILKYAHDTDGTAVGSLDLSGERDRLEQEQRKLSRKEHRSNNWEKQRRCVAACHQQIKRKRRDFLHKLSAYYAREYELVAVEDLDVKGMLESPRNSRNTASAAWNTFTDLLEYKCKREGTHFVEVDPEDTTKECASCGVKTDKPIWVREHSCPACGFEADRGANAAWNILSRGLADLGVGHSESTSSESPCDSDGLRKSLGDFRTPVETALPTGTAVVPAKRVCRGNLDRLSDAV

SEQ ID NO: 24151 - protein, 495 aa, unknown
  TnpB Polypeptide
VFDKDGVPLNLVEVLDGIRKDAELVAHYALQEMTEQNLALSTYFDSVKPAEAGRQMNLKLPAEVKKQFKSGASRLEKMFQEQVVTNLRSWTTRVEVMAQTSTKYVSAGWKRTASKSKPASMQPRLALSAADKQYREMTVAPERIELTMIVQGQWIKIHFPTPPQLLEVGCESGVPDIWVDKDNRVVFGFHGKTNPGRPEFSERYVLGVDLGVKNPAAYVVWDTDKKEVVERSLLGQRARSLNNKIKRTQTQVASLQKKKRSKEAVSHREHLSNRRRELSILIAQELADASWRYGNAIVSFEDLSHIKNTMKYGRWFRGEVFRRTRDMVEADGGRVFKVNAAYTSQRCHVCQSDLNMSNYSSPVCESCGITHHRDLNAAANIAQRANVKKACETRRKHATKTKRVRKSKCHSKPLKHPGTKNKPTPKAPQNQKKRTTHTRPPLPSKEVSVRMCPADHRVSAVDHRGDSWFQTTSGTTVPKNNLSIVNTVDVVYSKE

SEQ ID NO: 24152 - protein, 348 aa, unknown
  TnpB Polypeptide
MLVSKTLRCKVFSPTQKKLELLNGEYTNFQIYVRSGKNFGIYSLTKANFDFVYKKKARKKKQPMPLHNQSTKFKITGSKLTPYWFRIPVKGKRGGIWLPIKPHENIDSSWEIREAKVFKRKKDFWIYITIRKEVELKTSYSSVLALDVGEKVIAAAVLSSVRKPIFLGREVRGIRRHHAWLRKRLQERELFKKLKEMRGKEKRRVELALHEVSKYIVELAERNNSMIILGDLKGIRKGGRGKRFNRIVNSFPFNKLSFFIEYKAHLKGIAVVKVREDYTSKTCSRCGEEGKRVKQGLFKCPHCKYQANADYNGAMNILKRSWEHVFQDGAAAFSPEPPMTEQTRAEAH

SEQ ID NO: 24153 - protein, 496 aa, unknown
  TnpB Polypeptide
MRTQTASFVVQTKLKLSTSVENYLEKSFCIAASAYNEALSFGLRRFKALKQNSLYQELLEKRRDVRVRKECDKALFELRKSYGLTEYGLSTHLSKQRRVPNSSYRHLSAGEIQVVASHAYKALEKVLFYKITAHSLRFRSKYDLNVSYRNRGNTDATRLVKSDRQGIAYRLYLHKVSTFVDIPVKAFNRYQQQSLLHSEKIKYVQIVRKTIRGKRVYILQIVCQGFPPAKITRGNETVGIDPGISTIAYTSNSEVALVDLVPKNINQKEKLMKLLDRKIDRSRRVNNPDCYHEDGTIKKGARFKRPSNRQSRLQIRRQKTYRSLSEERQKLQGQLVNQIVSQARVIKIEDLSVKGLQRRSREIRINPKTNRPFSKKRFGKSIFRAAPSAFRNTLQKRAHQLGIDFNVISPKDTKPSQYNHITQTFEKKSLSTRIYNLSEDVTGVQRDLYSAFLIGHIENGHYEQEQLTKDFPVFYKLMKEFLHQPPKTSRLVWYLH

SEQ ID NO: 24154 - protein, 391 aa, unknown
  TnpB Polypeptide
MMKAYMFRVYPTKNQEVKMDRTLSTCRHLYNDSLAERKKQGELNRLKREFQVFPWGKPEWISYEDQANDLSESKTSFQKEVHSQALQNTLKRLDRSFKNFFNGFGYPRFQGRSRYNSFTYPQSGFELDEGKLVLSRIGSLKIILHREMEGRIKTCTIKKDVDQWYAIFTVEIERRIEAVPAATKIGIDVGLMSLLTLSNGEQIEPPKFLRASGKRLAREQIELSRKKLGSKNRGKQRLKAARVHRTIRNQRKDFAHKTSRQLVEKYDHIVFEDLQIQNMMQNHHLAKSISDAGWYQLINFTKSKAEYAGKVVELVNPKGTSQVCICGCSVPKDLSVRIHNCPNCGRIVGRDHMAAIVIESRSTAGIAGIEACQRHPNREPMKQEATLLVGW

SEQ ID NO: 24155 - protein, 627 aa, unknown
  TnpB Polypeptide
VAKTQTLSFPIRLPDAMQVEALRLLDESTEAINQILVELWPQLDLFVADRTGPAWKQVERHLLTRSGHGNRQERNEMEQAGRLLRAQATRKQVFHTILPLLSEGLIRPRDGKRPAKKDHARIKEQVRTLRTQMQDAGEDADAFMAMTNIIEQACNRYLQSDEFPTTYEALQPAPVLSIGHLTFAGDDGMKAGQTYRARIEVSYCCDIQTRQEQCQASLWLKLRCPDELGKWAWGVWSQEIPLPPTVFTYLWQGATSQAPTLREIRSDDGTRVAVLDLMLEVPAKYVLDLSQESRVLGFDWGVRSLITVSILEKSAGDEPYRQVSRPVFLDTGGIDGRQARLRREIDRLKACRQRSDTLIKQAQTLCSEQHTVLPTDFPRWQERVRGYEVRIKQCWKTYERRNRELAHLASNLLILLALVYDCRLICGENLTTLKTEGRGRGVRGRFRNWRNNTTVRGELWRTLKYKCHMLGIRARQVEPRGTTHTCPHCHHPAKTYASSAPSDRVKAIAWGAWLCCSNPDCLWNGARDYAASVNIARLGMAFLITYHETKRYVSYRMTSSEVKPALYIRAGATLLLPSQGFIARPHEGKHIYYAGWSYSVALRTSRPENLLAVLSTSQLRKYVLRSA

SEQ ID NO: 24156 - protein, 379 aa, unknown
  TnpB Polypeptide
VFAAAQWFAESPQSAYRHKGIMGVMERLQAFKFELQPNGEQAQQMRRFAGSCRFVFNKALALQKENHEAGNKFIGYVAMAANLPVWKRETGFEWLKDSPSQALQHALKDLEKAYKNFFEKRADFPRFKKKGMGDSFRYPQGCKLDQGNGRIFLPKLGWLRYRHSRDVLGELRNVTVSQSGGKWFASIQTRREVGAVQPTGGIVGLDMGIARFVTLSDGSHLDPLNSFKKHQQRLKRYQRRMARKVKFSQNWKKAKAKVSQIHINIGNARKDYLHQASATISQNHAIVCIEDLQIRNMSKSSKGNAETHGKQVKQKSGLNRAILDQGWGEFRRQLDDKLAWRGGQVSAEHRCTQAQFACIACGYKNHADVVGAINLVEPV

SEQ ID NO: 24157 - protein, 701 aa, Streptomyces sp.
VIRAYKFLLRPTVRQRQALGEMLRDHCSLYNAALQERRDTYRHSSKTSVKYGEQSAQLKEIRAFDPEQQGRWSFSSQQATLRRLNKAFQAFFRRVKAGEKPGYPRFRGVSWFDTVEFPKDGDGCRWNSIPLDSVTRVRLQGVGHVRVHQHRAVKGRIKTVSVKREGRQWYVILVCDQVPTEPLPTAGTVTGIDMGITHFLTTSEGVHVENPRHGKRGNQALANAQRALKAFPRCKREHRTANHRRAVEKAAKLHRKIRRQRTDHAHKAALALVHAYDQIAHERLNIANMVRVPKPKPDPETAGSFLPNGAASKAELNRSIHDAGWGVFLGILAQKAESAARVLIPVDPRNTSRTCPQCGHVDRENRDGEKFQCTACDHRDHADRVGAWNVKLRAGLVLPDVIRTAYWRSPPDRTGGRSHVVVELVVAVAPSDVHRAPRHARVAVAVGLAVLVEAVVAGEGEEAVLVVPAGEDVVDDEAVAGEDVEGVEGGALGGEVLEVDPVGGVGADRVELLVLGVDDDVGAAGAGALDLEVLLTEDRDEVPVVRALLLLGERKDLVAELGVGGVEAGAGSRGGGLGGLLLVEAGEDRDGRSRAVDGVDGLLEVAVPLAQAAVVQGAVPLQQSLGEGGDAPLEGGPALLADEEVGFLVAVDGDAAGAVGEVDGALLVGEGGRGRQQGGEERPGDGEDGEEPACPRHAPGE

SEQ ID NO: 24158 - protein, 426 aa, unknown
  TnpB Polypeptide
MKQITTYGVRIHAASMKPVQDMVRIYRDAVSYLIRVSDEHWNELWNLNSFARLRVMECLVHHTKNRLFVEYEDFDLQFYKLPSYIRRAAISEAIGAVESYRSRQKVWNENPVGKAPGLPQAGFTYPVLYEGNMFEQTGEYSARIKVWIRNTWDWMDVTFRKSDADYILRHCSDRQKLCPAIVKKGRKWELMFPFEEEVSLRTVDVKDQKILAVDLGINNACACSVMRSDGTIVGRRMFRLPVQEDCLNHLMNKVKKAYKQGHKHIPTLWNSIDNVNHVISVETARFIARIAEEYQVDVVVFEKLDLSGKKKRKSRRQRLHLWKSQDVQSMVTSKVHRLGIRISHVNARNTSQLAYDGSGYVIRDKNNYSVCQFKTGKIYNCDLSASYNIGARYFVREIIKSLPATTGLGISAKVPECTRRSTCTSP

SEQ ID NO: 24159 - protein, 407 aa, Tolypothrix sp.
MLTLTYEYKIKPTNREKAIFEDWLEISRKVYNYALSERKAWFKSRSCQINACSLHSEYIIPADAPRPTYYHQSKSLTAAKKEIPELRRVQSQVLQQTLIRLEKAFVSMWEHNHGFPRFKKPGAMRCFVFPQLKHEDLLENQIRLPLIGWVIFRPSRPIPEGGKLKQARIVKRASGWFVMLTLQWDVSVPSPMPHSEALGIDVGLTNFIAASNGLNVKRPKFFVDLQRKLKLLQQRVSRKKLGSSNWRKAQMKVQRLHEHIANTRKDFHWKVAHQLCDQAQTIFVEDLNLVGLSRSVLGKHCLDAGWGQFFQILEQCCFKRGVYFQKINSRKTSQICPNCQTETGKKMLSERVHVCSNCGYTTDRDVAAAQIVCQRGLAAVGYTVKMLGEGKFIGIRATQESPDFLFK

SEQ ID NO: 24160 - protein, 230 aa, Paenibacillus sp.
MNAHRPFDPANVTQINVKQYVDRWMVNISVKVPDAEATQTAESAESAVGIDVGLNTFAALSDETKVDNPRYLRKADKQLKRKQRQLSRKQPASRNRKKAKHKVAKAHQKVARQRKDFLHKQSHRIVRDHDLIVVEELKVRNMVRNRRLAKSISDAGWRRFITYLSYKAKRQGKRFAQVPAHGTSQTCLCGASVPKPLSIRIHECESCGRIQDRDIVLAKIILQRALEIPA

SEQ ID NO: 24161 - protein, 220 aa, unknown
  TnpB Polypeptide
MKCGKWFVSIQTEYEQEIPTPNGGEIGIDMGIVRFATLSNGQYFEPINAFKTLKGKLEKLQKQFKHKTKFSKNWQKLKAKIAILHHKISNIRKNHLHQISNIISKNHAIVYVEDLKVANMSKSAKGKNVKQKSGLNRSILDQSWAEFRRQLEYKLAWNGGFLFAVPPQNTSRCCPNCGHTAKDNRQTQAEFKCVECGYQNNADVVGAINVLKRGQQLQAA

SEQ ID NO: 24162 - protein, 452 aa, unknown
  TnpB Polypeptide
MRTYCIANIDCIHPFYQKMDEYAFACKNIFNKTLYEYRQNFFYQEPLLTAFDMINYLSNKEKKDNVPAKVKQQTIKQVYESFKSSVGKSKLPRYLNKETGRANIILTNQAILKTRFTNENKIAFNYDDFCFEFNITNLTNKLELKFEHIKQVRVIYNSTYKKYKVLLYVEKEKSKKDSLEKEPKLSQVAAIDLGLNNLMALVFQNQRILFDGKPLKKINRRFNKNLAKLQSQRDKAINELKIVSDEIKTMEQDAIWFYELEADIDFDVKKYQKLMRRQNDLIKEIDKLKTKIGKLYEKRNNRINYCLHERSKKLIELLASNGIIKLVIGYNKNWKQDINLGKRTNQNFVQIPFYTLIEYIKYKAQEKNIEVITHGESYTSKCSFLDDEAICKHDIYAGRRIKRGLFRSKTGIEINADINAAYNIARKAGFNFKQFESLSPCSWAVVQSIQFN

SEQ ID NO: 24163 - protein, 379 aa, unknown
  TnpB Polypeptide
LFTYKFRAYPTPAQATVFGTTLETCRRLYNSLLADRIENHTGFFDQKKSLVQAKELNKHLRAVHSQVLQDVVLRLDIAYQAFFTGYSRYPKFRRYGKYRSFTYPQMGFKLERSSVRLSKIGRVKLKIHRPIVGRIKRVTVIQDIDEWFVAILTDDQNVSIQARDGQVGADVGVTNVVALSDGTIIEGPRFTRRSVERISSLQRKLSRKKTSSNNREKARLALAKAHRVIKRQREDFAHKLSDALTKDNDLIVFEDLKVGNMMKNHSLASAIMDASWGKLRQLTVYKAERRGGRVMLVNANGTSQKCSECGEMVPKKLSERVHDCPRCGLVIDRDVNGARNILKLGQELALAEKQPLLVQRRRISKFAPVKQEARVLRYG

SEQ ID NO: 24164 - protein, 341 aa, unknown
  TnpB Polypeptide
MCKSQEKNAESWLPILGSVYNFAVRKIELNAKDKIYFSKQEFQNLLANHGEKVGIPSHTLQGVLCTVHDAWKRCFKKTSGKPRLKGMRNKLTSIPFPDPIKAPKGNRITLPSLGSVRFHKMDIPDGKIKCGRMVKRASGWYLCLFIDAEPKKIEHVAFGEIGIDSGFKSLLTTSDGEIIEHPRELEGGAERLAQAQRGHDKQLAARLQERIANRKKDRNHKLSHRLVSENIFIAFTKDKISGIAKRFGKSVASSAHYQLRQMLSYKMPKSGGTYVEPDSKLSTKTCNECGSQSGPTGLAGLSVRQWVCRDCGVSHDRDVNAAINTLIVGAGYAHERETVNV

SEQ ID NO: 24165 - protein, 341 aa, unknown; identical to SEQ ID NO: 24164
  TnpB Polypeptide

SEQ ID NO: 24166 - protein, 256 aa, Clostridiaceae sp.
VVWIFSKWLNNEYISNNPDKLWLKEVSSKATKQAIMNGEKAFKKFFKGESGFPKFKKKKNQDVKSYFPKNNKTDWTIERHRVKIPTLGWIRLKEFGYIAINSVVKSGTVSQKADRYYVSILVEEDIKPNNTPCTKGIGVDLGLKEFAICSNGLTKKNINKTSTVKKLEKKLKREQRKLSRKYESLKIRTKKMKGVDTRQNIKKQVVKVQKLHQRLTDIRTDYINKTVTELIKQKPSFITIEDLNIRGMMKNQPKRS

SEQ ID NO: 24167 - protein, 236 aa, Okeania sp.
LKKKGRKDSFYLEGSIKIIQGNYIQLPRIGIVKTYEILPSVPVKNVRISKKADSWYISFKYDFEPAPTEKVGETIGVDIGINTLATCSDGSKFANVKAYRQAKKQLVRHQRAVSKKVIGSKNRRKAVKKLAKVHKKVADIRADALHKLTTLSPVSCLLSPVSCLLSPVSCLLSPVSCLLSPVSCLLSPVSCLLLQRFFIPSSGAVACAQRYIKCDKCITGFQIRRKVEVEKLFLPS

SEQ ID NO: 24168 - protein, 388 aa, Bacillus sp.
  misc_feature (196)..(231): Xaa can be any naturally occurring amino acid
VKTSQQLPRNKKTSNPRVTFDGRHWWISVGFQEDYELQELTNESIGVDVGLKELFVASNGTKERNINKDAKVKKLLKRKKSAQRDMSRRFKKGVKIQSAGYEKAKAEHLRLSRKIMNIRNNHIHQATATLVKTKPMRIVVEDLSISNLLKNKKLSKAFSFQKLNFFFRCLSYKCEKYGIEYVKADKWFASSKICSXXXXXXXXXXXXXXXXXXXXXXXXXXXXXXXXXXXXVKFIVSDKMRLEYRLNDETKGYPALWNYANISNSEIIARMTCEYFIKEKNTYVVTATSVDPDGTAVIYIQKEVFANDPSDPTYSHIGFEIRELSETSSSLVDSQDVWNYEEILPSLHSDIIYIQRDGMSMEFSLDSREIDEDRKCYIYYGNFTGESR

SEQ ID NO: 24169 - protein, 428 aa, Halothece sp.
MLTLSYEFKLEPNQLQIDMIEQTLGVCRTVWNYALRERKDWINSRKCPVNACSIKQEYIIPANEPYPSYSRQAKALTEAKKDSERLKSVNAQVLQQVLRTLDRAFADMKARGFGFPRFKNKYRLRSYLIPQLKGQVLKGNQVKLPQLGWVRFRKSREIPDGFKVKQARVIRKASGYFVMLSLQLDVDVPQPFPHGHPKGLDLGFDKFVATSDGLEVKRPRFLKSLQRKLRLLQRRLKNKKKGSNNRHKLNRKIARVHQRISDARKDWHFQLAHQLCDGAGMIFVEDINFRSWQRGMLSKHAADAGFGQFVNILQWVCWKRDVYFAKVDKDGTSQECSQCGAHTGKKTLDVRVHHCPECNYIGSRDVVSAEVIRNRGLALSQVEGLSAVGTLVDNKENACGDGLTGVSLRANLVKSLKQESPTIATKGA

SEQ ID NO: 24170 - protein, 394 aa, Chlorogloea sp.
MQKAYRYRVYPTPEQESLLRRTMGCARLVYNRALAARNQGWYERQEKIDYIKTSAMLTQWKKQEDLQFLNEVSSVPLQQGLRHLQKAFANFWTGTAKYPNFKKKHNGGSAEFTKSAFKWKDGCVWLAKCAEALPIRQCRQLPKGCEPSTITVKLDASGRFHVSLLVDTVIEPLPKTDKTIGLDVGITSLIATSNGDKIANPKHFKRLRSKLRRVQKSLSRKQKGSNNSRVQRQKIAKVHSRITDSRKDFLHKLTTQLVRENQTIVVEDLAIKNMVKNHKLALHISDASWGELVRQLGYKCEWYGRELIKIDRWFPSSKRCGNCGHIVDKMPLNIREWECPRCSVIHDRDINASKNILAAGLAVSVCGANIRPEGLESEGQLRKSGNGKKQKPKP

SEQ ID NO: 24171 - protein, 386 aa, unknown
  TnpB Polypeptide
MASLERQRAILCYIIGMRKMFKYRLNPTPAQERAMMATLNECRWLYNHLLEQRKTAYEECSDTLSLYDQQATFGSLKVERPSLANVHSQVLQNVAVRLDLAFKAFFRRVKAGEKESGFPRFRGYGRYDSFCYPQSGYKLSGTRVFLSKIGHIKAIIHRPLDGTVKTCCVRRTSAGKWFVSFSCEVEDAPLPATDAVVGLDVGLEKFATLSTGAQIANPRFFRRDERDLARAQRRLSKEPRPEKGQRATPARRKRRKAVTRIHERIANRRADFAHQESRKVINVYGVVAVEDLSINTMVHNHCLAKSIHDAAWRQFIACLTYKAEDAGRRVVAVNPAYTSQTCSQCGHRARKELSDRVHRCSCCGLVLDRDHNAALNILRLGLQSLA

SEQ ID NO: 24172 - protein, 468 aa, unknown
  TnpB Polypeptide
MNRGVPPTAPNARTGEFTPPGMTSRARANSFSLRGFGGVVPLGLTERFVTMISGGCPVLQGGRNVVPAQYRNRMSRYRLQLSPTQEAVLLGHCAHARYVWNLCVEQESQWRPGRGRMPGFAERCRQLSEARAENPWLAGGSAIVQQQAIRDHAQAMAGFFAGTHRRPSWRKAGRDEGFRITQVRPGDVRRLNRSTAQVRIPKVGFVRFRWSRPVPQGVKSYRVNMDRAGRWHVAFAAIPSLVPAPGNGGVIGLDRGVAVSAALSTGELLCCPVLTARQRQRRRRLERKLTRARRGSARRKQVKLAIARLKACEADRRKDWCEKTSTELARRFDVIRVEDLKITNMTRSARGTAEEPGRNVRQKAGLNRGILASGWGLLVRRIEDKAPGRVEKVRPAYTSQRCSACGHIAAGSRESQALFRCVACGYADNADVNAARNIAAGHAVTARGGDGVTRPLNREPQPCTPPAA

SEQ ID NO: 24173 - protein, 442 aa, Escherichia sp.
MVKNLALVFGDKDQVNMHQENTVPSASDISFFHRPKYNLPCETTTAFTFRLRPGGQQEREMRRFAGACRFVFNRALALQNENHEAGNKYIPYGKMASWLVEWKNATETQWLKDSPSQPLQQSLKDLERAYKNFFQKRAAFPRFKKRGQNDAFRYPQGVKLDQENSRIFLPKLGWMRYRNSRQVTGVVKNVTVSQSCGKWYISIQTESEVSTPVHPSASMVGLDAGVAKLATLSDGTVFEPVNSFQKNQKKLARLQRQLSRKVKFSNNWQKQKRKIQRLHSCIANIRRDYLHKVTTTVSKNHAMIVIEDLKVSNMSKSAAGTVSQPGRNVRAKSGLNRSILDQGWYEMRRQLEHKQLWSGGQVLAVPPAYTSQRCACCGHTAKENRLSQSKFRCQVCGYTANADVNGARNILAAGHAVLACGEMVQSGRPLKQEPTEMIQATA

SEQ ID NO: 24174 - protein, 547 aa, unknown
  TnpB Polypeptide
MIKQSKYTKIFHSKDLTRQKYDELYNFAVLIRSHKNTVSQYVNDNLLHFLEYNKFQFLKVMRASFKDVIPSSFDSQLYTQVFTCYQNKFDAIQHKLVFEAITFNGFEFYKRDTKNHKKGDLKKVIINKKQTPLSNCLTYLARYGNENTINYISSNINKCDEKKREFYNNILRCCEKYGFERLYNLALSKRKRIVKNYSEYPIEFKSLTFNGRCRKTRIIDYNSKFGSKINSFVSLSGIGRKSFDIPVTFNKGWYGNMKDYRKKNPDYEYTLTFNEKYHQVNIHLCKDGERYIPQVNGNTIGIDVNCKHNLFSLSDETTYDYDRKLVNDFCKLFIEIDKLKGKNKEYKVGKRKQQKLDTLKSKMVKSEQQLIANMCKALHSQGVGHIVMENLDNGFGKCYVKDKNNEGINYNRKVKFLGLSSLKQEVEHIARKYDIAISTVQASYTSKMCPICGCIEDENRPNQETFECIECGHKDNADFNAAKNIRNRVLVTVLRESLLKQLGNGAFESKKLKREKVKEVLLSFRRNLQENTRSECREGRLTTFDYV

SEQ ID NO: 24175 - protein, 399 aa, Symploca sp.
MMREFFKSMKQVLTLVVKLQPTSEHRQLLDDTAKAFADACNWINETVKPNLTNKNSIQTLCYQDVKKRFGLTANHVVRACARVAVNRLTAQHTGKKVKQFKPSSFDCDARTFRLIKTGYLASISTTEKRAKIPMRVSNYHLGKLKNQNPTSAQVCQHKDGDWYVHIQLKYDVYKPTKTNKVIGIDLGITDIAVTSTNKSWSGKEIQEKRDKFNRVRASLQKKASQGTRATRRRCRKILKRLSGKERRYQAWLNHNISKAIIDEAKQTQSFIAIEDLTGIRERTNQQPRNKTQRRRSNSWAFYQLRTFLEYKGIKEGVEVIAVSPRYTSLTCHCCLHIGRRNNKSFKCSNQACGWFGDADTNGSYMIALVGLSVRQPGGSGLLACPIDSGLQKAHDFSVA

SEQ ID NO: 24176 - protein, 408 aa, Streptomyces sp.
VKTKHVRRAFKFRFYPTDAQAAALSRTFGCVRKVYNLALQARTEAWYQRQERVNYVQTSALLTEWKKTDDLAYLGAVSSVPLQQALRHLQAAFVNFWEGRAGYPSFKSKKKSRSSAEYTRSAFRWRDGRLTLAMMDDPLDIVWSRPLPDGAEPSTVTVSRDAAGRWFVSLLVEDPSVQPLGPAAHDAVALDVGLTSLVTLSTGEKIANPRHERRDRGRLARAQRQLARKEAGSKNREKARRQIAKIHARITDRRRDHLHKLTTRLVRENQTIVIEDLNVRGMLKNRSLARAISDAAWTELRGMLDYKCEWYGRQLVVVDQWYPSSKTCSACGYHLAKLPLNVRQWTCPACSTLHDRDENGAKNLLAVGQAVTACGAGVRPQRDASRTRRPAAKQEAKQATAGHFSPEK

SEQ ID NO: 24177 - protein, 254 aa, unknown
  TnpB Polypeptide
MDHGIKLPKVGMIHAIVHRLPGPEWIIKSATISQKSNGSYYISLLCEKEEEEITPLPVFDEKVLGLDYKSDGLYMDSNGRLGDMPKFFQKAQKRLVKRQRKLKNKDIHSKNYQKQLKKIAKLYVHTADQRKDFLHKKSAAITKQYDYVVVEDLNMRSMANKGFGNGKATLDNGYGMFLTMLEYKLHNKGGKLEKVDRWFPSSQLCSCCGFQNQEVKKLNVRTWICPKCGSIHDRDLNAAVNIKNEGLRILRSAA

SEQ ID NO: 24178 - protein, 338 aa, unknown
  TnpB Polypeptide
LFNAAVYNRFTQYEKFKHSVSYIEQQNSLPAFKEIWTEYKEINSQALQATLKRVDFAFERWFKGLGKPPRFKSIRHYSGWTYPAKTGYSVESNGENGYIVLSKIGRIQMRGKAKYWGTPTTCTIVYRNDKWYASITVDVLDQVLKPEVLPTGAIGIDLGCKSALSITDAENHQHIDAPKFLRNAERDIKRASKQKRRKQAPNTNKRVKASRRWKKAQSKVSKLTRKVANQRQNWVHQVAAEIVSGNSFVATEKLEVVKMTSIAKKGKRKKQKAGLNKSILDVGFGMLKSNIKYKVEQIGGVFIEVPTKKVKPSQTCPKCGYQHKKTLDDRVHECQQCQ

SEQ ID NO: 24179 - protein, 383 aa, unknown
  TnpB Polypeptide
MKSRKKTDVECIAYKFTVKPSKEQEHIFANAFGCKRFLYNVMLADESYHYKTMGKSLRNEVSDYKEQYPFLCDVDSLVLANAKLNLTTAFQKFFNGESKYPVFKKKSGRQSFTTNCSNKKQPNLVYDMEHKLLKLPKVKEPLAVIQHRKIKTGGVLKSATVSMETDGRYYVSMLFEYPCTGTTPIVSDTVKSIGLDMSMEHFYMDSDGNVTDYPRFYRFMESILAKEQAKLSHMVKGSNNYNKQKHRIAKLYAKIKHQRSDFLHKLSYNLVMDYDVICIESLNMKGMAKSLHLGKSVHDLGWGEFVRMLSYKCKKYGKTLIMIDKFYPSSKACMACGYIHKGLTLSDRLYICPSCGNIIDRDWQAAINILSEGLRIYHNLLVA

SEQ ID NO: 24180 - protein, 365 aa, unknown
  TnpB Polypeptide
MQKGVKFRIYPNREQQNLINQTLGCCRLVYNKGLAMRNEAYKNGNKIGYTQTSAMLTELKKDDDFSFLRDVDSIALQQSLRDLDRSFVNFFAKRAAHPAFKSKHNHHQSYRTINQGNNIRIVGKYIKLPKLGFVKIRQTMEVGHIHNVTLEHTPTGKYFAVLNVEFTPQPKQNNGGIIGIDVGIKEFYCDSNGHSVPNPKHLEKAMQKLIREQRKLSRKQKGSNNRNRQRIKVATVHEKITNQRNDFLQKESTKLIRENQTICIEDLKVKNMMRNHKLAQHIASVSWSKFFDMLAYKATWYGNDIIKVPTMYPSSQTCSCCGYKNVLVKNLAIRVWECPKCHTVRDRDINAGINILTKGLQMQSA

SEQ ID NO: 24181 - protein, 379 aa, unknown
  TnpB Polypeptide
MLRAIKVRLYPNKQQTQAINELLGSYRVVYNQTLALKQEAYELNKTNLSLCDLSKYFHGTMLKDEKYSWLKKQNTKVMKQAIRQMLTAYDNFFKLHKGFPKFKSKKDKQSALFSLEAISKKNTFETKHISLIKSLKNIKFRCSDLYFKRLQTYKDSIRSATLTKTKSGNYFLSILMDIPQNEFVKFKNTNKQIGIDLGIKDFVITSDGEVFENKHLFEKQERKLKRLQRQLSRKQKGSNNRNKQRIRIAKVFERITNQKENYIHSVVNELLTYYDTIYMEDLNVSGMMKNHSLAKPIQEVGFYRFKSVLQSKVLANDKQVVFIDRFYPSSKTCSCCGYKKKDLKLTDRFWACPKCNIKHDRDINAARNILIEGQRVLCG

SEQ ID NO: 24182 - protein, 415 aa, Fusobacterium sp.
  misc_feature (254)..(327): Xaa can be any naturally occurring amino acid
MYLTLKQQVKYLSKKEFRNLKYLSPIAKNLTNEAIYNIRQYYFKNKKYLSYNENYKILKNSKNYKKLNSNMAQQILKEVDGSFKSFFGLLKLVKNGQYDNKKIKLPKYLAKDGFTTLVIGFVRLKDGMLIIPYSNSFRKTHKEIAIKLPPILKDKKIKEIRIIPKQHSRYFEIQYTYEVEEVQRELNKENGLGIDLGIDNLCTCVTNNGASFLIDGRKLKSINRYYNKINAKLQSIKDKQKIERTTLRQKRIAXXXXXXXXXXXXXXXXXXXXXXXXXXXXXXXXXXXXXXXXXXXXXXXXXXXXXXXXXXXXXXXXXXXXXXXXXXFKLQEESYTSKASFFDGDEIPIYDKENLQEYIFSGKRIKRGLYQTSAGKLINADCNGALNILRKSKVVDLSILYNRGELNTPKRIRVV

SEQ ID NO: 24183 - protein, 414 aa, Sporolactobacillus sp.
MVNIGLSLKLKLKVTSDQAERLKTLMMIYRNACNEVSHYYFDHHFRLNQVQLHDRLYNKLRRDYALKSQAAQSVLLTVLARYRSVRTQLSHERVQNGWKLNTNGNPLLDTKGHPIPVFTCKTLDHLWKPIQFARPQADLVFNRDYSFLSDGTLSLNTMGKRIKVSYSTKGFKQYLNQDWKLGTAKLVQRRGKFFLHIGATKEVPDFETQNVKHVAGLDRGLRFLVTGYDEKGKTLFINGKEIMHTRSKYKKLRGQLQAKGTYSAKRRLRKIGQREKRWMADINHQISKALVAHYGANTLFTLEDLTGVRFATEKVSKDRRYEQVSWAFYQLEQFLTYKARLNQSEVIKVDAHYTSQRCPKCGKINKDHRRHETHEYVCENCGTRSNDDRIGAMNIQLLGTQYVSGVAAPHFEKD

SEQ ID NO: 24184 - protein, 410 aa, unknown
  TnpB Polypeptide
MKKTMLPDDTVRLVEQHFIGPSDPRFATIDAAAFASKNIYNLTNYEARQHFFTTGHLLSYETLYHRLKKTDAFLALPQKVSQQTVLQVARAWKGFQEARKAYRQDPARFLGPPRMPGYKPKQAGRAVLTYTDQALSRPALAEGLIVPSGLDIQVSTAHRQVRQVRIVPRRGGYVVEVVYLQQITSNPALDPALVAGLDIGVDALATITANKAGFQPLIINGRPLKALNQFYNKRKAALQSQLENNRQTSARINRMNRRRDGRITHYLHVASKRIVDHLAAEGIGTLVIGKNDRWKQEVNLGSRNNQNFVQIPHARFIDMMTYKARLQGVQVIYQEESYTSKCSFLDLEPVEKQPVYLGKRITRSLFRAADGRLIHADVNGSLNIIRKAMPAAFAHGTEGVVVRPRRLTPA

SEQ ID NO: 24185 - protein, 382 aa, unknown
  TnpB Polypeptide
MASKLRRKHDVAGQVENTVACTIKVKIPDTLAHRLDNLQPVASSSVARMLRNRDEASSKYYPELPSVVSKSLIAKYQRNRKCETVSHLVIPICGDKERQIRFEDNGVRVFALFGREILPLILAHPCVADERGRRNISAEFFQRGGEWYGAFSYRTPAAPAFQPTGMIGVDRNSVGHVATMADPQTGKVLHLGFDPARTKAAWRGRKANLQRAKKNRLLCKIKRKQSRRTKHENHIVSKVIVDYAATHRRAIAIEDLGQVRAKGSKIRSYTERSQWAFFQLLQFIEYKAALRGVEVIQVNPAYSSQECSRCHGLTKPTGKKFVCSHCGHKDHRDANAAFVLSSRVEPIGGLARDSAGSRSGVLVTPFLGSIGGHRAGEAATCH

SEQ ID NO: 24186 - protein, 318 aa, Bacillus sp.
  misc_feature (313)..(314): Xaa can be any naturally occurring amino acid
MINKAYKFRIYPNKAQATLINKTIGCSRFVFNHFLSLWNHAYKETGKGLTYGTCSAKLPAMKKEFVWLKEVDSIAIQSSVRNLADAYTRFFQKQNNAPRFKSKKNNVQSYTTKQTNENIAVVGNKIKLPKLGLVRFAKSREVKGRILNATVRRNLSGRYFVSLLGEIEVQELPKTQSSIGMDVGLKDFAILSDGTIYENPKFFRSLEEKLAKAQRVLSRRMKGSSRWNKQRVKVARIHEYMANARKDYLDKISTEIIKNHDVIGIEDLQVSNMLKNHKLAKAISEVSWSQFRTMLEYKAKWYGKQVIVVSKTXXQSKE

SEQ ID NO: 24187 - protein, 310 aa, Moorea sp.
IHSQVLQDVVKRVKLAFDRFIKGDSNGKRSGRPRFKKRHRYRTFTYPQLKEGCLEENIINLPKLGKVKIFLHRPIPTGFKIKTASITKKCDGYYLVLSLLDKTVPEIKPDINPESIIGIDVGLKDFLTTSEGETVEIPQYYRKSQKRLKVIQKRVSRRKKGGNNRLKAIKQLGKQHKKVADKRKDFHFKTAKYLLSKYDVVAYEKLNVKGMAKSRLAKSVLDAGWSSFLTILTSKAVRVAWPTALNAGLLAVPVSAQNTSQNCSNCGKKVPKKLHVRWHDCPHCRCSLVRDHNAAINIKNRAAGFEVTVR

SEQ ID NO: 24188 - protein, 665 aa, Mycobacterium sp.
MAASVTDTTTATSGDVMPRRRGKSKAPNFKYEGPVSVIRLELDASDHRARERLERQWEAVFRLRRALQRDAAARCLAYWAAHHERAADPKALRERLGLTRKGLEAAAKSHIEASRWMRDHLTKAIGLHVADEVWETVDRHLFADGSGRRHGPPRVGSWWEFTRIPGRARSHTKATPTWETYRLVGTLDGHLAAYRHPQLSAEVTTGAAAAARPAGTSILAQPARLAAPTRPASSWADYDGVLAVVFAGLPAGDLVLPVRLPQGAGRWAQLAHFLADPDVWHKIDLVRVADRRAPGAWRYYAHLLVHQSGYQSPATRARRAEVPAGRRAGVDANVSNLAVASFPADQPDRLVIDQIDCTPQQQKAAARAATKARARQKALDRSRRNTNPDQYRPSQRQHKRAQRRAAAGLVAKQITNPGGPRAARADGVPLRAYRHDTLSQRFQRTRRDHAAESRSASQAKQARADQVAARIVAAHGNAITVEDCRISTWARLWGKRIAVFSPGMLVAALKRECESAGGTLYRAGTRTTALSQHCLCGNRVPKTLAQRTHHCPECGLHADRDVTSAMLAACVELTDPDDPRTARVDYKLAHALRAWLASQQEWEGSVNRHQPPPTPVDGPARTGSHHRVASAEQAALDPPPNRPSQKLGRRGPSRKQPAPKLIGAA

SEQ ID NO: 24189 - protein, 348 aa, unknown
  TnpB Polypeptide
MRQLAEARREFEWLRGGSSSVQQQALRDFDWAVKEFVNRTRGCPTWRKRGRHEGFCVRDTKVRIHSRKWAQVQVPKLGWVRFRLSRRPPPGALGMARITHDRGGRWHVSFPGPQPGVPDEGRCGRAVGIDRGVATTVATSDGQLLRAPVMRKRERQRLARLQQKLACQRRYSARWQATKADIGRVHQRVADRRRDWVEKVTTRLAANYALVAVEALPVGTMVRRPKPKPDADNSGQFLRNGAAAKAGLNRAIYANCWGLIARRLEQKMSSSGTTMVVVPAQYSSQQCRRCGHTSPENRKSQAEFRCQLCSHVDHADANAAGVILARAMPAPTPGSGATPSGVLAKART

SEQ ID NO: 24190 - protein, 434 aa, unknown
  TnpB Polypeptide
MQRLQAFKFELMPSGEQQRKMRRFAGSCRFVFNKALALQKQNHEAGGKFIGYVAMAKELTAWRNGADTPWLKDAPVHPLQHALKDLERAYQNFFAKRADYPRFKKKGLRDSFRYPDPKQIKLDEANGRIFLPKLGWLRYRASRDVLGSVRNATVSESCGKWFVSIQTAREVDAPVPAGTTAVGVDMGIARSATLSNGTFYAPLNSFRRHEAALRKAQRAMSRKTKFSRNWRKAKARVQRIHARIGNTRRDYLHKATTTISNNHAMVCIEDLRVSNMSKSAAGTSEEPGKRVRAKSGLNKAILDQGWYEFRRQLDYKLAWNGGYLVAVPPQNTSRTCPCCGYVSANNRRTQARFACVECGFEEHADLVGAINVLRAGHAQFACVPQGDSPLGQVSGAAMPPAAGTHLSDLVSSSMLPLSAAGIPSLSAQSAAAEG

SEQ ID NO: 24191 - protein, 572 aa, unknown
  TnpB Polypeptide
MSKCEKALHVRLRRLSLGAVSGSWSSETIKTTKNTLKRDFLAEFGLTSRQYNSLLRCLEGRYKSLQELAMLRIEKSQDKLSNLEKKIEKRTAKLKKDRATRDAVQERALVGKAPTKAQEKVLLGKVERDKLRFANHNQKRRIGILQERIRMDQQIAAAEVPPVVFGSKKRLRERAKIHPNDRQGLMVWRRKWEAARQSQFLIIGSKGETSGCQTCVLGKNKDGQFYLSLRLPNALKAQMGTHVQVPLTDLPERVREALEKALDAHVQRKPHKSSIAYRFIREAGHSDKTRLSQWRLLITLDQEIPEIPRPAFKTIGLGAGKKPKKNKDQALGQTDAFIGAVGVDLNADHLAYAAIDRFGNPIRAQSGKIPLHVRGKTSERREALIGDAVAEIVRIASRLGLPIVIEILDFKARKKELKDSNAGYARMLSSLPYSQIQTMLRRRAEREAVELVEVNPAYTSVIGRVNYSRRYGISVHIGASVAIARRAACLSERVNYIYSYRGCRNALPAPAEARRHVWRQWAGVRKELAQRDSDKSRIASGSAFSARSRKGRDVTSPPDAGGRHVVGVSAPV

SEQ ID NO: 24192 - protein, 379 aa, unknown
  TnpB Polypeptide
LKKGGEIMELTITAKIKILPNEEQKGLLQKTIQVIKNGLNYVSEVVFETKVLGQAKLIKMTYEELRLGYGLRSQMAQSVARTVIAKYKSAQSNGHEWTKIRFKKPEYDLVWNRDYSLTKGVFSVNTLGGRIKVPFETKGMEHFFDGTWKFGTAKLVLKKGKYFLHIPMTKTFEDVDLNQIRNVVGVDLGINFIATAYDSNGTTTFFRGRWIKDKRAHFQRIRKSLQKKGTPSARRRLKAIGQRENRWMTHINHAVSKALVEKAGKGSLIVLENLKGVRSTAEKVRKHNRWYVVSWAFYQLQEMIRYKAKINQSAVIVVDPKYTSQTCPKCGHTEKANRNKKKHIFRCRTCGYTSNDDRIGAMNLHRKGIEYLSAVTAQA

SEQ ID NO: 24193 - protein, 326 aa, unknown
  TnpB Polypeptide
MKANRVEQHIIKKNNPHWKIVDNLCFKSKNIYNYANYIIRQIFIITNLLKDNKEITQEQSDFLKWVNDNVDEYNKNKLKNLDIKQSKGRNLDKVFKSLEYFDKNNRVCRYDFLDYITKYSEPFIDLGSSSSQQTLKVLDKNWKSFFAGIKGWSKNPEKYLGRPKLPKYKHKEKGRKELILTNVQSKIIDGYLFFSFHPLKPLNNTFKTNIIGKLMQTRFIPKGDTYVMEIVYEIDIPEQMSYNVNIIGIDIGVDNLATVGNNIGLKPFVINGKPLKSMNQFYNKEKSNSQSHLKLKYDKNWSNKLQQLTNKRNNKITDYIHKASKY

SEQ ID NO: 24194 - protein, 544 aa, unknown
  TnpB Polypeptide
MTTKLLSVKKKNDRNFITVECLLAFDKDEDKEKVLNLMRKFSSMVRFAYKRLLEGVERKELTKLLAQKYGINTRYSDSAVFLAQQTLDSCVERGQNPKKLVFGSRVVFEKLKKKHLTGKRREKLRQEWEERRYGFLYSRGDKSKGGNLNLRLVYLNGQWHLRINLGNGEYVWAKVVRFAKRERDRWIDLVWDLTQAERTGNWFAYTVRLRLKNGKIYTQISKEEKFPEITITRENGVIGIDINAYPFHLALAWTSRDGNLEKYERISLNGLLDGNTDKREYLSWQIAHQVVEIAKREGKAIVVENLEKIPKGRRGDGMPKLRQKGQKWIYKGLLEKIEIVGRRKGVQVIKVNPAYTSIIGKLKYSPMLGIDKDVAGAYVIARRGLGFKERISKNYEKLLEDKEFLSYSVARVEDRIAKLKKEIERKKNEYKRNKLKSELRRLKRELKLLLKFLLDSGKSEPATQQAVNRKTKPMRGRAKSLQKNWRVLSVALAFSCLESFRDFSPLKRVILLGDWVGVAKRKGLVPLLGQGTAAQNMCSFVYFG

SEQ ID NO: 24195 - protein, 598 aa, Rhodococcus sp.
MTGPGSTAPRQFAFTTRAHMAVDDATGEPIGLDDVDTRVGWLLDLITAAGAELVSRLWQPATFDVLATGLDRHDRRLPAQGHVAAARLGWNPRYPDGIYVPSRVCRVVTAHVVATLRTLTFRDTAIAALSARFDPATGAVAPSTESADYVPPGFVRGVQRQLAAHARRSGAAPADRLRITDVQGPPQTSAMAQLSAADRQLAQITMTKRELVLTVKLPTSPAPAGRAQWRRVRLTAAIPAHLHGRAVTDWHLPTLVLDRRGLLWRCAATELVPVNDPKSATVAVGVDWSPSTLGAAAIAAEGPSGLSSDYRGWTYDDRGLGIKLGRLQAEGQMLHRKAARLTRLAATAPPEVRALLEEKIAVLNEHREAVGVKRGRINRELAFHFARQVTDYAAAADAEMIAVEDLTTLETRDHGRVNNNRAAQSARRRAVAALAHTAAGVGVPVVSVPARGSSAQCPGCDKPLARPGGYHTAWCPRCQVGGNRDHLAGVNLAKRALLGRNKVTRRRGRLPAIRVAEHAPVRPSRDKNGPTPSRPRHRRVRRSLPTVTRLLGVNPKQHVPAPQASVWDTVKPTPPHGDAGSRDTRPSPTPTPVADSMR

SEQ ID NO: 24196 - protein, 656 aa, Rhodococcus sp.
VVGDRPPRQPSRTQVQHRRQIQKFTVTDWEVGNVADVSGVRCARGEIPPDQVRHHGRIRIGDGGTYRFAQVHADDPVLAHHPLDPLVVHLDPRLAQLGRDARGTVGAVGVGMDGADPRGQLLVGAGAGGPGRRRGPPPVETRAGDFENLAQPLHRNGVAVVVNELEAAHQFVSPAKYFAALRRISRSVSSFRIWALSCLFSSSNTDSDDTSPADDAGRAAPLARSSAVEVPVRLRSALTQLRRVSRLTPRSLPMPSKVWLGSDRYSATASALNSAEYAFIAISDISSSGTFTTQCSRCPHSGGNSHLPTLILDRRGLLWQCAATELVPADDPESAAVAVGVDWSPSTLGAAAITAENPDGLVSDYRGWTYDDRGLGIKLARLQAEGQLLHRKAARLTRLAATAEPEVRAQLEEKIAVLNEHRTAVGVKRGKINRELAFHFARQTIDYAATAGAHVIAVEDLTTLETRGHGHVNNNRAAQSARRQAVAALAHTAAGVGITVVSVPARGSSAQCPGCDEPLARPGGYHTAWCPDCRVGGNRDHVAGVNLAKRALLARNKPTRRRGQLPAIRVAEHAPVRRCRDKNSPTPSRPRHRRVRRSLPTFTPRMGVNPKQHVPAPQASVWDTVKPTPPHGDTGSRDTRPSHTPATPMANSMRSP

SEQ ID NO: 24197 - protein, 249 aa, unknown
  TnpB Polypeptide
VGNQEGFSMTEYGAYQEHIRYTHDSKYYLHIPVTYEVEESNISDICNVVGIDRGINFVVATYDSKHKSGFVSGKAIKQKRANYSKLRKELQMRHTPSSRRRLKAIGQRENRWMQDINHQVSKALATGNPKHTLFVLEDLTGIRNAAERVKTKDRYVSVSWSFYDLEQKLIYKAKQNQSSVIKVDPRYTSQCCPACGHTEKSNGNKKIHLFTCKNCGYTSNDDRIGAMNLYRMGINYLTDSQVPNTVVTE

SEQ ID NO: 24198 - protein, 428 aa, unknown
  TnpB Polypeptide
MFFDAIIMYMQTVKIYQLNHLSHKQFQRLKAAQMEAARVWNLCCQTHKEARMARSAWPGRDTLQKATKGQFALHSQSVQMVVQAFLANIETTRKLRQSHPQMKMKYPWREKRFFPVKWPAQAVSREQGRVVLPMGRGRASIILPLELPTQSGACSLVWNHGFELHVCVEMPQAEEAPGNVHATVDLGEIHLAAVTTNTGSAMIVTGRGIRSLKRLRHRQLGKIAKKQTRCQKYSHRWKKLQRAKNKQCRRAERRIRDLRHKATRKVIDFCVEQKVGNLFIGNPHGVRKKNSGRHHNQRMSMWEYGKDIDYLTHKSQQAHIESSTGSERGTSSRCPKCGHKHKPKNRNWVCKACRFSGHRDLVGSVNMHELSYGKPVEFPRSFTYLRPGKSRSRGSRADTPQRCLSKAEDQPRIADTVSAETGHHSDVA

SEQ ID NO: 24199 - protein, 441 aa, Domibacillus sp.
MFVTHSFRIPYDKKVYDELRIMQREAASVWNDIVREATSYYFTCKKWLSKTDIQAIRKQTYDLHSQTVQAIADKYVANRETIRQLRKVDKKANYPWRRKYYYCIPLKKASMTVSKDTITIKKAEYGYALSDLLTKKKKKKWNEKVPKKNKTVVLPNLSEEDMENCNYAEIVWRNGAYWFCYAVSVPEKDISSYDFKAAGGELGEIHAVTVATENKALLVSGRAMRSLSQFRAKALADLSKKMSRCQKGSNQWKKYRQARIRIRQKSKHQLEQLEHKTTKEIVAFLEEENVTNFVIGHVSGIEKNTKKKKQKKNKIRRQQLSLWNQGRIKQKLTYKAQLKGIAVEETEESYTSQDCPFCGGRHHAKGRRFGCSVHKTEIHRDVNGAQNIARKKHHMAVKPLLSVIYKQPVWYKRFLSEEQRQKTKHPNDEPKKEKRIASRMA

SEQ ID NO: 24200 - protein, 442 aa, unknown
  TnpB Polypeptide
MQIISSYGVELRKQNIPIRQTLEIYRSAVSYLIGIYVQVWEELAEIPDAKRRFNAAEHLVHTTKKNHACFDFDIRFPKMPSYLRRSAIQHALGTVSSYKTRLDLWEKTDGKSGKPKLVYENHAMPVFYRDVMYREGAEGKDEAYLKLYDGHDWKWSCVRLDHTDMEYLRKCWSGKKASAPTLEKRHQKYFLRFSYKEEVTLTKTPVKEQIICSVDLGINTDAVCTIMRADGTVLGRRFIDHPSEKDRMYRTLGRIRRSQREHGSAQTQGRWAYTKRLNTELGKKTAGAIVRYAEENHADVIVFEYLEMQGKISGKKKQKLHLWRKRDIQKRCEHQAHRKGMRVSRVCAWNTSRLAYDGSGSVSRDPKNHSLCVFQTGKRYNCDLSASYNIGARYFIRELLKPLPVTERSLLEAKVPPVKRRTSCVYADLRKLHSEMELLKAA

SEQ ID NO: 24201 - protein, 414 aa, Caldilineaceae sp.
VIRSRPQEEWFQAFLRSEQGQPYADQDLSWLRDLPFAPVRHAAKYLSGAYTRFYKAAAAAREAGRSLGRRKSDGKPKYFPRRKVKHRKPDGFTIPCSVRMDGHRLRVPGAGWVRLDKANPLYLGCEARQVRFLKEGTERHPKWYAVVSYKVPVGMLKQGSPTGAVGVDRNVGQATDSEGEVYEIPDDPKLDANIKRKQRGAEKARRRSRASGKPMSNRGRRICGQLKKLQRRKKRRRENANHQASRKLADAAHTVVLEDLDIANMTKSAKGTVEKPGKNVKQKSGLNREILNTGWGQLERNLDYKAGMVEKVSPAYTSQTCSACGHTSKENRRTQAKFKCVACGFKANADHNAALNILVRAGFPPRTRPARGTGASARRDASGHCPLPQAKGKSTSTTREQGIPPPFGAAASGA

SEQ ID NO: 24202 - protein, 459 aa, unknown
  TnpB Polypeptide
MLSSGQFSEHEEREPISPAMPEEGISEVKYKNMRTSVVRLLPNGFQERKLRRLANTSAKLFNEINYERRQQFFHGEKVGFKETWDKCYEKYKGVLGVNAQAVMQKNNEAWSSTFSLLKLKKEGKLPLFMNRVSPPRYWKDRETKKRKPLLVVRADRYVVDEQTHKLILKDFNLEIDFVGRLKWYGKQGRLEISYDETRNAWYASIPVEVGVEETKTGRKSKYILHGERKTIQVESPKGNKLASIDLGINVLASVVMNDGIWLLYKGLRTKEDYFYFEKKIAAMQSLAGETKNSSECEAREALSREKRRLFKKLTRRLLHLYRSFASHLLKQLHELGVSTIYLGYPFNIAQDKGNKFTSNMWSYRELMDVIELKAQEYGMKAFEVVEYNTSKYCAYHNVEVKRSPRGVISCPKGHKLHSDLNGALNILEKATGIVVSAIGKPLSFIVDHNGVAPVKGCNP

SEQ ID NO: 24203 - protein, 514 aa, Clostridiales sp.
MNTVMAFKTLMLQIYKPTKQKKDLMDAALLRYSRAFQFLMDRYRKELEELAESKSAVTQRLLFNLIDKETAQKLNDYDVQPFKDSLKIEFAAVSASYIAQKRKNPRVRYPLLFLDDTRFASEIADCIRQFDSARISPQNFAYRCSKLIGQKGNLRSLYFGRYAMNRNYCLLYDEFKDRFYAKLYLLNRKESLPAGNWASGLCLKYVWAGMPPLIPKPGSRSYIVVPLAFGKRQYADLKKALENPGLLHSARLVKREKKYYLMVNMECGQRDALTVVTTMGVARNMSGGLHYTVCREDGEIQENGSICAAPNGENLFRLANTIAGIAENNRSQVVVEANGGRNDRLPLLPGEGSCLSVGQYAALVKILKYKLPERGLPAPIEVSANGLFHTCPACGKRTRRNQVSAELFICIYCGYASESEWIGSESLAKRLEQYRHDKIPLTIRKTGDGLLCFNKILGFECLLPQGAADYTPVYDKLRQFLENMDGEYIGDPKKYAVWRKLFYAANLEAAVRFC

SEQ ID NO: 24204 - protein, 423 aa, Streptomyces sp.
MPTHVKRAFKYRFYPDDAQAADLSRTFGCVRKVYNLALEARTAAWYQRQERVNYNATSAMLTAWKKTEELAFLAEVSSVPLQQCLRHLQGAFTHFFEGRAKYPRFKSRKKSRHSAEYTSSAFRYRDGRLTLAKMREPLNIVWSRPLPKDTVPSTVTVSQDAAGRWFVSLLCDDAITPAPATTAAVGIDAGIASPVTLSTGEKVTNPRYERRDRARLAKAQRELSRKAKGSNNRAKARRKAAKVYARITDRRRDHLHKLTTRLVRENQTVVIEDLTVRSMVRNGKLARAISDAAWRELRSMLEYKCAWYGRDLIVIDRWFPSSKLCGVCGTLRAKPALNVREWTCGCGTVHDRDVNAAKNILAAGLAVTACGDGVRPQRESSRTGRSSVKQEPQRATAGTPAPRRGGSQFAHTPSSDETPRTVH

SEQ ID NO: 24205 - protein, 407 aa, Streptosporangium sp.
VRLRYNYRVYPDADQRAALARAFGCARVVFNDALRLRTDAHIEGLPHISDGGLSKRIITQAKQTPERAWLGEVSAVILQQALADLNTAYRNFFASLTGRRKGRKVAPPRFRSRKDSRQAVRFTKNARFKVTESGRLWLPKIGDVPVRWSRPLPSDPSSVTVIRDAAGRYFASFVVETSDRPLPEVAAEIGIDLGLTHFAVMSDGEKVDNPRILRRAAKKLRRAQKALSRKEKGSANRAKAKVKVAKAYAKVADTRRDWAHKLSTTLIRDNQAVYVEDLAVSGLARTRLAKSIHDAGWSQFVAMLEYKAARYGRHFGKIDRWFPSSKLCSACGTIAESMPLTIREWTCPCGAAHDRDINAAINILAAGQAERLNDCGAQVRPGRVPAPREEAVTHPEPHTRQTGTSVL

SEQ ID NO: 24206 - protein, 405 aa, unknown
  TnpB Polypeptide
MKLNRQVRLYPNKIMKRVLDSLCDYRRYCWNEAIACWNVQYEARLIGLPEDLYDKLRSKTEPLTSEEKELVNQYPSPSHYSVRNELVAQKEDWQTAFSSRVLQQAVKDVATAWELFFQNQDMAGQPTFKTRKAPKQGFKTDTARIRNGQLLLDKPHGYQGQWKTIRFKGLSIPDGKLTLCSVTRVNGHYTATFTIDVESTSLPKTGQKTAVDANVDHFDTLDGRTTLKPEVLNPLYARVRHYQRILARKRFRNPRVIHSKGYQATRTKLQRTYERIANIQKDLLHKFTTDLYQRFDTVVIEDLDVKKMQMSKRAKNLHRSLFGQFRQMMEYKSQKFGKTLIIADRFYPSTQRCSSCGFVKTGDDKITLSGNLKHGTRHNEYICYHCGYEDDRDHNAVLNLLALAE

SEQ ID NO: 24207 - protein, 409 aa, Gordonia sp.
VRRAYKVRAYPDESQEAIFNRTLGCVRLVWNKTLADRQHRYTVEQASTSYKQTDAALTGWKRTDELAFLNEVSSVPLQQTLRHQHTAFSNFFKGRARYPKFKSRNGRQCAHYTRSAFRMKVDGLWLAKTSAPLRLAWSWPDIELAELDPTMVVISREPDGRWFATLCVDQPDPAPAMPTGQSVGVDLGIKDFATLSTGEKIANPRHLARHERGLRRQQKRLARMKRGSSNRAKQRKKVARKHARVRDARRDFLHKTSTGLVTTNDLVAVEDLNVAGMVRNHKIAKSISDAGWGQFRSMLTYKTEQAGKRLVVIDRWYPSTKTCSSCGHLLVSISLGTRYWTCPDCGTRQDRDINAAKNILVAAGLAETRNACGADVRPQGTSLRQSAVKQENLYVSAGIPIPRVGRMSI

SEQ ID NO: 24208 - protein, 418 aa, unknown
  TnpB Polypeptide
VGTRAYKYKAYSSKTTARVLRTQLQAACKLYNTLLHLEEEEYRKNKRTMSRNELRQLALDLRKKDPEFHSLHSQVAQQVAERFYQARQRFLEGLANKPKAKKPHKYLSLVYPQSGWKLSNIREVGLGKNKKKKARLYLSKIGFFTLIMHRDFPLSRVCQVCIKLNPSGRIYVVFLVEEEAEASNEQKCADESKKAVAVDVGITRLATLSDGRFLENPGPLERSLDRIQTLQKSFSRKIKFSKNWFKAKTKLAKEHEYVKDFRRDVFFKLGALLATEYDLLVLEDLDVLGLIQKGETKKRRLRLHDSAFSELRRVLEWQFEKRGKTVLLVPSYNSSRECFWCGKINQSLTLEDRIFHCPFCGFTLDRDLNASLVLLKRAGWVPPSVPVELRPIPPLPSLGLKGRHGGAVIREAPPFRAG

SEQ ID NO: 24209 - protein, 294 aa, unknown
  TnpB Polypeptide
MLEVHRTHRAAICNHSQVADALDRHGWSASKLWNVANHHSRQVWDETGKIPDHEELKDELKDHPKYKGLHSQSSQRVLEELAESFNSWYSSDDDRANPPGYRKENYYDDEGRRVHEEHPRSTVTWKQNGIRHDTKNNRVRLSKGANHKEHPKAWEYILVEYETRPGVTVKNLQQVRAVYDSATERWELHLICKDEIETPTAPGEETAGIDLGISNFAAVAYSTDDANLYPGTRLKQDGYYFPKEIANCDDSSGNRATRLHNKWSERRTHFFHSLATHIVERCVEKGVCRINTGD

SEQ ID NO: 24210 - protein, 489 aa, unknown
  TnpB Polypeptide
MMRKAFKFRCYPNKQTQQRLWDVMQRGVTPVWNACVAERQAVRTEYAHLCDEAICDRVYDLKRDLSPKEEKAIRKKMANQVSWPSAYSQYKHIRKRDHPEYADFYAKMLECTVAEVDGAEKSYRALWILGDTKARPPSEQRVHRVITYRLSGFKLNGSYLWLSRIGTMKIRLHRPVEGIIKTVTIREKNWKWYVSFSSEAEHFSGPCRSVSEDNPVIGRYLRQKHPITGGATREKTGAYNVLPRSQPSGGATREKTGAYNYNDHSLELSFRPHCFVEDSAGRIFDHPDFYFEGIETLRRLSRELSRKMKWHCADCDGVCEKYRTVRDTPTCWHCGSEVIRPQRSQNWYKARKRLGAHQEHIARQRRYWLWHVANFYAGHYRQIIVYEKMWKYKIKYARTGDEAIRLCDGAAALFVAMLKTKCQDFGTELILRKDVKWQHQEKDLIERAELEGLHKLMRRLQRILNDPRPVHLPFLKRASKQRPTLKRYA

SEQ ID NO: 24211 - protein, 362 aa, unknown
  TnpB Polypeptide
VNIKAGDKFEERELNILPSQMKQYIIKRLQSNVKTLQKLDKKGRKTGKIKYRKVLHSIPLMQYGITYKVDKESESVHIQSLGNFKAKGLNQIPMNAEMATANLMEKDGDYFLHVTAYVPKEEKIHNKKAIGIDLGIKNQVAFSNGITTQYAIPASERKIRLYKVFSRAKYDQKTKQQSKRRQKVLNKIKGEFSKENNMKRDINNKLASYVSNNYEFVAYQNDHIHAWQKLWGRRIYQTSIGEFRNALKRKASTPIEIDRFTKTTGICMDCDALLYLNLSDRVFTCPFCEYLQDRDVSAANATINKGLSLRNVGETLAEDHASVSSMLEYLKHIPHMKASIADETRSSKQTERQIEASSVRAR

SEQ ID NO: 24212 - protein, 402 aa, Streptomyces sp.
VIRAYKFLLRPTVRQAQALREMLADHRSLYNGALQERRDAWRHTSKTSIKYGDQSAQLKEIRSFDPERQGRWSFSSQQATLRRLDKAFAAFFRRVRTGEKPGYPRFKSVGRFDTVIFPKDGDGCRWDSTPHDPVARVRLQGVGHIRVHQHRPVQGRVKTITIKREGTRWYVVLSCDEVPAEPLPATGQVVGIDLGVTHFLTTSTGEHIANPRFLQEAAEELAAAQRHLATFPKRTKRRTKAHRAAARKVAKIHARIRRQRLDHAHKTALTLVRDYDVIAHERLNTAGMTKAPAPKPDPEQPGVFLPNQRAAKAGLNRSILDAGWGVFLAILTNKAESAGRTVVAVDPRNTSRTCPSCGHTAKENRLTQAKFQCTTCGFAANADHVGALNVLNRAGLALCDAA

SEQ ID NO: 24213 - protein, 288 aa, unknown
  TnpB Polypeptide
VYVKLNSHTLQVLSGLNVHSVTFTPDALSISFSKDTVEIEPEGYIGVDRNLDNVTTASANGMVKTFDLSKATGIKSTYRFVKSRFKRNYSRTRAQIFSKYGKKQRNRVLPILHNVSKRIVENAKTRRYGIIMERLTGMRRLFQKDNGQSRNYRAKMNSWSYGELQRQIEYKARWEGVKIIYVPARNTSKRCSICGYKTLESTQRRLWCPHCGAILDRDENAARNIAAGGLRFSPNGPPGEAMVEEREPDNATLILKVDEGKQSQSIRRRLGGTLETKESKRMIGNGKS

SEQ ID NO: 24214 - protein, 381 aa, Okeania sp.
MITLTYQYKLKPSKQQEMEINQILDVCKSVYNYALRERKDWLSSRKAAINSCSIISEYIIPADTPYPNYNHQAKSLTIAKKTNPRLKSINAQVLQQTLKTLDRAFSEMKSLGKGFPRFKKKLRSFVFPTMLKNCLGCGKVKLPQLGWVKIRQSRLYPDFFQAKQARIVKKVTGYYLMITFTSSELVPDNPIGKVSLGVDAGIESFIATSTGKLVKSPKLLLGQLRELKLLQRKLKNKKSRSNNWLKLQNKIARLYEKIANVRRDWHFKLAHQICDLADNIFVEDINFKSWSKGIVRKQSLDSGIGQFINEILPYICWKRGKYYGKVDKNYTSQECPQCGHINKKKLSDRKHNCSSCGYQINRDIAAAPTPIPSREGSKRGG

SEQ ID NO: 24215 - protein, 207 aa, Okeania sp.
MPIPQLRDNPDYYSQKKDLVNTKDKFPSYKLIHSQVLQDCIKRVKLAIERWFKADKSGHKLGRPRFKKTSRYRSFTYPQIKLDCIEGNKINLPKIGKVKLIQHRPIPEGFIIKTVTISRKADGYYVTLSLEYKSVPALTSEVEPTLKNTLGIDMGLKEFLVTSEGESVPIPQYYRKSQQRLKTLHKRLSRKKKGSRRWLKAVNAVAK

SEQ ID NO: 24216 - protein, 135 aa, Brasilonema sp.
LHERIANTRKDFHWKVAHQLCEQAKTIFVEDLNLVGLSRGMLGKHCLDAGWGQFFQILEQCCFKRGVYFQKVDSKKTSQICPNCGTETGKKDLSERVHVCGNCGYTTDRDVAAAQVVLNRGCAAVGQTVKMRGFG

SEQ ID NO: 24217 - protein, 400 aa, Cyanobacteria sp.
MYLTQKNQIRELNKSEFLAVRELCRLSKNLYNVGLYTVRQYFFQERKHLRYESNYHQCKGNENYRLLNTDIAQQTLKVVDRTFKSFYGLINALKEGSYQQQVRLPHYLSKDGYFLLIIPRIVVKDGKFRIPMSKAFKKQYGEVWISFPKRLDINQVKEVRIYPKYNARYFEVEFISEVEPEPVEVNPSSAISIDLGVDNLAACVDTNGASFLVDGKTIKSINQGFNKRNADLQSIKDKQGIKGNTLQQVKLVAHRNNQVRDYLNKTARFIVNHCIDNQIAQMIVGYNPGIKQEIKIGKCNNQNFVQIPFHSLRSKLKALCERYGLIYTEQEESYTSKASAIDGDTIPVYNADNPKIYQFSGKRIKRGLYRTKDGHLVNSDLNGSWNIGRKSKLFGLCRSV

SEQ ID NO: 24218 - protein, 379 aa, Lactobacillus sp.
MTLKAVKTRIYPDSQQQTKIIANFGYCRFVWNQLLDMQIQRHDNGGRYVNEFGMNYLIKSLKQEFTFLKAAESTSLLHVSRDLHHAYQKLFKEHRGFPKFKSRKFPKQSYQCNSVNHNIQVTNACCLKLPKLGKVRFKCGQAVSGKIKNVTIRLSATGKFYAVLLVDTDTQELPKTNNTVGIDMGVADLMITSDGIKYPTIRFDKILSKKKHYWEKRLARRRLQAQREIAWDQHNKAPEPRELSDFNNYLKAKRMVAKYNEKIANQRNNYLHNLSKQLVEQYDLIKIEDLKTKNLLHKHKLARAIANQSWRKLRSQLEYKCAWYGKQLVNVNPRKTSQICSNCGFDDGKHTLDVREWTCPKCGINHDRDINAAKNILSA

SEQ ID NO: 24219 - protein, 341 aa, unknown
  TnpB Polypeptide
LKRKREGKLPPHVKRVGPPRYWKDGETKERRLMLVVRQDRYVVDEQNHRLILRDFDVEINFAGRLRWHGKQGRLEVRYDEARGAWYAYIPVEVGVEETKVGKKSKHIVRGERKSIRIAGPKGDVAAAVDLGINILASAVTGGGAWLLYRGSRAKEDFFYLTRRIAKIESEADSARNAGDDEEFRRQNRRRRRLFRKLVGRMAHLYWNLANHLVRGLWELGVSRIYLGYPHDIARERGNKLTVNLWTYRKLMDAIELKAQEYGIRVYEVVEYNTSNHCAVHGTKVARGPRGVVTCPLGHKLHSDLNGALNILRRGAGSIPATLRRPLSFLVDHSGVAPVKGA

SEQ ID NO: 24220 - protein, 435 aa, unknown
  TnpB Polypeptide
MGSYEAVKVRLDPTPRQGRLMVSHAGAARFAYNAGLAHVKDMLDNGESADWSHYSLRKWWNANKDELAVNSTTGEVWWNQNSKEAYSMGLRSLAQGFSNWSKSRKGKRKGRRVGFPRFKSKNATMRFAYSTGFTAPTAGDPYGLKLPRIGRVHCMENVYRRMNGARLIRISVSHHAGHWYASLTVERESAAPVSAPKLGTVGVDLGAKNLAALSDGTVIPNPRALNTHLRALRKAQQALSRKVAGSARREKAKGRVARLHARMADVRADAIRKATSMIARNYSTVCIEDLNVAGMVKNHHLARSASDAALGEFRRQLEYKTARSGAALRVVDRWYPSSKTCSKCGVVKAKLSLSERTFNCDTCGASMDRDLNASVNIRVAGSAPETLNARGEDVRRSGLVSGNADLGEARTKQSLAGGVRLGAGLGNEAMRPRVS

SEQ ID NO: 24221 - protein, 203 aa, unknown
  TnpB Polypeptide
  misc_feature (16)..(22): Xaa can be any naturally occurring amino acid
LVTTRGECWLALTPNXXXXXXXRCRELLQRLSGKERRFQVWVNHRISKAIVSKAKATNSAIALEDLTGIRERVNQQPRSKAERRRTNSWAFYQLRQFLEYKARVAGVSLILVPPAYTSQTCHKCLHIHPDPAQSYRSGKSFKCGHCGWEGDADLNGANVIALLGAVVNQPRGPGLFCSLVEQNRLRATVRTSGPEALSPLRTA

SEQ ID NO: 24222 - protein, 340 aa, unknown
  TnpB Polypeptide
LRDLDKAYDNFFRRVKLKKAGKLRGKVGYPTFKSRRHGVGSFRLTGVIKVFDGHIQLPRLGLLKLKERGYLPTEGVKILSATVSEKAGRWFVSVQVEEEIPDPEPAQGTPVGVDLGITTLATCSDGTSYENPKALQQAQKKLRRLQRQLSRQDKGSRNRQKTRQKIAQLHYRIANIRRDALHKATSGIAGKTKPAALRPHNVALENLNVSGMLKNHRLAHSIADVGMHEFRRQLSYKADWYGSEIVFADQWYPSSKMCSQCGQIKDALSLSERTYRCDVCGMVIDRDLNAARNLAQLATTASSAGRAAQDAANVCGEAIRPQYVGQPSLKQEPNRILGTA

SEQ ID NO: 24223 - protein, 402 aa, unknown
  TnpB Polypeptide
MYEYRLYPSKVQQKRLFSHFNLCCELYNILLKRCKDAYKEDKTALNSKTKLSEMVKEIKDNDPRFKEVHSQVLQNCVDRLSKAYANFFRRLKEKQSGKKIKVGFPRFKKQFKSITYPQSGFKFISDKKLRVSKIGGIPIVLHRVPKGKVKTMTIKRNKAGQWFAVFACEVESPVGTHSTTDKAVGIDVGIESFATLSTGEHIPNPRYLVKSEKKLKKAHRGVSGKVKGSKNRGKAIYRLAKVHVKVANQRRDFQHKLSGIITNEFGTIAVEDLRINNMLKNHHLAKHISDASWNSFIQMLCYKAESANGRVLKNSKTKGSSIRCSNCGKDVPKPLSVRVHNCPFCGFTTHRDHNSALNHLKDTVGLTEIYACGDSTPTSILQRLVASGVVEAGTTFGSTQFH

SEQ ID NO: 24224 - protein, 390 aa, Desulfobacter sp.
MKIRRAYKYRIYPNKQQQQQLAVQFGHARFIFNYGLDVRKKAFKETGKGLSYTATALLLPKLKQDLPWLKEADSQVLQQKLKDLDTAYVNFFQGHAGYPTFKNKNSHQAIRYPQRFKLTDSQIYLPKVGWVALVLHRPTEGVPKNATVSKTKSGKYFVSVQCELELSEFSNNLPAVGVDLGLHHFATLSTGEKVAHPAHLRAAEKKLRRLQKALSRTKKGSANRAKARRRVAVLHEKIANQRSDFLHKLSNRLVRSHGTVRLENLNVAGMVKCHSLAKSISDSGWNTLKLQCEYKACQYGSGVQSVDRFFPSSKTCNVCGYVNNDLKLQHRFWTCPECSAEHDRDINAAINIRNFNTVGATELQACGEDVRPTTFLGGRLTSVKEEAQCL

SEQ ID NO: 24225 - protein, 409 aa, Mycobacterium sp.
MAHRYRMYPTAQQSVFMLERHCSDARYVWNLAVEQFNWGRAGRPAPGPVQRQKQLAQARQAFEWLAAGSSPVQQQALRDFDRAVAGFFNGVYRRPSWRRKHLNEGFCIRDSRVEIVNGKWAHVFVPKLGPVKFRLSRPLPVGKLGMARVTFKAGRWHVSFPAAQPAVPGVPGREENVVGIDRGVKTTLALSDATMLRAPVMRRGEQKKLVRLQRQLAGCRKGSLRRGKVKARIAKLHARVADRRKDWVEKTTTRIASTYGVVAVEKLPTRNMVRTPKPKHDPDHAGHYLPNGKAAKAGLNRGIYANCWGQIAQRLEHKTSASGTVLVEVPAAYSSLECRSCGHSVKENRKSQAEFCCVNCGHQDHADIQAANTILARATLPAPTSGPEATPAHAGVLAQARRPHDARAA

SEQ ID NO: 24226 - protein, 500 aa, unknown
  TnpB Polypeptide
LRHRPPGRPHRARRGPGRQRSGPGPGRVRSRPARPAQRRDPDRPGHRADHPPRLRRPRRHRARGLSSVGCSVSDSALWLTWVCRVRPAGAEGYRPGGCRECQMFLRWWAYGLVRWRAGVGWRRVRVTQAYRFALDPSAVQERALRSHAGAARFGWNWGLAKCRERYAAERKWYSAVDLHRLWNAQKKADPALAWWAGNSKCAYQEAFRDLDRALRGFAASRTGQRKGRRLGFPGFKKRGRCKDSFRFGTGAMRCAGSTVILPRLGTIGTHEPTRKLARRLGNGTARILSATVSRTAQRWFVSFTVEVDRAVPGRHARPGSAIGIDLGVKTLLTGVDDRGNVVVADGPRALRPALRRLRRASRAHCRTARGSANRRRRAARLARIHAQVANVRGDALHKATTDLARRYETVVAEDLNVAGMTRNRRLARAIADQGFGQARRDARLQNGGGRRDARPGRPVLSLQQDLLGLRHGESQAGPVRADVPLRSLWPGPGPGRQRGT

SEQ ID NO: 24227 - protein, 274 aa, Nonomuraea sp.
LSVPVEWPKDGDGCRWDCRPEHPVAAFVLLQGIGHVRVHRHRRVLGTVKTISVKREGSRWFVVLSCEGVPAGQLPGTGAAVGLDMGVASLVTTSDGVHVANPRHLGATAARLAAAQRDLARKRRGSRRRRTAVAGVAVLQAKVRRGRLDSPHKAAPALVRDYDVIVHEDLKIANMTRSASDRSILDAGWGVFLQVLAYKAASAGRELIAVDPRDTSRTCAECGHCAKENRVTQAEFACQACGHTAHAGAAEAAWREAASFMRRRSHSDILGHGP

SEQ ID NO: 24228 - protein, 416 aa, unknown
  TnpB Polypeptide
VSSCEEYHRRTAVTRLAVSEPDATVLRQTVSEWKEGCQIAVDMAWDHCQSKSDLQRLAYDTIRDQTELGSQHAILACHQAADNIASCIAQRNAGQEVSKPNYTSPTVAYDSRTMTLFRDAEQVSLTTSGDRSRVRADLVLPPDEDGYQDQYLDSDEWEPTESTLHYRDGNWYLHLGFRKPKQSTEELTENGTVLGVDLGVTEIAVTSTARFFSAGELNHKRREVERIRGNLQTHGSRNAHRTLEAVSGREAEYVKHVLHRVANGIVEEALCYGCDGIVFEELDGIRERLPHAAWHSEWAFDTLYRYVEYKAEAEGLFVDTTQPKHTSKRCAECGFIHDDNRPARDTFECQQCGNRNHADYNAAKNVAEMYLRRGQQSSRRRGVSQYALKSGTVTPNRGYTPCPDGFEAESTDKPHP

SEQ ID NO: 24229 - protein, 489 aa, unknown
  TnpB Polypeptide
VPARDSDPLEAFRKEIERRKRSNKRTVRLRLFPNRYEEETLFDIGLACARLWNELSYEKRNAFFNGELSPGKRDEISKRYYHRYKGVLGVNAGQVVNKNDEAWNAFFELLDLRKQRRLPPHIRKLSPPGYWKDRETGEKKIHILIRNDRYYLEPISEDEGYIVLEGFDLRIRYAGRIRWEGKQGRLEIIYVNGRWFAHLPIEVGVDPPKSNPKGYVKPIYEDDERKKKKRRIVNPRSIKQRDPIGDKEAFIDMGLNNLFAVTISDGSAMLIKGRTIKSEYYWWKGEIATYQAIRDLLRNAGFSTWKEYHEKYLKAMYKRDERLRHLYITAIRFLADELHRRGVKKLYIGYPIMLSQDNGNEYNTNIWWFRKIVLWIVDIFMEYGIEVEIVSEDYTSRECSICGNKHKNGRIYRGLYECKKTGKKINADINAALNIARRLGHRIRISRKIESYHVTHNGIKPLIPNQRANTQDPSIETPPLKGGEGSCYL

SEQ ID NO: 24230 - protein, 277 aa, unknown
  TnpB Polypeptide
MGWVHLDLEPSKEFYKLLTRGFKPTSHAKIKLDRRNRRVLFHLSLEKEVEIYRPENIVKPVDVNENSVATLYEAFAVILETDLARTTLGYSYRKKSIQKRNGSSGKEARKAIKKLKERKKKRDYRMKTASLIVREAMRMRGVIAIERISGDDIRIMISRYKNRQLRHRIYQSALKGELNAIIDKAREYGVPVLMVDPRNTSKICPIHNALIEYGEDRIGVCSKGGERRHREVAALINIYLKALEALYEGYAQKAFGVLNLDRSTVTLGSTAFPRSFL

SEQ ID NO: 24231 - protein, 197 aa, unknown
  TnpB Polypeptide
MAETVLYGGNGGVHEEHPRSTVTWKQNGIKHDPKNNRVRLSKGANHKEHPKAWEYILVEYETRPGVTVENLQQVRAVYDKANGRWELHLVCKDEVETPDAPGNETAGVDLGICNFAAVAYSTDEADLYPGNRLKQDGYYFPKEIANCDDAGGAEVTRLHEKWSERRTHPVHSLSTHIGQRCVEKGVGRIYVGAVDGV

SEQ ID NO: 24232 - protein, 380 aa, unknown
  TnpB Polypeptide
MLLMELSKTVVCKIIPSEKDAQRLLTTLETFRDASNYISKLAFEYKVFNPITLHNIVYQKMKQKFKFSANLAIRVRNRVVKAYEQKRDKPIRFKTLSINLDKRLFRLTYKPDGIYASISALQGRVTVMLDIGDYQKKLLENINPARAVLVYRNKTFFLHIIIKKQVPEPKGKNPIGVDIGMKNLLVASNGFKIKGGKIIAKRHHLRELRSSLKAKGTASAKRKLKRLGRRERRYVNTILHQVSRAFVNSLREGDIVVMENLIGIRNNTKYGRSLHSWAFRRLQFFIEYKALEKGIPVVYVEPTNTSLTCPRCGYISKRNRRTQSLFRCIKCRFQHNADFVASLNLSRVELARSGRARVNEPNAGMSGFNHYDSPASPHDF

SEQ ID NO: 24233 - protein, 444 aa, unknown
  TnpB Polypeptide
MTTPLHGVGRRFKSALPHHLLFTFNNVILGIYSNFKIIQLMIECLRTERIEVGFDPNLSQLCHQTKNLYNAANYTIRQFFFKQKTILTYYKLWKIFKTTPEYKQLPGHTAQQTLRILARNWTSFIRTNREFTHNPKKYMSKPSIPRFKKKDGEFQALFTINQVNIDRDGYLNFPKKVKYKIKTRLSDKTKLQLVRVIPKGVGYRIEIVYKRNFQTRVPSMKRKAAIDLGVVNIITMIDNIGSRPIVVKDDGKGLKSNIQFYLKERARLQSIYKSQSIKSGKKLTKLIDTFERKKLEQLHKISIAIVQECENKNIGVLVIGYNPEWKQRVQLGRRMNQNFVSIPYFELIEKIKYKSEEKSIQVELVDERYTSKCSFLDNEMVKKQLQYQGKRVSRGIFCSSKGYKINADVNAAYNILAKSDPKALPKRSVDGVGGYVAYPSSWKL

SEQ ID NO: 24234 - protein, 383 aa, unknown
  TnpB Polypeptide
MISYKYKLYRTPKTKHLDKMLREACFVWNHALALQKRYYKLYHKYISDSRMRKHFAKRIHRYLLHSQTTQEIIDRLDMSYQRFFEHLAARPPKFKKAKDFTSFVFRQGGYTLNGNVLTINSIAKRYKFSLSRPYDGRIKELTIKRSNLGEYYIVMVLDKAPQSLGKSCNGASVGIDFGLRKYLTISDCTTVDNPQFLKSGLRQLQRKSRNLSKCVPGSHNRERKRLELNRLHEMVVNRRSDFQWKLAHQLCRQYDTIFLEDLSLVPMFSTYRWGRKMADLAHGEFVQKLQYVATKYGVTVHKIDREFPSSQTCTCGHVYQDLRLQDYVWTCPQCGAVHDRDILAADNILRQGIAELESARKSPATGRKRVRTRYYSRISCLQA

SEQ ID NO: 24235 - protein, 386 aa, unknown
  TnpB Polypeptide
MLKSFKVMLVPNNRQRTRLFQFAGAARFAYNWALRKEIDAYEADEKFISNFDLRKEFTVLRNSAEYEWLRTISNNVPKQAIKDCVDAYQNFFKKQSGRPRFKSKRRGDFSFYQDTDKIRITATHVKLEAIATSKKRNKQQLNWFRLAEVGRIPLGLKYKQPRITFDGLNWWLSVAVEFADPKPSEKCGDSIDIDLGIKTLATCSDGTIYLNINRTAKVRRLKKKQRRLQRSISRKYEMNNTKGESYSKTRNIIKSERKLLRIHHRLADIRQNYRHQITSAIIGRKPNPIVLEDLNVRGMMSNRHLAKAVQEQGFFEFRRQIEYKASWAGLSVVIAERFYPSSKTCIACGHVKKNLRLSERIYHCENCDNVIDRDLQAAINLKRYVS

SEQ ID NO: 24236 - protein, 368 aa, unknown
  TnpB Polypeptide
MNKTLIRTISIKLDVNSQEAFLQATQQQFNAAASWIASLCWEEHITNTNTAHHRVYGETRRRFGLGAQLAVCARAKAVESIKATKAQQSETCPQFGPRGSLRYDARTYRLLSLDRVSLNTLQGRIVCRLILGHRQHEMLVDSTWKIGGADLVWRRGTYYLNVTQSKEAPLLTETTETLGIDLGMVQLATDSTGESFSGSKVHEVRMRYHKRRQVLQSIGTRSAKRRLKKMSGREKRFQKNTNHVISKTLVHKAAVSRKALALEDLTGIRERVTVRRENRYERHSWAFFQLRVFIAYKAAWAGVPIKFIDPRNTSRTCSQCGHCVKANRQSQSSFTCQQCGFCLNADHNAAINISRADVKRPLVSASNG

SEQ ID NO: 24237 - protein, 505 aa, unknown
  TnpB Polypeptide
MECVRRAVAVEVENPPSELYAVEEQYRRIVEEVAVYVAERGRLEKEKYGELYRRFRELYPLPAQLIQQAMNQGVETGKSFLKLKKDGRVHKPRPEVRRVSIRFAKDSWSYKKTISSTAPVKLALSLPGGRRKVWIKPHRRFWLYWWKVLRKEVELASTVFLKRRRNKWYAIFVFDVAPKKETPTEAVAFDVNENSVAVARVSLLSTVDAVARWNRQYVDPAVYLIRTDFGRLVKRYEAVRNAKLEELKRKYPYAGRDEEERRQNVADTREFRKFVRRLRERRRKEGWVRQTAREITRSPAVIITEELGKNPQEEMIGVEEKKVGKRELRHRIKQTPFKKLIRAVEDKAAETGSAVFYVSPYRNSRVCPIHFAKLEEGGDWHALHCPRGHVVDRDAAAVLNMLWKITPEGVVKGVWWDVKEARKKLRKRRRLVPKEAVRRRNPLVPWPVVCAVWTSLGALKAGGKWPAVLARAAPMTPAQGADEDGARAPPRPRGTPARGEEVSSP

SEQ ID NO: 24238 - protein, 232 aa, Ruminococcus sp.
VKTKLHRRFDGNIKSATISQTPSGKYYVSFLVETVHQSLPSVTKEIGLDLGIKDFCVTSDGDRYENPKTLQKYEKLLIKLQRQLAHKKKGSSNYYKTRIKIAKCHEKITNIRKDYLHRISLKIISENQVIVTENLKVQNMMKNHHLAKAVADVSWYEFTRQLTYKAEWNGRIYQKTDTFFPSSQLCSCCGYQNPETKDLSVREWVCPDCQTIHDRDVNAAKNILSEGLRLLV

SEQ ID NO: 24239 - protein, 561 aa, Syntrophothermus sp.
MPKNKAKDKFSVTVCGEFFPEVYPAFRSERWSRGHEDPLVTETRLFSACTRWAFHRLLESTSRNEVKKLGQDLFGLNSRYVDDARVKAQALLDAQRELLFLEIEEAEKKLRRARKKLGLAMRKLAKAEEKATDSEATQKLRLVVKGRNNRAASLENKLAELKAHQEGGTIPKVVFGRRSLWEKVCRGKASREEWRAARKNRLYSRGDETKGGNPNMKVFLDGKDFRLAVTISHLSEKTGVDRLGRPKMSRAPRVEGGLWLPEKHRELVRIWLAMRLPYAVELVRTLDGRYLVHLTFDLGEAPEADFARGCLALDTNPDGVALCNVGRTGQPEPWPEGVSVSYPSNLCKYEGEFQVITYSNGFLYIRVPDLTYASGFRRSYLIGVLAKVVVDVAFFLGKPVVLENLDFGKDRLETDKKFNRMASNFPFAKMVEAVCRRAVKEGVPFKLVCARYTSTIGYWKYTKRYAVPVHCAAALVIGRRAMGFRERVTKELKQLVVHIKHDLTQKVSSLPREGEGMIRRVRARLRRLDGKLSLHNGLAPQQQEVYYSVWHDLKQLALSLR

SEQ ID NO: 24240 - protein, 397 aa, unknown
  TnpB Polypeptide
MILTHKFRLYPNKKQKEKLLWTLNKCRQTYNFLLSELQQQKVIDRSQIQGILPDLKICEPELRSVYAKTLQYECYRLFSNLRGLSQSKKNSRKIGKLRFKGKNWFKTFTYNQYGFKLINNGKRHQILHLSKIGKIPIRIHRNVREKIKQVTIKKEQSGKWFASIIEEREEKIRAQSIKNMAGIDLGLENFIYDSDGNKVENPKHLYKHSNKLSKLQKKLSKKKLKSKNRLKAKIKVAKQFEKVVNTRNDFLHKVSRYYISNYGAIALEDLRIIQMVHNKYLSKSILDASWSKFRQYISYKAERAGKLLLLVEPRGTTQRCSRCSNKVKKELWHRTHKCPYCNLEIERDYNSALEIKNLGLQQIGQELSKFKPVEIALAGNSNMDSSYQLLKQEAFSK

SEQ ID NO: 24241 - protein, 320 aa, unknown
  TnpB Polypeptide
MRVNISNNVTKQAIKDACTAYKNFFRGLQKFPRFKSKKRSMPKFYQDNVKIRFSNTHVKFEGFSSSRKANKQKMNWVRLAEHGRIPTNAKYMNPRISFDGLNWWISVCVEFPDCRETLNDDGVGIDLGIKDLAVCSDGTKYKNINKSQKVKESEKQKRRLQRSISRSYEKNKKGESYCKTNNVIKKEKLLLKRNHRLTNIRKNYLNQTISEIVDRKPRFICIEDLNVSGMMKNRHLSKAVQAQGFFGFRKQLEYRCSDKGIQLIVADRFYPSSKLCSCCGNIKKDLKLSDRVYRCACGNMIDRDFQASINLKTYGEKFAS

SEQ ID NO: 24242 - protein, 421 aa, unknown
  TnpB Polypeptide
MLNLTYAYKINPTPDQVMLIEQTLNVCRKVWNYALRERKDWINSRKCKVDACSIQLEYIVPADTPYPNKGFQEKALTAAKKTNQELRSINAQVLQQVLRKLDTAFEDMKRKGNGFPRFKKFGRMRSFVYPQMLKSPLGKGWVKLPQLGKVEVIMHRPIPNGFELKQARVVKKASGYYVMLSLQLDVNVPDTPPSGHPLGIDVGLEKFLATSDGELIKRPKFFEALARKLKLLQRRLKYKKKGSKNKAKLAQKIARVHERIHDTRKDFHFKLAHHLCDQAGMIFAEQLNLKGMAKGMLGKHTLDAGWGQFWELLSWVCSKRGVYFAKVEAAGTSQTCPECDAHVSKNLSVRVHECPECGYKTNRDVAAAQVIRSRGVSAVGQTVDEIACGRDASGADSVSLGGTGRDRNFLEAILGSHVHTL

SEQ ID NO: 24243 - protein, 395 aa, unknown
  TnpB Polypeptide
MPAGGEGELTLTVRVRVSPEPEGEQEEALLGLMRRYRDALNYSVRAVIANRALSLGKAHKLLYKDLKERYGLPSRIAQDCYREAIAIAKSWLRNPRRGDMPTVKGLRMWLTHEYGYRVKGGYVELAGGYRLRVIGWDRRYDDFPNREARLVFREGEFALYIFKRVPRPARYAPKGVLAVDVNEGQIVVGNSSVEQRIETPVERALRYRRLAERLQEKYSSARYSAWLRRSGIRRRVRYFRRKAKNIMEDWARKTAHTIISLARQGQLAVAREDLTGLIESLRKLPKDHRTALIMLGYRRLAFWVDWQAEKSGVPLFVVDPAGTSTTCPRCGAELVEVGYRRLRCPRCGLEADRDSIAVLNIERRALSQMGGTLASPTAPQVTDVSPNRWGEPPHL

SEQ ID NO: 24244 - protein, 376 aa, Proteobacteria sp.
VIQRQGYHSRLKTTPALRRSLAQYAGACRFVWNKVLALNEGRYLAGVPRLNYYEAAWWLTQWRHSEEYGWLAAVSIHALQYCLRDVERAYQNLFAGRTAPPRFRKKFLSDSFRFPTDFQRDGDRLKLPKIGWMRFWKSREIAGAIKNITIRRDGDHWTVAFQAERAVEPPVHPSTSAIGIDLGIATFAAVSDGTLYPPWNAYRRLQTQLAKAQQRAATKVKFSKNWQKCQTVIRRIQATIARRRKDYLHKLSTSISTNHAVIVVEDLQIGNMSRSARGTAEEPGRNVAQKAGLNKAILDQGWGMFRSMLEYKQLWRGGVVLAVNPRYTSQTCPQCGCVSKLNRLQQALFSCIDCEYTSHADVHATQNILALGQRER

SEQ ID NO: 24245 - protein, 438 aa, Streptomyces sp.
MITDVKLVVHIELLPTPDQAAALKATLHACNEAARWVSSVAFKQRVFGKKPMQVAMYNEVKARFGLSAQPALHAIRKVADAYATLRANIRSGNLGKPGSKRRKQVEAKPVSFRPDAAQAFDDRCLSWQIERLTVSMWTTSGRMKGIAFTGSPEQLEFLAGFRRGESDLIHRDGMWFLAATCEVPDAPLNADPVDFLGVDLGIVNIATTSDGEIMAGRELNRSRARERGLRTKLQMKNTPSAKRRLKKRRRKEARRAKDINHKISKHVVAEAERTGRGIALEDLTGIRERVRLRKPQRATHSSWAFAQLGSFIAYKARRAGVPVVYVDPAYTSRTCAECGHIDKANRVSQAWFACRNCGFVDHADRWGHLPFERSREWGRLPQHPRTRVGVVATRGPVNGPRHSASAGGRTRATHHSQWCPQRKLGYVSNRAVDVARLL

SEQ ID NO: 24246 - protein, 433 aa, Streptomyces sp.
MARFRMYPTSEQEQQMLLHCAHARYVYNLAVEQHAHWKPGRGSAPSFAEQCRQLTEARRASEWLAAGNADVQQQALKDFATAKSARFTSGFGEPTWRKKFVHEGFRVIGTDRVPEHHDDGTPKLNARTGRQVMGRSVVVRKLNRRWAQVKVPGCGWVRFRLSTSGKGAQLPDAKTFRVTFRNGQWHAAFAVVPDPVPAPGTDTVIGIDRGITVTAALSDGRKLNCPQLTARERAQIRKHQRRAARAPKGSERKTAEYAKAAKLKARETNRRKDLCEKTSTLLARTGDLIRFEKPDIRNMTRSAKGTVEQPGRNVAQKAGLNRGILAQGWGLLRQRTGHKAPGRVEDVPAPYTSLRCSACGWIDKNSRKSQAEFVCSSCGFTCNADTNAAANVAAGQGGIPRPRRTAGAGGTTPPTRSKNVREPQPKPVEILLF

SEQ ID NO: 24247 - protein, 406 aa, Nocardiopsis sp.
VSHKQGLRFEPAPTGEQAVAMGRHCGLSRVVENFCLETVRKKYAQRKAEETYGITGEDLTKVPWSAPALEREWHAAHPKRYPWFSQDRLSSRIPKEACRVRAAGIRNYFESKNGKRKGARVGWPRWRRRKHGSRFRYDADRARPLDARTVRLPAIGEVAVREDMSWLVERMATGSARILGATIREQAGRWWVSFQIEVDRDDVDKRRRVEAGAPACGVDLGLKTFAVIKSSDGTTEEVRAPRPLKAAQRALKRAGRRLARSAEGSKNREKARERVGRLHLRVADRRRDFLHQTTTWPARTKSAVAVETLHVKGMARNRRLARAISDAGFAEFVRQLEYKSGWYGSRVWKADRWFPSSKTCGNCGRINRALALADRRWACPGCGTVHDRDRNAAGNLLARMLEESTA

SEQ ID NO: 24248 - protein, 410 aa, Kitasatospora sp.
VRAVSAVHVKRAFKFRFYPTEAQAAELSRTFGCVRLVWNRALAARTEAWAERRERIDYGATSAMLTSWKRTEELAFLSEVSSVPLQQVLRHLQGAFGNFFAKRAKYPRFKSRKRSRGSAEYTRSAFRYRDGQLTLAKMAEPLDVVWSRPLPEGVGPSTVTVSRDAAGRWFVSMLCEDPAVAPLPPVGTVVGVDLGVTSLVTLSTGERIPNPRHERRDRERLGRAQRELSRKAPGSANREKARRKVARIHARIADRRRDFLNKLTTRLVRDNQAVVIEDLAVRGLLGNRKLSRAVADCAWAEFRAMLAYKCAWYGRELITVDRWFPSSRLCSACGAVRDALPLTVREWECGCGAFHDRDVNAARNILAAGLAAAACGDGVGPQRSTPGGRSSVKQEVVPPPRSRAAARPRG

SEQ ID NO: 24249 - protein, 578 aa, unknown
  TnpB Polypeptide
MSKHCWALKDRFESQFSAAFYPIMLSDTKRAELIHRAEEIRAVRNDISEVFFSDMLGFQDMSKFEVFNFFNPTFNTRLSSHYLKKAIEDVWKAYQLRFDAIRKKIEFVKVDELVPSFYKINVKGHKKGDLKSIECHTKKTELTKVLTWLARYGKEESVYWLESAIPTAVESKQKFYRAILDKIRKFGFDRLMRLALSRRTTVFSEYEKRGKITFESLTFSGRSRIKRPIVDARRNETGKFDYFIEISWDWYNQGYRGNSKNTLCIPFKYNRAYHRALNRYCNGTDTSYTIVIRGNDIHFVLARDGYRYKNDEEITDENTIGIDVNSKHNMFALSTGEFIPHDEALIADLETELLKVDAKQKVYNARFKKDEGHDAFKISKKDMARVEAITTKLNESNKRTIANLCKRLAELGIRHIAMENLDGFQGSSLHADDSKGFNLGRLHLRTGLSSLKDEFIHIAPHYGLLVSLVQAEYTSKMCGHCGCIDDRNRQTQEEFCCIECGHTENADTHSAKNIKFRLTSTVLRGNLLERAGDSGYRYFQPKSLFRWQVRKCLEKCRCDGLFKQAIGNHERLTMSKFE

SEQ ID NO: 24250 - protein, 485 aa, Streptomyces sp.
VGGKFRPQSGFVVQAYKFALDPNVGQERALRSHCGASRAAYNWAVSWVTASWWQRRAEASYGIGADGLTPWRPWSLPSLRKEFNRIKNSDARFSGWWEENSKEAYSTGLANAAAAFDNYAKSKQGKRKGPRMGVPRRKQKRKARLSCRFTTGTIRAEPDGRHVTLPRLGAIRVHESTRKLLARIQAGRVRILSATVRHERGRWFVSLQVEAPREITRVVRPDVAVGIDLGVKHLAVLADSAGEIRYESNPKHLDGALKLLRFHSRRVSRRQGPDRRTGQKPSQRWEKANRERNRIHHRVANLRTDALHKLTTKIRAEYGTVVIEDLNVAGMLRNKRLARRVADAGFGEIRRQLTYKGQRNACRTIVADRWYPSSKTCSACGAVTAKLPLHVRVFACDACGLVMDRDGNAARNLAALAAACTTGTGVAGDQDTPRVSKPRGADRKTRRQRPDQNRGRGGRAGGATLPHQRQEEARDRRQAEALTLW

SEQ ID NO: 24251 - protein, 462 aa, unknown
  TnpB Polypeptide
LITIKLKYKTDEKSSIKLKEYRRQYSSVFKVYFNRLLEGMIPKEILHLKLNNVDLMNSSFKGSALQEARTLLKVWDSKKEQFKNYLIFGGRKAFLDRIKGNISKEELRERRLQKLCCVGQAATRGNIMFSIQEDFNILFKPSKNEHRILEILSPSKKRYARELKAIYIKSFLEKKYPITYHLDNDFVYLTFDEAILKDEKKELGYIPNRVMALDLNPNYIGWSIVDWKSSSEFKVVKSGIYNFKNLNDKEKELKDLKLNSSHPKRKYLNNKRRTEIFEVSKNLINKALYYKCQIFSIEDLNIHGSNKNLGKNFNKLVNNQWIRTDLVSNLEKRCNIFGIKFIRSKPEYSSFIGNFLYRSLNLPDMVLASIEIGRRAFEFYNQYIIKSKEIRKNIVRPSLVDFRTLYLKSLEEFELQPIYKDLIELYYFFKKSKLLYRLSLDKFCLEFSSCFSIKSQLSVYNS

SEQ ID NO: 24252 - protein, 462 aa, unknown
  TnpB Polypeptide
LITIKLKYKTDEESSAHIQEYRRQYSSVFKVYFNRLSEGIPSKEILHLKLNNVDLIGSAFKGSALQEARTLLKSWDSKKSKNKNHLIFGGRKSFLDRIKGNISREELQEKRLQKLCCVGQAEKRGNIMFSIQEDFNILFKPTRQEHIILEVLDSQKKRYSRELKAIYVKSFLEKKYPITYHLNSEFVYLTFDETILKNENKELESIPNRIMALDLNPNYIGWSIVDWKSSSEFKVVKSGIYNFKSLNNKEKEFKDLKLSSEHPKRKYLNNKRRTEVFEISKNLINKALYYKCQIFSIEDLNIQTKDSGLGKNFNKLVNNQWIRTDFISNLEKRCNIFGIKFLKVRPEYSSFIGNFLYRSLNLPDMVLSSIEIGRRAFEYYNQYITKKFEIRKNIVRPSLVDFRTLYLKSLEEFELQPVYKDLIELYYFFKKSKLWYRLSLDKFNLEFSSCFSIKSQLRYISL

SEQ ID NO: 24253 - protein, 420 aa, unknown
  TnpB Polypeptide
MILTQKNKLYLSDNDKLIIDKLSFHSARLYNSCLYIIKEYFEKNNCYLNYVKQYHEVKLNDNYNLLITDSAQQIHRIADRNFKSFFSLLKLKAKGKYSSPVKPPNYLDKNRGWSIFVAGRSARIKNGKVYVGLSKAFREQYNIDKKDIIFDLPPNLNIKKLQQLQIKPLYGGKEYEILFCYEKPNDIKELNNDKYIGIDCGLDNLLTTYDGKQSFIITGKPLKSFNQHYNKEKSRLQSEYERNKLKDKTTKKFIKLSEKRKNKINDYFNRTVITIVRYCLDNDIGNIVIGDFKEIKQEINTGKVNNQNFVSIPYGILKRKLEAKCVYHGINYILQEESYTSKCSSLDLEPIQKHDDYVGKRTKRGLFMSSNGSRINADVNGACNILRKYKSKSGGDLSPTDVSGVINHPARINPTKPVIR

SEQ ID NO: 24254 - protein, 449 aa, unknown
  TnpB Polypeptide
VRLPFRQCRGTKSERAGPGKVIGAFLTPIRSNGNEAHAILIHRGFKYKLDPTPEQETLFRQFAGVCRFVYNLALEQREKYRDTYAYAGIPLNFAQQSRELTMLRAEVDWIAAVPSVCEEQALRDLDRAFANFFAGRGGYPTPRKKGLHDTFRFKGREVAIRVINSKWAAVRLLKTGWVKFRMTRPIGGEIKNATVTLDALGWHIAFSCEAYRPDAECDGPSVGIDRGVATTLMLSTGEAFCVPASMNAIDRRYRSAQRVVARRKKGSNRRRKAILRCTRLSAKRARIRRDWHHKTSNSIASRFGVVVMEHLRVVNMTASAKGTVESPGLNVRQKAGLNRSILNQGWSSFATILGYKLEERGGHLVTVDPAYTSQTCSGCGTVDKASRKSQAVFHCQHCGFRGHADHNAAINILRRNTASMGVEEGHRLSVEALTRSDFSAAENQPAFAG

SEQ ID NO: 24255 - protein, 328 aa, unknown
  TnpB Polypeptide
MEKTFPWLKDCSAQVLQQSLKDLKSAYCNFFEKRSNFPRFKKKGEKNSIRFPQGYKLEQGNRRIYLPKIGWVRYRKSQQVVGEIKNVTVSQECGRFYVSIQTEFEYEVPKHQGKEIGIDMGIARFATLSNGEYFEPLNAFKTYKGKLAKLQRQLKNKVKFSKNWLKLKAKIAKLHHKIANCRKDFLHKISNEISKNHAMIYMEDLQVANMSKSAKGTIEQPGQNVAQKSGLNRSILDQGWGEFRRQLEYKSAWRGGFVIAVDPKNTSRTCPCCGHIDKENRPTQAEFKCVKCGYRNNSDVVGALNILARGRASSSHQNQAGTQPSCLS

SEQ ID NO: 24256 - protein, 352 aa, unknown
  TnpB Polypeptide
MKIIRSTKCSLKFTTARKQRQLDSVLKEYARVTNFFINYFWSNPTTKAQLLKSIVNLPTTWLTARLCKVAAREALDMISASKKRWGAKAVLPLHRGQRMCVSSTIAELQQSNTTNFDAWLHLNSLGRKIVLDLPIKFHRHFSILSAKSKRLNAYIITRNSVQFVFERETGPKKNTGNDIGIDTGINKLASTSTQHQYGEIRPVIESINRKVKGSKAQKKERRHLRHLIDETVKTIFQQEDPRLIVVENLKGINQSTKARLPKATRKLVSNWNQRYWLSRLQQKCEENRVYFRTVAAYNTSITCSKCGNVDRKQRVAEVFICSNCNHQGNADLNAATNILNRCLSGVYCPTFK

SEQ ID NO: 24257 - protein, 366 aa, Bacillus sp.
MMRTYKFRIEPTKDQRQKIDKTLLYCRRLYNACLEQRIIVYKMHKRNGISLSYYTQKKELPPLKTACPEYKTVHSQVLQNVVERLDKAFQSFFQRIIKGEKKPGFPRFKGSNRYHSFTYPQSGFSLNGNYMKLSKIGNIRIKLHRQVTGKIKTCTVVCKNGKYFVCLSCEEQPQECLEHTKMVGVDLGIKNLATTSDGHFFHSPKFLRKSESQLKRLQRIVSKRKKGSNRRKKAVTLLAKKHEYIANQRKNNSHQVSRQLVNQYDVIAFENLKIKNMLKNHHLAKSIGDAGWNQLINYTTYKAESAGKRVVLVDPKNTSQECSNCHEMVNKPLAVRVHDCPFCGLKCDRDVNASINILHRAIELLS

SEQ ID NO: 24258 - protein, 431 aa, unknown
  TnpB Polypeptide
MDKSWKLKIRNGIRLTREKRKVQICKVYELKVDESRLNKIQKETLKMLFIEAKWLYNYWLSTDKIFEQDCKNKEVIVLNKDKNKVKKQLKFLSCSYRQQILQHMKQSIYILAKQKKKGLKIGPLKFKKDFKCLELTKHALQKNGGTYLIVGKNRLKILGIKKSLIVNGLKNIPDGVEFANAKLIKKPSGYYIKVTTYSYPKIVDQKGEIENKEKKDVGIDFGIKNMITTSEGETFNCSIGETERLKRLQRKQSRQQKGSNNRRKTNVLLQKEYEKISNKKNDAANKIVHKLLTQYSRIYIQNDNFANWNKKLYNTGIQHSILGRIKAKLKESKQVGIIDQFIPTTKMCYKCGIINNEMTLNDRIFKCVNCDHEEDRDIKAAKTILMIGKINYTNVSVPTMNREFKPVEVSCILEKSSNQEDMKEISYYHRR

SEQ ID NO: 24259 - protein, 462 aa, unknown
  TnpB Polypeptide
MGQTARTTKLLLDLRARDQGGANSNKRRYLEETVTILDAARQFYLDFFLAHPEKLMERVEVVSKQTGEVREGLISSDKLLTWAEFQTVETREHPTPLASWNFSRQFPDFPNRYRRSVIKDVIGKARGYLTTLLKWQRSGKKQGKPGVPTASNHPTLYAGTFALELDALDLRKSFVRLKVYTGSEWVWVQYPTRYNRYFEQRRAEEGWEQESPKLVLGKQSAAIHFLQSKAIKARKIVESKRDPDLVTVAVDLNVKQLAVITVRQHGTIIQTRFVSDQGLDQARFRHLGRIAKKQWQSGQAVKGERSNQQLWRHIRRQNTDAAHKTARAIVEVCEQYPGCVLLFERLRTIKAAGGSKSRRRNRKQANQLKGKINQLAKEKAYAKGVVSVEVNPHGTSQYCSRCGAKGVRFTSQAGQRVTGKGGKLFFCPVCHYECHADFNASCNVHHSFFREFHWQPRTPKSG

SEQ ID NO: 24260 - protein, 385 aa, unknown
  TnpB Polypeptide
MITYKFRLYPKKAEQKKLEISLEVCRQTYNHLLSKLSEDYTKNEIQNYLLDLKVVFPEMNNVYSKVLQMENQRLFSNLSSLYKLKKKGRKVGRLRYKGKNWFKTFTYNQSGFSLEQKSKRGILYFSKIGNIPIKLHRKVEGKIKQITIKKALGKWYCSIVTDAVIKRNCGNGEIGIDVGIENYIYDSNGKSYDNPKHFDNYYQELKVAQQSLSRKKKGSNSRRKARVKVAKIHNKIANARDDFIHKLSTKLIQENKFIAIEKLNIKNLMSISYNAKNIADAGWGKLACYLHYKAENAGCVVQDVDSSYTTMDCSFCRATNSKLELSQRKFICKNCKQEIPRDYNSAINILFGGKELATMEKATNTEQFVQQVVSMKSEAPSVMVE

SEQ ID NO: 24261 - protein, 386 aa, unknown
  TnpB Polypeptide
MVIHKELGVMVMYKAYKFRMYPNDKQKELIHKTFGCTRFVYNYFLNECKTNGYQKAYDMCNKLKELSNEYPFLKEVDSCSLRCAIFNLEDSYKNFFEKRANYPKFKNRFNKQSYKTTCIRSSYKGKDYTNIELNLINRRIKIPKLGLVEIRGYRNLKEINGRIINATIEKELTNKYYVSVIVEEEETIKEKVTPTTIVGIDLGIKDLVVMSNGEKYSNPKEIIKREKQLKRYQRKLSRQIKGSNNYYKTKERIVRIHSKIKNSRKHNILEIVNKIVKEHDIIVSEKLKVKEMSSNHNLAKYILDASFNKICNLIKWKSKIHGKYYYQIDSYYPSSQTCNCCKSKTKETNNLSIRKWICKNCGNELDRDINASINIMLEGLKLHYQS

SEQ ID NO: 24262 - protein, 331 aa, Microcoleus sp.
LAVSACVRVGANRKTAKLKGKPVKTFKPTSADYDARIFAFREKDWTVSLTLMNGRYHIKMNVGQYQTGKLKGKKPTAAQLCKHRDGSYYIHIQVKDTPPEPIKSSQVIGVDLGRTDIAVTSEGEKWSGKHITAVRDRYSRTRASLQSKASKGTRSTRRRCRKILQRLSGNERRFQTHENHVISKTIIKQAGASNAILAIEDLTGIRDRTNQMPRSKTERFRSNSWAFYQLRQFLTYKGIGAGVEVIAINPRYTSQTCHKCLHIHPTRGESYRRGKSFKCGHCGWHGDADLNGAMMIKLLGSSVNRPEGSELFCSLRAVESPHHSCTQLGGR

SEQ ID NO: 24263 - protein, 681 aa, Micromonospora sp.
LVSGKLRLAEGEMARTACARALLRAGVDEESGEVLSAAVLAQRVGWCADLVAGMVAVLVGEHRNTADVQVLASGQDAGGRRLPSNAWMALRRLGWTATPPGGMRVNDRIVRMAQEQAGRALRSAAWRADVTTGVLSTWPADPRKRTPAEWEQVRKAIPGGEHLPSNVIKGRTRQVVTFVKVNGRLPVDVFELEGVPRIPRMLLLAACDRQQAIIERSDTDPAKALLRLQLPTRPDPQTYRDWTWVACPIRLPSTVPAAAVLHLPTLRIIDGTVRADMAYTHAVPKARATGHTVAVGVDWGLNTLLSAGALRLEEDGRITALGAGGQFRAAGVLAKQHRLRRHSERLHAKAEQYARLLGGRPDEQLRAKQEVLAGEIRHVSARRSNLNDALAWAVARWTVDQAIAARATAIYLEDLRSMETKGLGYSLNTRLTQQVRGKISDRMRHLAAEHGIAVVTVPARNTSKHCPQCLTPLQHRRAPDQPTVAGWKWAICPNQSCRWQGDRDHGAWRRIAARGLTHQTKTVTDKSTGAMVIRSVVDELEANAVVTPSSNTSRRDRSKTGPTRPHASRPAPRRRGAPSPTRPHSLAGKRPEGHAPTDRLRLPRAAHRHQGVNTISTPTTAGHRPRGAALGAGFHLHAHATPPRWETIPETPSDSGSLSRSVTLALDLLMTGSASKDGNCA

SEQ ID NO: 24264 - protein, 395 aa, unknown
  TnpB Polypeptide
MKRNYATLLRIYPNQEQSLLIDKTIGCCRFLYNQMLAERKNVWEEHKENKKEVYGWKYKTEKQYKEEFDFLKEVDSVALVQARRHLENAYNNFFKSLSGRRKGGQIGFPVFKKKKSGGSYTSLFYNGNIKIIDKNHIRLPKLGIFKFGQNKNIDLSNKICSITVSRKSTGKYYCSVLFEKDIKEVKKIKLSKDNKVIGLDMSLTNFFVDDEGNSPAYVKIYKKHEKRLKKLQHLESKKKKNSRRSRKLRKSINLIHEKISNERKDFSHKLSTKLVKENDIIVVESLNLKAISQGLKLGKSVMDLGYSQFINQLKYKCDWYGKHLIEADKWFASSKMCHKCGYKYNELALSDRKWVCPNCGTPIDRDKNAAINLKNLGIGYVRKCLQSQNISSAMK

SEQ ID NO: 24265 - protein, 392 aa, unknown
  TnpB Polypeptide
MIRAYKVRLYPTKEQMVLIEKTIGCCRKMYNEMLNERKQAYEQLKDNREKLYHYKYRTPAQIKQEFSYMNEVDSQAFNWVQMNIKTAYTNFFKSVSGVRKGGKIGFPTFHKKQNFGAYTTQVISIFDNKHLKIQKLGKVKYSDKRTIVGKIKHATISKTPDDKYYCSILVENNNELPEKVQLNNNSKVIGLDMSLSNFYVDSFGNSPEYIKRYKSKEKKLIRLQKIESRRQKHSNRRKKLRKSINLINNYIKNQRLDFTHKLSRKLVEENDVIVVESLSLKNMSGSLKLGKSISDLGYGMFITQLQYKCDWYGKHLVIADKWFASSKICHICGHKYKDLTLKDRKWVCPNCGAQIDRDENAAINLKNLGMGYIHECMSSQNISSAVKHIECN

SEQ ID NO: 24266 - protein, 207 aa, Enterococcus sp.
VAQIAIELPEKLNTATKIMGVDLGIKVPAVCCTEDNEVKFSGNGRMNKYMRRYHHSRRKELGKAKKINALKKSKDKEQRWMKDQDHKISREIVDFAINHHIGIIRLEKLANIRQQTRKSRKNNHSLSNWSFYRLASFIEYKANLVGIKVEYVHPAYTSQKCPNCGHHHHAKDRKYACSDCGYIGHRDIVGAKNIIDAPVLDGKSQVA

SEQ ID NO: 24267 - protein, 418 aa, Halobacteriales sp.
MANRTVTRTHVASIRNQRQVRDGLDSLGFAASKLWNITRWTVERIWSETGHIPGHAELSSYLKSHERYADLNAQSSQRVIQELAEAFKSWYGHRQNGDSEANPPAYRKRGDHHPRSTVTFKQDGFKHDPENGRVRLSKGRNLKESWSDFILCEYAADPDADIENVQQVRAVYDRGEWRLHFICRHEIDPEPPGDDVAGIDLGISNFAAVSFGDEGVLYPGGALKEDEYWFHKKRAECDDSSSVEANRLDRKRTERRSHFFHALSKDIVGRCAERGVGTIVVGDLSGIRDGEDWGDSGNLSLHGWAFDRFTQMLEYKAEERGIDVEQVDERGTSKSCSVCGTKDGSQRVERGLYICESCGTVANADISGAENIREKVLPSLACDGGDRDNGWMAQPAVCLFDKSTGRVRPQEQVVDCEP

SEQ ID NO: 24268 - protein, 421 aa, Halobacteriales sp.
MSNRVVTRTLKASVTNHSQVSDDLDSHGFAASKLWNVGRWTISRVWDAIGHIPDADELCSYLKSHDHYADLHSQSSQRVLQELGEAFVSWYNQDDPDANPPGYRKYGDDHPRSTVTWKNQGFKLDTRYNRVRLSKGTNTKESRYAADYILCEYTLRTDDDQTLADVESVQTVRAVWTGDKWELHFVCKMRVETPDAPGENTAGVDLGICNTVAISVGDETLLYPGNALKEDAHYFRHEEYDTEGENGPSNHAEWARQRKSRRQDHFLHALSTDIVQQCVERDVGTIGIGHPKHIREDEDWGRHGNKRLHDWAFETLLNHIEYKAEDRGIDVERVDEARLKTSKTCCECETEADSNRVERGLYVCDTCGLVANSDLNAAENMRATVTPNPTQDRSNGCLAQPSVRLFDKSTGRVRPQEQAVS

SEQ ID NO: 24269 - protein, 416 aa, Halobacteriales sp.
MEVRRTAVVKLDVSDGQRDALHRTAEQYLYCANRTADYCWSDTSYTECKTHQRQVRDALYSDLREETELQAQLVQAAIRRAVEAIRGVVERWKKGQRVSCPTFTAKTMDYDTRSATLYWNKVSLATVEGRVEPSFVLPADSPTPYEQYVLSEDCEFRESTLRYDATTDEFYLNISTRRIDGDGAEVPADTGHPDQTVLGIDLGVNSLAVASTGTFWQGDDYDHWCREFEKRRGEMQQCGTQAAHNALLRLGKREEAWRKQYIHTVANEIVTEAVGHDCDVIVFEDLTDIRERLPQAKWHHVWAFRRLYEYVSYKAPERGVSVKQVEPNHTSQRCSRTDCGFTHDDNRHGKQFECQKCGYEVNADYNAAKNIGLRYARKRIHRLRSSPKSGSGDAPVDVRVNGGTLNGESHRPVAGD

SEQ ID NO: 24270 - protein, 362 aa, Haloimpatiens sp.
VLFVKKSSLLNKGYKFRIYPNNEQIAKIEGNFGCARFVYNYYLSQRIGAYNSEGKTIGYLEQQNHLPLLKKHYPWLKVADSTSLQISIRNLDKAFQNFFNNKAFGFPNFKRKKSLRKCYTVNCVNSNIAVKNGKIKLPKLKWVEAKVHRKVEGRIISATVIKNSSGRYYVSIITEQKKREISFIEGENIVSLQMKDFINISNEESIYYFKYIKKISKLEIKLLRKEKESNNRKKLEKQIGKLYEKVQNKRDDFLHNLSKNIVDENQIIYIQEANVKGEKSSVKDYQNLKSFSWSKFCKFLEYKSSWYNRSLIYVENNDNYFNLNYGQKLLNTNIPINFGDKINVTLMKKILHPHSFKYTGIL

SEQ ID NO: 24271 - protein, 382 aa, Moorea sp.
VKTPTKIIRTDKWQLNPTPDQKVFFGETVKIYRRACRFLVGIIYTHWAELGSLTADRVAWPTANQLTPAVERLMHETAKRPNIKYPQFNKAFYKFPSYYRRAAIAFAAGQVSSFVTRYNEWQSGTRKRRDTKPPRLNADAGCYPALYKGQCYKLYGFDQVEIKVFNGSDWVWTNVQITGLRERHQVASNKMLSPSLIFNERVCHLSVPFSCKPEKRKPEANVTAVDLGINTTATIAVVTHSGTVIHREFIHPGRDIDRRDKRLKSVSMRASLTMGKGGKLHKGFCSKTYQKCRRINNQIGHVVSKGIVEIAKKFNSEAIVFENLKGWKAKGGHKRSNLRQRFHGWLKAKIRDFTEMKWAELGGKVVEVVAAYTSKLGFDGSG

SEQ ID NO: 24272 - protein, 448 aa, Moorea sp.
VKAPTKVIRTDIWKLNPNSEQRWLFGETVKVYRRACRYLVGIIFSHWSELGSLTADQLTPAVERLMHQTVKRPNIKYPQFNKTFYKFPSYYRRAAIAFAAGQVSSFVTRYNEWQSGARKRRNASPPRLNPDAGCYPALYKGQCYKLHGFEQVEIKVFNGSDWVWTTIQITGLRERHKAASNKMLSPSLIFNDLYCHLSVPFNCKPEKRKPEANVTAVDLGINTTATIAVVAHDGTVIHREFIHPGRDIDRRDKRLKSVSVRASKTMGFGGKIHRGFCSYTYQKCQRINNQIGQIVSKGIVQIALRFNSEAIVFENLKGWKPKGGRKRSNLRQRFHGWLKGKIRDFTEMKWTELGGKVVEVVAAYTSKLAYDGSGTVKRNSNNYALATFPSGKRFNADLNGAYNIGARGILKLARRNDSKDRSSKSSGRSPRSWACLCDLWTLGSYRLA

SEQ ID NO: 24273 - protein, 427 aa, Moorea sp.
MNKKQSYWGCQQVRLSPDKDLLAVIEYICRESNNIYNCSVYYARQIWFKARRIVNRSELCQEMKYNKHFSAMYVSASQQVCNGVAESFKSFQKLDKLYKAGKLNDKPKPPRYRKSGGMFTVSYPKRWLKLVNNKLRFPLGRQVKAWFGLSEFYVAFPSNLDWESIKEVRILPRNGHFYVEFVYKLKSKNLNIDSSKILGIDHGIDNWLTCVDTLGNGFIVDGKHIKSLNQWYNKRVSFFKEGHGKDYWTKQLANISEKRNRQMRDGVNKAARLVINHCLINGIGTIVFGWNKGQKNGLNIGKKNNQKFIQIPTDRLKNRIFQMCAIYGITFVETEESYSSKASSLDNDSLPIFGEKPVGWKPSGKRVKRGLYRTASNLYVNADCNGALNIIRKVAGTIGSDLIELSRGALTTPVRVRLWTLNESPSF

SEQ ID NO: 24274 - protein, 289 aa, Moorea sp.
MIILEFKVYGKKQQYLAIDEAIRTARFIRNSCLRYWMDNKGVNKYDLSKYSKVLAHQFPFANELNSTARQASSERAWSSISRFFDNCKKKVPGKKGFPKFLHRGRFGKADAARTVEYKQSGWKLSPDKKWIVFSDKKGIGKLKLKGTWDLWGFDKKQIKRVRIVRRADGYYVQFCIQADNNEQLKPADATIGLDVGLKDFYTDSRGNTEPNPRFYRTGEKRLKFYQRRVSRKKKGSANRKKAINRLGRQHLKISRRREEHAKRLARCVIRSNDLVAYVRAACRKARFEN

SEQ ID NO: 24275 - protein, 504 aa, Moorea sp.
VKTPTKIIRTDKWQLNPTPDQKVFFGETVKIYRRACRFLVGIIYTHWAELGSLTADRVAWPTANQLTPAVERLMHETAKRPNIKYPQFNKAFYKFPSYYRRAAIAFAAGQVSSFVTRYNEWQSGTRKRRDTKPPRLNADAGCYPALYKGQCYKLYGFDQVEIKVFNGSDWVWTNVQITGLRERHQVASNKMLSPSLIFNERVCHLSVPFSCKPEKRKPEANVTAVDLGINTTATIAVVTHSGTVIHREFIHPGRDIDRRDKRLKSVSMRASLTMGKGGKLHKGFCSKTYQKCRRINNQIGHVVSKGIVEIAKKFNSEAIVFENLKGWKAKGGHKRSNLRQRFHGWLKAKIRDFTEMKWAELGGKVVEVVAAYTSKLGFDGSGKVKRDSKNYALATFSSGKRFNADLNGAYNIGARGVFKLVRRNGNEGRPSKRSGRSPRSWACLCDLWALRSSRARIGHPHLGDNQVGEASFTQMTNESSRTPNIKTTPILTLPEGGDNPVILF

SEQ ID NO: 24276 - protein, 419 aa, Escherichia sp.
  misc_feature (266)..(299): Xaa can be any naturally occurring amino acid
  misc_feature (372)..(405): Xaa can be any naturally occurring amino acid
MHQENTMLPRRISVSLFIDQSIIWPVKRLQAFKFQLRPGGQQECEMRRFAGVCRFVFNRALALQNENHEAGNKYIPYGKMASWLVEWKNATETQWLKDSPSQPLQQSLKDLERAYKNFFRKRAAFPRFKKRGQNDAFRYPQGVKLDQENSRIFLPKLGWMRYRNSRQVTGVVKNVTVSQSCGKWYISIQTESEVSTPVHPSASMVGLDAGVAKLATLSDGTVFEPVNSFQKNQKTLARLQRQLSRKVKFSNNWQKQKRKIQRLHSXXXXXXXXXXXXXXXXXXXXXXXXXXXXXXXXXXVSKNHAMIVIEDLKVSNMSKSAAGTVSQPGRNVRAKSGLNRSILDQGWYEMRRQLEYKQLWRGGQVLAVPPAXXXXXXXXXXXXXXXXXXXXXXXXXXXXXXXXXXNSDARYVDIQRTPM

SEQ ID NO: 24277 - protein, 458 aa, unknown
  TnpB Polypeptide
MMNSVQMILSKQHFPEVFAFAEKNSALSRNLYNAALFRIRQTFTGWDKESRSENEQEVFTEIEKTVQVTDGKFKPKRILNYNALEKILRANENPDFFSGLPMQTAQAVVRAAASDFSNWLKVLKEYKKSPNKFTGHPKMPGYKKGTRVTFTVTNQDAVLYPSDTGEGCMLKLPGFSKGKRVPLKYLSSDANLRQVSFKPYYGTFVMTFAVEDMTPFFHPDLPNFAGIDLGTDNIAAVVCTDASSVVYKGGAVLSENQWFAKEKAKAVSIITKGHDYIHASSRHLNRLSMHHDCFLKDQMHKISCDIIRYCAEHRVGTIVIGMNKQWKQNVSIGKRNNQTFFTIPHAGLRDMILYKALSAGITVIEQEESYTSKADVTANDLIPVYGEEKGNPHFSGNRIKRGLYRCHNGLLINADCNGAANILRKAFPDIWKYIKDFRFLAVPESRGFRKLNPKYRIA

SEQ ID NO: 24278 - protein, 412 aa, unknown
  TnpB Polypeptide
MRSQKIRLKPTKEQESLMWWYSKVSRNYWNLLVDIDKRNNKGEFDEILSEHGNKMYHSKFHDREVYNLSLSDYHNLAKIVAVENYDKDSESWSWYYQPNQSFIYAFLSRELVKIRRQNKGKLNFRSISNTPPSFNVRCDISANKKRPSRIYLKDNGKLQIPTIGDVDYGSVRADFDLSGKKQVANISFDGKYWYLSYTEDVETQLEELPDATDGVGIDLGIKTLVTVSDRTTVPNIKTFRRVRILTKRLKRLQRKLSRKYRINKCNKHHKTKNIIKLEQQIKLIYRSIKNIRINHIRKFVSELVKKQPRYIAIEDLNVKGMMKNRHLAKDVSNCSFYTIKEHLIRKARERSVEVRLVDRFYPSSKICSNCSSYKQDLKLSQRVYHCCNCGMKIDRDFNASINIANTNEYVLV

SEQ ID NO: 24279 - protein, 385 aa, Meiothermus sp.
MIKAFKYRLYPTKPQLRDLDKTLMLCRHLYNAALQERREAYKKAGVSVTYYQQKRSLPEVRTELPEYKGIHSQVLQNVIERVDKAFQGFFRRVKHGENPGYPRFKGQGRYDSFTFPQAGTTGVKLQEGGKRVLLFGIGSVKMKLHCPLEGRLKTATLKREGEAWYIVFVCEVKPNPLPLNDEKIGIDLGTHPHFLVTSKGELVEAPRYFQKAEDKLARAQRSLSRKKRGSNRHKEARKRVAALHRKIANQRKDFHHKLARRLVNRYGTIVHEDLNIKALARSRSAKGVQDAGWAQFLHILAYKAAEAGRRVIAVDPKYTSQACPVCGHREKKPLWVRAFTCPACGASLHRDVAAAINVLARSGRVPDRRWARTEPSGMGTAWAVP

SEQ ID NO: 24280 - protein, 402 aa, Escherichia sp.
VKRLQAFKFQLRPGGQQECEMRRFAGACRFVFNRALARQNENHEAGNKYIPYGKMASWLVEWKNATETQWLKDSPSQPLQQSLKDLERAYKNFFRKRAAFPRFKKRGQNDAFRYPQGVKLDQENSRIFLPKLGWMRYRNSRQVTGVVKNVTVSQSCGKWYISIQTESEVSTPVHPSASMIGLDAGVAKLATLSDGTVFEPVNSFQKNQKKLARLQRQLSRKVKFSNNWQKQKRKIQRLHFRIANIRRDYLHKVTTIISKNHAMIVIEDLKVKYMSKSAAGTISHPGRNVRAKSGLNRSILDQGWYEMRRQLEYKQLWSGGQVLAVPPAYTSQRCACCGHTAKENRLSQSQFRCQVCGYTANADVNGARNILAAGHAVLACGGMVQSGRPLKQEPTEMIQATA

SEQ ID NO: 24281 - protein, 397 aa, Moorea sp.
MFVLEFKVKCEKEQYQAIDEAIRTAQFIQNKCLRYWMDNTGVGKYDLSKYCKTLAHDFKFADELNSMARQASAERSWSAISRFFDNCKKKIPGKKGYPKFKKFARSVEYKTSGWKLLNPKKIKFTDKKNIGELKLIGTWDLSFYQKKDIKRVRLIRRADGYYCQFIISIDVKVETEPTGKAIGLDVGLSSFYTDNNGNKIDNPRFLRKSLKKLKRLQRRLSKKKKGSANRKKARQRLAKTHLKVSRQRKDFAVKLARCVIHSNDVVAYEDLRIKNLVKNHCLAKSINDVAWYQFREWLEYFGEKFGKITIAVPPQYTSQNCSNCGETVKKSLSTRTHKCRCGCELDRDENAAINILKIGLSTVGHTGSKAWGEDTSTLIEAILSRQVTLVNQESPHF

SEQ ID NO: 24282 - protein, 404 aa, unknown
  TnpB Polypeptide
MRLNIQVRLYPNRTMQAVLDSLCDYRRYCWNQGLELWNTMYEARLIGLPVELRAKIKASLTDKTITFSEEEQALRVRFPSPSHNVVRDGLVAQKANWQFEFSARVLQQAIKDLARAWNLFFKNPKTAGKPGFKSRKKPKQGFKTDRARIIDGRLVLDKPHAYKGEWSGIRFRGAFIPDGKLKFCAVTRTKGKYIATITMDVETVALPKTGKKTAVDANVDHFDTTEGQTSVNPRMLDPLYAKVRTYQRQLARKRKVNKNYRHSKSYQATRAKLQATYERIRNIQNDLLHKFTTVLYCEFDTIVIEDLDVKGMQMKKKAKNLPVLFSVDSANLWNTRLKSSVKCSLLQTVSTHLLNVVPTVDISKPVMRKSLLVETPNMEPNIMNMFVMNAVMRTTATTMQFSTY

SEQ ID NO: 24283 - protein, 369 aa, unknown
  TnpB Polypeptide
VYRFRIYPNKSQKELFARTFGCVRFVYNRMLAEKIEYYEKTGKVLKVTPAKYKAEFPWLKEVDSLALCNAQLHLQTAYKNFFRDSSVGFPKFKSKKNPVRSYTTNCVNGNITLQSGKLKLPKAGWIRIKQHRSIDDRYILKGATVSQEADDKYYVSLLYAAEEPGHEIRPVKTAIGLDFSMNELYVDSTGTHADYPHFFRKYQEKLAREQRRLSHCKKGSSRYMKQKKKIARLHAHIARQRKDYLHKESRKITNFYDLVCIESLNMKEMSQDSRFGKSVHDNGWGMFTDFLSYKLERAGKKLVRIDKWYPSSKICSCCGKLKKELKLEDRMYSCTCGNQMNRDENAAINICREGLRILGVELDAERKIS

SEQ ID NO: 24284 - protein, 496 aa, unknown
  TnpB Polypeptide
MFEAPGDQETALGRTSVEPILLCCYRKRPDTGPGHTIYQQPEDKINQERRRGMKIISTYGVKIKTYNQIFKKTVKVYRHAADFLIGVCLNEWEQILPLKGKRRLTYVESLVHVTAAHPDVKYDFDQKFYKLPSYIRRAAINEALGKVSSYKSNLSNWEAEDPKVRGHKPSFPRAGYIYPCMYRGNMYQQTGTYEAKIKVYIRNTWDWLHIKFRKSDMDYINRRCANRKMCTPTLQKRGHEWHLDFPFMEEVELCNTDIWNQTIVAVDLGINTAATVSVMRADGTILGRHFCKLSEETDHLTHSINRIKKAQQYGNRKMPRLWAKVKGINHDISVKTAKFIIDTAVLYNADTIVFEHLDRNGKVRGSKKQRLKLWRSQEVQAIVTNKAHHLGMHIRRICAWGTSRLAYDGSGTVLRGQKAGFNTYELCRFPNGKIYNCDLSASYNIGARYFIREILKSLDANSRLLMEAKVPPCSKRSTCTFATFISLNAELMSLAA

SEQ ID NO: 24285 - protein, 240 aa, Methylococcus sp.
MREAVRFSGTIQSTTVSLMADGGYISVLVETQDVLQAKTNHGVVGIDLGLKTFATLSTGEFIKGPKAHRALGKRLRRLNQSLAKKTKGSANFRKAKTKRSKRHKRIPDIRQDAVHKLSHRLSTEFSVIGIEDLNVKGMSRNGKLGRSVGDAGMRMFRTQVEYKAAMTGSFIYVHPRFAPSTKVCSGCGQWQDMPLGKDTLSCDCGWVIDRDLNASIILKTAASSAVGASGENGSGAALAA

SEQ ID NO: 24286 - protein, 333 aa, Exiguobacterium sp.
MLKGYKYRLHPTAEQADFLVRTIGCARLVQAPVPVPRRGGQPRARQREASPRRGVREVLRRDGAGFPVFKSRRKARASYTTNNQHGTIRIEGDRVRLPKVGFIRFTQHRIFDGEIRSATVSMTKTGKFFVSLLVEQADEPWVPAEHKIGIDLGLGDFAVMTNDALVTEKIPNPRNLREAEERLRRAQRSLSRKKPGSRNREKARLLLAKKHEKVRNRRHDFLHKLSRRIVDENQVVVVETLKPREMMQDRRLAKSIGDAGWGEFVRQLAYKCRFHGRTLIQADPWFASTQVCSACGENGGKKDLHVREWTCAVCGTHHDRDVNASLNLLGLAD

SEQ ID NO: 24287 - protein, 397 aa, unknown
  TnpB Polypeptide
VPCLNALVLVALSTIKPWHGKKNSIRQITLLSLAIHKFSYTKIANLLPQWKSELDWLKDAPSQTLQQSLKQLESSFRNFFAKRADFPKFKKRGVSDSFRFPQGFKLEHYNSRIFLPKLGWLRYRNSNQVLGTVKNITISKKCGKWYAAIQTEREVETPVHSSTGIIGVDLGIARFATLSNGQVFEAVNSFQKKQIKLVRCQRALARKIKFSHNWNKQKGKIAQLHSTIANIRKDYLHKTTTTISQNHAMIVIEALQVRNMSKSAKGTIEAKGRNVKAKSGLNRSIVDQGWSEFRRQLEYKQKWLGGEVLAIAPHYTSQCCSCCGHIANDNRKSQDKFACVSCGYETNADLNAAKNILAAGHAVLACGEMVQQDRSVKHEPTEGIHKSSRESVGIPTL

SEQ ID NO: 24288 - protein, 434 aa, Thermococcus sp.
MKRTVTVKLQPSKEQEKILFELAHASAVIWNKLNYQRLRQFKEFGRIDFNGTEKEAYHEFKNWVGGSTVQQLARKNAESWRSFFQLNKKKKSGELPEWFRPKPPGFIGEENGKKLFIIPLRNDQYKIDGNVIGLRRLGKFGRLRIQFKGKIHLKGKQGRLEITYDEVKRKWYAHISLTVEEKLLNGEWVEVPRQPLGNVSAGIDLGVNNLMAVYVESGESFLVNGRPLKSIAFYWRKRIAEYQSKLNNSGCKKSRKLKRMHEKAKLQAKHYINTAVRQTVEKLYRLGVSKIVVGYPKGIARNSYRSRKQNFILSHVWRFNTVIQRLKEVAEEYGISVVVVNEAFTSQSCPLCGQRHPDGRIFRGLFKCRGEGVVMNADLVGAFNILKKVVETITPSLSALAGGRGNWPKTGPEGFFEPPSKGVMRTPQTSPPLS

SEQ ID NO: 24289 - protein, 424 aa, Nocardiopsis sp.
MRTAYKCRTYPDPEQAAQLGRTFGCVRLVWNKTLADRHTAYHQHGEKTSYKQTDQALTGWKRTQEMAFLSEVSSVPLQQTLRHQHSAFASFFAQRAKYPRFKSRNGRQSAHYTRSAFRIKGGQLFLAKHKRPLKVAWSWDDVDLAALEVTTVIVSREADGRWYVTFAVDTDDPDPAPDTGGEVGVDLGVKDFATLSTGEKIANPRHLERKARNLKRYQRRMARKVKGSNNRRKAKRRVAAAYRKVRHARADFLHKTTTRLVREHDLIAIEDLNVRGMTASARGTAEQPGKQVRQKAGLNRSVLDAGLGEFRRQLEYKAERFGRTLVVVDRWFPSSKTCSACGYLLDRLSLGTRVWACPSCRARHDRDLNAAKNTLAAGRVAAREVVSGDACGAGVSRQGSSLPLSAAKQETGPVRVAARAAPDR

SEQ ID NO: 24290 - protein, 436 aa, Thermococcus sp.
MKRSVTVKLQPSKAQEQILFQLADLGTKAWNEVNYHRRQLFFQKKPVDFNSTEKTVYEKYKREIGSATVQQIARKNAEAWRSFFSLAKKRKSKELPTWLKPRPPNYLKEGGKRKPLIVLRNDQYRIEGNKLILKGLGEFKRVEIQFKGRIHLKGKQGRLEITYDPVKRKWYAHISFTVNQKLSKDGWIDVPRTPKGNLSAGIDLGVNNLMAVYVENGESFLVNGRPLKSIAFYWQRKIADYQSKINNSGQKTSRKFRRMHQKAKLQARYFINTAVRQTVEKLYRLGVSKIVVGYPKGISRNSEKGRKRNFLLSHVWRFNTMIKRLKEVAEEYGIKVEVVDEAFTSQTCPVCGKPHEGARFVRGLFECPTTGLVFNADLVGAFNILKKVVKTITPNLGGLRAQGRGNGGKALPEGLKSPPLLGFNEAPQTSPALARG

SEQ ID NO: 24291 - protein, 436 aa, Thermococcus sp.
MKRSVTVKLQPSKEQEKALFELAYATAVIWNKLNYERLKQFKEFGKIDFLGTQQEAYYQFKDWIGGSTVQTLARKNAEAWRSFFSINRKKKSGELPEWFKPKPPKFIREENSRKLFIIPLRNDQYRIDCNVIELRRLGKFGRLRIQFKGRIHLRGKQGRLEIAYNPVKRKWYAHISFTVEERLWEERWVKVPREPLGTLSAGIDLGVNNLMAVYVENGESFLVNGRPLKSIAFYWRKKIAEYQSKLNKSGAKKSRKLRKMHERAKLQARHYINTAVRQTVERLYHLGVSRIVVGYPKGISRDSDKGRKQNYLLSHVWRFNYVIKRLKEVAEEYGISIVVVDEAFTSQSCPFCGQRHPNGRIFRGLFKCRREGVVMNADLVGAFNILKRVVRTITPSLSALSGGRGNGGKALPEGLKSPPLLGFNEAPQTSLPLARG

SEQ ID NO: 24292 - protein, 308 aa, Thermococcus sp.
MVSLSSRANGKPVFKKEVIMLDDHLFKLDLENRIIKLSTPNRRTVLEFYPAKHHEKFRDWRVGQAWLVRTPKGVFINVVFSKEVEIREPEAFVGVDLNENNVTLSLPNGEFVQIITHEREIRAGYFLKRRKIQKKIRAGKRRRELLEKYGERERNRLNDLYHKLTNKIVELAEKYGGIALEDLTEIRDSIRYSAEVNGRLHRWSFRKLQSIIEYKAKLKGIRVVFVNPAYTSSLCPVCGGKLSPNGDRVLKCSNCGFEADRDVIGSWNVRLRALKMWGVSVLPESQPMKTGGWKVSRNDIYELYANYG

SEQ ID NO: 24293 - protein, 395 aa, unknown
  TnpB Polypeptide
MLKGIKIRLYLNGEQESVINRLLGSYRFVYNQCLSHKINAYESEKKSVSLSGLGKFFHGNLRNEFDWLQEHNTKVLKQSIINLETAYKNFFKKGRGFPKFKSKHDVQKVRFPQEAVAAKTFDEDSSKLNLTKTIRGLKFRCGDRDRKYLYKNKSGIKSITIIKNKAGQYYATILIDGDLLRIMDKPKKDVVGIDLGIKTLLTLSDGQIFENNNYIKRSEKKLKKLQKQLSKKQKGSNNRAKAKQKLAKAHEKIKNQKLDYLHNITTKIVSENQVIVLEDLNVSGMMKNHNLAKSIQELGLYEMRRQFEYKAKWYGRELVFVSRWFPSSKTCSCCGWKNNNLKLNDREFICENCGLVIDRDENAAINIENEGKNIDRATFVRINACGLPNYGRPNQ

SEQ ID NO: 24294 - protein, 383 aa, Rubrobacter sp.
MRKAYKYRLYPNRSQAQALDAVLEQHRRLYNLALRERRDVYEAEERSFSYGEQSGRFKETRRVLPSFATLNFSSAQATLRRLDKAFKAFFRRVKSGDVPGYPRYKPEDRFRTVEYPSYGDGCRLKDNGRLYLQNIGHIKVKLHRPIEGTIKTISVKRACGKWYVVFSCDLGDAPEPATDGAAVGIDLGLKNFLVTSDGESVEPPRYYRESQRKLRVAQRSVSRKKKGSNRRRKARQKVAHLHEKTANQRRDFHHKQARKLVDGRGLIAHEALNVKGIARTRLARSTHDAGWASFLNILSYKAEEAGTKVIAVDPGNTTQVCSACGALPETKKKLSDRVHSCGCGYTADRDLNAALNIKALGLSVRDGTQWVATNVSREAVCFS

SEQ ID NO: 24295 - protein, 353 aa, Burkholderia sp.
MAGMILVYRYRVKSLNGLLNKQSRAVNYAWNFCNDTQKHALKWRKKWPTGFDLNVLTTGSSKELGIHSGTVNATCEQYAKSRSQHRRPYLRYRGKKSLGWVPLKGRDLKREGDAFRFAGNTFRVFNSRALPEGKIKDGTNFAQDARGNWFLNIVVDMPDVQARPIRSGVGIDLGLKDFVTLSTGEKLPNDRFGRRAAEKLAKAQRARKHKRHIAKLHAKVANARADFQNKLALDLVRRFDYIAVGNVSAAKLARTRMANSVYDASWSSFRNKLRYKAIAHGATFEEVDESGSTQSCSACGSKDSTTRPKGIAGLRIREWACSDCGVLHDRDTNAALNILRCGRASPGVGIFRR

SEQ ID NO: 24296 - protein, 528 aa, Streptomyces sp.
  misc_feature (379)..(420): Xaa can be any naturally occurring amino acid
MSRFRMFPSREQEEQLFLHCAHARYVWNLAVEQHAHWRRWRKSAPGFAEQCRQLTEARRDSEWLGAGNADVQQQALKDFAKAKNARFTSGFGEPAWRKKFRHEGFRVIGTDRTPEYNEDGTPKLNAKTGKQVMGRSVVVQKLNKRWAQVKVPGCGWVRFRLTRPELPAAKTFRVTFRNGQWHAAFAVIPHPIDAPATGEVIGIDRGVTITAALSDGRTLNCPQLTAKERAQIRKHQRRAARAPKGSDRKTAEYAKAARLKAREADRRKDWCEKTSTMLARTYGLVRFEKLNIKNMTARAKARPDPDQPGQYLKNGRAAKAGLNRAILAQGWGLLRQRTGHKAPGRVEDVPAPYTSLRCSACGWIDKNSRKSQAEFVCSXXXXXXXXXXXXXXXXXXXXXXXXXXXXXXXXXXXXXXXXXXTSVNLSPNGLESPSFKRGRMSTWSYAGRAAPCGRPTPRGCLPCGPRTPGPTSPSSRTRATTYTWTSRNGCMRQWPDSSTPFLRAIVEPPGNVTHVTSGTWGKWFATPP

SEQ ID NO: 24297 - protein, 378 aa, unknown
  TnpB Polypeptide
MKKAHNNTHKGRMKRTSRIYLKNPNKGKEEKLKHFFILITTMVNYFIEMFWSDQTFDKELATKEITDRAVKKYQITARLSQALAKQAKEIVRSQHKKPKTQQTMPTFRNISLNLDSRFWTLEKFNGSFDWALKLTSGFPKLIIPFNNTKHSLKFINDGWVFSKSIRMGMNKKGIWIDLIFEKEKLPLKENGNILGLDLGFRNLFATSDKELIGTELKAQIVKSGKRRKSFHYFIDTEINRIIKTMDFSNVKTLVLEELKNVKRGNRCFKYHKSFHIHTTRKKFSRRVNRLLSFWHYARATERLQMICEEQGIGLVFKDPYKTSQRCPSCGKIDRKNRNGEIFKCINCEYKEHADIVGALNLKSLQLAGVYSLRSLQSQ

SEQ ID NO: 24298 - protein, 432 aa, Okeania sp.
LYGCQQNLIKESPDVMAILEYICCEANKLTNCGIYYCRQMLFKAGIFVTKAALDRQLKSNIHFKAMRSACAQQTLHSVIESFNSYGKLLKLYKEEKLHFRPQPPSYRKKGGMAVVSYPARWVKLIGNDLKFSLGNQLKAWFGIDHFLLPMPSNLDFSSIKEYRIFPRNGCFYIEFVYKQPQIEPVKANSNVLGIDPGLNNWITGVSNTGKSFIIDGKKVKSQNQWYNKQVAKIKTEKPQGYWDEELAKITEKRNRQMRDNINKATRFIINWCLANNIANIVFGWNPFNKDGINIGHKNNQEFVQIPTAKLKERVSQLCQQYGINFIETEESYTSQASFLDDDFLPQYGEKPERWKASGKRVQRGLYCSSNGSLINADCNGSANIIRKVSAQLNFDLTKACRAVLTLPKRYFWDSLSKQYRKDCEAARFQPAA

SEQ ID NO: 24299 - protein, 410 aa, unknown
  TnpB Polypeptide
MRLVYKFNIGKNEEISKLCKVSNNLYNQALYVFRETLKNESKWLSYFELDKILKDTRNLDGEINYRLLKAQCSQQVLKLLDKNIKSYYESVRDYKKHPNKYKEKPGLPKYRKRGSEFNMYYTNQNCRIRNGKIILSKELSIDIPQYEKYSYLLENFKQIRILPNHIGYRIEVIYEVEDVEIPKRKEEKIASIDLGIDNLATIVSEDFTIIFSGKFVKSHNQSFNKTLAKLNSIKDLQKMKGTTKRIKKLYYDREQYIEDVFHKISRKVVDLLLDSKITKLVVGYNKGWKQNVNMGKRNNQKFTQIPFARLVSYLEYKCELAGIEIVIHEESYTSKCDFLAFEKIGKHENYLGKRKNRGLFQSSVGKLINADVNGALNIMRKVVGDSCESIRRIIDRGLLFNPVRITNVFC

SEQ ID NO: 24300 - protein, 445 aa, unknown
  TnpB Polypeptide
LGRVGGKLFIVSATTLYRVLRVDRVVVKALKLNLLPLSKMKEHLLAELFNSVLRCCNDVLAIAKSKSPKNFAILHNTSYPIIKQKYDLHSQILVDCIHQAWENRKTNPDKFKQIPVRFNVPRSGKFGETKRGNPVVIIASFNGNGRIALPIKQDGAYKRFVKHIKNGWKCTQFRLHKQNDNYVVIANLRKKFRVKQKYKTVVGVDVNSGSFAVTVLRGDRRVLKQLYLGQDIWHKQWKFMKRRSKLQSYADKGSKRARRALKRMKHDERNFVNTRIWQVSHEIVEIALRYDAVIAIERLKNLRKRNGKGRKPKTANRKIHRIPFAKFRMTIRSVAWQNGIEVIEVRATKTSQRCPKCGYTSKKNWVFFNGKRKLFKCRKCGYEANVDRTASRNIATLALERGLTSFETTLSTQPQSSRAGGDVSPRVRLDDGRWYPQPSESKLPS

SEQ ID NO: 24301 - protein, 305 aa, Pseudomonas sp.
LRPSSTVPAPPAECVQEFFEGRARYPTFKKKRYHQSAEFTASAFKYWDGQLFLAKSTEPLNVRWSRDLPFAPSTVTISKDAAGRYFVSCLCEFEPQALPVTPKMVGIDMGLKDLFATSDGVRTLNARHTAKYASRLALAQRRLSRKKLGSANRAKARQKIARIHAKISDCRLDGLHKLSRRLINENQVVCVENLAVKNMIRNPWLSRAIADAGWGELVRQLEYKGAWAGRQVVAIDRWFPSSKRCSGCGFVMDSMPLNIRLWTCPECKAEHDRDVNAALNIKAAGLAVLALGANVSGIGQVPVSC

SEQ ID NO: 24302 - protein, 413 aa, unknown
  TnpB Polypeptide
MHTLRLKLEMDKNTAYIMEKRFRILAHISNQIRKHVKKLLSRLENDKQYQQALDEYIRLKKSESDDKQVVADMKRLSKFMNETRESIGLTKNGLEKYASVMQRRYKKNISSHQVQAEVAHIMKGVDAVLFGNGKDVHYKKESDFHTIPGKSLSGIAIRFDQNNEKRQIDCYIKWNGLKIPVKYDISKPDMPGEKNYINESLSIGVIKYCEIERLWFKSGWHYYVKLYITENAPKKIAPGKSTMGIDEGPSTIAAVSESSVFLEELSPKCKDYNKQIASLQRKIDKSTRVTNSDRFNEDGTAKKKTKSLPPWKFSKTCQRNKAKVRELYRRKTEYTKCQHETLLNSMIKDSSIFINEPMDFKALAKKARETKRRDKASVIKNADGTEKTVYKYKRKKRFGKSITDRSPSSSLQD

SEQ ID NO: 24303 - protein, 246 aa, unknown
  TnpB Polypeptide
VIDFYKNDVEKSFASLSDMRNKKRKISHYLRRHGNLPEDVRRSLIQKMDRLDHMIQKAEVPHRKNRRYYGMLKHEIKTSIDSYIKSIDHETLTVLEKLDIKEFNSSRKANGKRSMFARGQLQKKLMEALNWKGYDFKEIEPDYTSQCCPVCSYTDKANRSNKSFKCQCCGYEADADYVGALNIKTRAKDKEILDVCEKYKYNHDEMQKHIKWYIMHVIKSIKQQQGKLCSRARAPALATLHSGTCS

SEQ ID NO: 24304 - protein, 693 aa, unknown
  TnpB Polypeptide
VAAANGQRRARGPNQGTPWKRTAEGGLSLLRLPLDVHDPVQRRRIGSMFSAGFSVYRAVQRDARDRTRAYWAAPRERALQPAAVRERLELSRTGLEHAAYAHVDAAPHLRRSLTKALAMHLADSVWSATERHLFRDATGERHGMPRPGGYLDFARLPGRAKSHTHERKWETFRLHGTLAGHRAAYSRPEGTDDGTFVQPHRLRPVHEPADGWWRYTGPLAVIFTGLPIGTLVLPVRLPTAPCNQPILDHHLADPSRWHKIDLVRYRDPTVEGRWRYEAHLLVLTTPYVARETEARRREAAAATAQRRAGIDVNVSNLTVASHVDGADLRITRVRHDDSAKQAMVTRKRRQRRRSRRLDRSRRATNPAQYELSARQIAHNERRAASGLPPVQMIPRGPRKCRAGGAPQVAHRRDALSNTYRRERAAEASDARAESQARRDLARQIAARFVSDHGCSFVIEDCDLRAWAPRWGARMAAFTPGLLVRALEREASLVAQIAQRSTAVERVSTRSTALSQHCLCGQRARKTLAERTHACGRCGLRGDRDAVSATLAACVEQDTAQTPTAALDKRLAAELLNAPGTRQALYATLPYALCGRQDVRSESTVHSARDGWFVAEKGPTRDLVVVARRIVGRASYPTLDEHGGLGRRTTPDRAGTRTNLTRTWALTQLRASLRRSASRGRRRSRGFLARTRRG

SEQ ID NO: 24305 - protein, 372 aa, unknown
  TnpB Polypeptide
MRQVVKVRLDPNQQQKQLLEQSFGNCRWLWNQGLNLMNQTDKETGKGLSSYDIKKKIPRLKQEYDWLTLTYSQCLQPVCLNLGTALNNFFEKRARSPRFKSKRGKQSIQYPQNVKVLENALKLPKIGEVKAVLHRPIEGKVKTVTVSKNRCDQYFASILLENGKTNPDASADGKALGVDLGLNHFAVTSDGSKFENPRWMAKHEQNLKRKQQQLSRKQKGSQNRDKARKKLAKVHNKVARCREDFLHKLSRRIVDENQVICVENLNWGMFLTMLKYKAEQDGKIYIEVDRFFPSSKTCNVCLHQINRLPLDVRYWTCSHCRTHHDRDINAAINLREEGLRLLTCGTRGKAYCPDVRPNPRGRKTSTVGQSVG

SEQ ID NO: 24306 - protein, 387 aa, unknown
  TnpB Polypeptide
MSRCLKLKGFGCNISVNRNCLKIRLYPDRAQARELKTTLETCRLVYNSLINDRKFQYDTAKVSVGYFTQKAYLPAWKKDHPELKEVYSQVLQDVAHRVHLAFDAFFDRVKNGDTPGFPRVKGARQYDSITYTQGKNFKIGDSTIEFPKLGKIKAKLHRKPWGEVKNCTIRRINGKWFASLCQEVEADHLPFSDEAIGIDVGLKTFAAFSNGEFIDNPRFFRKEEKSLAKAQRKLSKQKRGSRERKKARKVVARIHERIRNRRHDFCHQNARRIVDRFGIIAVEKLSVKNMLGNHCLAKSIADASWSMFRSILTSKAENAGREIIAVDPRYTSQDCSGCGYRPDGLEGRTKKRLSDRWHLCPMCGLSVDRDTNAAVNILAVGQHSPAT

SEQ ID NO: 24307 - protein, 456 aa, unknown
  TnpB Polypeptide
LRDKKRKKKESKGVLMQIISSYGVEIKKQNIPLRHTLDIFRQAVSYLIRVYAETWEELSGIGNAQKRFNEAEHLVHETKKNHARFDFDCRFPKMPSYLRRAVIQHALGSVSSYQTRLALWEGRELSGKPKLTCENHAMPVFYRDVMYKEAETGEDTAHLKLFDGCDWKWFPVKLLHTDMEYLRKKWSGKKASAPTLEKKHHKYFLRFSYTEEISLSKTPVKEQVICSVDLGINTDAVCSIMRADGTILRRKFINFPSDKDHLYHVLGRISRFQREHGSRQVQSWWAYAKRLNVELSRKTAAAITEYARENKADVIVFEYLEMQGKISGKKKQKLHLWRKRDIQKICEHQAHRCGIRISRVSARNTSRFAYDGSGRVIRSAEDHSLCTFTTGKAYNCDLSASYNIGARYFIRELLKPLPETERSSLEAKVPSVKRRTSCVYADLRNLYLEMDILKAA

SEQ ID NO: 24308 - protein, 183 aa, Acidocella sp.
VLAARRAKRKFGENVAKARRRLARLHARIANIRRDGTHKATTILAKTYRRIGIEDLNVRVMARNRRLALSIMDGGLFEFRRQLEYKTRFYGAAVIVADRWLPSSKTCSCCGSVKAELALSQRTYHCDACGHEIDRDLNAARNLERLAASSAVSACGKERSGAVRKPRVKRALKKQEPNSSLAA

SEQ ID NO: 24309 - protein, 258 aa, unknown
  TnpB Polypeptide
LTSRKSTECRTFAPSGTATSELHFVCKVELETNDSAGDEVAGIDLGIKNIATVAFPDEYVLYPGNSLKEDKHYFKRAEYDTEGENGPSEKSMWARRKLADRETHFYHVLTDTIITECVERGVGTLAVSWPEEVRESDWGKTGNKKLHSWAFDRIYQYLEYKGEIRGVEVLKENEWNTSKTCSNCGDDTKENRVERGLYVCSSCGLVGNADCNGAENMRQKITPSPHGEDRSNGCVAQPSTYLFDRESGTFHTREQAVS

SEQ ID NO: 24310 - protein, 437 aa, unknown
  TnpB Polypeptide
MQLTEQHIIDQSDPRFAAIDAAAFASKNLYNAALYVMRQTFVHEGKRLSYTQMDKLMKQHEAYKAIPAKVAQQILMQLANDWESFFQACAAYKENPSKFRGHPRLPKYKDKAKGRNLLVYTAQAISGGRSKHGLKDGIIKPSGLTLTVKTQQKYINQVRMVPRSGFYVIEVVYEHEQPKSTVDLANFAGIDIGIDTLAALTSNQPGFVPVLVNGRPLKSINQFYNKRRAELQSKLGRTGRTARMERLTNTRNRRIEHYLHTASRWIIDDLVAHGIGTLIIGKNDGWKQEANMGKRTNQNFVSIPHARFISMLTYKAELVGIQVMVTEESYTSKASFLDRDAMPVYTPDRTEKPKFSGKRIERGLYRAANGKLINADCNGSLNIIRKVAPDAFGSEGVEDGKGDSPVVHPVRLSFPSRSRKTSNGGNSKQSRARSISL

SEQ ID NO: 24311 - protein, 371 aa, unknown
  TnpB Polypeptide
MKLIAQVKLLPDDEQRAYLLQTLEQANALCDWLSEQAWELQKFRRFDLQAACYRAARERSGLSAQVVIRCLAKVADAYTLDKRTRRTFKPHGAIAYDDRILSWQTNNQRVSIWSIGGRLNIPYQAGARQLELLQYRQGETDLVYRKGAFYLLAVCDIPDPDERDVDTALGVDLGVTNIATTSDGKTYTSATIERNRRKHQRLRTQLQKRGTKSAKRHLKKLAGRQRRFQKDVNHQISKRLVLDAERTNRGMALEDLTHIRSRTRVRGKDERARRGNWAFAQLRQFIAYKAALHGVKVWVVDPRYTSQRCFACGHTERANRKSQSEFLCCACGHTAHADVNAAKNIAWAAVIPPIVSTAQTSASRQGQAAPL

SEQ ID NO: 24312 - protein, 576 aa, Bacillus sp.
VWDEWVLDVERKCWYFGFLVAILDAQTNVRLGVNEMTKAATPSFVLTVDMNINTHSQMLIERDLEVCRVLYNACLSELLKRERQMKRTKSYQKIKRCLRVVSQKLSYSIEKKNENKSKHYQEQKENLLNALFALQQTFELTEYGMHEYIIPMRKHFGNTLNSAIAQKMATRAWNTFYKKLNGKAKRVQFVKRNEMRSFEGKANTSGWRYRNRTIVNGKTIISLRIKEQDMYLQEALSMIENEAFFSYTTKQGGVKQAVTKVKYVRIVKRLIRGKIRYVAQLTVQGSPPPKRNRDGSFKYSIGKGRVGGDLGVSSVAIVGENDVLLCTLAKEVKNVSRDIRLLQRKMDRSKRASNPTNYCEDGTIKKGKKTWTFSRRYQLLRSQVRELHRKQAAIRKNSHQRLANQLLSFGDEHYWEDMHIQGLQKRAKKTEKSEKTGTFKRKKRFGKSIGHRAPALFLTILEQKIRAQGGTFQKVNTWTFKASQYDHNSNDYQKKELKNRWHVFEDGTRVQRDLYSAFLLKNSNKTRTKPQRKRCLETFDRFKHLHHEHVSMLEGQEQMVLNSGICVKEKNATVVA

SEQ ID NO: 24313 - protein, 446 aa, Bacillus sp.
VATTKDGMHIKGTKKELINGWVTSGYQFALLPNPDQCQALERAFGCERKVYNEYVAGLYEYLEKTNFQGGRIDYKAPAYPTITAQYHYLDKSNDACVYNDAKRRFQAAITKYNADYAFKPMTYKKGARKKIKSMGYEPTLRDVKGLPKFHSKKQGKLSYTTSQTNGNIRLVYREDGVFLRIPKFREGILIVMHRPLPDDAVIKKATVRREGDRYLVSLSVDYPANQTPLKQEVAEPKILGLDYSQTALYVDSEGREAGYPRYHAIIQKRQRRLNQRLARQRAAALIDKEGNPVYSKRYQHTLTRYQRTMAKAKHQRKDFLHKRSTEITNSYDAIVVEDLNLTNLAQCLKLGKKLHDNGFGMFRTQLKYKAEKKGKHYLVADPFYPSSKRCSECGKIKETLPLSMRVYTCDYCHTKMDRDYNAGRNLKQYGMTLLQENGVAVDPVYV

SEQ ID NO: 24314 - protein, 369 aa, Bacillus sp.
LKITKTFSYKLKPTKDQSNDLQKTLAATTFCYNLFLHYNKLSLEKIKKKLDLKEMLKQLPSVIKKYQQLKGVSTSYLNSTVVDLFFSLKPVYRVDSLPSFKKQGNRIILLRDFLLDEANQYLKLPAIGSIAYIQTRHIKGVVKALHLVYKFNGWYVDVVCEQHIQPKNPQTKPRFLGIDVGLNDFAILSNGMKIDNPRFYRTLEDKLKTAQKSLSRKQRHSSNWHKQLKKVQSIHKHIYHARMNFLHQLTTYLTDEFDVLAIEKLPIQEMKRNRKFAKSIQDASWGTFVKLLKYKATEKGKTIVEVDRYFPSTKTCSRCGHKEIIPLHLRTFTCTRCHLKIHRDYNAALNLEQKAVHHAFVHNLSDCRG

SEQ ID NO: 24315 - protein, 529 aa, Bacillus sp.
MAKETTPSFVIQVEMDVSNFIIAKIERELDINRVMYNSTLRELLKREKQMKQTKVYKQQMRFLRAVNRKLSSADKTTEKELKKEKKKITDGLKLLREIYGLTEYCVHAFINPIRFHFRNAVNVNIAQKTATRAWKTFEKKHFGKAKKVRFVPKGDFLSFEGKTNGTGWRYHDRQVVVGKQKIPLLLSDKDVYLQEALHLIESQQEFNYTTKKGEKKTAPYTVKYVRIVKKDIRGKNRYYVQLVCAGYPPAKKDKNGRFKYPLGNGRVGCDIGTSSVAVASEQRVLLSNLADRIAPPDEVHRRIQLLQRQLDRSKRAMNPSYFRPDGTIVKGKKKWVFSNRYVKTKKKLKETHRKLALYRKESHQQLANELKTWGNDVYIEDMRFSSLQKRAKDTKKSEKTGKFQRKKRFGKSIAHRAPAMFVSIWKQKVKVAGGSFHEVNTWTFKASQYDHMTGKTTKKTLSQRWHVFENGLKVQRDVYSAFLLQQANEERKETCIKRCTEQFDRFKVLHDNEINQIQTEGRSVMNSGI

SEQ ID NO: 24316 - protein, 407 aa, Haloferax sp.
VSDDLDSLGFSASKLWNVGRWTCDRIWSEISHIPGHNELTTYLKSHERYDDLHSQSSQRVLQELAEAFNGWYGKRRNGDTRANPPEYRKHGDEHPRSTVTFKAAGFKLDTQYNRVRLSKGANLKDYWSDFILCEYQTRPDVDLATVESVQQVRAVWTGDEWELHFVCKVAIEVADTPGEKTVGVDLGINNFATLAYENGHAELYPLNCLKQDDYYFSKRIAQCDDSDSDQATRLNQKKSGRRTHYFHTLSKHIVQRCVEEGVGTIVVGDLSGIRDDEENDESKNWGKHGNLDLHSWAFDRFTSMLDYKAEMEGITVERVSERDTSKSCSCCGRTRKANRVERGLYACDDCGTVANADVNGAENIRQKVSPSSPSLSVNRSNGWLAQPSTYLFDSESGCFAPREQATS

SEQ ID NO: 24317 - protein, 361 aa, Paenibacillus sp.
MQRTYKFRLYPTNEEKINIHFVLERCRLLYNRLLAERIAAYKQMGQSLTYYEQKATLPERKQYIPELKNVHSQVLQHVVERLDTAYKAFFRRVKTGEKAGFPRFKSESQYNSFTYPQSGFAIEGKHIQLSKIGKVRIRLHRQPQGTIKTCTVVVKNSKYYACFSCKVENEPLPFSAKQIGIDLGISKLAVTSDGEQIESPQFLRKSEQKLKLKHRTISRKQRGSNRRRKAVNELARLHEKVSNQRKDYAHKQSRKLVNEYGFIAFENLDIQGMVKNNHLAKSIADSGWKGLVQFVTYKAESAGRQVVQVNPSGTSQQCSNCGEMVKKTLAVRVHQCSCGYVADRDENAAINILKLALNNVS

SEQ ID NO: 24318 - protein, 321 aa, Paenibacillus sp.
MVEEKKSVKKTTKDVFANLPSAVKNQAIKDARSVFITKVKKSKYTIIPTLKRPICVWNNQNYSFDFTHISIPFMVEGKSNRVKIRALFIDKDNRNVNLLKHKLGTLRVTKCSGKWVAQIAVTIPTVEKKGIRILGVDLGLKVPAVAITDDDQARFFGNGRENKYKKRKFRSVRKKLGKQMKVNVIRKLQDKEQRWMKDKDHKVSREIVNFAVENKVSVIRLEQLTNIRQTTRTSRKNKKNLHTWSFYRLAHFIEYKANMTGIKVEYVNPVNTSKTCPECSKKNKAQDRRYTCPCGFKKHRDIVGAMNIRYATVIGGNSRSA

SEQ ID NO: 24319 - protein, 351 aa, Paenibacillus sp.
MQTITIQIRIFPAHPSVLLDMGQEYIRTVNELTKQAEVSGTFPKLTSKSVQANLPSAVKNQIIRDARSIFQKFKKDKKRPILKKRVYYVNNQNYTIGDHHISFPVVIDGKVQRLVVPAILPDRERVLLANSKHGLLRVVQKSKKWFVQVAIERPTEQASGDIMIGVDLGLKVPAVIVTSSGKTKFCGNGRKNKFIRRKYNTNRRRLGKLKKLSVIRKQGNKEGRYMKDQNHKISRQIVNMAIQENVSVIKLEKLTAIRKTTRTSRKNTKNLHDWSFYQLNKFIAYKAALAGIKIAEVDPAYTSQTCPVCLRRNKANDRKYRCVCGYTAHRDRVGAINIMHQPVADGNSLPA

SEQ ID NO: 24320 - protein, 379 aa, unknown
  TnpB Polypeptide
MFRAIKVRLYPNEQQEQAINQLLGGYRVVYNQTLALKQEAYNLNKTNLGLRDLSKYFFGTLRKDEEYSWLKEQNTKVVKQAIRQMLTAYENFFKLHKGFPKFKSKKDKQSLLFPLETISKKNTFETKHISLVKTLKNIKFRCSDLYFKRLQVYKDKIRSATLTKTKSGNYFLSILVDIPQDELVKFKKTGNQIGIDLGVKDFVITSDGEVFENKHFLKKEEQKLKRLQRQLSKKKKGSNNLNKQQIRIAKVFEHITNKKENYIHSVVNELLTYYDTIYMEDLNVRGMLRNHKLAKSIQEVGLYRFKSVLQSKALVNNKQVIFIGRFYPSSKTCSCCGYKKQDLKLSDRFWVCPECNTKHDRDINAARNILIEGQRVLCG

SEQ ID NO: 24321 - protein, 418 aa, unknown
  TnpB Polypeptide
MSECGKSFCAMTVKSWFSTKQITDHNKNSQKNYLQPLMSSRTVCMSSDAIVTKTRRIRIYPTQQQKRLFKQWFGVERKVYNTCINHFNEKDIEFKGWMKMSTLVLHSLTEGYIKSVPYQIKNKAVKDSYTSWMTNCKRTKKSGKPFELRYKSRKNPIQSCYIPKSAVSDSGIYHTISGKLKFSEREWIKNDICDCRLINDHGRWYLSVPQKITTMPTENQGGIVALDPGVRNFLTYFSEDGRFGWLGIHAFDRILNLNLKCDHLLSRLALTKDKRKKSKLKRTLNRTYHRIQDLVDELHWQCINYLVHNFSVIVFPPFEVKGMTKKGRKLRKSVVRSMLSLRFYEFKERLKRKCKECGVVYIEQNESYTSKTNSFTGELITNLGGKEWFMYDGIKVHRDLNGARNILIRAMRDSSAVG

SEQ ID NO: 24322 - protein, 379 aa, unknown
  TnpB Polypeptide
VNLFMAEKAFKFRLYPNKKQEEQLAKTFGCIRFVYNYYLNKRIELYKTEQKSMNYNACSADLTNLKKEKEWLKEIDKFALQNSLKDLDKAYQNFFREVKKGNKEQGFPKFKSKHNNKHSYRTTFTNNNIEIKDNKIKLPKLGLVKFAKSRDIQGRILNCTITKMCSGKYFISICCTDVEIEKYDDNKNIIGIDLGIKDFAICSNGETIANPKYLSKLEKKLKREQRKLSKKKKGSKNRNKQRVKLNIVHEKIANQRNDFLHKTSTKLIRENQIICFEDLNVKGMVKNHKLAKAISDVSWSEFVRQNNYKALWHDRIIQKIDSFFPSSQLCSVCGYKNIEVKDLSIREWKCPECNTIHNRDINAAINIKNEGMRLLGLVA

SEQ ID NO: 24323 - protein, 398 aa, unknown
  TnpB Polypeptide
MKVNRVEQQFIKKNHPLYKIVDQHCFYSKNIYNQANYLIRQAFIKENKVLSAFDIQKLMQDMDCYKECGSQAAQKTIQLVGKMWKSFFKANKDYQKNPEKYLGRPKIPKYLPKDGRQVYMLKNIQCSLQDELFRISYKPFNQYTVRTHAQGKLMQCRFVPKGEYYIMEIVYEIEVPECNESIDRICSVDLGVENFITVVNNFGEKPFIVKGGEIKSVNQYFNKKKAELQSDLKKKTGMDWSKRLEKLTNKRYEKIKYLMHCISKKLVDYCVLYNVDTLIIGLNKKWKQENGGMQNFAYIPYDLFIHQIKSKCEQNGIKCIETEEGYTSGTSFLDNEEPMKENYDKQRRVYRGLFVSKSGKTINADVNGAYQIMKKVVPDAFSEGIEGAGLHPLRFNIA

SEQ ID NO: 24324 - protein, 526 aa, unknown
  TnpB Polypeptide
MNNGYQQSGTQRGNVSSTLMPSCAFPLLPLPSAIAGLVVTSSATTLSDKSNDCQQSTLKPKSSKTSALVSTSSEKVFRPYWDDSCAATSSALWLPTETDWRGSVSTPSGFSSSATVENSWFSIHTLRPASKLNSLPIYSPSSITSLAACTDSVAMRAKRIRVYPTPAQKSLFKRWFGTSRKTYNLTVDHLNQPKELRATHWMGAAKQILPTLPEWAKEIPYQVKKIAVEDAYKAFSNGCRKAKKTGAPFRLSFRSAKDPRQSCFIPSSALKDSGIYPRIAGELKMSEKLPDDARDSRLIFEHGRWFVIVPYRVAISRAENQGRVVALDPGVRTFLTGFAEDGVFKIGRGDFARIARLGRHMDDLQSRIAKAPCRQKRSLRKALSRMKFKVWDLIDELHFKSIAFLLKNYDAVLLPTFETSEMVARSNRKIRSKTVRAMLSFAFHKFGMRLESKAKELGKLVLRVCEAYTSKTASWTGKIKQIGAAKRITSGGITVDRDVNGARGIFLRALVDTPSLRNERAIVGVQ

SEQ ID NO: 24325 - protein, 351 aa, Oscillatoriales sp.
LVLARKFYAKKKWQKSKTGCNFPLACSLQYKSTNWQNLRFQIHNKKRKLTGLINRVEHLRLSPVKVFIPMRDIFVVGSKDESFGNQVCQWNGDKITFRVPKCLESRFGKTVSSLVGDFSRNINRLPECGAKTWHFYRKVQFTPNPAKQVSRERMYGCIGIDINPGSIGWVYVDSEGNLKAKGQIPLQIGLPSGKQQAQIVDACLQLAAKATEFECPVVCEELDFSTKKQSLGEKGRKYARMLSGWAYSEFYKQLSSILSNRGIELTTVNPAYSSIISLVKYLRMYGLASDEAAALVIARRASKLSEKIPCSLTAYSEVNSEKHVWSEWNKLNKKIKRSAMISRRCDYQACF

SEQ ID NO: 24326 - protein, 375 aa, unknown
  TnpB Polypeptide
VLKAFRYRLYPTKAQQTKINAVLESLRWVYNETLAVRKNSWEQECKSISLFKTNKLLTGWKKERLELNSVFSQVLQDAQVRVDLAFKAFFRRVKAGEKEVGYPRFKGHGRYDSLTYTQFGFKLGKDKLTLAKIGAVRVNVHRPVQGKIRRITVRRTSTGKMFVSIMAEVLSNPLPFKDGSVVGADVGLESFATLSNGEKISNPRFFRTEEVELVKAQRKLSAEKKSSEKWRKRLKVVQRVHERIANKRSNFVHQESHKLVNRFGIIAFEDLNIKGMQQNNNCGLAKSITDASWGMFVNAARNKAEEAGSKVVLVNPKFTSQACSRCGLIVKKDLSERTHLCECGLVMDRDLNAAINILRLGLQSLSQTGIEAHAL

SEQ ID NO: 24327 - protein, 470 aa, Saccharopolyspora sp.
MAPRSPRVQSAEVPAFTPGRSRSRVVLGDHALVLTRDRWTCKLTGLRTAYKCRTYPDSEQAAQLGRTFGCVRLVWNKTLDARHRRYHTEGRSTSYTETDAALSQWKRTEDLGFLSEVSSVPLQQTLRHQHTAFSNFFAGRAKYPRFKSRTGKQSAHYTRSAFRIRDAQLFLAKQTTPLRFVWSWPEVDPTTINPTMVVVSREPDGRWYVTFAVDTDEPEPQPPTGEAIGVDLGVKDFAVLSTGETIANPKHLDRKARNLARYQRRMARKQRGSNNRRKAKRKVARAHRKVRHARQDFLHRTTTNLVRRADTIAIEDLHVDGMTSSARGTTEQPGRNVKQKAGLNRRILDAALGEFRRQLEYKTTRVGTTLVVVDRWYPSSKTCSACGHLLSNLKLSVRHWTCPDCRTRHDRDHNAAKNILAAGQAVAGQHPGQACGADVSRAGSSRTQSAMKQELSGASPTGIPALQDGE

SEQ ID NO: 24328 - protein, 411 aa, Saccharopolyspora sp.
MQLRYRFRLYPDDAQRAGLAQTFGNARVVFNDAIRVRRYAYQAGEKYPSGTQLQKRLITDAKRTAEREWLAYAQHSVLQQVIRDCDTAFRNFFDSLSGKRKGRRVGAPRFKSRKDRRQAVRFQPDGFRVLGNGKLRLSKVGDVKVAWSRDLPSTPSSVTVVKTADERYFVSFVVETGDDTLPPAVDEHGQEHELALDLGLHAFAVDQHGNAIENPKFLRRAERKLKRAQRELSRKQRGSNNRDKARRKVARQHGKVADTRADWLHQETTRIVRENQAIYLEDLAVSGLARTRLAKSVHDASWGGFRRMVEYKAARHGRELVVIDRWLPTSKTCSGCGVVQQSAPLSMRTFECAACGLVLDRDTNAARNILAAGRAERRNACGADVRPPSEAVGVEAGSSGSPRGSTAPHAA

SEQ ID NO: 24329 - protein, 328 aa, Saccharopolyspora sp.
VGFPRFRSKRAAWSCRFTTGAFGLTEQDRRHVRLPRIGVVRTHESTRKLARHVERGTARIRSATVSFRRGRWQVSFSVEITKADPAPATRGGTVGVDLGVKSLAVLSTGEVIANPKHLEAAQRELRRLQRRAARQQGPDPRTGRKASNRWRKAQARIAQLHTAIANARTDGLHQLSTRLVDEFDTIVLEDLHVAGMVRNRQLARAVSGVGMGELRRQVTYKAAWSDRELIVADRWYPSSKTCSDCHAVKATLRLSARVFTCEHCGHSADRDLNAARNLANLAETAGCTSSQSCGATENEPAGNPRKTSLAGTGYRHGKTAPTGAAKAA

SEQ ID NO: 24330 - protein, 415 aa, unknown
  TnpB Polypeptide
MAIQVTRTYVGDIQNHQQVQSDLDSLGDAASKIWNVARWTADRVWEATDEIPDEGTLKAYMKTRDCWKDLNAFSSQKVIEELSDAFQSWFDVRQKDETANPPGYRKEYDTRPRSTVTFKDNSFKHDPEHNRVRLSKGANLKDGWGDFVLCEYDTRNDVEFSTVDTVQNVRVVWNGEQWQVHFVVKETIETLDSPGDGIAGVDFGVSNIAAVAYPNEYVLYPGNTIKQDTHYFQRKEYNTEGENGPSQQAQRLRQKRTRRETHFYHTLTKTIIEECVDRDVGTLVVGWPEDVRSDDLGKTNNKWLHTWAFDRLYQYLAYKGEERGIEVLKENEWNTSKTCCKCGDTADSNRIERGLYVCDSCGMVANADCNGAENIRQKITPNPSVDRGNGCLTQPSVYLFDKSTGEIAPQEQVVS

SEQ ID NO: 24331 - protein, 506 aa, unknown
  TnpB Polypeptide
MIQTIRFLLHPTSLQEKQLHEIFTIYNRVKRIGYKLRFQLKDSIYNKKEMRNVIQPQLMHICDNNPYINSILIDNEAKLAQQQTWHEKRKKYMKKQIKTITEKIKYIFQKDKYDRRLKGLYSRLSSIQNRLNNLEINPVVFGTKQLFRERIRQKMSKKDFQIRRDSSFCCVGKKQGVNLNIKVFPGMILRVHRFSKEEGKKWLFIPFTVNSIQKKWFDEILSAEKYTVEIVRGFFKGKLKYFANISYEIPEAEICYNLEKGAVGLDFNYNFVSLCNINKNGDLKSYREIMFRNLHTLRKNSRVNYISYKIDKVINYCINNNKGLVIEDLSLDLEFSYNKVFNRKLSNFRITALDLLERKCLKRGIAIRKVHPAYTSLIGKYKYSRSYNLSTHILASYVIARRGLGFKEEIPAIYKWLLSQVGDMIEPRLKKGSPYNEWSQIHDLFKYSGITSFKTSEIVRKSLLVKNVLNSATSEQPDNLRAGLSSSGKIEDYHKFWNFIEITKFL

SEQ ID NO: 24332 - protein, 292 aa, Streptomyces sp.
SRKKSRKSAEYTTSGFRFRDGRLTLAKMADPLDIVWSRPLPEGAAPSTVTVSQDAAGRWFVSMLCDDRPTMSAPVNTAVGIDAGITSLVTLSTGEKIANPKFERKDRVRLARAQRDLARKAKGDGTNRAKARRKAARVHARISDRRRDFLHKLTTRLVRENQTIVIEDLTVRNMVRNHSLARAVSDASWTEMRSMLEYKAGWYGREVIAVDRWFPSSKLCSHCGTLRGRMPLNVRTWTCDNCGTAHDRDVNAAKNILAEGLSVSVCGAGVRPQRSTPGGQSAMKQKIPRREP

SEQ ID NO: 24333 - protein, 402 aa, Proteus sp.
MKRLQAFKFQLRPNGQQEREMRRFAGACRFVFNRALARQNENYEAGNKYIPYTKMASWLIEWKSDTETQWLKEAPSQPLQQSLKDLERAYKNFFQKRTAFPRFKKLGKSDAFRYPQGVKLDQSNSRISLPKLGWMRYRNSREVVGEVRNVTVSQSCGKWYVSIQTEYEATEPQHESTSIVGLDAGVTKLATLSDGTVYPPVSSFKVNQRKLARLQRKLSRKIKFSANWQKQKRKIQRLHSHIANIRKDYLHKVTSEISKNHAMIVIEDLKVSNMSKSAKGTTERPGRNVKAKSGLNRAILEQGWYEMRRQLEYKQLWRGGQVLAIPPAYTSQKCAYCGHTAKENRQSQSQFECLECGYTANADINGARNILAAGHAVLACGGRVQSDRPSKQEPAELIQTSV

SEQ ID NO: 24334 - protein, 281 aa, unknown
  TnpB Polypeptide
MWLYPGQSYWVRDGYVEIAGGIKLSIIGWDRRYDQYENGEARLVYRGDKMILWISKKIPRPKPYQPRDAIAVDINERKIVYGDDKINKKRDTKIGEAHRWKKLAEDLQKKYSSPRYPAWRRRKAILNRIRSYHRKARNILEDWARKTSLRIVGLAKRLGYAVAREDLKGLINSLRKIESKDHRKKLIMMGYKRLGKWIDWNAKKQGVPLAIVNPNGTSSKCPKCDSKGLKEVDYRRLRCPRCGFEEDRDVIGKLNIRKRALKKLKIKANPGEFWPPSLPPR

SEQ ID NO: 24335 - protein, 409 aa, unknown
  TnpB Polypeptide
MNTNLAHTIRLYPTESQKTFFKKACGTARVAYNYGFSEYQKIRKEGKNPKINDIKKKFNIEKKILYPWMSETNKDANQQPFTNLQNAFNRFFKKQSNYPKFKKKGKKDSFYISNDKFNLKENKFWIPKLGWVKGAESLRFKGKITSATVKRKADCWFVVVSVETEINPKTCDNQTVVGVDLGVHTLATLSDGKFIESIKPLRKHLSKLKLLQRWASRKVKGSFNRKKANQRVAKVHYEVVCLRKDILDKLTTYLCENYKVICIEDLNVAGMIKNHCLALSISDQGFGEFRRQLEYKSILRGSSLIVADKWFQSSKMCSGCGHIKTDLKLSDREYICENCGQVLDRDLNAAVNLKNYGLNKIGMVSPKLTPVEMEALVYSSSIGVNETTVDEAGIFDLKNNRNKHPLISM

SEQ ID NO: 24336 - protein, 215 aa, Bradyrhizobium sp.
VAERGSEVDPSAPTEVVREVLAVACDGAIALARQYGGGVITVEKGLGKLRSGGKNRKLNQLLNYRGRTVFVAMLRRKAGLAGIAVLEVWGGYSTTIGNLRFDLPDACASAAEIARRGIAARAEIKDVLPVFDEGWRAHLRKDVPLPAEAGSRADVHRGLKAAKTIGYRRPHPEMPPDPGCRPSRGGLAVQQLGRSRRPGLLARPVGTGWLKQVSS

SEQ ID NO: 24337 - protein, 300 aa, Psychrobacter sp.
MPRFKHKSDGCDSIRLVQFDKYCRVEDNRVKLPNGIGLVKFRKSQNIIGTIKNVTISKKSGRWYVSFGCEHELAENPRHPAISAIGLDMGISKLLTTSNGEYIKPKNSFKANQLKLARLQRQLIKKVKFSENWKKQNRKIQKLHHHIANIRHDYLHKITTSISKNHAMIACEDLKVANMSKSASGSMEKKGYNVKAKSGLNKSILDQGWAMMVNMLEYKQQWQGGLLVKINPRYTSQTCFNCKHVAKENRQTQSKFECVQCGYVANADVNAARNILAAGHAVLSAEGRCGKGSPVETENL

SEQ ID NO: 24338 - protein, 444 aa, Acidimicrobiaceae sp.
VSTAVLENTSTSTATTTQAYSFAIDPTPEQGNLLRSHIGGSRFAYNVLLGLVAANWDENREKKAAGLEVTKYDYLSTSHFGLLYLWAETRNELAPWWGENGVSTYNDAAQRLSKAFTNFHRGRAKFPTFKRRGQGGSVRFTNTAVRLSDAHHVRISRIGEVKTYESTRKLYRPVNRGTAKIMAATVCERGGKWTVAFTVEVQRRVCAARAPERVIGVDVGLTTLYTGTTPDGEQVLQVANPRHLQHSEKKLAHAQRIAARRQGPRPGQAPSSRWKRANTRVQKIHSGVANARRNLIHETTTMLAKDYDVIVVEDLNVAGMLKNRSLAKHISDAAWGEFTRQLEYKTKWYGSQLVKAGRFYPSSKTCNQCQTVKAKLSLDERMYQCEACGLTLDRDVNAAINLARQGLAGTSSVTGRGGEVRPVASTDPAHPDEASTDTPPESGA

SEQ ID NO: 24339 - protein, 543 aa, Streptomyces sp.
VSEGVEGVEGVVRAEARVVPPAVAARLASLRARKDAGLVGRTAVVPVWLSRTDHARAHEACHAAAGLWNQTVTWLRGQWTAGERPGKEDVRRFVTSLPSEVRPFHAHTAQAVAYDLWDAVATSRANRAQGLKARAPWREKKYRPLSFTATFGWRVTPEGRLALSLGRGRGRIVLPMPHVISRDGRPVSAASWGEIRLCWDRNARSWSLHVAYSAPGDALPGPAVGRPTVTVAIDEGIINPMTFAAPLPDGSMSVLVINGRGGRAAKRQRNKTVAKLTSRMARCKNGSRKHRRLLAAKKKIEAKTERRLHDVDHQVTAKAEKFTREVHAAWTKHHREISGPDAIVGVRLVAGDVRGIERNTNTKRRASRSTRQQLSQWSRGRQDDFLQYKTGLVLEHISEAYSSQTCPLCNERTKVRGREYVCRNITCGFRLHRDAVGGVNIQALAVNDGQFRPDPDLRVEVMYRRAQPGWSPLQRSLHAYHQDVLGRSGTGAGREARRSAPNRATRSITAGVAVVPSPRGDSTDQTDGTTTLAGAGRTPVHAT

SEQ ID NO: 24340 - protein, 398 aa, unknown
  TnpB Polypeptide
METTTVRRVYRFRLEPTSQQEDGFRRYAGARRFTWNWALAQRQEHYKATGKGLSRVALSALFTALKKEPDTAWLSEVDSQLPQQAIIDIYRAFDAFFEHRARYPRFKSRKRDAARFRIPQRVTLAEGYLTIPKIGRVKVRQSQAVEGMTKSATFKRDACGHWFVSLVAEMDMPDLPLPAPDPERTIGVDLGVKDAVVTSDGERVAAPRFYRRGQRKLRWAQRVVSRRTTGGANKGKARRQVARVHQKIANKRNDFCHKLTTTLVKTHDVVCIEDLSIKGMAKTKLSKSVLDASLGTIRRQLVYKGAWYRRHVVAVDRFYPSSQIHNACGWRNRTLTLSDRSWVCHGCGEVVDRDLNAACNIKEEGLRLLTVAVGHTETQNARGECVGLPMEAALAIPA

SEQ ID NO: 24341 - protein, 446 aa, Calothrix sp.
MSKSKKSMGVQQVLLHPDQETKAILEYLCQQSGKLYNNGIYFARQTFFKTGKILTGKFDLDFEHSVSKSLVAQSIPSTPMQQTLRSVTEAFKSFKGLRDLFFKKQLHFKPKAPNYLTGSKLFKVAYPNSGGQKPTLIDGQLRFSLGLTIKRWFGISEFFLPVPSNLDMALVKEFTILPKNGAFYLEMSYEVERQVHDLDINQALSIDFGTADNLAACVDTLGNSLLIDARDMKAFNQLWNKKVATRKEGKPQAYWDEWLDRVTRKRNHQMRDGINKAAKLIIDHCLKYGIGTLVIGWNESFKNNANMGRVNNQKFVQMPLGKLKDRLNQLCDLHGIRFQETEESYTSKASYLDGDSLPVYGNKPDGWKASGKRVKRGLYRTKTGLIVNADLNGSANILIKVAKNLGIDLSRLGRRCLTTVARIKLWNVSSQKPLSKLVLSAESQSL

SEQ ID NO: 24342 - protein, 408 aa, Megasphaera sp.
LSDLTKTIKLRLYVTPEQDILFRQMTEQYRQACNRVSLYLFDNSFNLTYQSLNKALYSNLRSQFGLKSQLAQSSIKTAIARYKTVKQQLFQNPYRYKDEKGNWQRITKTLEWLWKPICFARPQADLVRNRDYSFVDNGQMLSINTLRKRTKCSFEGKHFAECLDGTYHLGTAKLVELQGLWYLHIPVTKAVDDFQKENVHHVVGIDRGLRFLTVSYDEQGKTEFISGKKMATKRHKFQEVRRQLQAKGTKSAKCRLKAISGRENRWMTDVNHQISKTLVEKYGKDTLFVLEDLTGISFDEGKLSRTTRQNDDLRSWSFYQLEQFLTYKAHENRSEVLKVSAKYTSQRCPKCGTIHKENRDHHRHLYHCQCGYQSNDDRVGAMNIQHLGSLWISGNNHPQYERITTAQE

SEQ ID NO: 24343 - protein, 124 aa, unknown
  TnpB Polypeptide
LNIRVDYENKVIHEIVEQKPRFITIENLNVRGMMKNRCLSKAISAQRFFLFREKLKRKTEIIGIELRVVNRFYPSSKICNSCGHIKKDLRLKDRIYICEKCVYIEDRDINAALNLRDAKEYLVA

SEQ ID NO: 24344 - protein, 418 aa, unknown
  TnpB Polypeptide
MRRKKKDESAIPTIIRAHKIRIYPNKHNQEVFQRYYDYQRSVWNRAIDERNAQYKIYKEMKATGLYTQKELNKNYFPHTNNLRKKMKKFDWEYNFHCRVRDVQFDNLCQAWDNYFNPNMPNHKKPKYKKKKDVESHKKLSLRDVRTKGKWLLLPKSQKSKPEYRFTKIKMAQELRFSGNITSDFSVSVENDKWYVTITVETPLEKKAALYNKSTGIDVNVGSIDYLKKDGQNKEYDKFYLLPKSLLRQYDKIKFYSRLISKKRNKNPYYKYSKSYYKAIIKLNNAYTKAYNIQEANLNNIVKYFFTNYNRIVIEDLDVNSMKMNKRLCKSLHRNAFGRFKQKMINKTEEYDTEFILADRYFPSTQTCSECGHVKTGDEKLFLWGDKYGNDHNTYVCYNCGTIQDRTENAILNLNHYGK

SEQ ID NO: 24345 - protein, 370 aa, Clostridium sp.
MILSKKIRIVPNIEQEQKLWQSVGTARFIYNWTLARQEENYKNSGKFISNNDLRKEITILKKEELPWLNEVSNNVAKQAVKDACNAYKRFFKGLADKPRFKSKRKSKPSFYNDTSKLKVKENLVLIEKVGWIKTVEQIPMNAKCTNPRVSFDGKYWYLSVGVEKENPMVELTDESIGIDVGVKDLAICSNGMTFKNINKTRIVKKLEKRLRRLQRKISKKYLMNKEGSTFVKTSNIIKLEKQIRLLHRRLSNIRNNHLHQVTTKIVKTKPSRVVMETLNIKGMMKNKHLSKAIAQQGLYEFKRQIQYKCEFYGIEFVEADKWYPSSKICSKCGHKKTNLSLSERTYICEECGTVIDRDFNASVNLSRYSA

SEQ ID NO: 24346 - protein, 409 aa, unknown
  TnpB Polypeptide
MLIQRAYRYELDPNNIQRTSLSQHAGVARFAYNWGLEQRINRYRNNQGNDRFTDAMRQHKLLNSLKKDQFPWMYETSKCAPQEALRNLHRAFQNFYRGLKSGKRVGFPRFKRRGVRDSFRLTGTIRFEGQKIQLPRIGKVKIKEKRKSYFSGRILSATVQRRANRWFVSVTVKENLADPSPIKGSSVGVDIGVKTLATLSDGTTFANPRALGRRLRKLKRLSKSLSRKKKGSKNREKAKLRLAKMYLKIFNIRQDTLHKLSTHLAKSHSKVIIEDLCVSGMMKNRRLARVIADVGFFKFRRQLEYKCQWYGSELVVASRTFPSSKMCSRCGHRKKELSLSEREYHCEECGLVIDRDFNAALNLVAVSLPETENACGEEVRLLTDSLNLQRAASMKQEPNIISGSVSRNV

SEQ ID NO: 24347 - protein, 371 aa, unknown
  TnpB Polypeptide
MTLLAHKIELRPTPEQREYLDRGCGHRRHCYNQLLEHFSQKDEAGQLVNKWSKAAAYQYYIKVLRVKFTWYAEVSSRVTRNAIDDLDNAFKHFFRRVKNGDKNPGYPKFKKRDHKDSFALREAEKFDVNYKKLRIEKLKTWINLREPIRLRGKLKQVTISKRAGKYFASFLIETDEYDPKDVNRQPSVGVDFGIKSLATLSNGESFPTSQPLKKEIRKLKKLQRNLSRKVIGSNRRARAKLKLQKLHFRVARQRAAILHQLSDYLTKSFDRIVIEDLNVKGMVKNRKLSRAISDAGFGMLRQFIEYKAKLRNCVVVIANRFFPSSKTCSRCGQIKQNLTLSDRIYSCDCGLVIDRDLNAALMLNKYSPDTI

SEQ ID NO: 24348 - protein, 361 aa, unknown
  TnpB Polypeptide
LEGFALACNQILEVAKRENCWNTIKLHHLVYKPVRETTGMKANHVCQAIRRVIGNAKAVKQVHKFRPTSLSLDVRTFRYVEEAQTVGITLKSGRVQFKVSIGGYQIALLRGQTLTSATLNKTKKGDYYINFAVEIDTPPTGKTPKVIGVDLGRRDIATTSTGTSWSGEKIQSVRDRYSKVRANVQSKRTRSSRRLTRRLSGRERRFQEWLNHNISKQLVQDAKSQNAALAFEDLTNIRESLNQKPRSKVERRRTNNWAFYQLRMFVQYKSAIAGVAVVLVPPAYTSQTCSRCGHIHPVKGKSYRNGKRFKCGHCGFDYDADVNAAINIAALGLPISQPESPGMSCQLAGQMTLFSVTQICG

SEQ ID NO: 24349 - protein, 420 aa, unknown
  TnpB Polypeptide
LNNGIITFGMERMYTYKFRIYPNKEQQDYLANVFGCCRLVYNYFLNEKKNQYNESKTSDSYNVQSGKLTELRKTEGFEFLSAVPLQSLQCSLRNMHTAYDNFYKHRSSYPKFKNRRDKQSFKMPQEKCFKIKDGKLYIPKLKSGIEIVMEREIVGKICFATISKNKAGRYHIAITVKQDYTPNNKTNECVGLDLGIKELIITSKGFKYVSKRNIIRKYKRKLKKYQRCLARKVYGSKRYENQVLKCNRIYQKITDIKTDYIHKITTELVRQFDLIKVEDLNIKGMMKNHKLAESISECNWSQFVQTLEYKCRWNGKTMIKVDRYYPSSQMCSECGYINKKVKNLAVRYWTCPNCGAHHDRDINAAKNNEQYEPDEWQRHISARNVEYGRGAVYQPFAKPRKTGEQTDSNEAIIELLNLYK

SEQ ID NO: 24350 - protein, 352 aa, Acinetobacter sp.
MKTLKLRIKDKHCKVLNQLASEVNFVWNYVNDLCFKHLQRKQQFFSAYDLAKYTKGTSKECNLHSQTIQAVTEELVTRRKQFKKAKLKWRVSNKKSARRSLGWIPFKKVAIKYADGYVEYGKHQFKLWDSYGLSQYNIKTGTFVEDSRGRWYVCLVVDAVKIEKNNAKTSIGIDLGLKDLATCSDGVKLKAPQIYRQYEQKLGIAQRAKNKKRVKAIHAKIKNVRQNMLHQFSRKLVNEHAAIFVGNVNAKALAQTRLAKSVLDASWTTLRTMLKYKCENAGVCYEEVNEAYTTQICSCCGSRSSSPEGRAGLGIREWQCMECGTLHDRDVNSALNILALGHERLAVGISVL

SEQ ID NO: 24351 - protein, 352 aa, Acinetobacter sp.
MKTLKLRIKDKHAKVLIKLASEVNFVWNYVNDLSFKHLKRKGEFLSAFDIAQYTKGASKECGLHSQTIQAVTEELITRRKQFKKAKLKWRVSNKKSARKSLGWIPFKKVAIKYADGYVQYGKHQFKLWDSYGLSKYAVRTGSFVEDSRGRWYVCLVVDSSNQEKPTATKAIGIDLGLKDIATFSDGTVISNPKFYRQYEKKLGIAQRARNKKRVRALHAKIANCRKDHLHKASTLLVKNNALIIVGDLSAKKLVKTKMAKSVLDTGFSALKTMLKYKCENAGVMFEEVNEAYTTQICSCCGEITSSSPRGRTGLGIREWSCECGVTHDRDLNSAMNILALGHKRLAVGITSV

SEQ ID NO: 24352 - protein, 217 aa, unknown
  TnpB Polypeptide
MGVARFATLSDGSCIKPLHSFRKHEKKLAKLQRRLAKRVKFSANWQKLKAKIQRLHRTIANVRNDFLHRTTTIISKNHALVVIEDLKVRNMSRSASGTFELPGKNVRARSGLNKSILDQGWFGFRRQLEYKLKWLGGKLVVIPPQYTSQTCSHCGCVDRANRPTQAKFKCVACGFECNADHNAALNILAAGQAVSACGAGRTQAPALKQEPAYGVAR

SEQ ID NO: 24353 - protein, 441 aa, unknown
  TnpB Polypeptide
MLDSPSIWRSASGSFWRRSTGRNWWIKVPQLGPDLGQSVYSSYLLFEEAWSTSTADRLTTQRTALRADPRTTQLLHALSSVKGVARCRSYRYLLQPTASQRAALERLLCRQCELYNAALEERRGAWKWEGRSVNYVDHCRTLTDLRGVRPDILENGVAVCRGTLKRLDRAFGAFYQRSRNGKTPGFPRFKSVRRWDSVQWEDSGGWHLNLEQSRLRLLGVGEVKMRLHRSLRGTPKAMTVSREGRRWWVSVRCTDVPAKDLCHTGRDVGIDLGICAVVSTSDGDVVSEGRYGQRARNRLAEAQQSLSRKQRGSQHRDRAVERVARAHRKIRNQRKDLAHKLSRSLVNDYDLIVHEDLKIVNMVRRPKRVRTGDGTSVRRGAAAKAGLNRSIHDAGWGVLLRFIAYKGGGSWSRSDCSRPAPHVTALLKMWVRISGKPASSG

SEQ ID NO: 24354 - protein, 517 aa, Meiothermus sp.
VRRRGKAEGYQGVQARLVFPEREDEKAVLDLMRRFSAAKRFAYNRLLEGRTREELKRQDGPLCPRFRLNTRYADEAIEKAQGVLDSARELGKDPCKVVFGGRKLFEQLKRQHLSGKDWKRLKREWKEKRQGLLYARGDGSKGGNLNLRLLVRAGALWLRVNLGDGTYAQALVRTGHPNLDKLLERVHVGLPYNVGLSLREGQVQAHFTWPEELPPPTHTKENGMLGIDVNADPYHLALAVVSPEGNLARYLTLPLEEVDFAPNKGAKELLLWKVAHQVVALAEEHGVAVATERLKHLRKTHRGDGSGRAFRRRQHRFAYRSLLQKIHALARKRGVEVLEVNPQDTSSIGMLKYAPLLSLSKDIAAAYVIGRRALGFTEKLPKGYGALLRDEGFLAQAEGFHQTRLRELQKLKETERNPYLKRKLSREMGKARRSLNLVQSLRGSPGSRSGSTEGRNPSGINPWRVLRVGLFLPFLGREVPRDLSPLKPFLHGLWERWKTSPGPHPGGGPECANVHFC

SEQ ID NO: 24355 - protein, 494 aa, unknown
  TnpB Polypeptide
MRALKKKIKGLKKPQFKRLKELTHHAKNLYNQTLWTLREAFEATGKYFSYPQMDKAMKQVTNLEGEVNYKLLKAKVAQQTLRRLDKNFRSFFSCHQDFQKNPSKYKGKPKPPKYKIEPHDHLIFDYQAFRIQGLFIVEKGPEIPLPNGKTFPVGESIRYEQVVVLEKGLEIQVPKQLWDKDIKQVEIIPKHKSFHAVFVYEENPTDFIQVNQSEQVMSIDLGLNNLATCVTNGVIEPFIIDGRRLKSVNAYYNKRKAKMQSKLSKRGKKGSRRLQGLTDWRNAVVNDYMHKATSIVVKTCVKHGISQVVVGDVVKSLNQINLGKRTNQNFVNLSLGQFVEKLSYKLGSHGIELVVADESYTSKASFVDDDKVPKRYNPKAKQKRTFSGQRVKRGLYKSSDGTLVNADVNGAYNILRKTDSDFSFSKLAKKVGTRIKEWLHPTKRIHPLPTPREQFLIDLEKASSNLSRQTANGSGVDSSPIHIVEMAAATWTCQ

SEQ ID NO: 24356 - protein, 378 aa, Clostridium sp.
LIKALKIRLYPTDEQITLMNKHIGCMRFIYNWALDKQIKNYESTKKKLSVSELGKELTLLKNTEGYEWLYEVSNATLKESIRDLDKAYKNFFNGSGFPRFKSKKKSDPKFYSRYEKIYFKNGFVNLEKIGKVSYKSDYDIDLTTITKFSNPRVSFNGRVWVLSVGIETQVEREQLNDTSIGVDLGIKDLAITNIDELDTTNINKTSKVKKLKKKLKRLQTQCSRKYEMNKKGGSYRKTANIGKLEKKIKKLHSKLKNIRLNHIHQATSKIVKAKPFRVVMETLKVSNMMKNKHLSKAIQEQGFYTFIDQMKYKCENYGIEFIQVPTFYPSSKTCSHCGSIKKDLKLSDRVYKCECGFSADRDKNASCNLANYGLEISA

SEQ ID NO: 24357 - protein, 366 aa, unknown
  TnpB Polypeptide
MRAFRALLIKLPRDRCDVGYIERLMALANLAYRGFEVWEPDIPKTIQHHLYGFRNFKNSLIFGTSPKAWFARTWPPLKTRRVYADGAREGVPNAPVVLDFVRGIIKIRLVCKPERDFVLELPMPEWVVERVREGGDVKYTMIGLRGEEPYLALVAERTVEPYQPSGYRLVVDVNSWKYGIAWGLIKNGKLITWRTERPGTFLINTLYHQAVDRERKAGKLRRLGYGGTAVVNRVRKQAKARRGKIYRITRDKAYFLAGKLVGKALRYGALLVIDDMTEESRRELLEEKLPRGVIKLLMANTKKFIKQLTTLAQWYGVPYRFERLPSTVCPMCQHELTQEEGRIMICENCGFKAPRDKIPIHWAMKL

SEQ ID NO: 24358 - protein, 467 aa, unknown
  TnpB Polypeptide
LPTSDCALFHHAEKGILDSMRSVVRYRYRAYPTLPQRQHLARTFGCARVVFNDALAAREHARATGAPYPSTGQLSKDLITAAKNTGERSWLAEVSVVVLQQALAEADTAYRNFFDSLAGRRQGAKMGHPKFRSRRDNRQAVRFTNNARYKVHSIDRDTAVLTLPKTGDVRLAWSRDLPSDPTSVTIIKEADGRYYASFVVTVDDPPAAPADAVCGIDLGQKTFAVITTRTPDGAEHTTEIVNPRFLRRKARALARSQRNLSRKKKGSANRAKAVTKVAVHHRKVREARLDHAHHTARRIIDTHQVIAVENLAVSAMAKAGATGARGRGNRRSVHDTGLGQFLTILKSKADRAGRTLITVGRWYSSTRTCFNCQAKTGPKGQTELSIRNWTCRECGVQHNRDVNAARNILAEGLRLKHLAEQVAEGHSETQNGCGGKVRPGLVPAPLETQAHLEEPVTDTVPHQPHAA

SEQ ID NO: 24359 - protein, 400 aa, unknown
  TnpB Polypeptide
MMVVKKMIKTIRVMLIPNNKQNTKLFRYANTARFAYNWALGREKENYKNGGKFLSDSDLRKEFTQLKKTEEYSWLNEVSNNVTKQAIKDACHAYKRFFKGCSKFPKFKSRKFSIPSFYQDNVKIQFSDTHVKIEGFAASKKKNKQKINWIRLAEKNRIPTDCNYSNPRIRYDGINWWITVGIEYEDSVTVPSNDGIGIDLGIKDLAICSDGNKYKNINKTKKVKKLEKQKRRLQRSISRSYENNKQGKEYCKTKNVIKKEKLLLILNHRLTNIRHDHLHHITSEIVKREPSFICIEDLNVNGMMKNRVNAINVGNTKRAKYFLYVFCINLPPYGYKCFLRKTEEEAADDRLLPLRILLSNTTTQLLLLSQMPTHLLYLILQHPILYCHLHTQEEMRHNHL

SEQ ID NO: 24360 - protein, 435 aa, unknown
  TnpB Polypeptide
MRKYIAGVNAVVALAQSGVSIQKFSSKDVDAELPSAIRGQIAQDARSVLVTHKKRVKKEKSKQAFWEKFGKLRRPLKEPKMPILRIPVLLVNNQNFKLDLERKEISFPMWVDGASKRVSFRAHFVERHREILAKTSHLGTLRIVRKNGELFAQIGYEVEIPEVEKVDFSTESAIESNLIMGVDLGVKCPAVAYVNDGTVRFFGNGRQNQFKRRKCYARRKKLQKAKKLRAIKRISNKEERFMRDIDHKISRAIVNEAVKRGVKVIALEDLDGIRENCAQAASTRKSRKNVWKPKESVASATEKSTKGKVSEDVQLSLFEENANVSDPNSSDTFTSKKKKRKLTKKQAEARRKRNRMISSWSFWRLSKYISYKAALAGIAVVFVDPHYTSQTCPVCGEKHKTKTRKYECSCGFRGHRDIVGAMNIARATYCVGDVA

SEQ ID NO: 24361 - protein, 315 aa, Anabaena sp.
LHKKLVAEVKSEHAWYYEVNKNVPQKALTDLRQAWDRCFSKTSKQPRFKRKGQHDSFYLESGTKAKPLIKNDGKRIKLPSIGWVGLAEPLPITVTHNCVISRQADKWFISVKYEVEKPPILADRPTIGVDVGIKELAVCSNGEIFKNPKAYRRMSKRMKRLQRSVTQKVKGSNNRKKAVRKLAKLHAKVSNIRKDSIHKLTYYLAKNHSIIKIEDLHIKAFLKNHKLAGAIADCGMYEFQRQLEYKTEKFGSELILVDRFFPSSQICSNCGNHRHKMPLKSRVYVCPDCGHTEDRDLNAAKNIDRWFVDIFIPVA

SEQ ID NO: 24362 - protein, 446 aa, Anabaena sp.
MRLLVNDKSTFSDLREYIQSSTKDVIVLSLVSSPYVIIKTGRKETKNMRTSYQYRLKPTKKQAEKIDKILDMLRCQYNYQLAQRFNWYEANRSPVDRCSVVVCHLPELKDKPNRFSQQASLTQLKKDRPWYRDIHSQVLQEVTKKVELDFDRWLKGDSNGKKSGRPRFKAVGQYKTFTFPQFKQHHFVNHKITLSKIGDVKVIVHRQIPDGFEIKTVSVTKKADGYYVTLSLDDKTVATIKPDFNANNIVGIDVGLIDFIVTSDDERIAAPKFLRKAERKLKSAQRRVSRRKKGSNRRKKAIKKLAIQHKKVSDTRKDFHFKTANNLLKKYDVIAVEKLNIKGLARTRLAKSINDAGWGQFISILTVKAVNAGLKVIAVNPNGTSQECSSCDALGLPKGGHKVKKPLSQRMHNCPICHTSLCRDLNAAINIKNRGTHGLKAQSMSS

SEQ ID NO: 24363 - protein, 372 aa, Anabaena sp.
MLLSFKTALIPNNGQVTAFRKASGVARHAYNWANAQVIDILVTQKEGEKLKLPSAIDLHKKLVAEVKSEHIWYYEVNKNVPQKALADLRQAWDRCFKKTSKQPRFKRKGQHDSFYLESGTKAKPAIKNDGKRIKLPSIGWVRLAEPLPITATHNCVISRQADKWFISVKYEIEKPPILADRPTIGVDVGIKELAVCSNGEIFKNPKAYRRMSKRMKRLQRSVTQKVKGSNNRKKAVRKLAKLHAKVSNIRKDSIHKLTYYLAKNHSIIKIEDLHVKAFLKNHKLAGAIADCGMYEFQRQLEYKTEKFGSELILVDRFFPSSQICSNCGNHRHKMPLKNRVYICPDCGHTEDRDLNAAKNIDRWFADIFIPVA

SEQ ID NO: 24364 - protein, 304 aa, Methanosarcina sp.
LKEANSQALLACLVNVKSAFTRFFREKTGFPRFKSKKNSVQSYQMPQHYTVNFEKSLVKLPKIGEVKAILHRRFEGTLKTATISKTCTGKYYISILVEDGKELPAKQDFSESTTIGIDVGIKDFAVLSTGEKVENPKYLKNSLNRLKVLQKRVSRKVKGSKNRDKARLLLSKLHEKISNQRNDFQHKLSSKLISENQAIALETLNVKSMQKNHCLAQSISDSAWSSFVIKLEYKAEWLGKTILRIGQFEPSSKLCSVCGYYNLDLTLKDREWECPDCNTKHDRDINAAINIKKFSLQDQNFIVI

SEQ ID NO: 24365 - protein, 369 aa, Euryarchaeota sp.
VTIIRAYRTELAASDWQLGMFREHVGLARFAYNWGLRRKIDVLSFNRLPISPIKIPSAIDLHRELNALKQTHFRWMYDMSKCAPQEALRNLDAAFKNFFKGRARFPRFKSRKDGAGSFRLTGAIHVRPGKIKLPRLGWVRLKENGYLPTKAHIISVTISEHAGRWFVSLNVSENGPGPVAVSGPVVGVDRGLKSLAVLSDGSAVENPKALSRYERKLKHLQRTVSRRRRGSSNRRKARAALARLHLRITNVRNDALHQATSRLARTKSVVVVEDLGVRGLMANHRLAKSIADAGWSEFVRQLGYKTAWYGSRLVVADRFYPSTRTCSLCGHIKESMPLSERSFCCDRCGRVMDRDLNAAVNLSRWPGVA

SEQ ID NO: 24366 - protein, 439 aa, Euryarchaeota sp.
MEKCCIERCGIVDVRAPLPLDNRAFGLTGGSGVTIIRAYRTELAASDWQLGMFREHVGLARFAYNWGLRRKIDVLSFNRLPISPIKIPSAIDLHRELNALKQTHFRWMYDMSKCAPQEALRNLDAAFKNFFKGRARFPRFKSRKDGAGSFRLTGAIHVRPGKIKLPRLGWVRLKENGYLPTKAHIISVTISEHAGRWFVSLNVSENGPGPVAVSGPVVGVDRGLKSLAVLSDGSAVENPKALSRYERKLKHLQRTVSRRRRGSSNRRKARAALARLHLRITNVRNDALHQATSRLARTKSVVVVEDLGVRGLMANHRLAKSIADAGWSEFVRQLGYKTAWYGSRLVVADRFYPSTRTCSLCGHIKESMPLSERSFCCDRCGRVMDRDLNAAVNLSRWPGVARTLETPVEGGVQPAATSAQPSCEAGTISLDRGPNRWMS

SEQ ID NO: 24367 - protein, 386 aa, Oscillochloris sp.
MNETVSTRTVCGKLSVDTADDATLRATQVAFNQAASYCAQVAWDEGITNKNTLHHLVYGPTRLNFGLGAQLACCARDKAAEAVRAVRAAPERRERDTDTVIAKTCPTFRDDGSIRYDANSYKLKSLDRVSLNTLNGRVIGQLVLGDFQRAHLYDMSWSIGGAELFRRANVWYLGITQTKADPAPDEPTGWLGVDLGIVTLATDSDGETHTGADVERTRQWYLGRRAALQRVRTKSAKRRVKRLAGRQRRFQKDTNHRISKRLVERAKRTARGIALEDLKGIRERVRVRGTAQRARHSNWAFAQLRAFIAYKAQRAGVRVVVVDPRHTSQRCSRCGHTERANRRTQADFCCVVCGHAAPADYNAAINIERAAVKQPMVSNSTHPRAG

SEQ ID NO: 24368 - protein, 419 aa, Streptomyces sp.
VIVMQLRYAFRLYPDVAQRTAPAKAFGCARVVFNDAVRAREDARKAGQPFPTAGQLSTRLITQAKRTAERSWLGEVSAVLLQQSLRDAETAYRNFFASLKGTRKGPKMGAPRLKSRKDGRQSIRFTANARWNITGSGRLNLPKIGAVKVKWSRTLPAQPSSVTVVEDAAGRYFASFVIDTDPAADAARMPDTDQTVGIDLGLTLPQTPSGGTPIAALSDGTKIDSPRFLRRAEKKLKKAQRELSRKQKGSKNREKARLKVARAYAKVADARREFLHQVSTRLIRENQAIGVEDLAVKALARTRLAKSVHDAGWAQFTGMLEYKAARYGRTLVKIGRFTPTSQTCSACGTVDGPKPLNVREWTCIACGAHHDRDHNAALNIKQAAGLAASACGAPVSPEPVLAQREETGSHGFPTGNRAA

SEQ ID NO: 24369 - protein, 386 aa, Ktedonobacter sp.
  misc_feature (324)..(339): Xaa can be any naturally occurring amino acid
MSSLKAYKYRLYPKSAQAEKLQWTLDRARELYNAALQERRDAYRMCRVSISYNQQAAQLPEIKEIRPEYHDIHSQVLQDVLRRVKKASDTFFRRIKEGKAPGYPRFQGYGRYDSFTYPQSGFSLTEDNRVCLSKIGTIKVKMPKGKKAHPPQGSMKTCTIKREGQHWFIVFTCEVEQDIVYPPSEETVGIDLGLLHFATLSDGSTIENPRHLRTSEPKLKKLQEALARKKRGSKRRRKAAQRVGKAHRHIRNQRKDFHHKQARKLVTAYQVIVFEKLQPANMSKRPKSKQDEATGQYLPNGAGAKAGLNKSILDAGWGQFQQIXXXXXXXXXXXXXXXXSCGCSLDRDHNAAINILRLGLQALEQESRARTERSEDAPLRSPAIHG

SEQ ID NO: 24370 - protein, 383 aa, Lactobacillus sp.
MIRTEKVRLYPNQQMQTVLDGLCDYRRYCWNQGLALWNDMYAESRIMDNKRLRPTFRKARNEMVANKADWQYQYSARCLQLAISDLGNAWKHFFDQSQPDWGKPHFKSKRAPRQGFKTDRAKLINGKLRLDKPHGINKWADIKLKGAKGLSGKLGVVSIVRENGKYWATLPLEKPVAPQSKTGKKTAVDVNVGHFNLPGKRISVFPKRLRFLYQRIKHYQRQLAHKQKENGKQAAQSNNYVATRTKLQRDYRRVANIQHDLMQKLTTQLVSKNDTIVIEDLAVKQMQMSHVASKGLQRSLFGYFRQTLAYKCEWYGKRLVLADRSYPSTQRCSQCGHVKTRDDRILLAGNHKHHTKHNEYICYQCGAVMDRDENAVQNLLQLV

SEQ ID NO: 24371 - protein, 526 aa, unknown
  TnpB Polypeptide
VVITTPKKALNKVKLDELYKVDTLHAQAVNAWIDKWYDHLEMVEKILSGRATTTMQKQTIDIGLPSAYIQIAGNRMLDILREHYLAVQDKIASDVWKEEKLSAEYKFVYATFARNYVMFSRFISGNFAVDDVVDSWAVGENAYLQKATECYKKLSDQEKAQIPAKIKEKFSEIRSVWKKPFFKGGSILLDYRVFSVSEAEETTEFNLWVEITSTEPYKRVKIPFYVTGKKLDMLETLFPGWQNTSRRKGLLVIRERHVHLSIPAEKEKTEPVSPLAYVGCDVGISSPISLHNGSRFGRNLNELVNEDYDEYLRLQAIRNKFRSLKEKAEKRYEITKDLVVREKLQRKIAEYERHLSDHRWAELRRKIKATVKTEIGRAVNLMLEELPLSNHVVIVLEDLSEMDASGARRSKRGCFDLSVWARRELQDHIKHDLEWRGGKAIYVVPDYTSQKCYECDYVDKDNRRGDVFHCKRCGYTDHADVNAAKNIKERFFDEEINQLAKKYSWNKNLRREKIKELLLQRANQAA

SEQ ID NO: 24372 - protein, 415 aa, Thermococcus sp.
VKIVLTYRVKHNWDVENLLMAYRRLLQQAIDEIWDNTVWKEKRVKHWYSVGKGKYKYYETTRLIPYFPKSSEFKRELRNKLLQNWSFAKHYVDSAIKTAYSILESWRQNYLKGRRKRKKPVVKRKFVRVKTTLMKVEGSKIRITIKPREEYLELDFSGEWFYERVKGWKVGELVIRDKDVYLAFSEEVEFSGKIKIGIDSNLLSLDVYHPEKGWVKVDLSELHRISETYDRVIDRLKSIQRKAPKRIGMLLKKYWVRRRNRIEDFLNKLSVQLSREFPDTIFVFEDLNKFKMLENGSKRFNRKLSRATWGKIVRKLSYRVPIEFVNPAGTSSTCPKCGNKLESRNGLVVCKCGFKSDRQFLGAFNVFVRGLGVALSGGEARDLLPNEPGGELRLMSPKSVVSVDLNGRTLTPTPP

SEQ ID NO: 24373 - protein, 452 aa, unknown
  TnpB Polypeptide
MLLTEEHRIKKDGNKALFRKIDDYCFRAKNLHNSVNYLIKQCDRIQRKLYAGENLEPWEAEMTDRINEGIRLYNAGRAKGGQRQYVDGNNGFVADAYFLSWYLKASSEYKAMPYATCSQICIQELCRSWKSYYKSVREYQKDKRRFTGRPKKPGYLDPKEGREWLVITSQNFTIKEDGSIRMPGFLNGIRIKARHPNIRQIRIKTEKSCIRVLLVYEAKEEKGEKGVYPSKTTSNLKAMGIDLGVNNLITAVWTSDDTPIIISGKPLKSINQFYNRKKASLQAAAQKGNGKKMTRRIESLTQKRNRKVKDALHKASRKIVELAAKTGTGVIIIGNNKGWKQNVKLGNRTNQNFVAIPHLVLIEMIRYKAALKRIEVRVIEEAYTSGTSYLDGEMPKAEFYNKSRRIHRGMFCSNAGVCINADVNAAYQILKAGGIKDLKIKNAEPVKKIKAA

SEQ ID NO: 24374 - protein, 506 aa, unknown
  TnpB Polypeptide
MCLNIQEKKLYMLEYQVKNKKKIFINKLNLSNLNILTTKLSKTLDLDLTLKEEGLSPFWNKSSIEKSKKLSLPIMTDLYALDLASYCSSVNTSIQNLQYSKIKIIKNQKMNLQMNLYPLLPTTHQNFMECENMTYCRKIRIYPTTKQKEYFETFFGASRYIYNKTIEWKKNNKDQKSLIFHKIRPHIIIANKDLDDNHKEAWLKNIPYDTRQLSLKNALSSIKSSIQLLKNKNIQYFNHKFKSKKDKKQTFYIDHRALKNLNLFPSLLKKDKKLKVKKKYKKYENYIPSSDSIILKDGKNYYLLFTKEKEKINITEKKNNIISLDPGIKKFQSFYDTNGYVGEFGNIELKKKLFKTEKKIDKLMSISTKQKKLRLRNKCYKLRTKAKNIISDFHWKLSSFLCKNYKVILLPIFKSKKMRKNLDNISNRVLNLYSHYKFKEKMIYQSKKYNCQLIIVDESYTTKTCGCCGMINNFIGNSNIFWCSSCKIELERDYQAARNILIKNTK

SEQ ID NO: 24375 - protein, 459 aa, unknown
  TnpB Polypeptide
MARRRKKSDKKWELVVKPGDRIFVSRTAVIPSKKLSRRGVQGVRGDREYIPKMFGDVLPHASRNIIENYYRLENGRYRELRKRRNRARQYSREIFDELVKHLGLGKRDLRGRRIVRYLWRKSREIARHQVDLEMMGGILVPRINSVSLWLVDDHVWKPATPTKISIDGFENIFFTSVAINTHRGWVHIDLEPSKEFYKLLARGFKPTSHAKIKPDRRNRRVIFHLSLEKEVEIYRPENIVKPVDVNERIVYGDHVINKESDTDIDRGYRWKKLAEDLQKRYSFPRYPAWRRRRGILNSIRSYHRKSRNILEDWARKTSLEIVRFAMRLGYAVAREDLGGLIESPRKLPKDHGKKLIIMGYKRIGKWIDWQVEKRGVQIAIVKPNGISSKCSKCDSKGLEETGYRRLGYPRCRFEGDRDVIGKLNIRKRAQKILGISWGSLVTLSTPQMIDANPNRWGNV

SEQ ID NO: 24376 - protein, 348 aa, unknown
  TnpB Polypeptide
MKITVCGGIIGLTNFKRNILDFEYNGFQKWMIFGIDEGIYSSYKAAKGWKFKKIRYKEHPIPLWSQLTKIEHNPSNTIAPYWLRFKTKLKRGGIWIGIKTKQSIPENSKLCDSFLLKNSKGNYEVRLLFEIPDVPVKESKNMLAVDFGEKRIATIVSSKDKKPVFLGREVRGIRRHYSYLRKKLGNKKLIDKVKFLGNKEKNTVNGILHKISNSIIAKSIEDKACIVLGNLKGIRNNSKGRRFNRIVSNMPYFKLTQMIMYKAQMRGIKVIKINERGTSRLCHRCNHIGIRNKQSVFQCLNCKTSFDADWNACINILNRSEELVSSDGAMAFSPKTVPLETVSTFNNL

SEQ ID NO: 24377 - protein, 450 aa, Scytonema sp.
VLKKKKEFKIVMKSAKCKLERNGFDLIETKRAFNEVVHFYFALINTYPEGINLPREEDGGWRYYEKLTVGDDAQYPFPFNGFPAQLRRCAIRKAIGAWESWNTSYQKWLNRPKKQKHHRPPVQPRVFNFSPSFDVGVCKNDDGHSIMLKILVNGQWKWIKFQYFAPVISADWVKGSPSVIVKGNAVTIVFPLEKYVRATGGIKTVMAQDSFRVLGVDMDLDRHIAICSVLEVDAKGKVFEVARHFIKQTSHTKRRKFQLGGIAQKMQQTGTVEKGFASTIWKNLHNREVEASREYARRIVEFAKTWGCSIIAFEHLGNLKPIRGKYSRRSNQKRAYWLKSKIYQQVSSIAYQDYRILTTRVNPKDTSRLDPWGNEVWRSDNFPVTIFDFLNYQSGAIFVGTVNGYTSHSGLNAARNIGLKAILRYNTNLVFLSRKEGHTVHTGESLSQKG

SEQ ID NO: 24378 - protein, 356 aa, unknown
  TnpB Polypeptide
MVVTIPVKLVVSNELDEKLSLLASEQSKCANYFVEVIKDKQSTSLKDLSGEPYFEAKRLFKLGSNLIQFAGYRAVTMMKVNHKTAKHSSKFNKVFLSLREIKIDGFKVGLIFSDGSKRTWVEYLYKEPVSGTTKESILKKINGEWLCYLRIDRTEPKPKNYKRFMGVDLGIAKTAVTCDWNGKHTRFFNGEPYRFKKNHFMELRKGVEPKLKQGNVYKFLKRISKHEANWVTNENHKISREIVNMAIKNKRSIALEKLTGITERLKVHKKSRKMLKGWSFRQLADFIEYKAKLAGITVVYVDPRGTSKTCPKCQYCSRNNRRTQSVFKCRKCNYESNADRVGAINIAIRGNTVLSA

SEQ ID NO: 24379 - protein, 388 aa, unknown
  TnpB Polypeptide
MMVKAVRVMLEPNNVQQTKMFQYAGSARFAYNWALAKEKDNYEKGGKFISDSELRKEFTRLRNSDEYAWLQNVSNNVTKQAIKDACIAYKNFFKSLQKYPKFKSKKKSTPKFYQDNIKIQFSDTHVKFEGFSSSRKANKQKLNWVRLAEHGRIPTDAKYMNPRISFDGLNWWISVCVEFPDCKKNLNNDGIGIDLGIKDLAICSDGTTYKNINKSQVVKKLEKCRRRLQRRVSRKYEKNKKGVSYCKTKNVIKNEKLLFKLNHRLTNIRKNYLNQTTSEIVNRKPRFICIEDLNVSGMMKNRHLSKAVQNQEFFEFRKQLEYKCNNNGIQLIVADRFYPSSKLCSCCGNIKKDLKLSDRIYKCECGNVIDRDFQASLNLKAYGKKFAS

SEQ ID NO: 24380 - protein, 485 aa, Moorea sp.
MPKKLGTTKKISTQVVPVVGMTKSVEQELFQVMKKLGIVRAESYNKLGSVSHWGMDWKKAIPEIKSFRTPETLGLPAKLMDWTINDVAKAITASQAACSDAVIKKLYKKFPGKENEKKRKDQSKQLKSLSFLESPLLHRLVRKEFKRGHSWVDNQIVYQQVGYKCKRLDRNTYQLELAGLTSRKRNKIIVKSNRKLKGQIRLIYNYLSQQFEIHFLVDHGRVESVPRPREIGVDKGYTEAFYDSEGKAHGKGLGVLLTKKSERICAKNRKRGKLWALHRNLEKLDPAKSARILKNNLNRKTENKRYRQNQSEILAVLGAASKSLLNGESLKVFAEDLTQPILNKRQSKALSRKLNNWMKGAMRDSLQKWANWTGSVVKEVQPSYTSQIDSRNGTLLGKRTGDNFTGFDGVVLQADCNAANNILARGTDKDISRFSSRTEVQAVLLRRTARFLKGMGLSLLDAVELGWLDSKHTKTQAFKQLLIEM

SEQ ID NO: 24381 - protein, 219 aa, unknown
  TnpB Polypeptide
VSIQTEFEHEIPTHKGGEIGIDMGVARFATLSSGEFFEPLNAFKTDKGKLAKLQKQLKNKMKFGRNWQKLKGKISKLHHKIANCRKDFLHKISTQISKNHAMIFVEDLQVQNMSASAKGTAEEQGKNVKQKSGLNRAILDQSWFEFRRQLDYKTQWLGGFLVAVPPQNTSRTCPCCGYTAKANREAQAHFECVECGYIENADVVGAINVLARGRVVVQA

SEQ ID NO: 24382 - protein, 95 aa, Clostridioides sp.
  misc_feature (93)..(93): Xaa can be any naturally occurring amino acid
VKKAYKFRLYPNKKQQELINKTFGCCRFVYNKYLAKRIDVYKNNKETFTYKQCSSDLTNLKKELKWLKEPDKFSLQNALKDLDNAYKKFFKEXYW

SEQ ID NO: 24383 - protein, 409 aa, Symploca sp.
METMRLVEKHVVRKCCREGKEIDDLAFKSKNLYNRANYEIRQHFFKTNQILDYNFMTSRLKREESYCALPRKVSQQVLRCLDRNWKAWKEANKAYDKNPVKFLGKPKLPKYKDKEKGRNLLVYTRQAISLKELKKGWIKPSGTNLMISCSKQDIKEVRIVPRLDYYMVEVVYEQPIQQLVSGEAVAGVDIGLNNLAAVTSNQKGFKPFLINGRPVKALNNYYNKKKAKLQSQLKGNSQTSKRIQRLSTKRGFKIDDYLHKSSRFIINQLVENNISTLVIGKNENWKQGINIGKVNNQNFTSVPHARFIQMLTYKAELVGIKVIITEESYTSVASFLDGDLIPVYGSHEELGVKFSGRRVKRGLYQSNIGIKFNADINGSYNIIRKVVPDAFGNGIEGVVVHPVKITLAN

SEQ ID NO: 24384 - protein, 416 aa, unknown
  TnpB Polypeptide
MYLTVKQQIKHLSKEDYKSIKKLCHVAKNLTNEAIYNIRQYYFTEGAFLKYEKNYILLKSSPNYKALNSNMAQQILKEVDGSFKSFFSLLKLAKQGKYAFQDCKLPHYLPKDGYTTLIIGFVRLNGNKLILPFSNSFKKTHKPVEIVMPPILLDKEVKEIRIIPKANARFFEIQYIYKAECIQRNLNKNRALALDFGINNLVTAVSNDGSSFIIDGRRLKSINQWFNKKNAHLQSIKDKQGFGKKTTNKQKAIARDRNNKVNDYMNKTARKVIDYCIINDIGTLIVGYNETFQKSSNIGKRNNQNFVNIPYGKLRAKLEYLCELNGITFVKQEESYTSKASFWDMDTIPVYNSDNPEEYQFSGNRIHRGLYKMANGKTFNADVNGALNIMRKSSVVDMNILYGRGEVDTPVRIRVA

SEQ ID NO: 24385 - protein, 392 aa, unknown
  TnpB Polypeptide
MAELSITLKLPFYRLNQSKAIEFERLTAINTQVANNLLQVDKKERLKLTSAAFKHIEIGSMWINQTIRNTNALTKARHFKRMWLEVNNQGYEVLKSGDLYTLSFSLYRGRKGRIPIHVHSASHHEVLDKLVARVAKLGSLKLCKSKAGIWYALISVSMEVPDASEVKGWIGVDRGQNNIAVAALPKGFGKFWKGGRVKSLRRQFQRTRKKLQEAKQLKEVKRLEQHEKRIMTQINHVISKKLVQFASDFEMGLRFEDLSGIRQTSKQRKQTKSDAGNNRDSWAFYQLEQFTRYKAIREGVPVESVPAPYTSKSDHRNGVIGKRNGDWFRGFDRYRCNADWNASQNIGQWLGFSCPLSLQSAVAAMVMADTEGEVNDSPLTSEASNRADLSPD

SEQ ID NO: 24386 - protein, 505 aa, unknown
  TnpB Polypeptide
MFLVTRHVTSRNLTAAKHARLAEMAKLCGKARAEAWRRYGALAGLGRTNRDIRDEDWLAGPKLGEQTGLPARIWKATLEDVLNAIKAKRAAAADAVIRIVWRSQRSKDEKKRLSRMLRDDTWPQDRLLHRLMRRHWRHGVSDITNQIVLDVQGHGSFELRGQHWLAVSSLIPRRRIAIPLGGFERQIDGAIRIQVRTDGEVDILYVVDEKSACVSRPCGTAEVGLDKGYSEVFTDSDGQRHGEGLGALLSAESDHLRTVWAARRKLSALADRLEAEAVVITDHSQRKRKLTKAARIRRHNLGRQKLAERKRRHRQTVRSLVFSACHSVLDKAGSVVIEDLRHPIRGYDRGRNTNRRLSGWVKGLIQEGVEAASRRRGASVDEVSAAYTSQVLPGCRAFGRRSGDALHCPLGKGVFEADHVAAINTLQRKGDTEINRYLPYRKVRQVLEERSRQSPPPCLANGQCAVPSSCLRLPRRDPSCCRSANADTTVNGERIIRPRTFEYVG

SEQ ID NO: 24387 - protein, 402 aa, Selenomonas sp.
MRRLLKAFKTEIVPTEEQKGKIVCSIGVARFLYNQYIACNRRLYKMYQCGLLDAGQKHFVTANEFDKHVNHKLKKELPWINLCGSKARKKALVNAEQAFKRFFAGTSGFPNFKKKTNQDVKLYFPRNNKGDWKIWRHKLMIPTLKQVRLKEYGYLPIGMAAVSGTVSYAAGRFYVSVVVDIDEKSRYNNDLESCYARQTEGIGIDLGVKNLAILSDGRVFKNINKGSKVKRLEKRLRREQRRLSRKYEFRKKKGGKTAAASANIEKQKLKVQKLHQRIARIREDYENKVIHEIVKQKPRFITMEDLNVKGMMKNRHLSKAVAAQRFNHLLAKLKRKAEIIGIEFREVDRFYPSSKTCHACGHIHKGLKLKDRVYVCPECGYTADRDYNASLNLRDAKEYRVA

SEQ ID NO: 24388 - protein, 424 aa, Caldilineaceae sp.
VIKAHRIALIPNDRQASLMAEHAGWARVASNWSIDRFAEAWFTGEGEDNEWLSDMDLRRQFNAVKRDLFPWSRKLSQNVAKNAIIHTGKGLEVWGAYKRALKKGKRPRRVGFPKHRKRGKHMSFTPTNGRNTIRVDGDRVRIPAIGWVRMREPLRFAGDILSATVSLEADRWFIAFQVDTGEPEPPKRPGPTVGIDMGIQVLAMLWDGDKRTKILNPRPLQEALAELRRIDKAISRSIKVHGKHRTSHRREALYAQRRRQHARVSHLRNDHHHRTTTAIAKRGGMVKVETLHIAGMQRNRRLGRALSDAGLGEFVRMLEYKCAWYGTAFEKVDRWYPSSKTCSACGTVKQSLLLSERTYRCLQCGFACDRDENAARNIQAFDTAARSAVADAETRKSSQPNGLPGRRSVNQTAPAPPVHNARLG

SEQ ID NO: 24389 - protein, 403 aa, unknown
  TnpB Polypeptide
MKTGYSIRTWRMRLFCSEKQMIEATEDLYREAVNFYYELLKDREDLWEENLLAIQGQLEKLTVPGKDGRVPKYIPPGGKLPVYFRRSAMNKAAMAVKTAAGAESFPEKIDANITFFKGMYRDLTDTSVVLKLWNGKKWIWTECSLTGRPFPKEAAILSPTLVHEEKWLMFHVPVKQENSDARTAKERMKEGTRLCSVRFTNTDSFAVCTVLDEQSIPLAMKNCSGGKSYRHHCRELLKKIETSKTYTDKDNVTQPNRKYYMHLKHLNEHYAHQASKEIIEFCKKNQAGIIVLPEYEENFSRISMYRSGNYSPLHLSIRIRNYLKYKAWAEGILVLELRADGTEKYCSICGSPGKKQGSLFICRNGHQVNRFLNAARNLGTKCQESFRRNQKTSGNNSGNTAID

SEQ ID NO: 24390 - protein, 405 aa, unknown
  TnpB Polypeptide
MIVYEGKLKGKEYQYGRLDEAIRTGIFIRNACLRYWEDGHGRCRNDFSKYCTTLGKSKEFPWAGKLNSQARQAMSERAYAAISRFFDNCKKKVKGKKGYPKYKKNRPNHGSVEYKTSGWKLSENRDSITFTDGFKAGTFKLYGTRDLNYYQLTQIKRVRVVRRADGYYAQFCIDRDRTEDREPTGNTVGLDVGLNHFYTDSNGQTVDNPRFLRKSEKQLKRLHKRVSKKFKKGKPQSNNYKKAKQKLAKKHLKVSRQRKDFAVKTALCVVRSNDLVAYEDLQVRNMVKNHHLAKSISDAAWSEFRHWLEYFGKVFGVATVAVKPHYTSQNCSNCGCVVKKALSTRTHKCKCGFVLDRDWNAAINILKEALRTVGHTGTFQEYWINASGQLALLSIDENQYSKVIG

SEQ ID NO: 24391 - protein, 778 aa, unknown
  TnpB Polypeptide
  misc_feature (531)..(765): Xaa can be any naturally occurring amino acid
MARLGLNSTINSERAISVSMSKHCWTLKDRYESQFSASFHPILLSDTKRAEIIHRAEEIRAVRNDISEVFFSDMLGFQDMRKFDAFNFFNPTFSTRLSGHYLKKAIEDVWKAYQLRFDAIRKKIEFTKVEEIVPSFYKINVKGHKKGDLKSVEVHTKKTELTKVLTWLARYGKDETIYWLESMIPTAVESKQKFYHTILEKIRKFGFDRLMRLALSRRTAVFSEYENRGKITFDSLTFSGRSRITRPIVDARRNETGKFDYFIEISWDWFDQGYRGDNKNTLCMPFKYNKAYHRSLNRYCNGTDTSYTMVVRGKDIHVVLARDGYRYKNTDEITEENTIGIDVNSKHNMFALSTGEFIPNDDSLIADLETELLKIDRKQKNYNTKFNEGEEHDAFKISKKDKKRIEAITAKLNESNKRTIADLCKQFAELGIKHIAMENLDGFKGSSLHADDSNGFNLGRLHLRTGLSSLKDEFIHIAPHYGLLVSLVQPEYTSKMCGECGCIDDRNRQTQEEFCCVECHHAENADIHSAXXXXXXXXXXXXXXXXXXXXXXXXXXXXXXXXXXXXXXXXXXXXXXXXXXXXXXXXXXXXXXXXXXXXXXXXXXXXXXXXXXXXXXXXXXXXXXXXXXXXXXXXXXXXXXXXXXXXXXXXXXXXXXXXXXXXXXXXXXXXXXXXXXXXXXXXXXXXXXXXXXXXXXXXXXXXXXXXXXXXXXXXXXXXXXXXXXXXXXXXXXXXXXXXXXXXXXXXXXXXXXXXXXXXXXXXXXXSANRHHVPWSIVP

SEQ ID NO: 24392 - protein, 440 aa, Calothrix sp.
MTFRLYPNTQIEKTLRYHRKLQKDLYNAAVNNRFTQYQKFNHSVSYFEQQNCLPAFKEVWTEYKEINSQALQATLKRVDFAFERWFKGLGKRPRYKSIRHYSGWTYPAKSGYFVESNGENGYLNLSKIGRIQMRGQSKYWGTPTTCTIVYRNGKWYASITVDVLDQVLKPEVLPVGAIGIDLGCNAALSITDGENHQQIEAPKFLRNAEQKIKQASQQKRRKRAPNRNKRIKASRRYKKAQSKVSKITRKVANQRQNWVHQVAVEIVSCNSLIATEKLEVKKMTSIAQKGKRKKQKAGLNKSILDVGFGMLRSTIKYKVEQIGGVFVEVPTKKVKPSQTCPKCGHQHKKTLDIRVHDCQSCGYRQDRDIAAAEVMLYWAKGSLPESGTGFVVAESPSSTSCTRSSAGGMKQLGAKKRQKLNSTGVNVETHPDNVVGVSSS

SEQ ID NO: 24393 - protein, 141 aa, unknown
  TnpB Polypeptide
MKNILIIVGSLRKNGFNYNLAKEIQDKIVNEITRAKLKYITIEDLKVSNMIKNKHLSKAIQEQNFYSIRTKLINKCKERNIELRLVDTFYPSSKTCSCCGSVKKDLKLNDRIYKCCNCGLEIDRDYNASINLEKAKVYKIN

SEQ ID NO: 24394 - protein, 287 aa, Streptosporangium sp.
MKLVVRVKLLPTPEQAAALEATLRAVNDAATWVSTLAHDQRVFRDYDLRKHAYGQIKDRYGLAAQAAQHVIKKVTDAYATLHANLRNGNVGKPGSARRERVQAKPIVFRPSAAQPFDDRCLSWQMDARTVSIWTTWGRMKSVAFTASADQLKTLAAYRKGESDLVYRDGMWFLIATCDLPDVPVTDPDGFLGVDLGIADIATTDDGTHHSGKGLNAVRHRDRELRRRLQRKNTKSAKRLLKKRRRKEARFAADTNHTIAKRIVTEATRTGQGIALEVHVQGDGVRVI

SEQ ID NO: 24395 - protein, 274 aa, Streptosporangium sp.
MPRSRSTTGACRGGSTRARYRSATTAGRLRNVAFTGSAEQLTTLALYRKGESDLVCRDGTWFLIATCEVPDRPVAVPDGFLGVDLGIANIATTSDGAHHSGKGLNAVRHRHRELRRRLQAKATKSAKRLLKKRRRAEARFAADANHTIAKRIVTEAERTGRGIALEDLQGIRERVRLRKPQRVTLHSWSFRRLGSFIAYKAARAGVAVVHVDPAYTSQECSVCGHVDKKNRPGQATFICTSCGFAEHADVNAARNIAARGVADWAVSHAADDAA

SEQ ID NO: 24396 - protein, 367 aa, unknown
  TnpB Polypeptide
MLQAYKYRIYPDDKQEELIQKTFGCCRFVYNTVLDYRQKLYKEQNKGMSKIDCNNYVNRVLKKEYEWLKEPDKNALTNAVYNMDSAYQKFFKEHTGFPRFKSKRNNYKSYKTNWTNNNIEVGDGEVKLPKLKWVKASTHRIFKGKIKSATISQLPNNKYYCSVLVETEIDKLPQNNSAIGIDLGVKDLVITSNGKKFDNIKTTKKYEKKLAKEQRKLAHKQKGSNNWNKQRVKIARIHEKIANIRKDNLHKISHKLINENQVVVSENLKVSEMVKDRKLAKSIIDCGWYELTRQLEYKAKWYGRTYMKVDRYFPSSQLCSYCGHQVLEIKKLSIREWTCPVCGKKHDRDINAAINIREEGLRMLNTA

SEQ ID NO: 24397 - protein, 374 aa, Thermoactinospora sp.
MLSVPQTVKRAYKYRFYPTPEQARLLARTFGCVRLVWNKALAERNRRYKDEGVSTSYVDTAKWLTAWKQDPDLEFLREVSNVPLQQALRQQQVAFNNFFAKRARYPRFKSKHRSRASATFQNNAFSFRDGVLRLAKMDAPLDIRWSRPLPEGAQPSTVTVSRDAAGRWFVSILVEEKIAPLPPVDRSVGVDAGITALVTLSTGEKISNPRHERADRRKLAKAQRALARKQQGSANRAKARRKVARIYARIADRRRDFLHKVTTRLVRENQTLCIENLTARNMVRNHFLARAVSDAAWYEMRSMLTYKAAWYGRALVVVDRWFPSSKLCSAHGCGHIHEPIPLNVRSWTCPACGTVHDRDVNAARNILAAGLAER

SEQ ID NO: 24398 - protein, 285 aa, Richelia sp.
MGVKIKGNKIYLPKLGWMRFYNSRSIPDGFTIKACTVRKRQNGWYVSIRIEDKSIPDYLTKPLADVVKIIGCDLGITKLVHLSDGHQIKNPKFATTKKAKRTLKIRQRRVSRKVKGSNNRKKAAKKVGLFHQKVSDKRQAYQWKIAREIVSRNIDAIALENLNVSGMMRRCRVKIDEKTGRFLENGQSRKKSLNRSISDAGWSELTLKIEYLAAKQGKVIIKVNPKHSSTECRNCGHIDKSNRDGEKFICAECGYREHADIAAAKTIGHRALKWYAGTPRNQGFF

SEQ ID NO: 24399 - protein, 495 aa, unknown
  TnpB Polypeptide
VRLAVWAALGQASRRGSGAGRCRVSESVTCHQAYRFGLDATATQQRDLARHAGAARFAYNWGLALVKAALAQREAEQSYGVPDGRLTPVPWNLYELRRRWNQAKHQVAPWWRNNSKESYSGGLDALARALKNFSDSRAGRRTGKKVGFPRFKSRHRSRPVCRFTTGVIRIEADRRHVTLPRLGTIKLHESARKLARRIEAGTGRILSATVSCDARGRWQVAFGCQVTRVAGRPGHVGRVGVVVGVDAGVQSMAVLSTPMPGLTDGKVANPRRLAAALKRLRREQRRATRQHGPYDPATATRRPPSRRWTKTRHRIGRLHGRARDARADGWHKLTTTLAQRFDTVVVEDLHVAGMLARPTPKPHPTGGFARNGRAAKRGLARSLADAAPAQLRRHLTYKTAWYGSHLHLANRYYPSSKTCSACATVKPKLSLSQRMFTCNTCGLTLDRDVNAARNLAQLVAGHGTGSAPETAAGNGWNAREDQIRPTPHPRHGQGH

SEQ ID NO: 24400 - protein, 558 aa, Richelia sp.
MYTSNCKVIEEVGQVPRKTTPSFVTEIPLIVNSVDNRELEARFHAGQQLLNAVLGEAMIRMELVRNSKFYLQAKQLKGDNNKAQRKKLFEEARKLHRFSDYELQSFAALTAKKSKWIEDKLDAQVIQKLGTRAFKAVEKVLFGKAKRIRFKAFDRFKSVEGKTNKQGLRWTLRQTKRAETIGKKSDYSNKIKCSEYVFSWVGLELKPMIDWFDPIVAHGLNSPIKYCRLVWRRLNGKKRWFLQLINEGLPYQKPKNYITEGLVGLDLNISNIAFVADNKAGLLPFADKVPTFEKEIKGTQRRMQRTQRMHNPDNYEPDFEKKVGNKTVVKKGKVRKGKKVWNNSKNYLKLRRKKADLERRKASYAKSQNRGLVNELLRHGNNFKTENVSVKGWHRRYGKAISAKSPGFFQSELTRKAESAGGQLVKFSTKKTALSQTHLDGSRIKKSLSQRIHEDVTGIRMHRDIFSAYLSRFVHDDLLLIEDAATQYPATEPLLVEGWEEYRKAAIKVGESEIRNSHVSLERLSTEGLSTNKLVGSATSQIVNKDDKLEVMPEPASL

SEQ ID NO: 24401 - protein, 465 aa, Acidimicrobiaceae sp.
  misc_feature (200)..(201): Xaa can be any naturally occurring amino acid
VLVSTVVVQPHTEQPRRSLRLRSRLMPRRYSPSEGQVIQAFTFALDPTPEQSAQIARFFGARRKAFNWTLATITADIEHYRETGESATPPSFYSLRKRWNAEKDTVCVNDETGEVWWPEVSKEVFADGVRGASGAYWRWQKSRSGTISGRRVGFPRFKKRGRDRDRCSFTTGTMRLEADRRHLTLPVLGTLRTHENTRRXXVSRQGERVVAALRVSVARPQQANIAQPDSVVGVDVGVRRLATVATVSEVIDELANPRALEHRLSELRRLQRQRARRTRGSRQYRESAAKITRLHAEVAHLRHHTIHVFTTDLAKTHGVVVVEGLDAASLLQQKGLAGARSRRRGLSDAALGEIRRQLRYKCPWYGSRLVETDRFFPSSKTCHNCDHVQIIGWSEHWICDGCSSSHQRDDNAAINLARWASLGSVGAPVKRGAEHQTESHSAAGDDTRKGSPALVGPNNSVRSAA

SEQ ID NO: 24402 - protein, 441 aa, unknown
  TnpB Polypeptide
MFICCHNGIKVALLMLLYIKEERKMFGCQQNLINPDKEVKAILEFLCSESKKLTNCGIYYSRQLFFKTGKIPSRADLHKELGTRNLNPHYQAFYSDTAQQILTTVAESFKSYFGLLKAVKAGKVTQKPKLPKYRKDGMALVTYTGRSVKLENGLLRFPLGSKVKAWFGIDAFYLPMPSNLDYQSIREYRILPRNGCFYLELVYKTELIQADVNPSNALMIDHGMNNWLTCVSNVGTSFIVDGKHLKSINQGYNKRVASLMEGKANGYWSNRLARITENRNRTMRDAINKAARKVVRHCLDNKIGTIVFGWNVGQKDGANMGSKTNQKFVQIPTGRLKERIKQLCEQYGIQFVETEESYTSKASFIDRDFLPTFGEKPEGWKESGKRVKRGLYRTAQGYLINADCNGAANMGRKNVAVMLGLNLSGISRGDLSAPLRLKLWS

SEQ ID NO: 24403 - protein, 725 aa, unknown
  TnpB Polypeptide
MADDVHNRKEAFLARKKLNSEQRFLCIRTRLSSVSRSPEMSTLLNTATIELSRASTAAMRILQIHVLDMTQQGLPVSITQTMVKRCIDIVGGVEAMGTKEPKLSAIAGSHWKAHLGPDYKTPNIMLLGANAKQYIAKEFLTNIKNHVALNFAHRHKQYVTSIVGRWCDEDKNTTPTDRRRAIRTVQCASLVKTHDLRIIREQVIKKRNQFDGCDKAKEKASGNQTTTAGRKRKRSEVDKEEDIVKEEVTVKEEVTVKEEENTGKKAKVKKKDKIPTWLECHEDDLVAFASRVRKDIGIEKFSGKSIGSHFEEYFRFFWIVQKRQEWEQGQEKPLRGFRAMSLIPVKAMTATNVTMDNEVLKYVHTQHMKNTVSQTMKDAPVEDLWEHYFNMKAIRRTGWKMDTGIVTDGVGCTVRLKRPLQENEQQGTKANDDHIFRWRQVDALDSKKVIAIDPGRRDLFSACTVKLNGANRVESRHLDNNNNNNNNNNNTHCSNKEYRNMAGFRASERRHKRMLAKNPDIAAFYKDIPSMKTTDLNQCKKNLEYFAANHAKATAMVLSRDHRNRHFNLRRAAQRTIDLLCNRILGTSDWNKYKDIVVAFGSGSFSSVSKGHGPGPTKTIKRALARRCQVIHADEYNSSKLCSSCGSKLTDTPLPQHARAFIQPKLSWGLRRCGNNECESLYWNRDVNAARNIGWRFLCEQKGLEVPKGLKRTREDLLYEDPPGG

SEQ ID NO: 24404 - protein, 453 aa, Nitriliruptoraceae sp.
MARRSARTKPIRSHTGTELPRARAFRFELHVTDDLEPVLWQNCGAARFAFNECLKWFERMLADARAQLDAGVDEPQVEDLWSSFAFINRFNAWKNGQLPDSPVGEDGSRGLAWKGEVASQDVFECAANDLGVAVKNWRDSRTGKRKGKKAGFPRPKKKFKSTPAFRLRNRNQPDKVTQAIRPDGNRYVRVPGLGALRVKGSAKQLRRAMEAGRFHPYSATIKYTHGRWWLVIAGQAAEFHPGRRSRKPRTAGRHGMDVGVAKLAVVADSDGEVTHNFPATKSLDRALRRLRRANKDLARATRDSKEWHRRKRRLQRIHGQVRFARQDALHKLTNQLAGELEHLTVEDLHAAGMMRSKLARQLGDAALGELLRQLEYKAGWYGLELVVSDRWYASSKTCSRCGVKNGQFDREPVFWCADTTCGHRQDRDENAAVNLARWTPQKDKETLPLTVAA

SEQ ID NO: 24405 - protein, 239 aa, Euryarchaeota sp.
LDTNEDSLDGVHASGDSAGLLRVSFDGVRRIQEIHFRRRRKIARKKAHDRRVARRLLDREGRRERHRVRQRLHRVSKGLVRFATEARAAIVLEELTLHGAGGRSRRMNRRLSSWPRREIHRQIEYKAALEGVPVIKVNPAWTSKTCPVCGARRRDRVGKVFVRLLCDWEMDRQINAGLNILKTALASNEALARAVRFQPGALRRDVVSPLYDLSALPTGAREEPSGVESQTGVIPSPEP

SEQ ID NO: 24406 - protein, 398 aa, unknown
  TnpB Polypeptide
MRNVAFKFRIYPNKEQVQLIGKACGCHRFIYNWGLGIKQKAYQEGKKINVIQITMLLPELKEKLPWLKEANSQSHQATLRDLDIAFTRFFKRLADYPKFKSKHKSKASFHIPQHFKIEKDALILPKLGKIKAVLHREVLGKPKSITISISRCGNFFASILAEQDIKDPELKSINPETTIGLDVGIKTFVVSSNGETFDNPKCLRKATSKVRYLSQQHSKKEKGGKNREGARLRLARQHEKVSNQRKDFLHKVSNQIADENQISTICVEDLNIKGMLKNHKLARAISDCSWAEFFRMLEYKCKWRGIRIVQIGRFEPSSKLCPCGFKNDLLTLEDRSWKCPRCGTTHDRDLLAANNIRRFGLAKLASPVKSKGGRRCRLKLGELPIRKLGVMNQEAPPL

SEQ ID NO: 24407 - protein, 437 aa, Hydrococcus sp.
MNVRITRRVTYRLYPTRDQEKRLHYWRKLHCALYNAAVYNRKTQYQKFGQSVSYLEQQNSLPAFKKVWIEYKPLGSHALQATLKRVDFAFNRFFKGLGGYPKFKASRHYSGWTYPCSAGWKAHTTGNNGYLELSNLGNIAMRGKARTWGTPTTCTIVLRGDKWYASLTVNCAPVRETGKGAVGIDLGCNNAITLSTGEQISKPDFVKTGQQKVKIASKKLRRKRSPNRNKKIKASRRWKKQRKFVSKLQRQVARSREDWLHKITSSIVSSNSLVAGEQLNVKGMTAMAKKRVRNSEVPSECKTHSRQGSKRKAQKTGLNRSILDVGFGMIGQMLEYKLAEAGGFYVESPTRQLKPTQRCASCWELTPKTLADRVHICSSCGHTENRDVNAAQVNLIWARGQELSSTVVESPSSTSCGSMRQLGALRRQKQQSAKTEG

SEQ ID NO: 24408 - protein, 474 aa, unknown
  TnpB Polypeptide
MSQRKKTRKEVNFLILTTSLKLELNLSDELLHRAEMEKYITCVNSLVSLHLSGVLIQKFSSKDVVAELPAAVKNQAIRDAKSVLRRYAKKQRKVERKRAWFAEQGKTPKHPIRDAKVPILRRPVLFVNNQNFKIDLDAKTISFPLFRDGETAPRKTKRNSVQKEIHVATVTHRQREILTTTSHLATLRIVRRGDKFFAQVGYKVEEPETDDLDALLADPKTIVMGVDLGIKCPAVSYSTDGKIRFYGNGRENRYKRRKCYAKRKKLQKAKKFRAIKRISDKEARFMRDRDHQVSRAIVNEAIRQGAKVIALEDLDGIRDGCTQSTKSTPTRKSRKNVDKPKVDSVAESAKNVTDASTPTREPVQINLFSETEALTKKQRRKKRKLSKKQVAARRKNNRSLNSWSFYRLAKFIEYKAALAGILVIPVDPYKTSQRCPSCGKEHKAKDRRYECECGFHAHRDLVGAINIAKNALKR

SEQ ID NO: 24409 - protein, 417 aa, unknown
  TnpB Polypeptide
MAIKRYRYRAYPTRGQARMLASTFGSCRVVFNDFIIERDRLYRAGLHKEVPFSETAKLVTTLAKQTPERAWLAEVSAVPLQQAVNDAARAYRNFFDSLNGKRKGRRVGLPSRKKRSHRQAARFTANAQFKVLDTTGSKWGKVRLPKIGNLRFARSRDLPSDPTSVTVILEPDGTYWVSFVVDEPTREAAPAVKVAALDLGLGDLAALISINPATGEASREKIANPRYLRAAQRKLARQQRALSRKKEGSANRAKARIAVARTHRKVRDLRADHHHKLARRLVIDHDVLALETLSLSGMGRTRLAKSVYDAGLGNLIRLLTEKAESQGRTVLRTGQWEPTTQTCSVCGTPGGKKPLSTREWTCGGCGTRLDRDYNAAVNILVAAGLAETLNACGPGVRRMLACAVGDEAGTHRSEAAA

SEQ ID NO: 24410 - protein, 377 aa, unknown
  TnpB Polypeptide
MDIKRAYRFRFYPTPEQEVILAQTFGCARFAYNHMLRLRTDAWYNEQKRVGYHETSAALTLLKKQPEFAWLNEVSSVPVQQALRHLQTAFANFFAKRTAYPTFKRKDGKQSAEYTSSAFKWDGQTLKLAKMAEPLNIRWSRTLPKAAKLTTVTVSKNTAGRYFVSLLCDDAVAAKPEAAGQVGIDLGLTHFAVLSTGEKIAAPNTFRQHEACLAKLQRRLAKKTKGSKNRAKAKLKVAKAHATIADCRKDFLHKLSTRLINENQVIAVETLAVKNMVKNRSLSKSISDAGWAEFVRQLQYKAAWSGRQLIGIDRWYPSSKRCNGCGHTVTKLPLNIRTWVCPECKTTHDRDINAARNILAAGLAVSAHGETISPVSL

SEQ ID NO: 24411 - protein, 450 aa, Actinobacteria sp.
VTTAILELTSTSTATVTQAYAYAYAYAFDPTPEQVNLLRSHIGGSRFAYNALLGLVKTNWDENRVRKDAGDEVPKEEYLGTGHFDLLYLWAKHRDELAPWWGENGSSTHNDATQRLSRAFTNWKKGTAKFPTFKKRQPGGSVRFTNTAVRLTDSHHVRVSRVGELKTYESTRKLYRHLERGSGRIMAATITERKGAWTIAFSVQVQRVIPATRPPERIIGIDVGLSTLYTGATPDGNHVLDVKNPHHLVTAEKRLAHAQRVASRRQGPRKGVAPSNRWKLAHVRVQKVHAGVANSRRNLIHETTTLLAKNYDLIVVEDLNVKGMMKNHSLARHISDASWGEFTRQLEYKTKWYGSSLVKAGRFYPSSKTCSQCQTVKAKLSLELRTYHCESCGLTLDRDLNAAINLARQGLAGTNTVTGRGGEVRPSQQTLAGEAHPDEASTETPPEVGA

SEQ ID NO: 24412 - protein, 420 aa, unknown
  TnpB Polypeptide
MRYNYRYRLKPTDELHERLAWTVDTCRQVYNHFLHRLNRVDGTSAYSEQKLLPDLKREWTDLQDVHSKVLQKVVQRLYDNLSTLKGRKDNGYRVGELRWKAPQEYRSIKYSQTGFKLNNTSGRPVLSLSKIGDVPMVYHREVPDDATIKEVVIKQEPTGEWFAVLGIETENDASPKPENPEKCIGIDVGILKYAHDSDGTAVEGPDLTDERERLEREQRKLSRKEHGSANYRTQQRIVARRHADLKRKRRDFLHKLSNYYTREYDLVAVEDPRREGVDGTPLEQPQPRRSGVGNVPSDARIQVRPRRHALRGRRSGWNDQRVFQLWRCCDRQAAVGTRTLVSLMRIRVGPRPQRRLQHPFSRTHRSRGGSPRFNACGDCAPYGNRFGSCKARLRNRKPRPQRGRQAEQGGVVHDWPPGNR

SEQ ID NO: 24413 - protein, 289 aa, unknown
  TnpB Polypeptide
LELYYVDVSETFRAFQPVTIDNSRLAHPLADETAALDIGANNIVACTVSTGDQYLYEGRDLFKRFRETTQRIAELQSKLREGRYSSKQINSLYRRRTRRRDHAMDALARDLIGRLYDEGVSTVYVGDLTDVLETHWSVRTNTKLHNFWAFRRFIKRLSCTGEEYGITVEVRTEAWTSQTCPNCGSTEDTTRHQDTLTCTCGFEGHADLSASETFLRRHETDVARPMARPVCPQVGTVTNGWSHHALPVPTRSTRTRKLPPWTRHSRDSQREETPAFTPGRMSYTRRPTG

SEQ ID NO: 24414 - protein, 536 aa, Nocardia sp.
MIADPVVVSGPSGVAVRDRLKHLTEQDSEVLRLVGQHLGHLASGDLKARCADGFAHDNQRWAARKREITAESSSRWAGSITKATHDQWALARRAHLAHLQNLERGVETLRARLALPVGEPGRGGVPGGYRSQREWFAKSRRLALLDARLAVVRADYAAGRVRVVRGGRKLLNTRHHLAEAGLTEQQWRTRWEAARWFLTADGESGKKYGNETIRITPDGQISLKLPAPLADLANAAHGRYVFSARVGFAHRDGEWRERVAAHQAVAYRIHYDTGRDRWYVTASWQHPTAREVGLDTVRADGVVAVDFNADHFAGYQLDRHGNPVGDPRRFDFDLAGPASRRDAQLRHALNGVLLWAKQVGVSAVAVEDLNFDAEKTREKHGRRKGFRRLLSGLPTGVVRARLVSMAARAGLVVVAVDPAYTSRWGHQHWRTPLSSTKRVLTRHDAAAVAIGRRALGHRIRRRTTPPRTHQSDGYGHRTVQAGSEVPEREETRRPATDRAPDARRRAGTGTRGTSVSNTVRDTRRNRTRASMLTPAH

SEQ ID NO: 24415 - protein, 367 aa, Oligella sp.
VKTLKLRIRDKHAKALDELSRSVNFVWNYVNDLSYTHLQRTGKFFSAYDLSEYTKGSGEFLNLHSQTIQAVNETYAKSRKQFRTAKLAWRTNHPKAKRKSLGWIPFKKSAIKHVASRQMGFKSLKSTLQLSLGKGNQLMIDLWDSYNLSLYSINTLEIVQDSRGRWYACITVKDFPKKTCGTGKIGIDLGLSSAAVASNGDTLEMKQTQKWAKPLAIAQRARNKKRVKAIHAKIKNTRQHMIHQFTTKLVKENALIVVGDVASNQFNSKKSTLAKSVYDAAWFEIKRQLTYKCEHAGCRFEVVSERYTTQTCSCCGSRDSSPKGRAGLRIREWTCAQCGTRHDRGINASRNILAVGLGRLEAGIPSL

SEQ ID NO: 24416 - protein, 365 aa, unknown
  TnpB Polypeptide
MNKTYKYRIYPNQSQITLINKTFGCCRFIYNKMLEDKIAYYQETKQVLKNTPAQYKQEFEWMKEVDSLALANEQMHLQTAYNNFFKNPKTRFPKFKSKKFDKKSYTTNNVNNSIRIISQNHIQLPKLGVVKFVEHRRIPKDYTIKSATISQAVSGKYYISILTEYEYEIPEINLDTSKSIGLDYSSHDFYVDNQNRSPENFQHLYRQSESKLAKEQKKLSHMKLHSANYKKQKIRVARIHEKIQNQRKEFIEKESTKLASLYDIVCIEDLNLQNIAQSLNLGKSTNDNGFGMFRTRLQQKLEIQGKKLIKIDKWFPSSKMCRFCGCINSDLKLSDRVWTCSCGQTLNRDENAAINILNQGLLLLQ

SEQ ID NO: 24417 - protein, 400 aa, unknown
  TnpB Polypeptide
MRQAFVYRLYPSRAQERTMESILVTTRLFYNGLLAERKQAWEERRESVTKVQQLRRVKERKAVNPYAASVHSHILQVVADDLDRAFQAFFRRVRAGDNPGYPRFRGMNRWTGFGLKELGNGFKIEGRRLKVSGVGRLPVRWHRPIEGDIKTVWISKKAGKWYAAFSCVVPDPVPLPATGKQVGIDVGLTHLLTTSAGDRVENPRWYRAEQAKLRVIQRRISRRTKGGRNRRKAVAQVQRQHERIGHRRKDYLNKLVTDLVRSHDLIAIEDLRITHMTRNRHLSKSILDAGWGYLAHHLTRKAACAGRHLRLVDPAYTSKTCSGCSERFTQEITLSVRWVTCEACGLSLDRDHNAAINILGRAQTVCAQPLHQQPTGTPPLGANVAGLSACVAQEAAAIYR

SEQ ID NO: 24418 - protein, 583 aa, unknown
  TnpB Polypeptide
METEEKQKGKRPDRLKQLNLNKSTDEKVMKCSLQGILIEKKLYSEVQEWVYTISKVTNKASLLFNRIILHCLNNKLPLPNLSDQTFFMHCFNVGVGRLNKSSPYVKEIWDACFSQFPKINKCRGDTPAYAYAVKTFMTNFKNSIIYTFDGRQKAYIYKWCSMNNVDTKYFYAIRSAINGWGCKTEPPKETLEFINQQKSLLGRVELDGGITLTWLGTHINEILNYYHFILKYMEQYDDTRKFTLTPITRIKCHHITIDTTVLYNMMVNLELIDSKKCKIDNFLSIRDTQFQSVFNLKNIPNKGTFSYNIETDGVSCSIHFKVPKNEEKPISNKVLKKNDRVIAIDPGRSNLVYGVEKLENNKYRTYKLTRGEYYTNAGIKTANRKSAKWEKDIHNEELIYRQHSLKTTSETEWDKFIADYISVYDTIWNTKLQKKWGRERFRVYCLKRKTLDIFFSSMNGDVKPIIAYGAAKFNPNSKHELSAPTTYVSKCCMKHYSTIFVDEYNTTKICSCCDKALHPVMKDRKQIRGLRWCSSTNCRTFLNRDMNAAKNILRAFIGNNNRPQSLSRNSDIVKVKLKSLILY

SEQ ID NO: 24419 - protein, 422 aa, unknown
  TnpB Polypeptide
MYEERNRKIKESWKATRERRSHMDCRAISVKVQENRLSKAKLEKIKRCFLEAKWLYNAVIATETLTLENISTVQIKVQDTFEEREIKCLSAQMRQSVVDSAKANVFNLSKAKKKGLKVGKLKFKKECNEINLKQFGQTYAIKGKNKIRVQNIGVLVINGLEQINLDEVEFANAKLIQKPSGFYINITVYSNKQQEVLTEKEVIGLDMGIKDQLTFSNGVKVNFYLEESEQLKGLMRKLSRQTKGSNQYKQTLSRIKRIFEHQNNKKNDVVNKLNSVLKSNYIVCFQDELLNSWKRKKSKHKFSFGRKVQHGILGRVKDKLKQNQSNHMLESSVPTTQTCPVCGCLTKHSLDKRVYHCNHCGFENADRDVHSANMMVLLSGYGTYRSLNTDTVSIEKMVSLLDNLSNLGVVVSTTSSMQAYHL

SEQ ID NO: 24420 - protein, 405 aa, unknown
  TnpB Polypeptide
MYGRNFVSLQVDFGETHQLKNCLKLRDMISCKYKLYRTKKTKHLDKMLREAGYVWNHALALQKRYYKLYHKYIKLNDMQKHQAKRIKRNLLCAQTVQEILERLDIAYKRFFKHDAKRPPKFKKAIDFSSIVYKQNGYSLKDNSLTISSIKKSFKFSLSRPYDGKVKRVSVKRNNLGEYFIILCLDKQAEPYGKSHDGASVGIDFGLKKYMTLSDGREINNPQFFKADLQELRRRSRNLSKCKKGSNNRKRKKLELERLYRNIVNKRSDFQWKLAHELCKRYDLICLEDLNLEGMTRRWGRKMSDLAHGDFVVKLEYVAKKYCVKVHKIDRFFPSSRLCTCGYKNDKLSLGDRIWTCPSCGVVHPRDLFAAENILRQGIAELGSGSKSPKHSQGRSHVNNPTIPCK

SEQ ID NO: 24421 - protein, 381 aa, Gemmataceae sp.
MQLMRKTFKYRLFPTRAQETILDAQLDECRWLYNHFLEERKTAYEATKTAPSLYDQQKTIPGLKATRPTLGDVHSQVLQNVAVRIDLAFKAFFRRTKAGEVPGYPRFRGKFHYDSMTFPQCPSGCSVDGDQLVLSKVGTIRIVLHRPLEGTPKTCTVRRSSTGKWYVNFSCEVPDPTPLPTSALQVGIDVGLTTFATLSTGPTGEPIDNPRFFRTDEKELAKVQRKFAKTAKGTAERRKRRKPVARVHERIKFRRDNFANQTSRRIVNRFGFIAVEDLEVNRMVHNHSLAKSISDASWSLFFALLIFKAANAGRSLVKVNPAYTSQTCHGCGHRQKMPLAGRIYRCECCKGECGRDHNASLNILALGLQGIGGNSVEAAAL

SEQ ID NO: 24422 - protein, 269 aa, unknown
  TnpB Polypeptide
MLLSKKTSIKVSQEYANVIGHMCYAASKLWNVCNYERQHYKEMGMEKYPDWYYQKKSHREDLWYKQLPSQTAQEVCKLLDKAWKSFYALKRSGGIENPRPPRFKQESIPITYMQMGIVHEWDTEKVRLSLPKALKRYMEETYQIHENFLYLENKIFRGMDQIKQLRIYPPEKGECKVIVVYEISEREELSQNGHYLSVDLGLHNLMTCYDSGNGNTFILGRRYLALERYFHKEIARVQAQWYGQQSVKGIKHPVTSKHIRRYIRKSRTR

SEQ ID NO: 24423 - protein, 369 aa, Beggiatoa sp.
MILAHKIELKPNNKQRTYFAKASGTARFAYNWALAEWQAQYQAHQENPALPKPTQGALRKQLNAIKRDEFPWMLEVTKNAPQMAIIQLGNAFKRFFKGEAGYPQFKKKGVHDSFSISNDQFSLNESLNQIRIPNLGWVRLRESLRFNGKILSATVSRQASKWFVSISVELDDVVHKRKAENQGVVGVDLGISSLATLSTGEVVTGSKPLKKLLVKLKRLSRSLSRKQKASSNWRKAKAKLAKLHARMSNIRKDSLHKLTCDLTQRFSIIGIEDLNVKGMMSNGKLARHIADMGFYEFKRQLEYKAQMRGNLIVIANRWYPSSKTCSSCGAIKQDLMLKDRIFQCQCGHTQDRDLNAAMNLAKYAVSYTV

SEQ ID NO: 24424 - protein, 497 aa, unknown
  TnpB Polypeptide
VSALNITSSYQVRIVNCSVNLNETVCIYRKALAYLIGVVNENWNAVKRIDTGNLEQQRYIDKLVHSTKNHEAKYPDFDKLFYKYPSYLRRATITVAIGAVSSYRSNLANWEVSDKKDKQPTLQVDRKALPIFFRDDMFLVDGAPEKVKVIKNPKPKDELTAEEKKIEKAKRKAVELQNSQNELTALSNHYTVRLKVFYKNDWVWATVTLRKTDIAYLRKYWMHACASAPILEKHFGKYSLRFAFDENVKLSDTPIDKQRVCAVDLGLNTDAVCSIMTADGTILTRSFINFPSDKDHLYHVLNRIKKFQRLHGSREAHNFWAYAKRVNDELSKKIAAAVVEFAVLYSADVIVFEHLDFKGKKASSKKQKIQMWRKNGIQHIAEHKAHRCGIRISHICAWGTSKLAYDGSGKVKRAPDNHSLATFASSKQYNADLNACYNIGARYFIREVTKPMSKKAWSQCKAKVPDIERRTQCTLHSLRQLHDFLNTPKEIQPEVTA

SEQ ID NO: 24425 - protein, 203 aa, unknown
  TnpB Polypeptide
MHKDLAMASRQTKGCNGKFVPTEEYYDVTQRRNNIMNDFMLQTGKHFIIWCVENRIDTIVIGDNPFWKQEVHIGKVNTQKFVQIPFDHMKNILSYQAERHGIRILRQEESYTSKASFPDCDDIPTYGKNDRNVKFTGNRIHRGLYKTKNSTYLNADINGSANIMRKCIPNAFEGKTLNWDDIRVIRHPMYDAMICNRSKQKNK

SEQ ID NO: 24426 - protein, 221 aa, Streptomyces sp.
LGVQLRYNYRAYPDATQRRALASAFGCARVVWNDCLRDRKQAHAAGLPYVKSADLSRLRITQAKRTEERAWLADVSAVVLQQSLRDLDTAYKNFFDSILGKRQGRKAGPPRYKSKKDIRQSIRLNTNAFSLKENGTVYVAKVGNLKVKWSRRLPAAPTSLTVTKDSSGRYFLSFVVDTEPDTLPEVDAEAGIDLGLSAFAVLSNGRKIDSPRFLRRAVSAV

SEQ ID NO: 24427 - protein, 371 aa, unknown
  TnpB Polypeptide
MLTYKAYKYRIYPNHEQQIQINKTIGCCRFVFNHYLAKRKETYEANKITLNYNACSADLTQLKKELIWLKEAESTALQSSLKDLDDAYSRFFKKQNDFPKFKSKRTASHSYTTKKTKGNIEIVGNQIKLPKIGLVKFAKSKEVEGRILSVIIRRNPSGRYFVSVLVEKEINYLPVSNSHIGIDVGTTYFAITSEGEFHDNPRFLRKNEKQLAKFQQSLSRKQEKAKKDIRKLADSKNYQKNKLKVAKLHEHITNCRNDFLQKLTTKLIRENQTISIEDLQVSNMIKNHKLAKSIADASWAKFRTMLEYKAEWYGRIIIVVDPKYTSQTCNSCGHISKENRKTQADFACIHCDHTDNADVNAAKNINSKKIT

SEQ ID NO: 24428 - protein, 449 aa, Streptomyces sp.
VGISGLGRGRKRIHGPEPCDGDMPLCDAVTWGCVRIMTAPSFRGVGTSPVKRAFKYRFYPNDAQAAELSRTFGCVRKVYNLALAVRSRAWETGRERVGYQQTSALLTAWKQTEGLAFLAEVSSVPLQQTLRHLQAAFVNFWQGRAKHPRFKTKRDSRASAEYTRSAFRYAEGRLTLAKMAEPLDIVWSRPLPAGTTPSTVTVSRDPAGRWFVSLLCEDFPSAMPPATNAIGLDVGLTALVTLSTGEKIRNPRHERRERERLARAQRALSRKERGSKNREKSRMRVARIHARIADRRRDHLHKLTTRLVRENQTLVIEDLAVRDMLGNRRLARALGDAGWREFRRMLEYKVGWYGRRLIVVDRWFPSTRLCSACGALAGTVPLDIRTWTCVACGTTHDRDENAAINLLAAGLAVTACGAGVRPQRESSSRPGRSVVKQETPPVRVGTPSR

SEQ ID NO: 24429 - protein, 436 aa, unknown
  TnpB Polypeptide
MKRTNVVKLVVDKNIHEKLKELATVTAKCWNEVNWLRMQQFKKGERIDFIKTEKEVYEKYRHVLKVNAQQVARKNAEDWRSFFSLIKEKKEGKLPKWFKPRPPGYWRDKSGKYKLIIIIRNDRYEVDEENRVIYLKDFKLALRFKGKLKWHGKQGRLEVIYDEARRSWYAHIPVEVGNVVRGKGNLRASVDLGIVNLTTVYVEDGTWYIFKGGGVLSRYEYYGKRISEIQKVLARHGQRRSRKLKLLYDKRRRFLKHALNSMVRKIMEELREKSVGEVVIGYPKEINKNRGNKLTVNFWNYSYIVRRFEEIGEELGIKITKVDESYTSRTCSLCGEAHEGGRVKRGLFKCPRIGKVINADLNGAVNILHIPESLGSVSRGQLTVRDRGNGLKTQPVVYRWTSGAGWARAAPTSYEAMRVKAVNHKPMTRPKGTPAL

SEQ ID NO: 24430 - protein, 370 aa, unknown
  TnpB Polypeptide
MEYSYKFRIYPNTEQQTLIQKTFGCSRFVYNHFLAQRIAEYNATGKAPTRFQQDKMLTSLKKELLWLKEVDSTALQSSLQTLDSAYQNFFRRVKNGEKPGYPKFKSKKNHRKSYKSKCVGTNIKVVGKCVQLPKLGLVKCRVSKEVRGRILSATISQNPSGKYFVALCCADVDIEPLPSTGAVVGLDMGLKSFAITSDGVEYKNHRYLRKSQKKLARLQRQLSRKSKGSNRREKARVKVARLHEKVTNQRNDTLHKLSTSLVRDYDLISVEDLASKNMVRNHKLARSISDASWGEFRRQLEYKAAWYGKRVVTVDRFYPSSQLCSCCGAQWPGTKDLDVREWTCPVCGTVHDRDHNAAVNILNEGLRLLA

SEQ ID NO: 24431 - protein, 373 aa, unknown
  TnpB Polypeptide
VRDVEFSYKFRLYPTKAQKEQMTKNFGCCRYVFNHFLAQRQDQYKENGKAPTRFQQDKSLTELKRELPWLKEADSTSLQASLQDLDMAYQNFFRRVKHGGKPGYPRFKSKRQHRRSYKSKCVSTNIKVLDGAVQLPKLGEVKCRVSRKVEGRVLSATVSQEPSGKYFVSLCCTDVDVKHLSKTGAAVGIDLGIKDLAITSDGAKYDNLHSYKRNLKKLARLQRQLSRKSKGSRSREKARIKIAQLYGHIANQRNDAIHKMTTQLVRSNDIICVEDLSSKNMMRNHKLALHISDAAWGEIRRQLTYKADWYGKELVIIDRFFPSSQTCGCCGCRNKEVKNFGVRFWTCPQCGAFHDRDVNAAKNILNEGLRLLA

SEQ ID NO: 24432 - protein, 411 aa, Actinomadura sp.
MALRKSAVKQAGCASVVQVRLLPTPADAERLATAVTICNTAATYASRIAWERRVFGQLALHRLIYRHLRDHFVGLGAQAAVRAIARVADAYTNRRATKKRAHIFRAHAAVPYDARMITFNRDARIASLWTPTGRVRAAYTGRDQDLKAIAELPIGECDLIERKGTWLLQIAVALPRPETADPFNGFLGVDQGTANLAVTCDGEVLPGKALPGTIENNGHIRALRDRRHRQRKRLQAKGTSSARRRLRVLSGRESRMMADINHQISKRVVREAERTGRGVAMEKLSGILGRVRAHRSQRRTLHGWAFAQQIAFTRYKAERVGIAFILVDAAYTSQTCPNSDCGHVSRRNRHARGMFRCQACGLAGHADHIAAINVAYRGADGWGAVNRPHATGLPSSRRAPESKPRASARGR

SEQ ID NO: 24433 - protein, 422 aa, unknown
  TnpB Polypeptide
MPKKSNKEVLFGIQRQQLKHLTASEYRALRELCVLTKNMYNVALYNVRQYYFTEKKFLGYNSNYHLCKDNENYKILNSNSAQQIMKVVDRNFKSFFALIQMAIKGEYHYKDIKLPKYLPKDGFFNLIFGEFNTSNDKFAVPMSPAFKRLYGKVEINIPSNLKGKAIKEIRILPKNNARFFEIQWIYEIQELKENLDKNNTLAIDLGIDNLCTCTANNGKAFIIDGKKLKSINQWANKENARLQSIKDKQGIKGTTKAQRKLWNKRNNRVNDYLSKTVKIIIDYCLNNNIGTIVVGYNPTIQREVDLGKANNQNFVNIPIGNIREKLTYQCQRYNITLIEQEESYTSKADFLAIDSIPTYNAFDKKTYNFSGKRISRGQYKSATRIILNADINGSLNIMRKANIKNINLIHKEYLNPVRIKIA

SEQ ID NO: 24434 - protein, 413 aa, unknown
  TnpB Polypeptide
MVQRAYRYRFYPTSEQASVLSRTFGCARLVYNRALDVRTAAWQAERRRLTYPQTSAMLTSWKRTEELAFLNEVAAVPLQQSLRHLQGAFVAFWEGRARHPRFKTKRRHYDAAEYTRSGFRFQHGQLTLVKLRGPLNIRWSRPLPEGSQPSTVTVSRDPAGRWYVSLRVVDSTVRPLPPVQTHVGIDAGLSSLMTLSTGERITNPRYESQDRARLARAQRVLSRRRKGSNNRAKARLRVARIYARISDRRRDHLHKLTTRLVRENQTIVIEDLHVRGMLGNHSLARAIGDAAWSELRRMLQYKCAWYGRDLVVVNRWLPSSKSCSTCGHLTDQLALSVRNWPCQRCGSWHDRDVNAAKNILAAGRAVAACGVGVRPQRESSRTGRPAVKQEAQRATAGLSTLKGGEDVKRRMLS

SEQ ID NO: 24435 - protein, 378 aa, Thermoprotei sp.
MPAGGEGELTLTVRMRVSPEPEGQRALLDLMRRYRDALNYSIRRLIASGALSLTKAHRLLYKDLKERYGLPSRIAQDCYREAIAITKSWLKNPKRGSISVVKSLSMWLTHEQGYRVKGDHVELAGGHRLRIIGWDRRYDGFPNREAKLVFRDGRFDLYVTKQVPRPAKHAPKGVLAVDVNERQVVVSNSHAEVRIETPIERALRYRRLAERLQEKYSLSRYRAWLRRSGVRRRVRYFRRKARNIIEDWAKKASHMIISLAKQGQLAVAREDLTGLVESLKRLPKDHRTALIALGYRRLAFWVDWQAEKGGVPILIVDPTDTSSACPRCGAGLVVVGHRRLRCPKCGLEADRDTIAVLNIEGRALNQMGELWPPRLPPR

SEQ ID NO: 24436 - protein, 419 aa, Streptomyces sp.
MQQRGHKVRLSLTPAQLVAVDEQGYAARAMWNLLHSWWTMLPKGERTLAAADAAIRQGRKDLPWLAALPAQASQAVLKTYFQAWKNCWDGRADAPNFKARFRSRMAIDIPQGRDLQIVRLNRRWGRMWVPRIGHVLFRWTRDLPVGKRAGKDNRVTGARLVKDADGWHVVFRVQHDVPEPGEHTGPSVGIDRGITKPLALSDGTFREHRPWLTPGETKRLRRLEQASARKRHARKKNEPASKRLRRTYDQIGRLRAKAKRRAVDWQHKTTTSIAETFSRIGVEDLHIPSMVKSAKGTVESPGRNVRQKAGLNRAIAGEAWGRTVTLLEYKAAQRGGIVVRVPAPHTSRRCSACGFITPGSRETQARFVCKNPGCGFEENADTNASRNIDHAAGLAVSGRGAGADGQAEKRQPPTKPHAA

SEQ ID NO: 24437 - protein, 384 aa, unknown
  TnpB Polypeptide
VNIVPAKRLNRAIKYRAYPTDEQAELFAKTFGCVRLVWNNMLADAQRFFNETGVFFITTPAKYKKEFPFLKEVDSLALANCQLNLKGAYHKALSEPNVGFPNFKSKKKAKCSYTTNNQLTTKKDGSKSQTLYVGQNYVHLPKVGDVRICKHRSPKNGWHIKSATIERTKSGKYFITVLFEFEEVIVPVEVKTSIGLDYSSHDFYVDSNGDAANYPRFYRRAEAKLTREQRKLSHMRCGSKNYEKQKYKVQLLHEKVANQRRNFCQELSTAIAKRCDAVFVEDINLRGMAGSLKLGKSTNDNGFGLFRNMLEYKLRDSGKVFIKIDKWFPSSKMCHVCGTLNEKLALSVREWTCSCCGTHHNRDHNAAINIRNTGLQMMQQAVTA

SEQ ID NO: 24438 - protein, 737 aa, Streptosporangium sp.
LRRVGLSGLVVTGIGGKRSMAVLMATASCTAYRAALESSGEVVGERTLVRRVGWLAALAQTMTTQILTERWTGAALSDLASGTSSDGRALPAKGWMAVRRLSWGCAAPAGVYVPERVRRIAEEEAARALRLALHRRTVLAAVCATWPADPARHSEAEWRALRAALPAGVSTAQIRNRTRQVRAHLTAHGSLPIDVTGLEEVPVVAAQVLLAAADKQLVTLTRATAVPADAGASGGPGTDKGGGPAAGDGHDGPQTAVLRVKLPLVAAPVSRADWAWHVIVFTVPPHVPTHAAWCAPTLRVAAHRLRVDLPFTVPLPVVSAVGHRVGLGLDWGVNTLLTGTVARLTHPTDDGLTGKPGSGRTTGPAGGRVVSDGRMLRYDATAISAKLHRLRAHRERLAAKRDHYAALLPGMCAPHFQWADLQHHHARAAAEHERVCARIRRLNHALAWSAARWAVDQAIATGAGVIYLEDLATLQARGRRRGNARLSGQVRGLVVAAIRHLAAKASIAVVTVPARGTSKYCPRCGTGTSVLQHVAAPDRPKRAGWKWARCSCGLSADRDWAAAERIVARGLLGQSHTRTDRATGHRTITVVVEGNVARARRPRAEARRVRRANRTGRDSFVRPDRPGPTLGKGRSTPKRPGRPPRVAQGARVVRGEAGLAQASRRVPEWRTVPAPTTVGQRPAGHEPQSGHPLGSRSGRARDFQHRTGFHRARATPVIRLSAEYGPRAGTATPTQAV

SEQ ID NO: 24439 - protein, 317 aa, Actinobacteria sp.
VPVGYDAGRLYADAIVEVPVTVYPPGQGPDPDRTAGIDLGIIHPYAAAGPEGQGLLVSGRAIRAECRQHLRDRKGRSRAAAGRAPKPGERGSRRWRKHRRRERKTGARHARRVRQALHEAAKEVISWAVANRIGTLAVGDPRGVLHLKAGRRHSQRTRDWRIGHLIRALSDKAEAAGITVHLADERGTSSTCPQCARRVPKPAGRNFTCPHCGLAGHRDLVAAASIAARGPGSGIIPAVPHGPGITHRRAGAHLPGVHPARRDPRRRPPSRPAPRRHLAGTGPPPTPPHSGTREVARGNARNTQARDNTSRTYELVH

SEQ ID NO: 24440 - protein, 435 aa, unknown
  TnpB Polypeptide
MKIMSTYKVKIKETAEYFQNTAVIYRQAVDFLIDVVLQEWHKVVDISLALQQRQIIEHEIHLTKSYLNPHYNFDAKFPKFPSYLRRTAITEAIGKVSSYKGNYANWQLSKQGKPPGKPKAGYVYPAMYRDNCFVRTGTYTARIKVFTRNTWDWADVALKKTDVDYILRHCSSRRECVPTLQKRGKNWYLDFAFEEKVTLQTVPVDQQRIIGVDLGLNSACVCSAMQADGTIIGKKFLKLPRETDHLRHWLNKIKKAQQHGARKMPRLWARAKGINEDIARKTAQFIVDVATLYNADVIVFEHLDMKGKKKGSKKQRLHHWKALAIQKIVTHKAHRDGVIIRRVCAWNTSALAFDGSGRVKRGKDNYSLCEFKNGKHYNCDLSASYNIAARYFVRELLKSLPAKLRLGIEAKVPQCTKRTTCTLSTLLSLNAELAA

SEQ ID NO: 24441 - protein, 371 aa, unknown
  TnpB Polypeptide
MLNYKYRLFPTKKQQTILNNTLEECRWLYNHFLEERRNSWEQKKKSLNYHTQAVSIVKLKQDRPSLSDVYSQVLQNVAVRIDLAFKAFFRRVKSGENPGYPRFRGKGRYDSFTYPQTGFEITDNGLKLSKIGTIKIKLYRQPQGTIKTCTIRRSATGKWYATFSCIVESKSILKSDKAVGLDVGITSFAILSDGRKIDNPRFFRKDEKNLAKVQGKMSKAEKGSPERKKRCKAVVKVHERISNRRDNFCHQEARKIVKQYGIICIENLSINQMVHNRCLNKSIHDAAWNKFTRYLTYKAENAGRVLVKVNPAYTSQTCSQCGHREVKKLSDRVHHCSCCGFVCDRDYNASLNILRLGLQSLGLSPRSPSIH

SEQ ID NO: 24442 - protein, 252 aa, unknown
  TnpB Polypeptide
MFSFIWRKHIRNFFRDPKVGFPRFKSKHHSKNSYTTNVVNGNILVEDKRIRLPKLKWISMKKHREPAENCCLKSVTVSMEPSGKYFASLLYEGYSCENQAADEDYSNAKILGIDYAMQGMAVFSEEIELEKAGFFRRNEKRLAREQRKLSRCVKESRNYVRQKKKVARCHEKIRNQRKDYLHKLSRRITDQYDIVAVEDIDMKAMGQCLHFGKSVQDNGYGMFRNMLDYKLAWKGKKLVKIDRFFPSSKKMQ

SEQ ID NO: 24443 - protein, 492 aa, unknown
  TnpB Polypeptide
MELYYAFSIIIVLAALFSYVNVRYVKLPMTIGIMVIAMMVSVGVRLFGGEIFSGLSHKLESLLQGFDFTEILMGAMLNFLLFAAKKKGKKDKNKEINLPQNYDVSLINASANLKELAKGIKESKNARLCLYGPAGTGKSEYAKFIAKSLNSKLIIKKASDLIDCYVGNTEKNIANAFKEAKDQNAVLVFDEIDSFLQDRTDAVRRWEITQVNEMLVQMESFDGVFIATTNLMDRLDRASIRRFDMKIEFGYMDGAQAAKLLQKECESLGIGADKAAKNSVAKIKFLTPGDFAAVARSAKFSPILGVGEFIDRLKLTKEYEKKLKREQRKLSRRCKLAKDSDKKLSDSKNYQKQKKKVAKIHNKIRNKRKDFINKLSTKIINNHDIICIEDLNIKGMLKNHKLAKSISDVSWSEFRRQLEYKANWYGRKIVKVPIFYPSSKTCSSCGNIKETLKLSERIYHCECCGLEIDRDYNASINILRKGLEILKEEKVS

SEQ ID NO: 24444 - protein, 475 aa, unknown
  TnpB Polypeptide
MPTKVYTIETRLPASINSELRIYLDDYVKEYNKCYRDMWHQMTASDFKTKYPKESNFVTDICNKYGYLKRTINAIRYDIKGRMKSYKELKKTELKQLETKIQTKQVKISQIIDKLDKLKPIVTNNKARENQLEKYRNLKKSLYYQKNKFNKMIQAKNKLVYQIKNNIYSVGFGGKHTFDNQNRLQENRYKTHKKWYNNYVKLRDKNIFYLGSSDETFGNQMFQMTYNSTFDDFIIKVRKENHWCKSTKEIDKYIVVEHIDFKYMKTYVKNIILSHYNKNDKDKLPLSYRFHRRKTHWYLQVMFSIKYDNYVTFSKYGTIGLDYNDGFIELSETDECGNLIYQEHIILKEHGTGNKAKSEIEQAISKIVCYALTKGKDIIIEDLNFKKKKSTISKSDKNKKYNKMLHLFDYSRYKEIMKNSCHRNRVYLNKINPYMTSQIGKQKYSNSKKLNIHQAASYVIARRGQGFKDKYKKIA

SEQ ID NO: 24445 - protein, 143 aa, Staphylococcus sp.
NYQKQKIKVARLYEKVMNQCEDFLNKMSTEMIKNHDMICIEDLNIKGMLRNHKLAKSISDVSWSNFVTKLEYKADWYGKEIVKIDKWFPSSQICSECGHNDGKKPLEIREWTCPICHTHHDRDINASINILNEGLRLHSMRRA

SEQ ID NO: 24446 - protein, 380 aa, Staphylococcus sp.
MERLKAYKFRIYPTEEQKIFFAKSFGCVRKVYNLMLDDRMKAYEETKNVSSKKMKFPTPAKYKNEFPFLKEVDSLALANAQLNLDKAYKNFFRDKSVGFPRFKSKKNPVQSYTTNNQNGTISLIDNKFIKVPKLKSSVKIKLHRQPKGIIKSATISRRSSGKYYVSLLCKEEVVEFPKTNSAIGIDLGITHFAIFSDGQKIDNNKFTSKMAQKLKREQRKLSRRALLAKKKGINLFEAKNYQKQKQKVARLHEKVMNQRTDFLNKLSTEIIKNHDIICIEDLNTKGMLRNHKLAKSISDVSWSSFVIKLQYKADWYGHEIVKIDKWFPSSQVCSDCGHNDGKKNLKIREWSCPICHAHHDRDINASINILTEGLRMQTLA

SEQ ID NO: 24447 - protein, 381 aa, Staphylococcus sp.
ILQHKSYKFRIYPNQEQEILIIKTIGCSRFVYNHFLSLWNQEYMTTGKGLSYNSCSAMLPHMKKSEEYSWLKEVDSIALQSSIKNLEESFKRFFKKQNMKPKFKSKKNPNQSYTTKNVSKGIQIIDNKIKLPKLRWVRFANSREVKGRILRATISKRPSGKFFVSVLVEEEINILPKTNSSVGIDLGINNFAILDNGVIYNNNKFTYKMEQKLKREQRKLSRRRLRAKQKGTKLLDAKNYQKQKIKVARLYEKVMNQREDFLNKMSTEIIKNHDMICIEDLNIKGMLRNHKLAKSISDVSWSNFVTKLEYKADWYGKEIIKIDKWFPSSQICSECGHNDGKKPLEIREWTCPICHTHHDRDINASINILNEGLRLHSMRLA

SEQ ID NO: 24448 - protein, 537 aa, Streptomyces sp.
MAASFVVPGPAGVAVRDRLKGLTAGDEEVLCAVSEHLGRLASKDLQTRCADAVDHDGDRWAARKRALTRHSSSRWAGSLTKYTHDQWALSRRCQLAHVQGLEAGIRMLRHRLSLPVGERGSKRGPGGYRSRREWHAKSRRLACLEARLEAARADWKAGRVRVVRGGKRLLDARHHLAEAQLTEWEWRQRWEAERWFLAADGESGKRYGNETIRVTPDGVVSIKLPTPLAHLANAPHGRYILAAPVRFRHRGEEWANRITADRAVAYRIHLDVTPGRWYLTASWQRPVVQTIPLEAARARGMVGVDTNADHFAAYQLDRHGNPVGDLHRFYFDLSGTAEHRDAQLRHAVTRLLHWAKRVGVSAIGIEDLDFTAEKTREKHGRRKQFRRLISGMPTGRLKARLVSMAAEQGLAIVAVDPAYTSRWGAQHWQKPLTSSKRKTTRHDAAAVAIGRRAQGHPIRRRTAPPRTHQSDECGHRTVQARPEVSGREGTRPRIPGPRTRSVGAGCGANAGDQNAQHRSGRSAEHGFRQQDSFPLSL

SEQ ID NO: 24449 - protein, 419 aa, Streptomyces sp.
VIVKLTVQVRLLPTPVQAAALEATLHACNEAATWAGEVAFEKGVKRNFALREHTYGEIRARWGLGAQAAQHVIKKTCDAYATLKAGLRAGNLGRPGSKRYRKATEKPIVFRPEGAQPYDDRMLSWQITERRISIWTVSGRVKAVAFTAAPEQLATVELYRKGESDLVCRDGMWFLLATCEVPEAPLNTDPHDFLGVDLGIVNIATTSDGEIMAGRELNRTRLRERKLRTKLQKKNTPSARRRLKKRRRKEARRAKDINHKIAKRVVAEAERTGRGIALEDLTGIRERVRLRKPQRATHSSWSFAQLGQFIAYKARRAGVPVVHVDPAYTSRTCAECGHIDKANRVSQAWFACRNCGFVDHADRNGSRNIRARARQLWRCGAPSTAPVPPLKPRDGTGRKHHVTASDARCASPGLQFRCS

SEQ ID NO: 24450 - protein, 651 aa, Streptomyces sp.
VSRKLPLADGETCRTACARALIRSGVDEKTGEVLTCAALAERVGWCADLVAGMTGALLDGHWNTSDVDTLAGGQDPGGRKLPSNAWMALRRLGWTVSCEVKVNDRIVRMAQEQAGRALRSVKWRADLVAGVLAVWPEDPNKRTGEEWDAVRAAIPGGEHLPSSVIRSRTRQITSFERNHGRRPVDVFELEPTPRVARMLLLAACDGQQAAIERSATEPTKALLRLQLPTRPSPQTYRDWTWVECSITLPPTVPANAVIHLPTLRIAGGKVRADLAYTHPVPKIQRTGHTVALGVDWGLNTLLSTGAARLHDEGQITDLGAGAQFRAAGVLAKQYRLRRISERLHARTDHYDRLADPSLDSRAATLAEEIRRVSARRSNLNDALAWSAARWAVDQAVAAGATVIYLEDLRSMEAGGMGRTQNTRLSQTVRGQIADHMRHLAAEVGIAVVTVPPRNTSKHCPACLTSLRHRKAPDRPTVPGWKWAICPGCGWQGDRDQGAWRRIAARGLAHQTKTVVDRTSGAMVIRAVVDAMEARSVIAATPKTHRTDRSKTGPTRPRTNRLTPGRREVPSPTRPLGRAGQRPEGHAPTDRTRLPRAAHRHQSVTTISTPTTSRHRPRGAALGAGFHLHAHASPPRWAEPAPDLTVRMGSLS

SEQ ID NO: 24451 - protein, 338 aa, Streptomyces sp.
VTLPRLGTIRVHEPTAKLLGPLRAGRARILSATVRHERGRWFVSFQIETAREIRRVTRPDVAVGIDLGVKTLAVLADSTGEIRTIANPRHLDTALRHLRRASHIASRRRGPDRRTGQKPSKRWEKANTRRNKVHHRVANLRTDALHKLTTAVTAEFGTVVVEDLNVAGMLRNRHLARRIADAGFGEIRRQLTYKTLRNGCRVVAADRWFPSSKTCSGCGAVKAKLPLHVRTYECDACGLVIDRDDNAARNLAALAATTAPTGTGVAADQDTAKVSKPRGADHKTRTTRPRRTTGTGRAGGATCRTSGRQKRETVLKPKPPGFGDVTNHPGRNARIAET

SEQ ID NO: 24452 - protein, 469 aa, unknown
  TnpB Polypeptide
MPTSHHAPAAGAHLHHNARPPRCGLRVPSDTAWPALTFGWRVTWTEQNCGMKANMGRYYRLYPAARQAERLTGWGHTSRAVWNVALAQRQFAWTQRKVTLRAVGQNRQLTEARAELPWLADLPAQSGQQMLRNLDAAYDNWWNPQHPAGPPRFKKRGTHLSVQFPGQSVAVRVLNPRWGQVRLPKIGWIRFRLSRPVGGEVRNATVSHDAFGWHVSFGVAAAERPAAANGLPGCGVDFGVACSAFVSDESAPRHMTSTLSAGERRRLLSLERRKARQLRWAKRHNAGRYSKRLHRNISEIAKLRARQARRRADFTHKFTTDVAKRHGWVAIENLRVVAMTASAAGSVEVPGHNIRQKAALNRAILDNAPGERRRQLAYKTRRFGSELRLVAPAGTSQTCAACGHRDPASRPGCGRVFACTACGYQAHADANAARNIEALAAGQAVNRTRSHPRVARPSSRMREPLGSVV

SEQ ID NO: 24453 - protein, 504 aa, unknown
  TnpB Polypeptide
MHTIQLLLKTTAYDRQVLEKRFHVVSHVHNVMVKHAKKCLVSLNHDSEYLSAKSEYCSLLKKNRFSADEKALKKQLSAAMNTQIRKHGLSEYNFQSYIKVCAKQFRKCLSSQQIQKETTRVWIGVEDVLYGDGKDIHFKKYRDFTTICGKTNTNGAKFNKDTMTVGWLGLELKCRIPKDSLYITEALDSDISYCEIKRMMFPNGWHYYAVVYLKGDAPHKLSEIGGMDNITGVDIGTSTVATVSDHMVTLKELAPECKKYNKCIEHLLRHLDLSRRASNPGKYNPDGTINKSNRDRWIYTKTYLRNLNRLRSLYRQKAAYIKQCHEQMINGLLSDSVNFIVENMTFKGMQRRTKTTERQDKTTDIVQKDGSIKQVHKFKKKKRFGRSLNDRAPASFVSILDRKATLYGGGVYKVQTKDFKASQYDHVEDNYKKAELKDRSKYVGGYKVQRDLYSAYLLKNSNTKFDKPDREKCIYGFENFLKMQNNLICEMKKNNITRKQCFGF

SEQ ID NO: 24454 - protein, 284 aa, Actinomadura sp.
MIKSRTVKLVVQVKLLPTPEQAAALADTLHQVNTAANHVAAVAFEEFGLRCRELPLRRSCYGDLKAAGLGAQAAQHVIKRVVDAYTTLRGTLRNGRLGGPASKRRRKAESKPIAFRPDAAHTFDDRNLSWQLDAGTVSIWTVAGRCKNLRFTCSPDQAKMLAAHRKGESDLVHRDGKWFLIATCDVPEPDVYEPGDWVGVDRGVVNLATTSDGDNHQGRRLSRYRRRQARKRAELQAKRTRSAARLLKKRARREARHARHVNHKIAKQSSPSRHAPDAASHSKT

SEQ ID NO: 24455 - protein, 334 aa, Tolypothrix sp.
TFNLSSAFVNFFEGRTKFPNFKSKHGKQSIQYPQNVKLMPENSVIKFPGNLGIMKTVFHKKLPDAKFTTVTISRNADGKYYASILFNQNDNPVVAIREAIGVDLGLKNFAITSEGSKYDLPKKQLAKLEKNRKRKQKKLAKKTDKASNKRCKAKRLVAKVSSKIARVREDFLHKLSHKIAYENQVICVEDLAVKNMVKNPNLTKSISDQGWGMFQTMLKYKAEKFGHTYQEIGRFFPSSQLCSETLLPIPMLQKGYDSLGVRFVDCPHCQKQHDRDINAAINIRNEGLRLLELGTSSSALGGDVRPKSSGRKKSTKVEAIPNELGSLHCTARSV

SEQ ID NO: 24456 - protein, 464 aa, Tolypothrix sp.
LLTNYVYKLRPNITQSSTMSNWVDMLRSHYNWCLNDRLTQYAQQFIQGDYCNIRTKALACPITCFVSKNGATGEPWKNSGDKNPRRSAGMIQDAALPTLKKARPWYADIDSTVLQQNVKRLDVAYKNFFDGRGFPKFKNRSNFTSFTYVIGVKVQGNKIYLPKLGWMRFFNSRPIPDGFKIKAATIRKRQDGWYVSLRIEDRAVPDYIVKPFTEVNNIIGCDLGITKLVHLSDGYQIENPKFATNKKTKVTLKIRQRRVNRKAKGSKNRKKAATNVGKFHKKIADKRDCYQWYVANKIVSRNVDAIAIEDLNVSAMKRRCKPKVDEESGRFLKNGQSRKKGLNRSIFDASWGELVLKIDYLAAKHGKVVLKVSPKYTSQKCQNCGHVDASNRDGEKFICTQCGHFDHADINAAKNIRDRAYSIVRVDCPELKRPKQCKELSARPRGNRVEPGNPSNRDIKSVMS

SEQ ID NO: 24457 - protein, 686 aa, unknown
  TnpB Polypeptide
LTFFLLELKKNHNTHKKNSSFFFILFLYIFHVCGNKRMEIGSSKSSEISSPELPVQSSQETKKKRTRPDVSARRQKRKVMQTSCITTKWSLLCKNEFLRDCLENIIVIWNKVALEAYQFANFHVLRCFNEEKPLPVLDQGFFMHCCNAITLQYETKILKDPSMEETKQLWIRNRQEAEITAVNIEGLSLLMTALPVEMCTASRNHLIVNFTSRLLRWLHLLWGLNRSEAWAFINEAFDAPQENRTSIQQGLVDFLQFRPSEFEIKRHFNHFLGLTFQFAKFMEERLEEAKDDHKAKRGVRTFSILPLKQSFVLSHIPLNNTTLYCIIQWMLKNRLNQRLRIGNQSWTANLSDAQFKATRNLFWHGLFNIRPFETSTRKFAYCITTNGYSASLHLECPKRKEDEDINSPFENSDEDDEDVQEKRGQSRAFYAHLNSICERFVGCDPGISNFYVGVDQDGQYVKASTQEYRDMSKMKQQIFWNDNLRRRFPQYDQVLRGMPSLHVTDPMEFLNRVRYILRHKDSLFSFCRQKGFRKWRFKTKRFSMKALVKLCKRVCDGMPKEKVCVGIGDWSRRDGVIKGHPTGPVKKWKRVMKTFANTLSIDEFRTSCRCNRCGHQCVNVKHKKRLEDGTFGWIKSHQVLRCENNECGTFWHRDFNSANNHYILLRCELQNQPRPVYLRRPNQGMI

SEQ ID NO: 24458 - protein, 366 aa, unknown
  TnpB Polypeptide
LYPNKEQEILINKTFGCVRFIYNKMLAERIEIYENYKDNKEELKKYKLPTPAKYKSEFEWLKEVDSLALANAQMNLQTAYNNFFRDKKVGFPKFKSKKKDKNSYTTNNVNNNIKIIDNKIKLPKAGLVSIKQHRQILNNQIIKSCTISKSPTGQYYISILVEFDQQVEQKQINKNNVLGLDYSQHELYVDSLDMTANYPKYYYKMLDKLKREQRKLSKCQKDSNNRNKQRLKVAKLHEKVANQRKDFLHKKSKQLADLFDAIIIENLNMQSMSQCLHLGKGVSDNGWGMFTVFLKYKLEDCGKQLIKIDKWFPSSKKCNECGEINHELQLSDREWICKSCGSIINRDYNATKNIRDEGIRMLGLVV

SEQ ID NO: 24459 - protein, 366 aa, Methanoculleus sp.
MRRTYRYRIYPTKSQVTLLDQTLEICRWVYNDTLALRKNAWEQEQRSISLYETNKILTQWKRDRPELKQVYAQTLQNVQVRVDLALKAFFRRVKVGEKPGYPRFKGKGRYDSFTYPQAEKGGFKFVGDRLNLSKIGDVKIVLHRPIKGTIKTLTIQRSATGKWYACFSVEYDPDPQPQKETVVGVDVGLESFATFSNGEKIENPRFFRTDEKALAKAQRKLSKVEKGTPERKKARKIVAHVHEQIANKRLNFAHQTSRQLVDRFGTIVFEDLNITNMQKNHCLAKSIADVAWNQFVTITTSKAEDAGSHVILVNPRNTSQMCSRCGKIVAKKLSDRIHTCPHCGLVMDRDQNAAVNILRLGLQSLG

SEQ ID NO: 24460 - protein, 370 aa, Synechococcales sp.
MRISFKTELKLNNIQKTQLAKHAGVARHAWNWGLALFRKILNYNQENPEQRLKLPSAIDLHKLLVEWVKTENPWYYEVSKTSPQYALRHLSAALTDFFKKKSINGRRVGFPKFKCKGKHDTFTLEGTIKINHRSLQLPRLGILKTYERLPQGLSPKTVVISRTADRWFVAFNYEVEPTPQIRIASVCGVDLGIKTLATLSTGETFDNPQPYRRSQARLARLQKAASRKVKGSNNRHKANMKVAKQHARTANIRKDALNKLTTHLAKNHDQIVIEDLNVSGMMANHCLAKSIADLGLYEFRRQLTYKCELYGSKLTLVSRFYPSSKTCSCCGHIQDMPLKERVFDCQKCSASIDRDLNAAINLKNQCITLA

SEQ ID NO: 24461 - protein, 387 aa, Thermoactinospora sp.
LLRPTARQVVALTACLDDHRALYNAALEHRRTAYRMAGVSITYGDQSGELKHIRADDPEGQGRWSFSSQQATLRRLDKAFAAFFTRVREGRTPGFPRFKGRGWFDTVTWPKDGDGCRWDSQPQHPTATFMRLQGIGHVRVHQHRPVRGTVKTISVKREGSRWYVILSCDDVPANPLPATGAVAGIDMGVAWLVTTGDGEHLANPRHLAVAADRLATAQRDLARKKRGSTRRRKAVARVAALHAKVRRQRLDGAHKTALALVRAYDLIVHEDLKIANMTRSASGTIEAPGRNVAAKSGLNRSILDAGWGVFLTILAHKAESAGRELIAVEPRNTSRTCARCGHCAAENRLTQAAFACTACGHAAHADVNAATNILRAGLALRQAAEAA

SEQ ID NO: 24462 - protein, 139 aa, Haloferax sp.
MNHRRREFEKTRGSMQQTGTRSAHLSIQSMKNRGHRWMQDELHRASNQILEEARDHDCTHISFENLTDIRKRMAGTKRFHAWAFRRLYQYTEYKAEMFGIGVEQISPAYTSQRCSKCGFTHEDNRRSKHQSCVRSVSTN

SEQ ID NO: 24463 - protein, 478 aa, Haloferax sp.
LKTRFARLPCSRSLHSRELRSREPRCTPRACGGCGAGDVHGASRRVLGRRSLPVTETASPFLSPPGWRLGYRNSRTSPRLQSWDESDHSDTNPPSIARRRVDRNTTSNNRWYRARPSNNTSKRRQDSRMQREVATTVRVKLHSLTERKAVLLSREYDAFQTAVQGDDANLYSATKQQASKVRKQKNPRRDTEQPVVLRNDVLGVEYDEDTVLSSWWVKIPLYDPERGRGNSIWCPAIVPEKDEPLVREGKVRDSELMRRDNGWYVHIVVKKRYEVREEYGDVLAIDMGARWIATSVALSTRETTFYGKDVRRIREHYKQLRKSIGKAKVRQGRQVIHRIGNTESRKVDDCLHKISRTIVDDAVARNAVIAVGDLGGIREGNDKGRHFNDKLHKMPFAKLLSYIEYKAHREGIEVVLVDEAYTSQTCNRCAEKGVRNTQGRFRCPHCDLDDNADKNGATNIGKRVLGKFSKPLSDTGPY

SEQ ID NO: 24464 - protein, 412 aa, Thermoplasma sp.
MITAARVKLYPNEGQKILLEKHFGSCRFVYNYFLKKRDEYYITHRDAKKSSLNYLDTQNMLIELKKEHPWLYEINAQSLQMSLRFLDNAFKNFFHKNAEHPRFRKKERNEFFAVPQHIKIQGNRIYFPKFSEGIYFKGSKEKLSEIKDINEIRITKDSGYYYCSIIYEIPEELPEKKPLSEDNSVGIDLGIEKFTTLSNGIAIENPRFIKKVEKRIKKLQKQLSRKQKGSKNRRKQILRLQKEYKKLRDMREDFYDKVSTAIAKRYDTIIIEDLNVKGMMQNHHISKSLSDVSFYYFKQRLEWKAEKYGKNIIEIGRFDPSSKICSRCGNIKHDLKLSDRIYHCNVCGLTIDRDLNAAKNIRKIGLIKVGSVRSEFTPVEIATSGLYGIYPYRQRSVVESGSSEASAEEQLT

SEQ ID NO: 24465 - protein, 390 aa, unknown
  TnpB Polypeptide
MVQKKGGKNMTLKGIKLRIYPNREQQLKIKLNFGYNRFVWNQMLNMMIERYRNNPEAPFLNAFALNNLLPALKTEYPWLKEAESTSLQATNHDLIEAYKKFFKLHKGLPKFKSRKFPKHSYQSKIVGNNIEVVSSSKIKLPKLGTMRFKSGRKITGKIKNVTIRLSATGKYYAILLVDTDVLELPKTGNAVGIDMGVADLMITSDGVKYPTIRFDKLLAKKKHYWEKRLARRRLQAKKEIAWDHHNKVLSPRELSDFKNYLKAKQMVAKYNEKIANQRNNYLHQLTKQLVEQYDVIKIEDLKTKNLLKNHKLARAIANQNWRKLRSQLEYKCAWYGKQLVTVNPRKTSQICSNCGFDDGKHTLDIRQWTCPQCGTNHDRDINAAKNILSA

SEQ ID NO: 24466 - protein, 399 aa, unknown
  TnpB Polypeptide
LLKVYKTEINPTKEQKETINKTIGVCRFIYNFFIARNKEIYEKEKKFVNGYNFSKWLNNEFLAKNSEYSWIKDVSSKSVKQSIMNAEQSFKRFFKKQSGFPKFKKKNKSDVKMYFVKTDAKTKINCERHKIKVPTLGWIRIKEKGYIPTNQIIKCGTISKKADRYYISVLIEVPDVITNKQEYTEGLGIDLGLNNFVVISNGITKKNINKTSKIKKVEKKLKREQRKLSRKYESLKRRKKDLNSSVTRETELKEEATRQNIQKEVIKVQKLHQKLETKRTDYINKIVNDLVKTKPSYITIEDLNVSGMMKNRHLSKAVSNQKFYEFRIKLENKCKQNGIELRIVDRFYPSSKLCHNCGKIKSELKLSDRKYVCECGYEEDRDYNASLNLRDAKIYKIAQ

SEQ ID NO: 24467 - protein, 397 aa, Rhodococcus sp.
MAGRVVKRAYKYRFYPTAVQAEQLARTFGCTRYVYNRALAERTRAWSQEQRRVTYADTSKMLTDWKRDTETAWLSEPSKGPLQESLRQLQGAFDRFWRKQTGYPQFKKKGRSKESATYFSNCFTYRGGQIRLAKQTEPLDVRWSRPLPEGAVPSQVTVSRNARGQYHVSILVEDTIPELEPADRVVGLDAGITSLYTLSTGEKITNPRHERRDRARLAKAQRVLARKEKGSRNRAKARLKVAKIFGRIADRRRDHLHKLSTRLVRENQVIAIEDLSVRNMVKNRSLSRAISDAGWSEFRSMLEYKADWYGRRVVVIDRFYPSSKTCSGCGVLASTMPLTVREWACRCGTVHDRDVNAAKNILAVGLAVTACGDGVRPPRNWLVLVEKREFTGEDFPH

SEQ ID NO: 24468 - protein, 418 aa, unknown
  TnpB Polypeptide
MIVKRAYRTELKPDQTQREILSRHCGTARFAFNWGLARKAESYRLTGRSLTAIDLYSELNALKKTTHPWLYEVSKCAPQEALRDLDRAYANFFRRCELKKGGKHQGKVGFPRFKSRKRGLGSFGLTGAIHTEERRIKLPRLGWIRLKERGCWPGKSEPLHILSATVSERAERWFVSLQVEEGIEDPSPAAGPPVGIDLGIKMLASLSYGEDDHVHYENPQALLGGARKLKKLQKKLSRQEKGSGRRETTNKRIARQHYRIACVRSDAIHKVTSEIVSKAKPHQMRPAVIGVEDLNISGMMKNRHLARAVADASMREFRRQMEYKYAWYGIKLVVVPRFEATSKACSRCGWRKEDLSLSDRVFVCDPCGHTADRDDNAAENIRSLAASSAEMINGRGGEVRPAEPDWHTPEKRQLRSVG

SEQ ID NO: 24469 - protein, 412 aa, Acidilobales sp.
LKTLEQVRMYSIPISDTRIRELITWYLQALQEAIDIIWDNMEWRYTFPMIEKRCGKLKIATPYKVKVPELPKSKSFKKRLRDVLLRGCPYAKHWVDAVIRTAYSVMESWRKRYLKGRARKAKPMVERRFARCKITLMKVDYEKKTVRITIKPGEYLEVSWAGKWFTRRVEGWRVGEVVLKDDRVLIPFKSTKVVEVRRVVAWDSNELSLDGFSPSLGLIKVDLRPLQSMKIVYDKKKAVAQSKNNREIYEKYVKREHNKERDFINKLVKGLTILFPNAVHVFEDLEKEDLVSKNKAPKNRRKRNARTPWKLIQRKLSEKTIVVKVSPKNTSRTCPRCGFVAKTRVGRVFKCEKCELELDRQRLASINIYLKYTTMRGFPYSDDPDMWMRGELWVGVALSGRSPVICTPMKGV

SEQ ID NO: 24470 - protein, 446 aa, Beggiatoa sp.
MKKAKKVTRIAYSDDLNQAKYDALNEIASLCGSIRTEVWRNYGSIGGLGAKFRPVRDGWIADEHVKNLPQRIWRATLSDSLDNIKANREAAKEKVARHIFRNIDDKDKRKELLKKLKKDSVWINDSYLRRLMRQYWKQGKNHTFNQIVLEPGSYKCFSHNGKNYIEVISLKRCKRIAIPVGTNYSITGQIRLILRDGKVEIHYTIDNTDDRACGSKEIGIDKGYTEAFVDSDGDFHGEKLGETLSKESDYLKKKYQRRNKIKAVLGKVEQKNPKKAKRIRKHNLGRKKLNRRKQRHTAAVKTIVFTAVNEVVDKAKIIVCEDLTKTFQSKSYGKNANRRLSGWVKGLMASAIDIVASRRGSRVVQVNAAYTSQICSKCGCLGKRTGDKFHCASGCGAVMIAPLNAAVNVKARLDDKELHRWLPFAKVKQILLERCRRSDETAHPVV

SEQ ID NO: 24471 - protein, 419 aa, Beggiatoa sp.
MKALKTKIRGLEKSQFKRLKELTYHAKNLYNQTLWTLREAFEATGLYFSYPKIDKVMKQVENLEGEVNYKLLKAKVSQKILRRLDKNFKSFFRCYHDFQKNPGKYKGQPKPPRFKHKQYDNLIYDYQAFQVKDGTVILEKGLSFSLPSKLVGKTIKQVEVIPKYRYFEAIFVYEDDETIAKVTPNDKVMAIDLGLNNLATCVTNGAEKPFIVDGRRLKSINHHYNKRYSKLQSHLKKTRDRKWSNRLQRLTDKRNARIADYLHKATRQVTDICVEKGISKVVVGDVTKSLNQINLGKKTNQNLRNLSLGQFINKLRYKLDLHGITLEVINESYTSKASFVDNDALPKTYQPKKTHSFSGKRVKRGLYRSKDKTLINADVNGAYNILRKSNPKFSFGELISKVGKGILDWLHPYTRLKIG

SEQ ID NO: 24472 - protein, 317 aa, Kurthia sp.
  misc_feature (260)..(317): Xaa can be any naturally occurring amino acid
MPHKAYKFRIYPNKDQQALIHQTHGHCRFVYNHFLERWNTSYKEEGKGLNRSVMSKMLTKLKKQDDTAWLRNVDSVALQASYENLLAAFDRFFKGQNKYPRFKSKKNPVQSYTTKNSHNCIAIVGNKIKLPKLGLVKFAKSRDIEGRIMRATIKYNASGKFYVSILCEVPDFKPFPKTNEAVGIDLGITDFAILSNGRKVDNQRFTAKMEQKLKREQRKLSRRYEQAKKEGRNLRECMNYQKQRCKVARLRERVAFQREXXXXXXXXXXXXXXXXXXXXXXXXXXXXXXXXXXXXXXXXXXXXXXXXXXXXXXXXXX

SEQ ID NO: 24473 - protein, 367 aa, Roseburia sp.
MLKAYKYRIYPNNEQKIQIAKTFGCCRFVYNQTLAYRKEIYEKEKKSVSKTDCNNYCNRQLKKEYEWLKEVDKFALTNAIYNMDAAYQKFFKEHAGYPKFKSKHDNHKSYTTNFTNGNIAVDFEENRVKLPKLKNVKAKLHRNFSGQIKSATISQIPSGKYYVSILVETEHVELPHVNQNTGIDLGIKELCITSAGKKYENPKIIRKYEKKLVKLQRQLAHKEKRSQNYYKTKKKIALCHEKITNTRKDYLHKMSHEIISENQVIVSEDLQIKNMIKNHRLAKSISDVSWYELTRQLEYKAKWNGRKYVRIDTFYASSQLCSVCGYQNTEIKNLLVREWTCPVCGTNHDRDINAAKNILEEGLRQIA

SEQ ID NO: 24474 - protein, 380 aa, unknown
  TnpB Polypeptide
VTATWDTRIPWTVQRRRRKRDCSTGHAQKLEAWRSFFALKEKGENANPRRTGATRRTDANPHLHPKRPVHDSVGQAVASRNPCRARVKRRIQTRLPRTTPPRSPRQPEVGMANRAVWNLSIRSVSDTFRAFQPVTVPDSRLDSPLAFHEAALDVGANNLVACSTTTGNQYLYDGRELFGRFRETTDEIARLQSKLREGRYSSKRIRRLYRQRTKRRDPHRTRWCATSLNRCTMRAWRHRIRGRPDRRAGHALVGQGEREDAQLLGVQGVHPPSRVRLRGVHGISLEAEPKAWTSQTCPECGDHETTVRHRDTLTCPVDSRGTPTSRRQRRSFENSNCEIRPMARPVQFEKGDDHDGQGKPYPHESPKEVRTNPQVASVGR

SEQ ID NO: 24475 - protein, 285 aa, unknown
  TnpB Polypeptide
MLETTRTYRAKIVNHQQVQDDLDNCGFSASKLWNVARYYTQGRWDDDGEIPDDGELKSELKEHERYSDLHSQSSQRVLEELAESFTSWHKARQRGDEDANPPGYRKHGDNHPRSTVTWKQKGIKHDSKHNQLRLSKGFNLKNHRSDFILAEYETRPDVTVENIQQVRAVWNGDRWELHLVCKVEIPVEDAPGDNTAGIDLGIKNYLAIAYDDGDAELYPGNVLKQDKHYFTRDEYDTEGENGRHVVPFALGRSCPGEKTTSCTPSPSTSLNSVSTTRLVVSPSVT

SEQ ID NO: 24476 - protein, 208 aa, Oceanobacillus sp.
MHQLPKTNTAIGVDLGITDFAILSDGQKFDNHRFTSKMEKQLKREQRKLSRRALLAKQKGIDLFDAKNYQKQKRKVARLHEKVMNQRNDFLNKLSTEIIKNHDMICIEDLNTKGMLRNQKLAKSITDVSWSSFVTKLEYKAEWYGREIMKISRWFPSSQLCSECGHQDGKKSLDIRHWTCPNCHTHHDRDVNASKNILAEGLRIKSLV

SEQ ID NO: 24477 - protein, 388 aa, Streptomyces sp.
VVVKLVVQVKVMPDAVQAPALEHTLPAINKAANWVSATGFERFGLKASVRELRKLCYGELKALGFGAQAAQHIIKRVADASTSLRAGIRAGRFGPEGSKRRRKAESKPVAFRPHAAHTYDDRCLSWNYDAQTVSIWTLDGRIKDVPFACSPEALKALAEHRKGESDLVFRDGKWFLIATLDLPEPEAFEPRDFIGVDRGIVNLATTSDGDNHQGRRLGRYRRWQTRKRAELQAKQTRSAKQLLKKRARKEARHASHVNHKVAKTVVAVAQRTERGIALEELQGIRDRVTVSRDQRARLSSWPFHQLGAFIAYKARRAGVPFIEVDAAYTSQRCPRCGHTERGNRPTRDIFRCRRCGLAGPADHVAGINVRDRARSAWVFVNMPDPAPA

SEQ ID NO: 24478 - protein, 394 aa, unknown
  TnpB Polypeptide
MFIRQNYRIYPNKEQSATLNQWLGQARFIWNYMLSKNIESYNDTKNFIFKYNMNNMLPELKDSVDYNWLKEIPSQCLQQKCQDLDTALKSSFKSKTNRKGFPKFKSKKIDESGIRFPSFKFEGNRIVLPKMKSGIKIKLHRELLGKKGSLTLSKDKIGNYFVSILVEISDDYFSKPITEIKSAIGIDVGLKEFAITSDAEIINNPKFYRKAEKKIKKSQKSLSRKNKGSSNREKSRKKLAKIHLKVKNQRKDFSKQNAYSIVKNNDLIAVETLNIQGMIKNHKLAKSIADVSWYQFHQDLQWQCKKQGKEFVKINQWIPSSKKCSCCGNIKSDLTLSDRIYECSCGLKLDRDLNASINILNEGLKFYNTVGTTEINACGNMIQGIESAQEAIIL

SEQ ID NO: 24479 - protein, 451 aa, Microvirga sp.
MESVSIHRPKWLPKGQLAALREAQREAAREWMDRVAVHKQARDTRAKWPTRDTLQKFTKGRYKLHSQTIQMIVQQFLANVEATTERRRNDPASRQWLRYPHREKTFFPLYWPAQAVSYDRCASHLILPMGRGRKSLVFRVALDFEPGAVKLVWKDGYELHIVRGDVVQAEASPGEHRACVDLGEIHQAAVATDTGAALVICGRGMRSHKRLLSKQLGALARKRARCKRGSRRWKKLQRARRKRSLLARRRIRDLRHKGTRKVIDFCVQQKVGTLFIGDPRGVRTLKAGRHHNQRISRWEVGQDMDYLRHKAERASIACSIGNERRTSSRCPQCGHRHRPKGRDWQCKACGFVGHRDVVGAANMHQNAFGVRVTFPARVTYRRAGPMRAARGLNSPAPSLPARRSSPDTGLREGVAPPSPQLLGTSPPQGRASDPRRDAGLPVRRQTLPSAA

SEQ ID NO: 24480 - protein, 370 aa, unknown
  TnpB Polypeptide
MIRAYQYRLYPTKSQISTLNRTFDLCQKVYNNTLALRRDSWDYDQKSVSLFETNKELTVWKQDHPELSSVYSQVLQNVQVRVDLAFKAFFQRIKHGEDMGYPRFKSYGRYDSITYPQLGFSLDVQNQTVFASKIGKIRAVIHRPVEGTIKTMIIRRSCAGKWYVSFAVKYEPEIKVHNGEEVTGIDLGLTSFATLSNGEKIENPWFFRSEEQALAKVQRRLSKEEKGTPERVRRRLIIAKVHDRIANKRKNFIHQECRKLVDRFKLIAFEELKIKTMQQNSYLSKSIADVSWGMMVQATVNKAEEAGSRVVLVNPNNTTQLCSRCNQIVRKELSDRVHCCPVCGLTMDRDQNAAINIMRLGLQSPVAKTT

SEQ ID NO: 24481 - protein, 351 aa, Chromatium sp.
MIQTQLKLRLNVTQETLLNSWLFRLTGVWNWAIRKIEHDAQGEVYYSKQRFQNLLAGHGQKIGIPSHTLQGILLMAHSAWSRCFKKTGGKPRLKGIRNKLSSIPFPDPLRSITGNRVTLPGIGSLRFHTQDIPTGKIKCARLIKRASGWYLCLFIDAERAPIASTGRGMIGIDPGFIDLLTLSDGEKIPHSQELQRSLKRLGQAQRGVNRKLTARLHERIKNQRKDRNHKLSLRLVKENAVIVFSKDNVKGLARTFGKSVASSAHAQLRTMLAYKSPTGGTQYLEVASRHSTRICSACGCLSGPTGLAGLKVRTWVCAACGTPHDRDINAAINTLMAGVGTTLERDMRHAA

SEQ ID NO: 24482 - protein, 289 aa, unknown
  TnpB Polypeptide
MLKNFQYRIFPTRKQLKTLETTLEECRWLYNHLLENRQQAYEQEGKRLSCYGQQATYWVLKEHRPMLNEVHSQVLQNVAVRIDLAMTAFFRRCKAGEKPGYPRFKGDERYTSFTYPQTGFRITHDERVSLSKIGSVKMVYHRPMKGTPKTCTVHRSSTGKWYVTFACESAPERLPKRSEAVGIDVGLKMFASLSTGEEIENPRFFRKEEKALAKAQRKQAKCVKGTPQRRKQRKVVARVHERIKFKRDTFTHQESRRIVNHFGVICVEDVHVNRMVHTHGLAKSIQDAA

SEQ ID NO: 24483 - protein, 389 aa, Chloroflexi sp.
  misc_feature (107)..(150): Xaa can be any naturally occurring amino acid
MNTVRVYQLNHLAPVLFQRLKEAQMEAARVWNLCMELHKDARMTHARWPGRRELEQATKGKFALNAQTVQQITHTFLANIETTGKIRRQHPELRMKYPWRIKRFYPXXXXXXXXXXXXXXXXXXXXXXXXXXXXXXXXXXXXXXXXXXXXTTNTSAALLVTGRGIRSLKRQRSKQLGHLAKKQSRCQKHSRRWKKLQCAKSKVSKRAERRIRDVRHKATRAVIDFCVEHKVGTLFIGNPHGVRSRDTGRHHNQRMSGWEYGKDIDYLTHKSKQARISCFTGSERGTSSRCPRCGHRHKPRGRTWACHACGFTGHRDLVGSINMHTLVFGTHPKFPRSFTYLRPGNPRRSSRADTPRSCLGQPTVQPPIVDTVSPETGHPVGVAQKPVPF

SEQ ID NO: 24484 - protein, 253 aa, Okeania sp.
LTCVSNVGTSLIVDGKHLKSMNRWYNKQVLTIKENQPQGFWSNKLATITEKRNRQIRDGINKAARIVINHCLEYQLGTIVFGWNQGQKNQIELGHKKNSEFVQIPTARLKQRIAQLCEEYGIVFIETEESYTSVASFLDGDYLPNYGEKPNDWKPSGKRIKRGLYRTGNNWFVNADCNGAANIITKVSRKLSLDLSRLCRGTLTCPQRIYLWSAKKKRSNRDLSVLRSICLESPRQQLRGVVNNNLNNKNEKY

SEQ ID NO: 24485 - protein, 362 aa, unknown
  TnpB Polypeptide
MIVLTYKYLVKGKRAKRQLRRASWAVNQVWNFCGQTQRSVQRAWKDGLSPRWPSRFDLAHLAAGTSKDLGIHGQTIQCVAAQFAKSRDQHRKCPRFRHSGGPKRSLGWVPFQAQSRQIEGNAITYLGTTYRFFASRPLPLIVKGGAFVEDARGRWWVCFHVGVANDLPAAPDVAVGIDLGLKTLATLSTGEKYEAPRHYRVWEDRLAVAQRANDKDRARAINAKIKNCRHDATHKWTTEVARNFRMIYVGDVSSSRLVKTRMAKSIYDAGWSGSKHALRYKASRHGGTCVEQDERLSTQICSSCGMLCETRPRGIADLGMREWVCSNCGTHHDRDVNAAKNILAFGLSAQPPVEESRVAHGR

SEQ ID NO: 24486 - protein, 363 aa, Mycobacterium sp.
  misc_feature (363)..(363): Xaa can be any naturally occurring amino acid
MPKFEVPDGWTVQAFRFTLDPTEDQAKALARHFGARRKAYNWTVATLKADIQAWHASGTVTAKPSLRVLRKRWNTVKDDVCVNTETGVAWWPECSKEAYADGIAGAVEAYWNWQTSRAGKRAGKRVGFPRFKRKGRDQDRVSFTTGAMRVEPDRRHLTLPVIGTVRTHENTRRIERLIKAGRARVLAISVRRNGTRLDASVRVLVQRPQQPKVVHPGSRVGVDVGVRRLATVATADGTAIEQVENPRPLGAALRELRHVCRARSRCTKGSRRYRERTTQISRLHRRVNDVRTHHLHVLTTRLAQTHGRIVVEGLDATEMLRQKGLPGARARRRGLSDAALGTPRRHLSYKTVWYGSALVVADX

SEQ ID NO: 24487 - protein, 380 aa, Methanolobus sp.
MRKSYKFRIYPNKEQEVALEKTLDVCRYIYNEFLADRKNAYERCNRGLSTMEQLYQVRYLEFDTDVHSQVKQDVIRRLGNSFDAFFRRCMGGETPGYPRFKGKKRYNSFCYVQSGFKIDGKKLRLSKIGDIKIIQHREIEGKIKTCTIRRDGKQWYATFSVEIENNVMPVEPETFVGIDVGLKSLITLSDGTQLNPPKYYREAERRLKRENRALSHKKKFSNNWKKQVEKINVLYRKIRNQRNDFNHKLSREVVDNYDYIVFEDLNVKNMVKNHHLSKSIHDASWGNLIQITKYKAEEAGKFVELVNPYNTSQLCSNCGKKVKKSLAMRTHECTHCGLILDRDINAAINILNRAVGTTVGACGVEPLGLSMNQEATKSLA

SEQ ID NO: 24488 - protein, 427 aa, unknown
  TnpB Polypeptide
MQLVEQHCINKQDPRYTLIDESAFKSKNLYNAALYEVRQSYIHEGTYLNYNEMQPRMQSHEAYTALPAKVSQQVLMQLHHDWESFFKARDAYNEDPSKFLGRPRLPKYKHKTEGRNLLVYTMQAVSRGKKSLDCGMIKPSQLPITVKTKQDPTTIDQVRIVPRKGVYVVEVVYEKAVKQAAVNPAYYAGIDIGLDNLVALTSNKPGFVSVVVNGRPVKGVNQFYNKRKAELQSKLGTTGTTKRMQSMINKRNRRIDHYMHTASKQIIEVLMKEGIGVLCIGKNDGWKQEANMGKRNNQNFVQIPHARFIAMLTYKAELVGITVKLTEESYTSKASLLDLDPLPVRRSGDDAKPTFSGKRVKRGLYRAANGREINADINGAGNIIRKVAPDAFGLEGVEDGKEVLASLVVHPVRVVIPRTKPKVGVSQ

SEQ ID NO: 24489 - protein, 379 aa, Anaerolineae sp.
LRLKPDPQVANAFEQTCLKYTYSFNAVCKIGWDAGLVHNGNALHSLTYYDQKAETGLPSQLICAARVKATEALKSAKALINKGEKATCPQSKWSPIRYDANSYTVWFNRNELSVATIDGRKRLPFKLPSFYSQYIQKGWKSCSADLCRDKKNRWWLHIVMECATPELEQSSECVGVDLGIVNVATDSRGNFYGEQRWKQVEDKTFQHRRRLQRKGTKSAKRHLKKMSGRQKRFRRDCDHVLSKRLVESVNKGATLVFEDLTNIRGRAKGSKTHRRRLHSWSFFQFQSFVAYKAERLGIAIAFVDPRYTSQKCSKCKHRERGNRASQAEFKCKACGFECSADINAAINIREDYWAAVNQPIAGSRASHDSLASPRALCRG

SEQ ID NO: 24490 - protein, 244 aa, unknown
  TnpB Polypeptide
LEDTLETCRLVYNSLVNDRKFHYDTAQVAVGRYTQQAYLPKWKKDHTELKAVYSQVLQDVVHRVDLAFKAFFDRVTKKVTKGETPGFPRLKGEGQYESITFTQNDSFNVGDSTVRLAKIGKVKAKLHRRRPWGELETCTVRRQNGKWFACLCQEVEAEPLPLSTEAVGIDVGLKTFVAFSNGAFIDTPRFFRKDETALAKAQRKFAKQKKGSRLRRKARKIGRSRHSPLPPPPDAAAAARGERV

SEQ ID NO: 24491 - protein, 122 aa, Bacillus sp.
MNKEGNRFIKTGNIIKVEKKIQHLHRRLTNIRTNYLHQVTKEIVKTEPYRIVMETLNIKGMMKNKHLSKAIAKQCLYELKRQIQYKSEKYGIEYIKVDKWYPSSKMCSSCGSIKKDLKLSYL

SEQ ID NO: 24492 - protein, 395 aa, unknown
  TnpB Polypeptide
MKLCIKYRLNPTKEQEKKLLWTLDRCRFAYNKLLEGLNKQEKINKNALQHSLVDLKKQYPELQNIHSKTLQYENWRLFSNLHGLSQLKRNGKKIGKLRFKSYGSFKTFVYNQTGFKFIRTGKRFDSLQLSKIGNIRMRVGDTQNIPTTKIKQIIIKRHGSGKWFAILCSEEQSQILEPTGKQVGIDVGLSNFVTDSDGLQIDNPKFYKKTLAWINKEQKKLSKKKKCSKNRLKQKAKLAGLYGRLENKRDDFLHKISRYYVNNYDVICYEKLNIRNMVRNHNLAQGIMDASWGKLINMVVYKAENAGRQQIPVEPRGTTQNCANCGNAVYKGLADRQHKCSCGFAVHRDYNSAINILRQGLSEVTPLENRPLHELARVPASQFVESGSPHALAVG

SEQ ID NO: 24493 - protein, 372 aa, unknown
  TnpB Polypeptide
MLKNFQYRLYPTKKQRHLLEATLEECRWLYNHLLENRKTAYEQDGKSLSCYGQMNTYAVLKEQRPSLTTVHSQVLQNVAVRIDLAMKAFFRRVKAGEKPGYPRFKGYGRYDSFTFPQSGFSITHDERVTLSKIGSVKMVYHRPVKGTIKICTLHQSSTDKWYVTFACETEPERLEPLATQVGIDVGLKTFATLSDGQAIENPRFFRKEEKALGKVQRKHSKLAKGIPERRKHRKVVARVHERVKFKRDNFTHQESRRIVDQFGVICVEDLHVNRMLHNHCLAKSISDAAWSAFFSQLRAKAEEAGRQLVTVNPASTSQTCSRCGHRQKMALSERVYQCPCCLLSLDRDLNASKNIVSVGLHTLGIQSREAPA

SEQ ID NO: 24494 - protein, 408 aa, Solobacterium sp.
MFNANWKGAAGMSNSTNAKKRKPGQCASAEVDRIALRFCGMPTSAQMETLNQTLGACRWLYNRMLHDRSACYKQTGESLNLTPAWYKHLSCCQWLKEVDSLALANVQLHLNRAFGNFFNGKSAYPKYKRKADHYDSYTTNIASKGAANLRFRMGKRKTGFLKLPKIDGEIRVKAHRTVPAHGVLKSVTVTHEPDGKYYFSLLYEVPHEEICHDIDPDNAIGLDMSMHNFCVDSNGKHIDYGKPYHAMQNRIAREQRKLSHMEKGSSNYRKQRVKIAKLSAKAKHQRSDALHKLSRQLVDTYDMIGIEDLNMRAMSQSLHFGKSVGDKGWGMFTSMLAYKAHRAGKRVIKVGKFFPSSQMCHACGRLHKLTKDLAVREWTCPDCGHHHDRDENAALNIRDEAVRIYCTC

SEQ ID NO: 24495 - protein, 506 aa, unknown
  TnpB Polypeptide
MAELLGRIERCLFVDLYARGGSQNELKSRYLKRFGITARMFNGIRVTLEGKVKAGGEARERHARSLKERIRSLEESLAGLKARLEEAEGSGAAWRLRFEMHQKRRRLSRLGARLRMVEEDLSRLVPRICFGSNRLFRRQFHLGENGSRTHGEWLSDWRGARSSQFTCLGSKDEKCGNQTCALLPGGTLRLRLPDALVKSLGEKWVLVPGVRFRYGQEVVDRALAEGRALTYRFVRRERKGRPIWYVQVTVERGDVPVVTSRLLGALGVDLNPGLVAAAQVDRHGNPASWRHIPVLTQGRRKEQITAGLAEATADVVAWAKAEGVPIVVERLDFEKKKARLREMGKRYARMLSAFSYRKFFVLLLSRAAREGVEVVFVNPALTSVIGQVKFGPGYGLSPHAAAAVAIARRGLGFGERLRSRSALSLPARNRGRHVWSDWGRLSRRLRAERARGRRPSEGKRGRGIPLSRAAPAAGFGPQGPCGDGLSPLPGCDPPAQTVGRAVRPAS

SEQ ID NO: 24496 - protein, 406 aa, unknown
  TnpB Polypeptide
MSIKAYKYRIEVNKATQETLQWVLDRARELYNAALAERKEAYRMAGKSITYYAQKRDLVEIKEQIRPEYQEIASHVLQDVILRVKKAYDNFFRRVKHGEKPGHPRFQGRHRYDSFTYPDGAGWKLEVGKAPDEKRGKGKALLHLSKIGTAKVILHRQIEGRIKTVTIKREGTDWYAIFTCEVATKPLPIAYEDVGIDLGVTHFAALSNGEFIDHPRYFRQAEKKLVAAQQAVSRKKRGSHRRAKAVKHLAKQHRKVRNQRKDFHHKASRQLVNRYQVIAFEDVETKNLTKAPAPRQDEATGANLPNGASSKAGLNTSILDAGWGAFTEMIATKAAWAGRQVIFVNPKHTSQACSGCGTIVKKDLSDRWHSCACGTELDRDTNAAVNILALGRKHLVVGTRPTSATT

SEQ ID NO: 24497 - protein, 489 aa, Mycobacterium sp.
VAVARFEIPQGWTAQAYRFALDPTQAQVRALASHAGAARFAHNHILALVKAVMDQRAAERSYGVSDAELTPGLGWSLPALRKAWNLRKASCAPWWAENSKEAYNTGLDGLARGLDAWSKSRKGERTGPVVGFPRFTSARSPKSVRFTTGAIRVEPDRRHVTLPRLGAIRTHESTRKLARRLEAGSARILSATVRQDSAGRWHCALQTIVEAKTRPAHARRSAHAVVGVDVGVKADSLLVIATPDGVEVDRIGAPKSLSAAQSRRRALQRRAARQHGPYDPASKTKQVPSKRWRKTQARIGRTHAHAAAVRRDVLHKATTALAQQHQVIVVETLNAAGMRTKGGARKRGLNRALADAALAEIRRMLGYKTRWYGSTLVAADRYFPSSKTCTACGRRKSNLTLADRIFECDACGIRIDRDLGAAINLARLGVPTPVVGEQGPAGSGPAAGRGATRETDPAKAGEAAGDETSTPHHQTVHQTGTASPQGEAA

SEQ ID NO: 24498 - protein, 403 aa, unknown
  TnpB Polypeptide
MLRAYKYRIYPTEEQKVLLAKTFGCCRFVYNWALKMKIEAYKQEKKSIGNVELTNRMKRELKTEYEWLGEVNSQSLQSALRNLDTAFKNFFRDTHAVGFPKLKSKKDRQSFQCPQHCVVDFGKGTITIPKVKDIPAVFHRKFKGTVKTVTISMTPSRKYFASVLVDTDIEELPTTPIHGDTCLGIDLGIKSLAVCSDGRMFDNPKNLQRSLDRLKLLQKRLSRKKKGSSNRNKARICVARLHEHIANCRKDNLHKITYALTHDSQVRTICMEDLNVKGMMQNHHLAQAVGDTSFGMFLTLLKYKCSWYGVNLIQINRFAPSSKTCGKCGYVYKGLKLSDRSWICPECGTHHDRDFNAACNIKEFGLKALPTERGKVKPVDCHKSNDRKKQEKRGCIGISKPPN

SEQ ID NO: 24499 - protein, 381 aa, Motiliproteus sp.
MNKRAYKYRFYPTVEQAELLAKTFGCTRFVYNLILRWRTDAFYQRQEKIGYVQANARLSAIKKDPELAFLSEVSCVPLQQSLRHQQTAFKNFFEGRARPPTFKSKKRRQSIELTRSAFKYVDGQLYMAKSKTPLAIRWSRPLPGEPSKVTISKDTAGRYFVSCLCEFDPKTLPVTPKMTGIDLGLKDLFITDQGERVGNPRHTAKYAAKLALAQRRLSKKKFGSAKRAKARLKVARPHAKISDCRQDNLHKLSRRLINDNQVICVESLKVKNMIRNPKLSKAIADAGWGELVRQLAYKADWAGRSLVTIDQWFPSSKRCSDCGHTLASLPLSVRAWECPECGTNHDRDINAATNIKAAGLAVLALGENVSGIGPVPLSCSR

SEQ ID NO: 24500 - protein, 301 aa, Lactobacillus sp.
MPTKDFSRKKGSFPKFKSRRFPRQSYTSKCVSNNIKVIDDHHIKIPKIGVISYRCGRQIKGKIKRATLRLSATNKFYLAILVEVDVPLFEKTNQTVGIDRNVDNLIAMSDGTIVPTIHFDKNLAYKKHQWQKKLARRRARALKEIAWDKHNRVLEPRNIKDFRNVEKARIMVAKYSEKERNQRTDYLQKLSTKIVKEFDLIAIEKLSTKNMLKNHKLARAISNQGWYALQQMLEYKCKWYGKELELVPAKNTTQTCSACGYLLQQSEKLTLDVRAWVCPKCHTHHIRDVNAANNILNSATQ

SEQ ID NO: 24501 - protein, 486 aa, unknown
  TnpB Polypeptide
MAFMTNGRKFSARFSSDASRYGYLTWSAAQSFIYNEKVREQRYFDSLYKLIDETKRHCLPIRPECCVDRPQPDQKYAHLIDFKAMPWLREVPSAILGIGGYRFYQASKRMLNGLARHPKVHPIKESDRVLQLTRNYFTIEPHTRKGWFVLTFGAKRKPGGNILFKAHRSFLMPAMVFVKLTTRGLSVSFCYEDPKELERFPENEEEIAARLMQYSKDELQKKAIGVDRGVARPVQSSHREAPYGLTKKQREKIERRERHRTRLQRRLAKAKIGSNNRRKVKRRLGRTYQYQRNVLEDFAHQTSHALVSLEDTSLIVLEALKIKNMVKHPAAKYDEETGQPLKNGASAHASLAESILNSGWGKVRTYLKYKALKAGKLVLEVDPKNTSRRCPVCGLIEKKNRPSQAVFHCVRCGFEDNADHAAAINIRDRGIDMLLSGLYKPRTRKKLLRTKKAKPSSVKLGPDRADVMPVELTVPDKTSILSACRR

SEQ ID NO: 24502 - protein, 380 aa, Azospirillum sp.
MIQRSYTYRLYPSNAQSVVLTEMLGAFCDLYNAALPQRIEAYRRQHKTLGYFDQSSELKAVRAVDERLAGFSYSAAQQVLRRLDKAFAAFFRRLKTKAKAGFPRFQAKHRFDSAAFRVGDGLTIRKSKRLGITGVPGEIKVKWHRDLPASAKLGAAVLSRSAGKWFVCFQVTVPDGDVQQRDGASVGIDVGLSSLIATSDGETVATPPWTTHAAKKQRRLQRALARCKRGSKRRLKAKQRLARHSAHTANQRRDVLHKLSRSLVERYAVIALEDLDVDRLARSMLAKAVHNAAWGQLRRFLAYKAASAGTRVEAVDPRGTSQTCPACGAGVAKTLAERTHTCPCGCVMDRDVAAATVILQRAQAMGPGTGLRSSSQRVAA

SEQ ID NO: 24503 - protein, 380 aa, Azospirillum sp.
MIQRSYTYRLYPTKAQAAVLTEMLGAFCDLYNAALQQRIEAYRRQHKTLRYLDQASELKAVRAADECLAQFSYSAAQQVLRRLDKAFTAFFRRLKTKAKAGFPRFQAKSRFDSAAFRVGNGLTIRKSKHLGVIGVPGEIKVKWHRGFPASARVNTAVLSRSAGTWFVCFQVALPDQEGPPHGGAAVGIDVGLSSLIATSDGETVETPPWTKRAAKKQRRLQRALARCTRGSKRRLKARHRLARHGAHTANQRRDVLHKLSRSLVERYAVIALEDLSVDRLARSMLAKAVYNAAWGQLRRFLEYKAVSAGTRVEVVDPRGTSQTCPACGAGVAKTLSDRLHKCPCGCVMDRDIAAAVVILQRAQGMGPGTGLQSPSQRGAA

SEQ ID NO: 24504 - protein, 377 aa, unknown
  TnpB Polypeptide
MKSYRFRVYANKQQDAVMRQHLWASKNLWNSGLTLAKQMYDDFGKFPTRKTLQEISKDSGLYSQVAQGVFVRLSLALKANTRRKKAGLKGGFPRFKSFDRMKSLHYPQSGFELLPNKKLQVTPFGKLNIKQHRPIEGKIKALTLKREASGKWFAIFTIEQDEIVPLVNNGGRVGIDLGLTTLATLSNGLKIKNPRHFDGHREKLAKLQRRLSRALKGGKNRRKAKLKVALAHEKIANVRRDFLHKATANLVNSYSFIALEELSSQRMAEQNFGKQINDAGWETFAGMIAYKAVEAGCKVVFVNPKNTTQECSGCHELVKKDLTVRVHDCSHCGLVLDRDVNAAINILVRATVGTTESNACEDGAIVPSVKQEATTCQ

SEQ ID NO: 24505 - protein, 382 aa, unknown
  TnpB Polypeptide
MISWKFRLYPSKQQDELLRTHLWASKNLWNYGLALAKQLYDDFGKFPTRKTLQEISKGSGLHSQVAQDVFIRLTNALRVKIRRKKAGLNGGFPRFKSFDRMKSLHYPQSGFKILSDKKLRVTPFGELGIRQHRPIKGEVKTLTLKKEASGKWFAIFTAGQDDVEPLMNNGGKVGIDLGLTTFATLSNGLKIKNPRHFDKHRDKLAKCERRLSRAKNGSRNRLKTKRKVALVHEKIANARSDFLHKTTTSLVNSYSLIGLERLAVRRMAEQNYGKQINDVGWGTFSNMIAYKAAGAGCKVVFVDAKNTTQECSSCHEVVKKDLTVRTHDCPHCGLVLDRDVNAAINILTRATAGMAGRNASGDEPTGSSLKEEAATSVYTKSG

SEQ ID NO: 24506 - protein, 396 aa, unknown
  TnpB Polypeptide
VRRSYKFLLRPTAGQLALLIALLEDLRQLYNAALEERREAWRMRKVSVSFYSQDAQLKEIRAADPERYGRWAFTCERAVIRRLDCAFQAFYRRCKAGERPGYPRFKGRGRFDSLEWPEGNGARWDSVPHPTVTRVYLKGVGHVRVHQHRAIAGRIKAITVKREGLRWYIILSCDDVPTEPLEPTGAVVGIDLGIASFLTTSDGKHVPNPRPLAATVATLAAAQQSLSRKKRGSERRHSAARKVAALHRKIRRSRLDHAHKTALALVRDHDVIVCEALQIGNMTRRPVPRPADDGTYELNGAAAKTGLNKSILDAGWGMFLEILRAKAESAGRTVIKVNPRHTSQQCSRCGHVAAGNRVTQAEFRCQQCGHEAHADVNAALNILRAGLARREAENAA

SEQ ID NO: 24507 - protein, 383 aa, Agathobaculum sp.
LFDVFDHLTKGGTNMNSKFETVFRTYSYRLYPTKMQQLELKALFDLQDHAFNDWADLANRGVAQGKNFETIQNEIEAHEMQTKRREDHYALSVTRKHVLALARRLYDQKIERIRFRLPNREQRSFTYKTVGISEHHLVIPSVGTIAMCDHRPLPVHATLCYAKILVDCYGAVYRVDLLLSVAIPVAEPQPVHYENVVGLDYTQDGLYVTNTGENAGYPGYRKLAQDKLRRYHRAAARFRPGSRRWYKQKQRAAKLERHVVQQRRNWQYQQAHKLCKEHDAICVETLDLVGMKQTNPSLAPKLNDNACAAFFRKLEQILHQNGKKLIRVDAQFPSSQICSCCGAYLGKQPLSVKSITCPHCGVTIRRDHNAARNIRDEGFRHLE

SEQ ID NO: 24508 - protein, 379 aa, Nocardiopsis sp.
MQLRYSFRVYPDPDQRIALAQAFGCARVVYNDALRARETAREAGETFPTIGELSKQLITEAKKTEERSWLGEVSAVVLQQSLRDLDAAYRNFFDSLTGKRKDPKLGLPRFKSRKDARQSVRFTANARWKITGQGKLCLPKIGEVRVKWSRALPSTPSTVTVIKDAAGRYFASFVVETDDQPLPETPADVGIDLGLGHFAVLSDGTKVANPRFLRRAEKKLKKTQRALSRKVKGSANRVKARVRVARAHAKVTDARREFHHQTSTQIIRENQAVYVEDLCVRGLGRTRLAKSVHDAGWSAFVTMLEYKAARYGRTFARVGRFLPSSQTCSVCYVIDGPKPLHVRTWTCGGCGAVHDRDLNASRVVLAAGRKLAREREAEN

SEQ ID NO: 24509 - protein, 582 aa, Rhizobium sp.
MDLRMGDGPSLSVVLDAYAALMSRAERLLLAKLKAGRVWTGDLKVSFYQHLGLSATHLDMAYRQLQAKLNSVAELASDRVKGLAGKIASKRADIARKVKALTKVVAERSKLPEELRVLEAKIAKWRASLATVKDSMRARHLFVLKQNLDKYHATLAAASSIQRRIQALRSALHQHKRRLGVLEHRKAEAQKQAADPTLCFGSRKLFRAQFAFKENDYADINAWRKDWSASRSAQMTIDGNSSKESGNQFARLRRRPDGRYDLELRLPKALASSATRSFKFAGHEVDCVDFAGLSFNHGDEVIQQAIDAGRPITFKFRRDDTSWKISVSVNDMNQPEPANFSSGALGVDLNAGHVSATLVDATGNPIESFTFPCVTYGRTTGQSKDTVRKVAAQIAELADRLGVPVVSEKLDFTRKKSTLKNSDDTRYARMLSSFAYSAFDAALASACLRRGVAHRRVNPAYTSIIGRVKFARRYGLSVHEAASLTIARRAMGCSERLPRSNDGTVTVPTNGSVHVTLDLPVRNGSRHVWTEWNGLNKEYQKKALAARGSSGRRSRPGCRPKTPSGRSGSPLHGPSVEVGRSH

SEQ ID NO: 24510 - protein, 545 aa, Rhizobium sp.
MNAGKEKLVLAMLHRWRRAAVRTATIQWRCFFERGRFDPFFDPATTHRKASVAVRTGLLVQIGAHFGLDIGEGKPGATRRYPEMAPGLVDPLAEMKAELGAAQVQMVREQVLGSLNSYVSNRANDFKRIVFASSVDDVTRHMLFVINKTRAWFDLSRKLVVGGVEIPASARCLARKIMSHVMSRHRFPRMDRINMLVDQRIAKLAEAKAATGHDTWLRITVVRGVKIDIPLQGFEYFDQRRGIRAKSFQIIKDRDDGRIYVGVMTNVAESFEASRESYAASVRTEAVALDFGLTTMFATGQGDLLGRGFMVKLQAMDRTLTAIARHVQRSGQKPRSSKRYCAWVAKVRGFITTEVNRVINRLIEVHRPSKLYLEALNFQSPGMSARMNRLIQNCGRSALRSKLAAIEQEFGIEATEVASAYTSQTCSCCGYTDKRNRSAQKFQCRFCGNRMHADVNASRNVGSERFRSFGSPTPGFRQRILDTLVSQHVERYSRERGAPSDPRKSNPYFTGQTIAARLSLQEVCQPPRSEVANEDEELPSTLFAA

SEQ ID NO: 24511 - protein, 377 aa, Proteobacteria sp.
MLKTMKYRLRPTKKPAHLLESQIEECRTLYNHFLEARKRAWEERQESLTYHQQAVTLPALKQRCPALAHVHSQVLQHVAVRVDRAFQAFFRRCKAKETPGFPRWRGPGRYDSFTFPQYGNGCQMAHGLLKLSKVGAVRVVHHRPLEGLPKTCTIRRSSLRKWYVTIVCEFDPQALPATGEAVGIDVGLLNFATLSTGESTPCPKFLRRDEKDLKRTQRQLSAATRGTPERRTRRAIVRRVHERIANRRTNFAHQESRRLVNRFGVLAVEDWAVHRMVHNHSLAKSIQDAAWSQFATFLAYKAVWAGRRCVAVTPAYTSQDCSRCGHRQKKTLAERVHACACCGLTLDRDHNAACNILRLGLQSLGRVPRSSGLQAGE

SEQ ID NO: 24512 - protein, 502 aa, unknown
  TnpB Polypeptide
MPSFILELEVSYSGNLLKEHKPGTNLKKLGTKHVLDTKMNVAVAIRNTCKKEALRRLHILQHDREYQALIKEYRACKSDKKSVAEINQKLRAVKKRVKFEEYDLHKYALYSKHQYSDILGADECQKLATQAFKSVEKILYGKSKKVIFLPRTSDSSVEGKSNKSTLKYIGDACIQFGKENQYPLVIKKKDAYAIEALKHPVKYVRLVRRTIRGRQRYFAQLVMDGIPPKTKNLNYGRENSRVGLDEGVSTIAVVSEKKVMLRELAPNTAIDEKKLRKLNRAMERSRRATNPGNYNSDGTVKKGKKVWKKSNRYRKLETKRKELYRRSAWNRHTSHQALANEIVKLGLDIRVEEMHISGLARKAKKTTVNKKNGRKRSKKRYGKTVMSRAPAALIAAINQKLSYVGEGIKKINTFTVKASQYDHVSNTCNKKPLNQRWHTLPDGMKIQRDLYSGFLICYTNDELDHVDRKACIHNFKHFKELHDQEIAYLKELDNQDLRWYIA

SEQ ID NO: 24513 - protein, 396 aa, Streptomyces sp.
MATRVKRAFKYRFCPTDAQAAELSRTFGCVRKVYNLALAARTEAWARQERVTYNQTSAMLTVWKKTEELAFLSEVSSVPLQQALRHLQGAFANFFAKRAKYPRFKSKRKSRASAEYTSSAFTFRGGRLKLAKMAGPLDIVWSRPLPEGSVPTTVTVSRDAAGRWFVSMLCDDPTVKPLAATDAAVGIDVGLDHLLTLSTGEKIANPRHERRDRARLARAQRTCARKEKGSANREKARRKSARIHARITDRRRDGLHKLTTRLVRENQTLVIEDLTVRNMVKNHRLARAISDAAWSEFRSMLEYKAQWYGRDVVVVDRFFPSSKLCSHCGTLQGKMPLHVRTWTCDCQTVHDRDVNAAKNLLAAGLAVTVCGAGVRPQRRTPGGQSATKQKTPRREP

SEQ ID NO: 24514 - protein, 369 aa, unknown
  TnpB Polypeptide
MSQKFRLYPSKATEGKLAEQLELCRWLYNRLLEELNAAKKAGQKLTQKGTQHLIVELKKQKPELSDVYSKVLQMVNYQLWGNIRALASMKKKGRKIGKLRFKGKWFKTLNYNQSGFKLVGKKLRLSKVGEINVKLHRPLMGEVKGVVVKREPSGKWHAIFQCENVAKPLPKVNKSIGIDVGLKHFLSDSDGRQLENPRLYEKTLKRVQMVQRELSRKKKGSKNRGKQKLKLAKLHEKLVNQRNDFLHKLSRFYVNNYDVIAVEDLNIVHMVRNRNLAGKIHDASWGKFLQMLAYKAENAGRQLVRVNPRGTSREYMYGELDRDYNASLNILERGLSGLGRPFEPVEVKPLLVGIPASNIIETGSPYTSG

SEQ ID NO: 24515 - protein, 453 aa, Moorea sp.
MQMYGCQQHFITTTAENRAIIEFICSEANKLTNCGIYYCRQILFKAGKYLTNADLDKIMKTNVHFKAMRSACAQQTLHGVIESFKSYKALSKLYKKGQLAIKPRVPSYRKKGGLAVVSYPARWVKLIKGHLKFTLGKQVKAWFGIDHFILPMPSNLDFKSIKEYRFVPRNGCLYLEFVYERPASEQVQSTDEVLGIDPGLNNWLTCVSTTGKSFILDGRKVKSQNQWYNKRVAAIKKGKSKDYWDETLAYLTEKRNRQMRDNVNKAARFIVNWCLSNDVSTVVFGWNKRNKDSINIGKKNNQQFVQIPTAKLKIRIEQLCIEYGIKFLETEESYTSKASFLDRDFLPVLGAKPVREACPSGLGWAASGKRVKRGLYRSAKGELINADCNGACNILRKVATQLGRSLAEVGRADLNLPQRYRLDSLSRSYREASRSRSESKGLSVVSTRKVTSA

SEQ ID NO: 24516 - protein, 375 aa, unknown
  TnpB Polypeptide
MEQTITAKLQILVNPSDKQILHDTMKAYSNACNYVSDYIYKTHNLSRYSVQEDTYYNVRDSFGLRSQMAVSCVRTVIAKYRTILENQNEWIKPNFKIPQLDLAWNRDYSLNTKNDTFSVNTLNGRIKVKFYKGGYENYFSSNCKFGTAKLVFKHDKYFLHIPVTYEIDKLAMSDVSNVVGVDRGIRFIATTYDSKGKTTFYDGNDIKQKRGHYKALRKQLQQVHTPSSRRRIKAIGQRENRWMQDVNHCISKALVTSNPQGALFVLEDLTGVRAATEKVMVKNRYVSVSWSYYDLEQKLTYKALKNHQLVEKVNPAYTSQTCPKCGHTEKSNRDKHNHLFYCKNCGYKSNDDRIGAMNLYRMGINLLVPDAVTTE

SEQ ID NO: 24517 - protein, 490 aa, unknown
  TnpB Polypeptide
MRTKTSSFVVELPLRVNDQQNRFLEQAFEFGRTLYNATLGTALGRLQRMRETKEWREARDMTKGRDRTKAFNAIHKSFGLTEFGLVTIANDHRKASGRNDIGAHEAQNIGKTVWKALKGHLFKKAGRPRFKSFKRGLNSIEGSNNQEIMYKPKLGAIVWRKHVIQYMKSDTDYMKEALASDRKVKYCRIVRRSLNGVKRWFVQLVVEGLPPVRKVYAPQCEEVGIDPGPSRIAYFHEHHAAIAEVAPHVDMKEPQIRRLQRKIDRSRRANNPDNYNPDGTVKKGSSVWHTSNRGRRMAAKLANHHRCLAATRKRDHGKLVNDLLQIGGTIKIEKNSYRSYQRNYGRSTNRTGMGEFVEHLKRKAESAGCEVIELNAYELKMSQYDPPTNTYRKKPLKERWHRWGNTNTLVQRDVMSAFLACHVTENGHDRALLLKKWTTAEALLSGSGLCRHEPCNDPVMSKDASGLTKPNCESKPERGRGLPQTLCSDV

SEQ ID NO: 24518 - protein, 374 aa, unknown
  TnpB Polypeptide
MVLNATVIKARRIRIYPTQQQKQLFKQWFGVGRKVYNTCVNHFNNKDIEVKGWMKLGTTVLSELTEDYIKAVPYQIKKIAVKDSYTSWRTNCKKTKQTGKPFKLRYKSRKNPMQSCYIPKEAVSENGIYYTISGKLKFSEREWLKNDFCACRLINDHGRWYLSVPQKITTTTAENQGGIVALDPGVRNFLTYFSEDGRFGWLGIHAFDRILNLNLKRDHLISRLSLTKDKRKKYNLKRTLNRSYHRIQDLVDELHWQCINYLVNNFSVIVFPPFEVKGMTKKGRKLRKSVVRSMLSIRFFDFKERLKQKCKECGVLYVEQNESYTSKTNSFNGELIPNLGGKEWFVFDGIKVHRDLNGARNILLRAMRDSSAAS

SEQ ID NO: 24519 - protein, 296 aa, unknown
  TnpB Polypeptide
MLRAIKIRLYPNKTQEQTLNKVLGSYRFVYNQMLARKQNAYKTDKTNLSVNDLSKWFHGTLLKDEQYDWLKEQNTKVMKQAIRQMDGAYQRFFKQHNGFPKFKTKKDKQSALFPIDAISKKNTFETRHISLISSLKNIKFRCSDLYLSRLQKYKKDIRSATLSKAKSGNYFLSILIKMDDAELKRFENTNKQVGIDLGIKDFVITSDGEVFENKHLFKKKEKQVKRLQKQLSRKIKGSNNRKKAQIRFARLFEKITNKKVNYLHYVTNELLTYFDTIFMEDMFCMWLQETRFEVKR

SEQ ID NO: 24520 - protein, 386 aa, unknown
  TnpB Polypeptide
MQRTICLQLEPSFTQAAALEETSRQFTAAFNLFAQLGWSNSVSNATKLHFLAYYTVRAALPDLNSNLTNTARAKAAEALRSSFTLRKNRTRTVSMPRSHSCPPRYNVHTFRINWESQTVRLSLVAGRQTIRFRVPAYATKYVGYSVDTADLLERDGRWFLHVVVTVPAPTIAPSETVVGVDLGLSHPAVTSTRHFLGKKRWKAREGRLFKLKRALQKRNTKSAKRHLKTLRRKQARFRRDCDHVVSKQIVQSVEAGSTIVVENLTNIRKRMKGKRHTAIKRRLHSWSFAQLLAFIVYKAQERGGTVVAVDPRHTSQTCSCCGHQARNNRRSRAAFRCQMCSYELHADLNAAYNIVAKYHAQGGISRLSGLPVNQPIVSDPEPLAEG

SEQ ID NO: 24521 - protein, 424 aa, Bacillus sp.
LKLLEGRNLRNYGVSLKGKHLFLNTVFSSVLKDPAERLLKAFTSFFKGNTGYPHFRSWKKKWYSLIYDEPNKGWELQRDGTKLSISLGDIPGLPKEKRKRNPSIIGTLGETVVLKEGEVFKTLRICKQQGNKFYAIFTVERCSQEELACKGVMSAYRKECNLAKKEKRKKSEKPKLEEKQMEIPKDISWIALDPNHKNFFVGVDHEGNSIEFTKLQMIKYWDTTIDKLKSLRDVCEKNYKKRKTKHGSSYTVHSTRWNRVNKALNIAYHKRREQIKTALYSIAHELYRRYDLVIIGDYTPTNGTTRFDNMKRSMLNQEKIGEFRKILEWVAAKLQKHYIMVNERNTTKECCICGHMKKKDPGVRNFTCEKCETILNRDTNSAVNIGKKAGYFLDINAYKHKLNHFSFTSYAVFGRKISWMSNHL

SEQ ID NO: 24522 - protein, 378 aa, Moorella sp.
MSSVTSSLKVTRNYKFRLYPNKEQESQLLRWLETCRWIYNTALAQRKETWERERRTVTRIEQQVWLKEAKKTDEHLREIHSQVAQEVLFRVERAFAAFFRRVKNGETPGYPRFKGRGRYKSITFTQFGEGKGASFQDGKLRLSKIGLVKIKLHREIHGTIKTVIVKRDAAGKWWAVFAVEKELTQSQANNGPAVGLDAGLEKFAALSDGSIIENPRHLRKTEKRLKHAQRNLSRKVKGSRNREKARQKLARLHAKIHNQRRDFLHKQSRRLVETYGLIAVEKLNIKGMVKNHRLAKSISDAGWGEFMAMLEYKAAEAGARLVKVNPSGTSQECSGCGMDVPKELSERTHYCPYCGLILDRDVNAARNILKKALALEAA

SEQ ID NO: 24523 - protein, 271 aa, unknown
  TnpB Polypeptide
LPKIGWVGYRKSRDIIGAIKNVIVSRRGEKWDVSIQTEYKVVSSAPNSSEIGIDMGVKRFMTMSSGDFVEPLNLFKQELEKLAKLQRKLARQKKGSRNSRKTKRKIARLHRYIADSRRDFLHKTSTKIAKNHSIVYVEDLKVSNMSASAGGTKESPGKNVKQKSGLNRSILDQGWYGFFQMLSYKLERRGGKLIKVDPKNTSRTCPRCGLVSAENRKSQATFACIGCGYRSNADEVGAINILRAGRVRLACGTSGAVRPLSAGTQRDRLQH

SEQ ID NO: 24524 - protein, 259 aa, unknown
  TnpB Polypeptide
MLLLYPIIKEKTVYVKPPEPQPLDPARALAIDHGIDNWLTCVSNLGHSFIIDGRKVKSFNQWYNKQLARLKTGKPQGFWSQQLDRITEKRNRRMRDAIHKAARLVIDYCLKHSIGRVIFGWNKGQKQECQMGKINNQNFVSIPTGRLKERIEELCQHYGIEFIEVDEAYSSQASFLDGDELPNYGEKPDGWQASGKRMKRGLYRTAKGWLVNADANAAANLLRKVSRTLGLCLKELCRGGLLTPLRSAGGASHVRLWTA

SEQ ID NO: 24525 - protein, 446 aa, Rhodococcus sp.
VRRQLAARARSSGGAPAGRLRITDLQGPPQIAAMARLSAADRQLAQLAVTVAEHELVLTVKLPTCPAPVGRAQWRRVRLTAAIPAHLCGRPVIDWHLPILVLDHRGLLWRCAATELVPAGDLDSAAVAVGVDWSPSTLGAAAITTDSPEGLVSDYRGFTYDDRGLGIKLARLQAEGQLLHAKAARLTRLAATAPPEVRAQLEAKIAVLDEHRTAVGAKRGKINRELAFHFACQVTDYATTAGAQVIAVEDLSTLETRGHGRVNNNRAAQSARRQAVAALAHTATGAGITVVSVPARGSSAWCPGCDEPLARPGGYHTAWCPGCRVGGNRDHLAGVNLAKRALLGKNNVTRRRGQLPAVRVAEHAPIRRCRDKTGPTPSRPRHRRVRRSLPTAPRRLGVNPKQHVPAPQASVWDTVQPTPPHGDTGSRDTRPSQAPATPVADSPRST

SEQ ID NO: 24526 - protein, 395 aa, Actinomadura sp.
MRFRLQPTLAQERALLEHCAHARFVWNLAVEQHAHWRPGRTSAPGYAEQSRQLTEARKAFGWLACGSQTVQQQALRDFAQAMSNFFAGTHRRPTWRKAGRHEGFRIVGRRGSHWDVRRLSRKVGEVWVPKVGWVRFRWSRAVTDSVKSFRVVRDRAGRWHVAFAAIPPPVDGPGTGQVIGVDRGVVVSAALSTGELLSVLGLRDSEAKRLLRLQRRLARAKPGSNRRQRLKTTIGRLKAREVDRRKDWVEKTSTDLARRFDILRVEDLKIRNMIRSARGTVQAPGKNVRAKAGLNRSIHAAGWGRLVARLEEKAPGRVERVDPAYTSQICNACGYRAASSRESQAVFHCRACGHTDHADVNAAKNIAVGRTVSARGGRPPGGPGNREPQLVSSSV

SEQ ID NO: 24527 - protein, 370 aa, Oscillochloris sp.
VKLTAQLKLLPTPDQADALRRTLEAANAACDYISRIAWDTQTFGKFDLQKVCYDAVRETFGLAAQMTIRALGKVGDAYKLDRRVCRTFRPHGAISYDNRILSYALPDSSVSIWTLDGRQPIPFVCGARQRQLLATQHGETDLAYIRGEWYLFAVCVVEEPLPTDVDGVLGIDMGVTNIAVDNDGEIHSGKAITHVRYRHRSLRKKLQGKHTHGARRRLKKLAGQEYRFATWVNHNLSKRIVAKAKRTKRAIALEDLTHIRTRVRAKRSQRATLHSWAFAQLRAFIAYKAALAGVRVHAVDPRNTSRTCPNCGCIAKANRKTQASFVCTRCGLAGHADVIAAGNISGRAPISVPHYPDADSSVDEGKAQEL

SEQ ID NO: 24528 - protein, 155 aa, unknown
  TnpB Polypeptide
MRSMAQRANKKSLIKALHAKIKNRRKDELHKFSTMLTQHYGAIFVGNVSSSKLIKTKMAKSTLDAGWSSLKTMLEYKSDHAGVMYEEVNESYTTQTCSSCGEKPPSRPKGIAGLGIREWVCSDCGTVHDRDVNAAKNILALGHERLAVGIPSLSQ

SEQ ID NO: 24529 - protein, 366 aa, unknown
  TnpB Polypeptide
MKQTMLLKLAPTEDQHRALLDTMHAFNAASTHVAEIAFAEKTANKFELQKLVYGELRTTYKLPAQLAIRAISKASEAYKRDKSIQPSFRPEGAIVYDPRIMAFKGLNTVSLITLSGRVLVPFRVGGYQEARIDRIKGQADLLYRDGVFYLAVTLDMPEPTLDVPDGTLGVDLGMINLATDSEGESFSGEAVEKNRKRHAALRQRLQKRRTKSAKRHLKKLSGQEARFKKNTNHVISKRIVQKAKANGQAIAIEDLRHIRKRTEGTVRRSQRAKHSCWSFGQLRLFLSYKAALAGVPLHTVDPRNTSRTCSRCRHCAKENRKSQASFCCVNCGHTDNADRNAAINISRADVMRPIASGRAQVQAAEL

SEQ ID NO: 24530 - protein, 539 aa, Streptomyces sp.
VREFAAPFVTPGPSGVAVRTRLKQLTPADEEVLRWVGAHLGTLAGRDLKARCRDGLGHDAAAWAVRKRELTPQSSARWAGAVTKATHDQWALARRGAHAHLQSLEAGVRILRHRLSLPVGQKGSKRAPGGYRSRREWHAKSRRLHVLEDRLEQARAAWVSGTVHVVRGGRHLAQLRHQLPAARLTESHWRARWEAQRWFLQADGEGGKRFGNETIRITPDGEVSIRLPAPLKDLANASHSRYVLTGRIHFAHRGQEWADRVAMNRAVAYRIHHDPVRGRWYVTASWQKPVTPTIPLAAALAEGVIGVDMNADHLAAWRLDVHGNPVGHPRRFSYDLTGTTGHRDAQVRHALTRLLHWARSCGVRAIAVEDLDFTAEKTREKHGGRKRFRQLVSGMPTGRLRARLTSMADQTGITVVAVDPAYTSKWGAQHWQKPLTSKNRRTTRHDAASIAIGRRAQGRPVRRRTAPPRTHQSDGCGHRTVQAPPDAPGREGPRPRIPGPRTRSVPPDTERTRATRTPNTVRDVRSDQEWVQDPLLITD

SEQ ID NO: 24531 - protein, 410 aa, Bacterium sp.
MIKEMRTVEFVVLPTSKAKAGKMFQIAGGCRYVWNHFREKNLADYQAFRNGKAQRRQTSFFSLGVEFTKLRRETDWMQELPCAPVRYSLKYLSDALGQAMAGKKGFPKPRSRAKTAPGFTLPDTCNFRIRKVNGKYSLLHIPLVGWVTLTRKGGNPHEAGDPKQVVLRHDGHRWRAFVSYEIEEEEKMDDGEVLGVDMNVRQIATSDGDFYHLPDLEKKEKRRKWYQRKMARQVKGSNRRGDTKKKLRKVSRKITSIRKNWVHQTTKEISGKCGTMVVEDLKVKNMTASAKGSVENPGKNVRQKAGLNRAVLDTAFGEVRRNLEYKCGRLIEVNPAYTSQTCSRCGHAEKENRKTQARFQCVSCGFASNADTNAAINIRRLGMAQLHGEGTGISTVPMNRETDARLPHGS

SEQ ID NO: 24532 - protein, 384 aa, Acidaminococcus sp.
MYRTQSNIIRGLSKEEYSILREMCRYSNNLYNVALYNIRQYYFQEKKFLKYEENYHVCKENENYSLLQAGVSQQTLKVADRSFKSFFNLIKKAKSGEYRFKDIKMPRYREKGGMFNLILSTNAINIKDGFLTIPMSREFSKLHGGRPIKIPFPERLEGKTIKEVRICPIHSGMYFKIQYCYLQEAEPQDVSADNVLAIDIGLENLATCVTSTGTAFIMDGRKLKSMNQYWNKQKAYYQSIADKQGQKKTHRLHALAKKRNHRTQDYIRKVTRYIINYCIAHRIGTIVCGYNGDFKRSMDLGKMTNQQFTQISFGSLRKTLEGLCERYGMTYIEQEESYTPRQAVWIWTIFLSTILDNRIREPSVENESIAGCISLPMGGRLMPT

SEQ ID NO: 24533 - protein, 431 aa, unknown
  TnpB Polypeptide
LEKLSKTITRAVVLECYANKFARKALREIESAYREMLVEMVEYAVKYKSSQEALHKVFYDKFRERFPWLPTRVIKGAYRDAVRRAKSFRERKKRGKVHKDKPEVKRVTITYSDSQDWRLESGVIELRTHRGWVELRYRDHKQLHRYLYGGWRLASELRFKILGRKIVVYLSFTKSFEVSYNPKNVVAVDVNENNVTIALFKDDALADVYRVETGLGRIVIAYSERRKRISLSKSTKVKEVKKRLKKLRERERKLDVLRKTAKFVERLAVENRAIVVVGNINEKAKKRMEEDAGNKLRHRIHQWSVKKLIELLDEKPIHVVKVSEKGTSSRDPFTDKKIKRFEPLMIRTAVKGFKRVKLVKIVLRIAKIGERALERDVVGAINIGLKYLNSDGSPMALGSTGAHEVRMKLVIPHRSSTPQTCLKLSTTIHKY

SEQ ID NO: 24534 - protein, 403 aa, unknown
  TnpB Polypeptide
MKKGSHSKSTKRQAALGVATRVLRLRIKDKHAKHLLEQSREVNQVWNYCQETSLKILARERRFCTGYDLDQLTAGATKEGLSLHSQTLQAVSAEYCTRRRQFKKVKLRWRVSHGSRRSLGWIPVKASALSYRAGQVHYQGAALSLWDSYGLADYQLRSGSFSEDSRGRWYLNVTVDVKQPVKTAGSSSVGIDLGLKDLAALSSGQTVEAQQFYRDLEPALAVSQRAGHKDRTKAIHAKISNRRKDFLHKLSTRLVKEYGAIFIGNVNAAGLAKTNMAKSVLDASWSMFRTQLQYKGDSAGSWVREVNEAYSTQECSCCHARTGPKGLAGLAVRQWTCSVCQSEHDRDTNAAKNILARGLVELEKEFTTAGEAKANEAAVNKDGQPSQVGHDLPVAGIIAPSGR

SEQ ID NO: 24535 - protein, 364 aa, unknown
  TnpB Polypeptide
LRLRLKDKHTSALRAMAADVNFVWNYCNELSFKVWTRERRFMSGFDFNPYTRGASKEGLRIGSAVFQEVSEEFAKKRRAAKRVKLRWRVSNRRRANYSLGWIPFKDRSLTYRGGQVAFQGLKLSLWDSYGLAGYELGAGSISEDSRGRWYLNVNVKVKKQAKATADETSGAALGIDLGLTAHMTDSEGEAVEAQQFYRDLEPAIATAQRANKKDRVRALHAKVTNRRKDFLHKLSTKQARESAALFVGDVDASALAQTRMAKSVLDAGWSAYRTMLSYKCDDAGTWFKEVDERYSTQECHVCHALTGPKGREGLSVRRWACLCCGIEHDRDVNAARNIRDRGLKWLESEFAKAAEARADATCLE

SEQ ID NO: 24536 - protein, 492 aa, Streptomyces sp.
MRDLAWMVLVGCGDGFFGWGHSGGDGVGELRSVASSFVACGPSGVALRTRLKHLTPDDEKVLRLVSAHLGSLASKDVKARCRDGLEHSADTWAVRKRELTPVSSSRWAGAITKATHDQWALARRCQLAHIQNLEAGIRTIEHRLSLPVGKKGSRRAPGGCRSRREWHAKSRRLRVLQDRLTAARADREAGVVHVVRGGKRLARTRHHLEAAQLTESQWRGCREAERWFCQAEGESGKRYGNETIRISPDGEVSLKLPVPLARLANAPHGRYVLACRVTFAHRGTEWADRVAANRAIAYRIHLDTSRDRWYVTASWQIPPTPTLPVEAALAHGVIGVDMNADHLAAWSLDIHGNPIGAPRRFFYDLSGTAEHRDAQVRHALTRLRYKWWPTGPPTSSFVVVRHSSYVRFPSSSIVGCIFIGPYSSMSEGRGVSGPSGPVRRMRSTRQIRNSRSSTRNLSAWPSSRYSSAAFAYLTFLASSSWYSRPQISASPS

SEQ ID NO: 24537 - protein, 405 aa, unknown
  TnpB Polypeptide
MPVVIKMKQTTIFKLEPNFEQEKHLHNLCSIATKLYNTDNWQRREAWEKTGKIPNAYAQKKALNQNHWFKLLPCHTAQAVCFTLQQGYNSWFSLRKKDSEANPPGFRKKTMLSPLSVYEFKIVGNSIRLPISRKYRAEHKISLMEIGFVDWKQPQGKAKFCQIVFCKGEWFAHVVYEVEEQTPNLNEGVMAVDLGIINTAATTDTTGQTRVYSGKQVLAVQHYFNKEKAKLTSILTKQYPKRHQSRSLRILQSKQTRQIGQALHTHSKAIVSDCQNKGIKTLVVGDLTDIRKDKNFGRVGNQKLHSWSFSKFAQQLEYKCARVGIRFVRANEAYSSQTCSQCGQVRKANRKHRGLYVCKACGYKVNADVNGSSNLLKKYLRDFLSRSIGSVALPSVARITNVCPS

SEQ ID NO: 24538 - protein, 316 aa, Synechococcus sp.
VKDVPCHIKQNAVVEAWQAFQKSKSAKFRSVRDKSHTLQFNAGNFRNGTWYPKLTKGLSFRASEKVPRECAYGTELMRVKDRWYAIFPEPVNEQCSLATGVIALDPGVRSFLTGFDGDGFVDIAKGDFGRITRLCYYLDDLQSRLSKAPRQKRRRMRQAAFRLRQRIRNLVDECHRKVAAFLTDNYRLIFLPTFESAQMVAKAGRKFGSKTARAMLSWAHYRFKQFLKFQAKKKNVVVVDVSEAYTSRTCTRCGHIHTKLGGAKVFVCPKCGHRLPRDWQGALGVFLRALRDTAFLLTEQDAVAAFPCRNVQKSSA

SEQ ID NO: 24539 - protein, 369 aa, unknown
  TnpB Polypeptide
MEKAFKYRIYPNKTQQVLIQKTFGCCRFVYNYYLDKKIKLYESEKKSFGYNNCSKDLTMLKKSLEWLKEPDKDSLQKALKDLDTAYKNFFKNKFGYPKFKSKKERHKSYRTSCTNNNIKYLGRHIQLPKLGKVKITDKMIPKGRILNATVSQEPDGKYYVSLCCTDVVNYPLHLTNKNTGIDLGIESFATFSNGHKIGNMRFYEKSEKKLAKLQKEMSRKTKGGSNWNKARIKVARLQKHIAEQRRDWMQKLTTDIIRNYDNICIEDLKVSKMKEENLETNKKSHVRHKHIGDVSWHEFRRELEYKCKWYGKQLKIVDQYYPSSQICHCCGNNGGKKEVDIRIWKCKYCGVVLDRDVNAAVNILNEGMK

SEQ ID NO: 24540 - protein, 431 aa, unknown
  TnpB Polypeptide
VIEATRTVIVKSTPLPRKLFRVFVELEGMYRNMVEQLVLHAVRNGVASFTRLKALKYRELRSQYPQLPSHYAYTSCQDASARAKSFLRLKKKGLAESDYPEVNRVSIWLDDHLWKMRSLTSIEIATHRGWIAIGLEPHKQFWRYVNTGWKPASEARIRLNKKTRQLFVYLTFKKNIELFEPRGFIAVDVNESHEAVLIDNGVYLFETGFKDIVLGYYYRRKRIQEKYDKLYGGKSRAKKKALKKLNERKRKNDLRSKLANIIVRVASEKQYAIVLERLGKHPARNMINHIKDDQLRHRIYQASFKGVQKAIEEKAKKRGVTVVYVNPGNTSRACPIHNSLIVYENGSRIGICSRGGELWHRDVVACYNLLLRARLGNGSNAPSLGGFTLDGSPVPLGSTATHEPMLIAREAWARRKSLDATNKHELMKMNI

SEQ ID NO: 24541 - protein, 402 aa, Escherichia sp.
VKRLQAFKFQLRPGGQQECEMRRFAGACRFVFNRALARQNENHEAGNKYIPYGKMASWLVEWKNATETQWLKDSPSQPLQQSLKDLERAYKNFFRKRAAFPRFKKRGQNDAFRYPQGVKLVQENSRIFLPKLGWMRYRNSRQVTGVVKNVTVSQSCGKWYISIQTESEVSTPVHPSASMIGLDAGVAKLATLSDGTVFEPVNSFQKNQKTLARLQRQLSRKVKFSNNWQKQKRKIQRLHSCIANIRRDYLHKVTTAVSKNHAMIVIEDLKVSNMSKSAAGTVSQPGRNVRAKSGLNRSILDQGWYEMRRQLEYKQLWRGGQVLAVPPAYTSQRCAYCGHTAKENRLSQSKFRCQVCGYTANADVNGARNILAAGHAVLACGEMVQSGRPLKQEPTEMIQATA

SEQ ID NO: 24542 - protein, 439 aa, unknown
  TnpB Polypeptide
MVTGRKYRAKALGKGSRKMFFTWSAAQMLIYNALVQERLYFLGFFRKFGGKLPSIDQKYSHLINRKDEAYAWMHGVPSQIYRNGAVLHKKAWSNYFAGVAGQPTPKKVKGADRSLWLTQELFSIKRVSKNWYELSVGTKKIPGGKYLFKAHRPFTAPASVHLKSYGSEIYVSFSCEEKVGQYPETEAEKIARLSRYGKDELQRITVGIDRGVVIPFQLNDGRRFDYSQTQKDRLRSSERKKKHYQRMMARRIRGSSNWKKAKAKTRLCNKYAANVRRNFAHKTSHSIVGDKSIEIIGMEDLNIKSMTVSPEPKVTDGGKFLPNGANAKAGLNKAILEKTWGLTERFIEYKAHRAGKLIIKVPAPYTSQTCSRCGCQAKTNRKSQGLFRCTSCGFSQNADRNASEIIKVHAVELFHAEGIKPKEVRKTMRLRHKPACASA

SEQ ID NO: 24543 - protein, 919 aa, unknown
  TnpB Polypeptide
MWWGPDDAPVLRHRSRSLDDVSRPCEKVVLNVGASSLLDNLLAESPDYKDPLKGFMLSAPYHRGRRPIYNPDDAVRRSAAAAVVPLTKCASAPATCFADRIARGDYGDSGLEDRPQSVEPTPEERMWTCRGCGTTDRSKLSTGSDSSMSCEVCGTVESNFSMIAGSRQKNCARDDDKTTVADEPCRDEHEIAGLALVNGDETCADRRKRHLHASTGTRVSRAVARKYDLSAAQARIDAEVVREARARVVRTVHSNRAKPHVPGHFHTHDPRVRTLPAHPRTHISPHVDMISTASQHIRGTSRSAQLISAHLSSVLATPVVPHRFFNATLKPVYDSCLLPVKPGSALPGPQCAVESTYAKCDDLRSGFRQRARQPPVQLQGKPRSELSRPFAPPPSPDAFDSDEDGGGEAGESSDEPQRKKRRKRVLVGQLRCYRVRMMPTAEQRHELKRCFGAARHAYNWFVDQVENQDKKPNEYALKKAYRARDDHPTWAEPVSSRIRAGGINDAANAYKSNFEKRKKNPSHTFDVKYRSHRKSHTEVVHVDGDGEGPGKQSPLLAFKPLPFANPSTRRAECAAFFGSNLSGVGVEEQRAAESDADRRARLALNAQLKSIGERPVPKPKAGAWRDGGADGIRLQDKPHVIARLLAEGRGGNGDGVVNGCKIHWDKRKDTFHLLYCYELPPAAPDPDPRFETKRIAATDPGARSFQTWYSPTSGDHGELLAGCRERLERRCARLDALQSAVATLRAEHVANDPAHRRRTPRQRGRRLKRLKRQEARERCRLRDWVGAGHYAAANFLLRAHDLIVAPHLKVAEMVPSAGRVFGSKTARAMLTWSHGRFTQRLHSAAYRHSGRTVLSDVGEPGTSKTCGSCGRWHADLGGSKTFQCPKCGVAMDRDVNGARNNFLAAYGRARGIGWDRKQH

SEQ ID NO: 24544 - protein, 423 aa, Atopobiaceae sp.
LDQQPSRLHRGRGALGSRQAMHREPEERVAMERAYEIRIYPNAAQRKLIERTFGCARWVYNRCLETRKAEYERTGRSPSVYQLQKLVTAWKRTDAPWLAEVDSHALQQAAVNLGRAFDGFFRRCRAGGKPGYPRFKSKRDARQSYRTNWGISVPDARHVKLPIIGVVKARVSRPVEGRVLNATVKRVPSGKYFCVLTCTDCPKPDIPEGRIEVLGVDVGIRCLMARSDGNAIANPKSLARSEKKLARAQRRLSRKKRGSRRRAKQRARVARIHEKIASQRKDALHKATTEAVRESQAIAVEDLDVRGMEKNRRLAKSVADASMSEMARQLEYKCSWYGRRFVKVGRFYPSSKTCSACGQVNQAVVLGVEAWTCPACGCRHDRDLNAALNIAREGARLLNEADGTAGLAGTGDAKASRTLVEQA

SEQ ID NO: 24545 - protein, 387 aa, Clostridiaceae sp.
MRKLLKSFKTEINPTEEQKTKIRKTIGTCRFIYNFYLAHNKKLHEDGKKFMSSNKFRIWLNNEYLPQHPEYLWIKEAYSKAVTQSVNNGQTAFTRFFNHESAFPNFKKKGKSDVKMYFVKNNPKDCHCERHRIKIPSLGWVRIKEKGYIPTTKDGYVIKSGSVSIKADRYYVSVLVEVSDNKTINHFDEGIGIDLGLKDFAIVSNGRTYQNINKSAKLKKLERQLIREQRCLSRKYENLKKGDATQRANIQKQKLKVQKLHHRIDNIRTDYINKTIAEMVKIKPSYITIEDLNVKGMMKNRHLSKAVASQKFYEFRAKLLTKCNKSGIELRVVDRWYPSSKICHCCGSIKKDLKLSDRIFKCRCGYIEDRDFNASLNLRDAETYSIA

SEQ ID NO: 24546 - protein, 490 aa, Mycobacterium sp.
  misc_feature (141)..(172): Xaa can be any naturally occurring amino acid
  misc_feature (385)..(490): Xaa can be any naturally occurring amino acid
VRPAVRQARCAEPGQARIGGRRRRVGGCLMAKFEIPEGWMVQAFRFTLDPTAEQARALARHFGARRKAYNWTVATLKADIDAWQATGIQTAKPSLRVLRKRWNTVKNDVCVNIETGVVWWPECSKEAYADGIDGAVDAYWXXXXXXXXXXXXXXXXXXXXXXXXXXXXXXXXTTGAMRVEPDRRHLTLPVVGTVRTHENTRRIERLIATGRARVLAISVRRNGTRLDASVRVLVQRPQQPNVAQPGSRVGVDVGVRRLATVANEAGAVLEEVPNPRPLDAALKELRYASRARSRCTKGSRRYRERTTEISRLHRRVNDVRTHHLHVLTTRLAQTHGHIVVEGLDAAGMLRQKGLPGARARRRGLSDSALGTPRRHLSYKTGWYGXXXXXXXXXXXXXXXXXXXXXXXXXXXXXXXXXXXXXXXXXXXXXXXXXXXXXXXXXXXXXXXXXXXXXXXXXXXXXXXXXXXXXXXXXXXXXXXXXXXXXXXXXX

SEQ ID NO: 24547 - protein, 461 aa, Mycobacterium sp.
  misc_feature (351)..(461): Xaa can be any naturally occurring amino acid
MPKFEVPDGWTVQAFRFTLDPTEDQAKALARHFGARRKAYNWTVATLKADIQAWHASGTVTAKPSLRVLRKRWNTVKDDVCVNTETGVAWWPECSKEAYADGIAGAVEAYWNWQTSRAGKRAGKRVGFPRFKRKGRDQDRVSFTTGAMRVEPDRRHLTLPVIGTVRTHENTRRIERLIKAGRARVLAISVRRNGTRLDASVRVLVQRPQQPKVVHPGSRVGVDVGVRRLATVATADGTAIEQVENPRPLGAALRELRHVCRARSRCTKGSRRYRERTTQISRLHRRVNDVRTHHLHVLTTRLAQTHGRIVVEGLDATEMLRQKGLPGARARRRGLSDAALGTPRRHLSYKXXXXXXXXXXXXXXXXXXXXXXXXXXXXXXXXXXXXXXXXXXXXXXXXXXXXXXXXXXXXXXXXXXXXXXXXXXXXXXXXXXXXXXXXXXXXXXXXXXXXXXXXXXXXXXX

SEQ ID NO: 24548 - protein, 381 aa, Enterococcus sp.
MLQHRAYKFRIYPNQEQEILMTKTIGCSRFVYNYFLNLWNHEYTTTGKGLSYNSCSAMLPQMKRNAETIWLKEVDSIAIQSSLKNLSDAFSRFFKKQNKRPQFKSKKHPIQSYTTKNVNNSIEIRNNFVKLPKLGFVKFAKSQEPKGRILNATIRKNSSGKFFVSILCEEEIVEFPKSNSAIGIDLGITDFAILSDGQKIDNNKFTSKMAKKLKREQRKLSKRALLAKKKGVNLFEAKNYQKQKRKVARLHEKVMNQRNDFLNKLSTEIIKNHDIICIEDLNTKGMLRNHKLAKSISDVSWSSFVTKLQYKANWYGRKIIKVDKWFPSSQICSNCGHKDGKKSLEIREWTCPVCHAHHDRDINASINILTEGLRLHVMGLA

SEQ ID NO: 24549 - protein, 315 aa, Microcystis sp.
MEKAYSFRFYPTPTQESLLRRTLGCVRLVYNKALHERTQAWYERQERVGYAQTSSMLTDWKKQEELEFLNEVSCVPLQQGLRHLQTAFTNFLAGRTKYPNFKKKHQGGSAEFTKSAFKFKDRQVYLAKCTEPLPIRWSRQIPDGCEPSTVTVRLHPSGRWHISIRFDDPTIKPLPVTDKAIGIDLGISSLVITSDGDKVSNPKHFKKHYRRLRKAQKNLSRKQKDSKNREKARIKVARIHAQITDNRKDHLHKLTTQLVRENQTIVVENLAVKNMVKNPKLSQAISDVSWGEITRQLAYKCRWYGRNYIEIDRVC

SEQ ID NO: 24550 - protein, 276 aa, unknown
  TnpB Polypeptide
LDLSGYTFSKWLNNEYIPNNPDKLWIKEFSSKAVKKSIMNADKAFRDFFKKEKGFPRFKKKREQKTKMYAPKNSKNDWKTEQHRIKIPTIGWVQLKEFGYIPSEKAGNKIKNGVVSRKADKYYVSVTFEISEEPEKIEEFTEGLGIDLGIKNFAVLNTGETFKNINKTSRIKKLEKKLKREQRKLSRKFESYSRRNRGGESATRKNLDKQIVKVQKMHLRLNNHRTDYINKVISNLIERKPSYIVLEDLNVRGMMKNRHLSKAIQKQNFYTFREIN

SEQ ID NO: 24551 - protein, 260 aa, unknown
  TnpB Polypeptide
MTQKAFKYRIYPTPEQETLLRRTMGCTRLVYNRALAARTEAWYGESKRIGYIESSAMLTQWKKQEDLDFLSEVSCVPLQQGLRHLQTAFSNFFAGRTKYPTFKKKRNGGSAEFTKSAFKWKDGQVYLAKCSEPLAIRWSRELPACATPSTITVKLTRAGRWSVSLLVDVEIETLPESPNEIGVDLGVTSLVALSTGEKIANPKGFNAKRRKLKKAQKVLSRKQKGSNNRYKARLKVAKVHQEITDARKDFLARVDDSIGA

SEQ ID NO: 24552 - protein, 132 aa, unknown
  TnpB Polypeptide
MPERIFLRVLTTRLVRENQTIAVEDLAVKNMVKNRKLALSISDASWGELVRQLEYKCDWYGRTLVKIDRWFPSSKRCSKCGHIVEKLPLNIREWDCPNCGTHHDRDINAAHNILAAFSCGESLWSERKTGKA

SEQ ID NO: 24553 - protein, 390 aa, unknown
  TnpB Polypeptide
MEKQYKFRIYPTKEQKVQIQKNFGCVRFVYNYYLEKCNKAYQDEKRIMNLNECCRDMTVLKKQPGYEWLAEADDNSLRYALRDLDFAYKSFFRAIKQKGSFTGFPKFKNKRETRQSYRSKNNIVRHSVDVFDKGVKLPKLGYVACKVSRQIEGRILFATILQVPSGKYFVSICCTEVEPATQAKTGTATGIHMGIRNLATLSDGQRFENIRAFEKSRSKIARLQRQLSRKPKGSKNHEKARLRLARAYEKATNRKHDFLHKLTTQLVRDYDLLCVRDAPFAERSKQPWYSKYAFDAGWNMFIRQLEYKCNWYGKELIKVSSKHPSVQLCSACGYKNTETKVKQTSQSWTCPKCDIKHNRAINAAINILNEGIDPKYVRRGAPEVKPDDSA

SEQ ID NO: 24554 - protein, 399 aa, Acidimicrobiaceae sp.
MAPEGSRCRTFRYRLHPTKLQTEALIRQQRYECELYNAALEERIGAWTRERRSVSLFDQYLTLTGLKECRPEVVASGIVLCRGTLKRLDCAYRAFFRRVKRGETPGFPRFKPASRFDSLQWEDASGWKLKFDHRRLYLMGIGEIKSNYHRPLKGEPKAITVKREGTKWWLSVRCVNVPAMPLERTSCEIGIDLGIVNQIATSDDELKKGNHFGAKAQKRLARAQRELATKQRGSNRRRRQVEEVVRLHYKIKNQRSDAAHQLSRQIVNDYDLIVHEDLKITNMVRAPKGRPDPAQPGAYLPNGARAKAGLNRSIHDAGWGQFVSLLSYKAESAGRTVVSVNPCYTSQTCAECHDVDAGNRVSQREFRCRKCGHRDFADINAARNILRAGRALQAPACVG

SEQ ID NO: 24555 - protein, 409 aa, unknown
  TnpB Polypeptide
MSLITRSYRRRAYPNGAQRRLLDRWFGATRWLWNTALEIRSEAYRACGLSLTGNDLSRWLTLWKRTAGHEWLAEVPATGLTQCLRDQDRAFSGFFAKRARYPRFKAKGARQSLRFQDVGAGWRSGVLRLPKLGVVKLAEGLPEVERPNMVTLSRDARGAYYVTFCAEVPCTLRPGAGALVGVDLGLTHLATLSTGEKIPNPRHYQRRLRYLRQQQRCLARRQKGSQRREKQRLRVARAHARAREERQYALHALSTRLVKEFDVIAIEDLNVRGLARGRAARAIRDAAFGELRRQLRYKSDWYGPLLLEVDRWYASSKHCSACRFRLDELRLDQRHWTCPKCGTSHDRDINAARNLLTQGVRQLAGRDDRDLRVDAGDACPEETVLVQVLAEETRSGHRNQVGLQPTRLG

SEQ ID NO: 24556 - protein, 172 aa, Clostridioides sp.
QFISNLKKSLNKLAKLQRELSRKTIGSLNRNKARLKVARLQEHIANQRNDFLQKLSTKLIKENDIICIEDLQVKNMIRNRKLSRSISDVSWSEFIRQLEYKANWHGRQIVKVGKFFASSQICNKCGYKNEEVKDLNIREWICPSCNETHDRDINASINILKEGLRLITIQNK

SEQ ID NO: 24557 - protein, 386 aa, unknown
  TnpB Polypeptide
MKKLLKSFKTEINPTVEQKVKINKTIGTCRYVYNFYLAHNRNLHDQGKKFMTGKSFSVWLNNEYIPNHLDKAWIKEAYSKAVKKSIEDGCTAFTRFFKHQSDFPNFKKKGKSDVKMYFVKNNSKDCRCERHRLNIPTLGWVRIKEKGYIPTTKDGWKIKSGTVSIRAGRYYVSALVEVPDETIYNNNNDGIGIDLGLKDPAIVSNGKTYKNINKSARVKRLEKQLRREQRCLSRKYESLKKGESTQKNIQKQKRKVQKLHHKIDNIRTDYINKTVAEIVKTKPSYITIEDLNISGMMKNRHLSKAVASQKFYEFRIKLKAKCDENGVELRVTDRWYPSSKMCHCCGTIKKDLKILDRIYRCSCGYIEDRDFNASLNLRDAITYKIA

SEQ ID NO: 24558 - protein, 382 aa, unknown
  TnpB Polypeptide
MLTTVKYRIYPNKEQTILINKTIGCARLVYNLMLHDFYTNNLMKTPAKYKNEYPFLKEVDSLALANSGMDLKQAFRNYKNNKEHFGKPRFKKKSHAKLSYKTNNQKGTVRIENGKLILPKFRTGIKIVLHRQIDGIIKSVTIEKAPCGYYTAAILYKTENQPEKPLLSKENIVGLDLGLTHLAITSDHQKYINPKHFHKLQTKLRKEQKTLSRRLEENVVKRVYDKNGKLINTIYKKPLKDCKNYQKQKQKVAKIYDKIKHQRLDYLHKVSHDIVKNHDYIVLETLKIKNLMKNRKLSKAIADVGWSMFVNMLQYKSERFGKVVVQIDQWFPSSQICSHCKHQDGKKALSIREWTCSNCHVEHDRDINAAINIKNKGLELIS

SEQ ID NO: 24559 - protein, 430 aa, unknown
  TnpB Polypeptide
MRQVERHWIKEGHALYPICNDLTFKAKNLYNAGLYQIRQSIFERNKCQEEEKLSVLSWVDLVSQFRTEKQDDMLALPSKVSTNILKNLGSSINSYYQLLKCFHDKSNLSITSKPQLPKYLHKTEGRYVVEFTNQTFSKKRGDSGELILCPKDLNLTIPTNVENPKCVRIVPKLGAFIIEVVYEVKGVPFKHTGNYAAIDLGVDNVASVVFSNGINPLVVKGSKIKSINQGYNRLIAKAQSKLPKNQRTSKNIHRLWRNRELKLQTELHKITSFLSLYFDEMSIEKVFIGKNVGWKQKVSLGKKMNQTFVSIPFNTFISQLTYKCKLRGIEVIEQEESYTSKASFVDKDELPVYGELKTQPNFSGKRISRGLYKTKYGFLLNADINGSYNILVKGLATLDKVVDRTLVSHHTRSLKNYSNLSNLSLISNYT

SEQ ID NO: 24560 - protein, 370 aa, unknown
  TnpB Polypeptide
MKQTLMIKLASSPEQHQALLQTVERFNEACNYASQIAFESSTFGQYYLHHLTYDYLRQHYKLSAQMAVRAIAKVSESYKMDRKSQHFFNPHSAMVYDQRILSWKGLDKVSILTLNGRQIIPIRIGAYQEVRIDRKVRQSDLVLSDGIFYLAAVVDAPEPTPNVPDGFLGIDLGIVNIAADSDGETYSGGQVNGMRKRHAKLRAKLQANGSKQAKRLLKKRSRKEQRFAAHTNHVISKSIVAKAKDSGRGIALEDLTHIRDRITVRKGQRRQQHSWAFSQLRLFIVYKARLTGVVTMLVDPRNSSRTCPQCGFVSKSNRKSQSLFSCVSCGFSSLADTVAAGIIASRATVNWPDFSPAPGGAGQGKAVSFS

SEQ ID NO: 24561 - protein, 404 aa, unknown
  TnpB Polypeptide
MLISYKFRIYPSKTIEEKLVEQLEICRWLYNRLLEEVNEARKEGRKITWEDTQSLIVKLKRERSELKNVYSKVLQMVNYQLWSNIKALAKLKQNGKKVGWLRYKTSLNSFKTLNFNQSGFKIDFERKKLVLSKVGEMRIKLHHPIEGKIKGVIIKRTKTEKWFAIVQAEVGEKPLPKTGRVVGIDLGVNYFCVDSDGIAFENPKFIDRTLEKIKKVQKELSRKQKNSKRREKVRLKLAKLYEKLENQRLDFLHKLSRYYVNNYDVICVENLDVKDLVENGKSSTLNRHIHDSSWSKFLSLLAFKAERARRRVVRVKPANTSKRCANCGYVVKNLYLRDRWFICPNCGWEADRDLNASLNILDVGLGQSRTPVERDPLPLVIPYRNVIEGQVLSVKQEAPSVRAG

SEQ ID NO: 24562 - protein, 230 aa, unknown
  TnpB Polypeptide
LSRRCRRPRRPLGLTSVLSASQRCRMARSAPRLTVSGSTKHDCAATWVAWTRLLAHARIGNARRDYLHKATTTISRNHALVCVEDLQVRNLSKSAAGTIERPGKNVRAKSGLNKSILDQGWFEFRRQLEYKVGWRGGLLVAVPPQYTSQTCPRCDHISAANRATQAHFSCRACTYENHADVVGAMNVLARGHRVAACEEDGSGLEHKLKVKPASVKQEPTEATIREVTHA

SEQ ID NO: 24563 - protein, 467 aa, Butyrivibrio sp.
VYRTRQYRISKNHILYDYCRDICRSSAVLYNRANFILRQYSSSVDSMAGFKPLFSNQMMIYRLVRDNLSGTKYLGDSKWLSYNALDHLLKITKDKAYYALPAQANQQILKLLLRDYKSFFEAVKVYGRNPEAFTGRPKMPGYISQGSFKTAILTNQICRINNGCLKFPGTRDKLSLGQLPEEVCLKEVRIKPGGNSFVLDVVLSVPDKGIIPMADKDILSELSDIEDINDLRVMAIDPGTDSIAAVANTFGARPFVIKGGVIKSINQFYNKEMKRLSSCAMICNNRYRTRRMNALTEKRNRRIKDQFHKVSRQLAAYARDNHVAVVVMGHNTYQKQEIGIGHVNNQNFVQIPMLIFADMLRYKLAEYGIKFVLTEESYTSKADFLAKDYIPVYKKNAKENFAFSGKRIQRGLYRHYDGTITNADINGAANILRKVFPKVSQWDRGIVDMPCSAGCIEHPTGSCRHAA

SEQ ID NO: 24564 - protein, 412 aa, unknown
  TnpB Polypeptide
VATCELRYPGTTRVLCLLEICCRFNWWEQNRCDINACSLVCHLPELRDNPEYYSQKRSLVFLKVSRPWYKEIYSQVLQDLVMRVKLAFDRFIKGDCNGKRSGRPRFRGKGRYRSFTYNQVEDKDLQGNWLNLPKIGLVKLVLHRPIPEGFKIKTAIISKKPDGWYVTLSLADTSVPELTNADVQPTVENSIGIDVGLEKFLADSGGKFEEIPQYFRRSEEKLAKLQQKASARKKGSRAKKLLNRKVAKLHQKVARQRKQFHFETAKKVLSKVDVVFVEDLTVKNMSRRCKPKQDADGKFLPNGQSAKSGLNKSIADAGWSQFIDILTFKAERAGLKVVKVNPKGTSQYCSICLNTVPKTLEDRWHSCPKCGLEVDRDTNSAVLIKKVGLGVVLTIKRSTRKRREARAMPLVG

SEQ ID NO: 24565 - protein, 360 aa, unknown
  TnpB Polypeptide
MKLAAKVKLITNIEQAENLKETILIANKACNFISEKAWQSKIFGQYNLQKLLYYEVKEKFNLSAQVVIQCIVKVVDAYKLDKKNQRRFKSLGAITYDSRIISWYTNKQFVSIWTIGGRLKISYACGKRQKELLKFQQGETDLVFVNKYFYLHSTCNIEEPEPQDFSDILGIDRGIKNIATLSTGQNFTSNHLLSLRSRYRKIRTRLQKKGTISAKRLLKKRNKKENRFGSHVNHVISKIIVAIAKDTKCAIALENLKGIRTRTTVRKKQRATHHSWGFYQLASFIEYKAKLIGIPVIYVDPRNTSRECFSCGYIDKANRKSQSSFSCVKCGYTTNADINAARVISRRGKVNYPYATSLVS

SEQ ID NO: 24566 - protein, 407 aa, Klebsiella sp.
MLKAVKMRLYPNKEQAQYFAVTFGCVRWVYNEALAYCNAHYEANKDLPEDQREKRPTAYDLQKRVTQLKKDEGKEWLKDADSQALKYACASIDQAFKNFFRRVKNGETPGFPRFKSKFRGDATFTSTQICVIKLNDEYVKIPKAGDVRQRGGKLPEGAKVKRVTVRRTPTGKFYATVLIDDGQELPAQPTENLDPVGVDVGCKTEGYTQQFAALSTGEIINTDATYKRLQKRLAREQRRLARKVKGSNNRIKQKKRLARVHEKIGFIRQNTLHQITNRLTLSHESIAVETLNIKGMMAKPKPKEDPERPGVFLPNNAKSKAGLSRSLASVSLGEFFRQLEYKCAWRGVGLIKIDQWAPSSKTCSGCGYLNKDLTLSVRAWTCPSCGADHHRDINAAKNIAKMAIAKM

SEQ ID NO: 24567 - protein, 442 aa, Thermoprotei sp.
MTIKTIEKTIKLKLIPLTKTDKNQLLSLLNDYTLMIEEALDIIVKNDIRSRKKAHRQCYRFLREKYPHLHNKFIQEAYKRALAMYRSYRRLLNKWKRLPEKEKRRISPPSLPTVEDNKVIELHVDTYRLERRHDFLVLTLSKGNGVYLRFLVMEYSYARRELEEAKLGNSKILVEGDKVYLLLTIRKNVEVSEHRNKFFMDINEDSIDCLLVNYDRNEAVLFSIRHDIRKVRTNYRRTRKSIQKKVKNLSVRNKLLAKYGYRERKRVEDRLKKITTLLAEIARKHNADLVRENLKDLRLNVRKRSKQLNYRLSTFPYRRFIEYIDYKFYERGLSVVETDAKKTSITCPICGYVDKRNRVDKETFKCRKCNFIFNAQYVACFNLFSRSNDGVVAIRGGGLFLIIRKTAQVVAVNVAPDEPPIRMRWLREKPVQISKILTITKR

SEQ ID NO: 24568 - protein, 513 aa, Nocardia sp.
MSGRVSTRAHANVRHRTSPERGVVARFEVPDGWVAQAYRFALDPTPSQDTALRSHCGAARFTFNHMLEHVRAVMEQRIAERSYGLGEGQLTPLQGWSLAALRKTWNQRKGGCAPWWPENSKEAYNTGLDELARALHAWTTSRAGTRAGARVGFPRHKRKARTGLSVRFTTGTIRIEPDRHHITLPRLGTLHTLESTRKLARRIEAGTARVLSATARFDGRRWWCAFAVIVAGKQRPAHVRRASPRCSTVGVDVGVKDLIVAATGDGVEVARVGALKPLTAASTRLSVLQRRAARRQGRWKPHTRQRQTPSKRWLRTQAQIGKTHARVANLRAEHLHAITTRLAREHAVIVVEDLNVAGLTRAGGARKRGLNRAIADTALARIRRLLAYKTRWYGSELVVADRWFPSSKTCSGCGGRKPNLPLAARTYSCDMCGMQVDRDLNAAINLARLGATAHQGRGSGTGTGSGPAADHRVGQGRGASRKTRLTDTVGKAGGVEASTPHHQPVGQTGTASP

SEQ ID NO: 24569 - protein, 498 aa, unknown
  TnpB Polypeptide
MKNKRVQWKSFNINMPSELIPIYDFLQNELNFILSNDETRALLDKIDLSKLRGDVWRDLRDSLKFRIKDWPLHNKTWHSYILFENIRREIKSKQEAIIIWNELVKNDFNINEELFNSLHRLNLYPTRSRIANIKRSNSIPELPRNATFSLDYTISEKQFFRMKTNNICEIKVGKKDWIEYEIVFPSSIDERFTGVIAKPRFIKRKRDGQYIGVCSYEYEIGNYGLEDKILGIDIGKIKLFSSVVMDKNGEFSDEFINTKRSQETEYKINRLYENKQILFDKIKAYEDLKLTNQTKYEIWNNLYSNIKAKITNIKDYQAKLLSSEIVKLALEQKCKTIHIENLSWLNSQGGSWNHSQIHSKIIEKATMYGIEVKKVSAFNTSKEHPITKEIGAVQDRTVKFTTGEIDRDLLAAINIDIRSTNIKLKKSLPKKAKSKRVKLKSNKKEIKEKVNRLKGNGQIVSFLTNVLDSTIKVELGVRPLHEILPCNSLIDYYNKLQV

SEQ ID NO: 24570 - protein, 448 aa, unknown
  TnpB Polypeptide
MLKQKYTTVTQLHEVNNKEIIEYFENACVYFCRLQRKAFHIFKNENIKGNKIDYNSLQKKFMADYKISKRTTTSILKEVQGRIKALAELKKHEFFQKEQKIKSLKEEIEKLDSKILEFQEKMKNKIKINHFKYWNLKKSRTFKKMKLNKFQMKLEQLKWEIETGNYKLCFGTKKLLQSNKTEFYLQRDSQISYIGSQDETGRNQMLQLSYNNRNNHFDIKLRKDFGFDTGDKYVFGKCYFNNYKNKLIEALKNKNSIPLTYSIIRKNGRYYLHCTFEYRIEDKSNFLTRKTYGTVGIDFNKGFLTVSETDRNGNLVKTDILKYRFGKGNKTQSDLENCISKILKRASETGKDVCFEDLNFKDKKSKTSKGKTDRGKKYNNMLHTLAYSLYDKLITNMAFRNKIGIIKVNPAWTSWIAKNKFCERMKLNIHNGAAFVIARRGLGIKDTI

SEQ ID NO: 24571 - protein, 539 aa, unknown
  TnpB Polypeptide
MLKTDFQNDIQLHAVPLSRIKQFRDASQAEPMRTIIIKLDTRTVGPKVMKEIREMILGYGCDLTYLYDLLTRREYRRYCAGQKFIQLRRRLREAFRAEQKQNPNLKTISKGGLQGKVWKTALEDACHLFNRYWRSAQERARSNIRNLPIYQKLNDAERYYIGTLLKRVDDRFFDLLDGKTPVAIIGKSVKGTIRKIRPLANLVRAEVRKAAGRTPCHSRCRSLTLTNECYTVIKNKDGKYAIQFITRKPNSRMVIDLPSGIHFDRTIKLVYDHGGLYLHVPHKVTVQPLKNVPQVVTTKGKPALYTVGLDMGVSEVYVDDSGKQFGTRLGKTLWDYAQSLDKKLRERNKFETAYRLTKNKAKKKNIKRCNLGKKVWDEKIERYRETLKNIVNEAINQIFKQCPADVYVVEQFSNLFSMKGISKKVRRMLSSWIRGIIDERLAFKAATHGVWIIHVPASYSSQRCPFCGHVERGNRNKDKFNCCSCHHQAHSDANGALNLLLAAHETKIKKGLDRFAIKAIYRKEYEKYCKKNRITPIPA

SEQ ID NO: 24572 - protein, 482 aa, unknown
  TnpB Polypeptide
MADSGLDGSSGRIEHLFDMVATGSPRLVHRTATVRLRSTRRQANRCYGLLRSAGDVWAWLLDTNRQRQRRGESAISNYQALCRELTSAGPFGELSVTGARSVLQRYADAWFQAANRRKAGQKDAGFPRRKRALVPVRCYHGTFKIDGQRVRLPVASGQPALWVRLARALPYPPEQIRAVILLADGGRLWLAVTAAVPVQDHDLDGGRVAGVDLGVIHPYAVVTETAGLLVSGRALRADSYLHLDDQKSRQAKAARRVPRPGQRGSRRWRRHRARVRRAEACHRRRVHQAQHQAAKQVIAFAVHHQVGTLVVGDLKGITNQDAGRVQNLRLREWRRTHLLQALRDKAEQAGIVVRLVDERGTSSTCPSCRRRVAKPKGRRFCCPHCTFQGHRDLVGAHNIAAKAGGGPPSTDVPVLIEHRRAGILPARRDRRRHFHDQRRRRSCLASGHPQGDPASLGCRSPRVPDLAHGEDQAALPNRANVA

SEQ ID NO: 24573 - protein, 405 aa, Moorea sp.
MLKVVKIRIYPDSSKKLALAKAFGSCRWVWNHFLNLMNETYKETGKGLSGYDVKKLLPQFKKQEETAWLSETYSQCLQQVCLNLGVAFKNFFERRAKYPNFKSKHGQQSLQYPSNVSIKDDCLKVPKIGLIDAKFHRPIEGKIKTVTITKNCCNQYFASILCDEGKEKPLPSSEGKAVGIDLGLTHFWITSEGAKFENPKILNKHQKILKRKQQQLSPKEKGSKNRNKARLKVGKVHQKITNFREDFLHKLSRRIVDDSQVIVLENLKIKGMVKNPCLAKARQQVGWGMFGIMLRYKAELEGKVYLEVYRFFPSSKTCHVCLNRVDSLPLEIRYWECPKCKTKHDRDLNAAINITDEGLRILKTDRTGDKACRQTVRRSKGGRKQSTTTLVSGQEVHTVPSGQCG

SEQ ID NO: 24574 - protein, 299 aa, unknown
  TnpB Polypeptide
VTWKAGKPTARRHQGIGLGVNAYRVVGTTLRVSTGARGQYLWLPLCVPPRWRDKLQYIKGDARLFKRGEDWYVMLPLKVPSTSTVCDEGGETTVIGVDLGIVRLAVAKTPNRVKVWNGTPIRYRRERFARLRQRYQRHRRTDRVRAMKGKEQRWMRDVNHKLSRELVDIASSYPNPVIALESLDGIRDRVRGSKRFNRMVSSWAFRQLADFIAYKAAKAGVHVVYVNPKRASRTCPRCVYGSRSNRPMQGDFRCVACGYRANAGVVAAMNIAGVAASLLRHGPPDTARPAEGQPGLVGD

SEQ ID NO: 24575 - protein, 375 aa, unknown
  TnpB Polypeptide
LWGEKVEYSYKFRIYPNTEQQTIIQKTFGCARFVYNHFLAQRISEYKETGKSSTRFQQDKKLTALKQELPWLHDVDSYALQSSLQFLDSAYKNFFRHVKNGDKSGYPRFKSKRDRHKSYKTKFSHENIRVLNDKLRLPKLGLVECRISKEVKGRILSATISQNPSGKYFIALCCTDVEIDPLPSTGAVVGLDMGLKSFAITSDGVEYPNHKFLKKSQKKLARLQRQFSRKSKGSKRREKARVKVARLQEHISSQRQDTLHKLSTQLVRDYDLISIEDLVPNNMVKNRALSQSIFDASWSEFRRQLEYKAVWYGKVVVRVDKFFPSSQLCSTCGAQWTGTKDLSVREWVCPVCGTVHDRDVNAAKNILNEGLRLLA

SEQ ID NO: 24576 - protein, 387 aa, unknown
  TnpB Polypeptide
MCYTAFVQTLTLRCTLKPTPEQAAALEATVQRFAEGCNHALRVAKARGEFRRFRLHRLVYGDLRAMGLSANLAVQVIARVGKKKGSRARFYQPTSCTFDPRTLSLRGEAVSLTTVAGRMLIPMKLGNYQRGMLKRARSVQGGVLTRGPKGRWYIHLSLRVETPTPPPGGGRVVGVDLGQKALAALSTGARFSGGALKGKRLRYLKKRAEVRSRLDRPSERTRGVQRLWERLTGREARFVNHTLHTLARRVVDTLEPGDTLAVEDLRGLRSRTTRRGKKERHLHHLWPYSKLRFLLEYKAALRGVRVVAVDPRHTSQECPRCGHTARGNRKSQALFRCTACGFQHNADWVAATNIAQRAGSMGMGRCKPARILRVSSLHRLLSESPRL

SEQ ID NO: 24577 - protein, 358 aa, unknown
  TnpB Polypeptide
MRAFNAACQYISDVAWDTQEFRRVPVHHLTYYEVRARFGLPSQLAVRAIGVVTDSYKADKERRHTFGQRSAVVYDERLCKVGSTTVAMRTLEGRQAIRWAGGGYQKSQLAAALRIGECDLLYRAGKDRWNLAVTIDLPDVPPSPAVDAIGVDQGIVNIAVTSDGAMYGGATVLGVRRRYFHLRQKLQKKGTKSARRLLKRRAKKERRFQANISHTITKQIANHARATGRGVACEDLKGIRSRTGHVRRSQRRTHSNWAFGQFTAYLAYKCQERGVSFVLVDPRYTSQTCSRCGHCEKANRHAQSSFLCRSCGFAAHADWNGAENIRAQALGVLSAGTRSDARTLGVTRSVACEQAHGL

SEQ ID NO: 24578 - protein, 448 aa, unknown
  TnpB Polypeptide
MPRHRDPRSPRVVHRTARAGLRVTRSQRRRLLALLVSAGDVWACVLELNAWRRARQDRPLVGYQELCRELAASGPGTFGELDSVGGRSVLRRYSDAWFAAAKRRQKHDGAARFPRRRRALVPLRWYHGTFTLEGRRLRIPVARSQPPLWVRLDRDMPCPPEQVRSVTLLYDAGRLWVDVTAEIPVACYQAGQEPDPGRVAGVDLGIIHPYAMAGPDGLGLLVSGRAIRAEHRMHLADRKARARAVARRAPKPGQKGSRRWRHYRRRQRLVEVRHRRRVRQAQHEAAKTVITWAVDRRIGTLAVGDPRRVLNVQAGRRHNQRTRDWRIGHLISALKDKAEAAGIGLALVDERGTSSTCPACATRIPKPAGRVLACPACQFTGHRDLSAAANIAARGGGGTTPVIPAGVTHRRAGAHLPGVAPSRRDPRRAHHRGARGFPGRHRPAPPPA

SEQ ID NO: 24579 - protein, 472 aa, Mycolicibacterium sp.
MSRHTTFRFSLDPTVEQCGVLARHAGASRFAFNHCLRMVKSSLDQRKTDTSVEVPWTRFDLINWFNAWKKTADAGRVITVDLRGIAEVKATGLIWRRAVYQQVFEEAAVDLANGLKACSDSRSGKRKGKRVRFPKFKKKTREIQSFRLRNKHPKGRPPSIRIGDANRPRSVTLPGIGVIRVRDDTRQLRRMLNKGRARILFASIINRRGRWWISLNVEAADLHPSLQHPPRSDDGGWVGVDRGLSTFVVAATADGTEVARIADAPKPLAAGIKQQQRLARSLSRKQKGSHNRKDAAARLARHHYHVANVRRHFLHQVSGELVKTHDRIVIENLNVAGMLANHRLARAISDAGWSLLARMLTYKQTWRAGQIVQADRWYPSTRRCPQCGVVNREMTLADRVFACSCCGYSADRDTNAAVNLARWGHDHHRSPDPQAGGRATNARRRDGGDQHLSVGETSPKEAGTEVHTAPAA

SEQ ID NO: 24580 - protein, 370 aa, unknown
  TnpB Polypeptide
MPNIAYKYEIYPTKEQALFFSKSFGCCRFIWNQILHDKIEHYKETGEMLHNKPAQYKCDYPWLKEVDSLALTNVQLNLEKAYRDFFKNPKKFGFPKFKSKKCSKKSYTTNNQNGTIEAYKDGIKLPKIGVIKAKIHRIAPEIYKLKSATVSQTSDGRYFCSVLYEYEINIMPVTKENLSVIGLDYKSDGLYMDSDGICCDMPKFYRKTEKKLAKAQRRLNRKTEGSSNYKKQQLVVNCIHRKIANQRKDFLHKKSNEITNQHDLVCTESLDMKALSNKGFHNGKSTLDNGYGMFLNMLSYKQERKGHHFIKIDKFYPSSQLCSCCNHRQPMPLYVRTYKCPNCGMVTNRDENAAVNIRNEGYRLFLEQIA

SEQ ID NO: 24581 - protein, 443 aa, unknown
  TnpB Polypeptide
MRRTNQFMLAPTREQHQILFELADACSALYNAVNYRRRQSFFEGEIDWNYKDIYDAFSPVLGAYIAGQVIRKNSEAWRSFLALKRKKTQRGLPPHIRRVSPPGYWKDRSTGERELRIIIRKDGYRITSRHVEIPLGRELRRRYGIRKLRVRWKGRLGWCGEQGRLEIVYDRVDRRWRCYQNVEVSPPHQPRGNRSAFVDVNIRNLLVALIEGVPKPLIFRARHLLSDWLYWGRCIAEHQSKLAQANGRHSSMRLRRLYRRRQHRLKQGINSIVRAFVKFCWLADVSTIYVDDPLHTHDGVHWHKKGNTLLHNFWCYRYLMQRLRLTAEEYGIRVVARRASSERCSLCGGNRGTTGCYRKHRGLFVCKTHNIAINADVNACLNLAGAILPSPSLQRDRDNWLVTQPVAVSSHTGESPNLPALAVENVNPLWCVAELSKSLLVER

SEQ ID NO: 24582 - protein, 413 aa, Lactobacillus sp.
MDQSIVIKYQIKPKSHTDEKSLAQAMEQFRLACNYISQYIFEHDFERSQTKLNNKLYHPIRDKFGLKAQMAQSAIRCTVARYKTVKTQLARHPFCYDTGKKDENGKPIWKSIPRDLNWLGKPVFFHRPQLDLQRGRDWSYQKDNQISLNTLQKKRIIADLIEPKGFKQYLDGTWKLGLAKVLKVGQKWYLHISATKTFSDYQKGQSQHVVGIDRGLHFLTTSYDEKGQTAFYSGKKVMQIRRKYKRLRAQLQSKGTKSAKRKLKKIGQRENRWMTDVNHQLSKTLVDKYGSNTLFVLEDLTGVRFATEQHDKDYRYEDVSWAFYQLEQFLTYKAHLNHSEVVKVATNYTSQRCPKCGRINKANRDHHKHLYTCDKCGYSTNDDRIGAINIQLLGTRYISGNDQPRFVKTTDSE

SEQ ID NO: 24583 - protein, 371 aa, unknown
  TnpB Polypeptide
MMRSYQVRLKATKRQGLALGALLAECCELYNAALQERRDAWKICQKNVTLYDQMKELAQLRVDPESASFPSTIQRDPLRRVDRAFHAFFRRVRARQTPGYPRFKSRDRYHSFTVDAESFRVEGDRIVVTKMGGFRFHTRCRLKGTPRALHVKRCGQKWRAVIVCDIGPAPERVAVSKAVGIDVGVRTLVTLSNGGEVLNPRWTQEAEERLARANRQLATKRRGSKNRAKARERLRRVHEAIVGRRRAWLHDVSKWLVSNFDLIAFEKLDIRGMVKDAPASPVRKSILDAAWAELVWMLTYKAESAGKWAIPVDAGGTTETCSGCGDVVPKKLRKRQHECPKCGLVLGRDHNAAIEVLQRGLRCAGASAEAA

SEQ ID NO: 24584 - protein, 443 aa, Halorubrum sp.
MSRTVRTFEATITNQQQVRDNLDQLGWAASKLWNVGRYYAQEQWDETGGIPDDGELKAELKSHERYTDLHSQSSQRVLEELAEAFNGWFGKRRNGDDRARPPGYRKNGDAHPRSTVSFKAAGFKHDAQFTRVRLSKGRNLKEHRSDFILCEYQTRPDIDLTEWDIQQVRAVYKRDEWRLQFVCRTAIDPEPPGDEVAGVDLGICNFAAVSFGGESVLYPGGALKEDEYYFTKKKAKCDDSSSREVTRLDRKRRGRRTHFLHGLSKAIVEECAERGVGTVVVGDLGGIREDNENGKSRNWGDHGNLDLHGWAFDRFTTLLDYKAEAEGVEVELVSERDTSKSCSACGYTDDDQRVERGLYVCEKCDTVANADVNGAENIRQKVLPSLSTDGVDETHRVSSAHQNAKRSGDGDRDNGWLAQPAVHLFDRSEGVFAPREQVVTREP

SEQ ID NO: 24585 - protein, 381 aa, unknown
  TnpB Polypeptide
MPVLSYKYRIYPSHAQVAGLEAMLGAFCDLYNAALQQRIEAYRRQGKTLRYIDQANELKAVRAVDERLLSYSFSAEQQVLRRLDKAIAAFFRRLRTKVKAGFPRFRGKFRFNSAEFRVGDGLTIRKSKRLSIVGLPGEIKVKWHRTLPANGKVGAAVISRSAGHWFICFQVTVPDAEVPQKNGPSVGLDVGLTALIATSDGETVTAPQWTKNAAKKQRRLQRAFARCKRGSKRRLKVKRRLARHSMRVANQRRDFLHKLSRSLVDRYAFLALENLSVGRLARSMLAKAVYNAAWGQFRQLLTYKAASAGTMLVAVDPRGTSQTCPDCEAVVAKTLANRTHRCNCGCVLDRDVAAAKVILHRAVSCLGPGHGPRNTSGRGAA

SEQ ID NO: 24586 - protein, 242 aa, Geobacillus sp.
IKPKENQEKWISIDPNHKNFFTAVDFRGETFEFAKLAMMKYWDRQIDKMKSKRDKCQRKEKQVKTQYGNTYSLPSKRWERLNQALDRVYHRRREQIKSALYAIANWMAKHYDVVVIGDYSPSLETAKYDNMHRSMLNQEVIGRFRHVLSWVMKRSGKECKVIHEKDTTKTCCVCGHKEKKDPSIRMFTCPNCKNEIGRDINSAMNIAKKANMLQPNSMILKNLSHITHFMKWNVFQSNIQFV

SEQ ID NO: 24587 - protein, 354 aa, unknown
  TnpB Polypeptide
VYWWKVLLKEAELVSTLILRRKRNRWYAIFVFDVKPREEPLAEVVAFDVNENWVAVARLSLLSTVDRVATWNRQYINPAVYSIRTDFGRLAKRYEAVRNAKLEELKRKYPYAGRDEEERRQNVADIREFRKFLRRLRERRRKEARVRQVTREMTKSPAVIITEELGKNPQEEMIGLEDKRVKKRELRHRVKQTPFKKLVRAVEDKAGEGGSAVFYVSSFRNSRVCPIHFALMKNGSGWHALHRPRGHAVDRDAAAVLNMLWKTTPEGVVKGVWWDVKEARKRLKKGIVPKETVEKANPIVPQPIVHAVWASLKRLRASPQWPAVLARAAPMTPAQDADEGGTRAPPRPRGTLAL

SEQ ID NO: 24588 - protein, 453 aa, unknown
  TnpB Polypeptide
VSVVFEAVKVALDPTPAQERLLLSHAGAARFAFNAGLAHVKAGIDAGAKPEWSYYALVRWWNVNKDALAVNADGTPWWAENSKEAANTGLRSLAAALSNWSKSRRGERRGRKVGFPKFKAKSKAALRFAYTTGAFGLIQGDPKALRLPKVGRVHCMEDVTGRVGDARVLRMTVSKRAGRWYAALTVERDDKPVTKPPKGGTVGIDLGIKTLATLSDGTIIENPRLLRKSERKLKKAQKALSRKTMGSKRRAKARAKVARLHARVADVRADAINKATTMIARTYSVVCIEDLNVAGMVKNRHLARSVSDASLGEFRRQLDYKTARTGATLHVIDRWYPSSKMCSRCGRVKAKLSLSERVYRCDGCGLVMDRDLNAAVNILVAGSAPETVNAHGGTVKRGDLSDRTTLDSVKCEPSRRESAVRLGADERKHVLQATNKQLVTVQRGSVVSRGRLR

SEQ ID NO: 24589 - protein, 303 aa, unknown
  TnpB Polypeptide
VILAHRIELDPTEKQKEYFRKACGTARFVWNWALAECHYRYDLGANTDANEIKRYFNSFKYEAFPWLRNIHRDAHAQPFAALGKAWKAYFNGEVKGRPQFKKKGKCRDSFYVACDKFSSGGKTVLLPVIGQAKLREPLRFTGKIQSATVSREADRWFIAIAVEIPQGEVPPPKGEAVGIDLGLTTFAVLSNGEKVAAPKPLGKDLQKLRRLSRAHSRKRPSSHNRQKAALRLARCHRRIGNIRRDFLHKFTTRMSKNHAEIFVEDLNVKGMVQNRRLSRAITMLAGRSCGGNSSISRICMDRC

SEQ ID NO: 24590 - protein, 376 aa, Vibrio sp.
LNRAIKIRIFPNREQQGFLDAQFGAVRFIYNRALHIKSHYYKKKGINLSPTKELKALISVAKKHAKYEWLKQFDSISLQESTRNLKKAFDNFFSPEMESRYPQFKRKQGKQSSYHCMNIDCDSESIKIPKLKSRIKAKVHRPIEGVLKSITLSKASTGKYYASLLFDVEKVLPEKPKHITQVKGFDLGLSDYLIDSDGVKIPNPLFLLRAERNLRKKQKSLSRKVKGSRNREKAKLLVAKAYEKLTNARNDFQHKLSKRIVDENQALIFEKLKSSNMMKNGKLAKHIGDAAWFSFVQKVRYKADWAGKHFVQISQWLPSSKTCSCCGHKLESLPLAVRHWICPECLTLHDRDRNAGMNIRLAGIIDLKAEGFTVSA

SEQ ID NO: 24591 - protein, 489 aa, Oligella sp.
MPKKQAFIDKSGVKFVENFQKNQKIKKFPSRTEIRYLTAFMQKSHAAAILRYKDHMDMYLKNAVSSMPNIVVVAHRPYYNIRMQRLQAFKYELRPDGQQERQIRRFAGSCRFIFNKALALQKERYERGEKKLGYAGLCKLLTEWRNSTETAWLADAPVHPLQQTLKDLERAYSNFFARRADFPRFKKKGQSDSFRYPDPKQIKLDQANSRVFLPKLGWLRYRNSRKVLGTVRNVTVSQSCGKWFVSIQTEREVEQPVPQATTAVGIDMGVTRFATLSDGTFYAPLNSFKRHETALRKAQQAMSRKTKFSNNWKKAKARVQRIHSRIGNARRDYLHKCSTTISQNHAMVCIENLQVRNMSKSAAGTADAPGRNVRAKSGLNKSILDQGWFEFRRQLDYKLAWNGGYLIAVPPQNTSRSCPCCGHVSAENRQTQARFECVECGFEENADLVGAINVLRAGHARFACEVSGAVMPPAAGTHRSDSGAAQCRT

SEQ ID NO: 24592 - protein, 387 aa, Erysipelotrichaceae sp.
MLKGYKYRIYPDEEQIVLLSKTFGCVRFVYNHYLDLQEEGYALGKKHLSKMDCNNDCNRTLKDEKPWLREVDKFAITNAIYNLDSAYQNLFHHIGRKPKHKRKHKGYDSYTTNSPTVQVVHGCIKLSKLGKVKAKLHRQIPADGKIKSATVSRTSSGKYYCSLLVETPDALPKPKSYVCSTRVLGLDYSSPNFYVDNFNRSPASQHWYRQMQKKLKREQKSLSRMYESAKASGRKLSECHNYHKQKRKVARIQEKITRRRNNFTNQMSTAIAKQYDAVVVEDINLRGMAGSLHLGKATNDNGFGMFRQQLAYKLADRGKYLIKADRFFPSSQTCSCCGTVHKITKDLSVKEWTCPTCGAHHLRDQNAAQNLKNEGIRILQTQGVSVI

SEQ ID NO: 24593 - protein, 404 aa, Streptomyces sp.
MIRTYKFLMRPTMGQTQALTEMLRDHCSLYNGALQERRDAYRHPSKTSVTYGMQSAQLKDIRAFDPERQGRWSFSSQQATLRRLDKAFAAFFRRVKSGETPGYPRFRGVNWFDTVEFPKDGDGCRWDSTPHDPVTRVRLQGVGHVKVNQHRPVVGNVKTVSVKREGRKWFVMVTAEQEQPTPLPATGSVVGIDLGIANFLADSSGGFVPNPRHARTAAARLEAAQQALSRFPRRKAKDRTNNHQRAVEKVAGLHGKVRRQRLDHAHKTALALVREHDVIAHEDLKIRNMGKAPAPKPDPDRPGGFLPNGATAKAGLNRSIADAGWGVFLTILHAKAESAGREVIAVDPRNTSRTCPNCGHVSKENRPTQEKFHCQECGHNAHADTVGATNVLRAGLVRRNANPA

SEQ ID NO: 24594 - protein, 387 aa, unknown
  TnpB Polypeptide
MPNSAIKYRVYPNKAQRILMAKTFGCARKVYNLMLSDKIKGFKKTGKIPTVTPAQYKKDYPYLKEVDSLALANAQLNLQAAFKNHFDKNRKTNTGFPNFKSAKHNRKSYTTNNNSRKTAITIINGKYIKLPKMGMIKAIIHRSPDASWVIKRATVSQESDGSYYIAILFQFDTKPITRTLDKSKAIGLDYASNGLYVDNNGNTGTNHKYYSESHDRLAKAQQKLSRMKGSKKDEGKSNNYLKQLKRVNKIHKHIANQRLDNLHKISTEIANQYDIVCVESLNMCSIANKGFGNGKATMDNGYGLFLTMLSYKLTARGKALIKVDKWFASSQLCSNCGVKHPEMKDLNNRVMRCDCGLVLDRDQNAAINILNEGLRLLNLSNNYSSSK

SEQ ID NO: 24595 - protein, 522 aa, unknown
  TnpB Polypeptide
MGRSKASKTKQGKDSLTSSLTCAVQLELPLFATAVSAQPNNETTLAGKSLTCNHSTQKPKSSKISAVESTSSAKDCKPYWTDLCAEINSRLLLPVVTDCASSGLNSFSIWSNKTVDKSWFSKTLYTVPNQNLPRIFSPSSTSSLVECTDSGNTVKKSRKIRIFLKATQKQIIKQWFGVSRFVYNTTVKLLQDSTIKANWKAVKTDILNGLPDFCKSVPYQIKSIAIKDACKAVSNAKKKFKNGGGISKVKFRSRKDPIQSCYIPKSAVSDKGIYHTILGEVTFKEALPQSFGDCRLVKAYGDYYLTVPEEVSRQQSENQGRVVALDPGIRTFITFFSESSFGEIGISANIQIQKLCFRLDKVISKIAKAKCKSKRRLKLAATRLRGKIKNLVDELHKKTARFLVDNFDIILLPTFETSRMSKKAKRRIRSKSVRQMLTLSHYRFKQFLKHKAFETSKVVMDVNEAYTSKTVSWTGEIIHNLGGAKFIKSPTDGRVMPRDLNGARGIFLRALVDTPSLRECIC

SEQ ID NO: 24596 - protein, 467 aa, Moorea sp.
MKAIFSDEERIFWKFQCEQSNSLTNSALYYVRQKHYKSLEEQEAYNTYWNGDEFRCGWRTRKCITKYPELDKALKMSPHYKAMCAQSAQQTLKTVGESLSSYNKLVDLYYLGEVDRPKLPRYRKSGGLAAVTFPRQALTYKDGLFYPSVSRESKPELLTQISLEPPSFIDPEWVREVTVRPCYGQLWIDWVIDDGKQPIEDNPTLDYSQAIGIDHGGDNWLTCVSTLGKSFIIDGRKLKSINQGYCRLVAKYKQGKSEFYWDSNLDSPKATLRERIQRKRNNQMRDAINKAARFLINRCLNDGIVNLVIGWNEGQKKRSNMGKSGNQKFVAIPTGRLVERLKQLCPEYGINLIITEESYTSKASFLDDDFLPKHGAKPVRVASALPKGWKPSGKRVRRGLYKTLDGNLINADCNGAANIIRKVTTQSINLTKVARGILTVPHRYDLFTHLSRSYRIKGEVARVYPAT

SEQ ID NO: 24597 - protein, 372 aa, unknown
  TnpB Polypeptide
MERAYKFRIYPNAEQETLIQCTFGCVRFVYNHFLAERMEQYRETGRAPTRFTQDKGLTSLKKQEETIWLREVDATALQSSLQDLDTAYQNFFRRVKKGEKSGYPKFKSKRNHRQSYKSKCVGSNIKVLDGAVQFPKLGRVKCRISKPVEGRILSATVSQTPSGKYFVALCCTDVEMEPLPSTGAVVGIDMGLKSFAVTSDGEEYPNPKFLTKSEKKLAKLQRQLSRKTKGSNRNEKARIKVARMHEHIFNQRQDALQKLSTEFVRQNDVICIEDLTPRNMVKNHKLAKSISDASWGEFRRQLEYKAEWYGKKIVVIDRFYPSSQLCSECGTQWSGTKNLSVRSWTCPVCGAQHDRDINAARNILSEGLRLLT

SEQ ID NO: 24598 - protein, 408 aa, Rhizobium sp.
MKERMAYKFRIYPDGEQARLLRRTIGCCRLVYNTCLEQKRLERHRSDPRRLSAIDQNKQLADLKAELPWLREVPHHCLQQAVIDLHRAYANFFEGRAAYPKPRRKYENESFRYPDAKQIAFREGEILLPKARWVRMVAHREVVGTVKNVTVSLSGDHWYASIQVEREVAEPSVRDGIELGGDLGVVNALALSDGAVYDLPRMSDAEKRREETLARVVSRRKKGSKNRAKAQRDLRNFRARIARRRRDAKHKVTTAVVCRCAVIYLEDLKVKNLTASARGTVEEPGTNVARKAGSNRSMLDVSPGETVRQIECKMRRSGGGVYYVNPAYTSQRCHACGHIEAANRPDRDTFKCLSCGHAACADHNAALNILHLGRKARTGGHPEMACESNPAAGRKQEEDGSSPRANAA

SEQ ID NO: 24599 - protein, 351 aa, Andreesenia sp.
MLQVRKALNCVSKYIFENNCLNQRKINEDTYYHLREAYGLKSQMAQSVMKTAIAKYKTNKSNGHNFSLVNFKNLEYDLVWNRDYSLIDGVFSINSLSGRLKIPFETKGMEKFFDGSYSFGTAKLVYKFNKYFLHIPMTKDYQGTTLFEVNKIVGIDLGINFLATTYDSDGETSFFKGRHIKSKRGHYKILRKQLQKLGTKSAKRKIKSIGSRENRYVNDVNHAITKALVDKYGSNTLFVLEDLSGVRNATEKVHINNRYTSVSWAFYQFRQLLEYKAMMNGSIVIAVDPRYTSQQCPKCGHIEKANRDKKKHIFKCKNCSYQSNDDRIGAMNLWRKGIEYIETNSKEEAVE

SEQ ID NO: 24600 - protein, 412 aa, Saccharopolyspora sp.
MARFRMYPTAVQEQQMLLHCAHARYVWNLAVEQHSHWQKGRRSAPGFAEQCKQLTEARAASEWLRAGNVDVQQQALKDFAYAKQARFTPGFGEPTWRKKHKHEGFRVIGTDRVPACRDDGTPLLNGKGKQVMSRSVVVRKLNKNWAQVTVPGCGWVRFRLSRRQPPDAKTFRVTCHNGQWHVAFAVIPEPIEAPGNGETVGIDRGVTITAHLSDGRVLNCPQLTAKERARVRKHQRRAARAAKNSPAKQAEYAKVAQLRAREANRRKDWAEKTSTMLASEFDVIRFEKLNIRNMTRTARGTVAEPGRNVRVKAGLNRSILAQGWGMLRSRAEHKAPGRVEDVPAPYTSLRCSDCGWIEKNSRKSQAEFVCVSCGFTCNADLNASINVAAGHAGGTTTTPGRSRVREPQLALR

SEQ ID NO: 24601 - protein, 535 aa, Saccharopolyspora sp.
MQLRYRYRLYPTPGQRQALARAFGCARVVYNDAVRARQDAHKAGEKYPTGTVLQKRLITDAKKTAERAWLAEAPAQMLQQTIRDCDAAYKNFFDSLKGKRAGRKIGAPRFKSRKDDRQAIRFTRGAFTLRGNGRLALAKIGCVKVAWSRDLPSAPSSVTVVKTADDRYFASFVVEVGDETLPPAVDTDGSDIEIGLDLGLSAFAVDQNGRIIDNPRFLRRAERRLKRLQRAVSRKLKGSNNRAKARRRLARQHAKVTDTRQDWLYKATTSIVRENQTIVLEDLAVSGLARTRLAKSVHDASWGAFRRLLEEKSARYGRDLLITDRWLPTSQTCSDCGRIDGPKSLFLNSGEAFADGVDHGPADHGFVMFGAAFVVAHAAAMLVDPGQSAFHDPSTWQDNEPHLTCEFRDDFDADPEQRLGPVDERACVAGIGPDQADTRAQIAQASQEVASGDAVLGLGTGHEHADQETERIHSDVAFTAVDLLARVEAPTLCANGLGGFDRGGVDTAGAGSSTTPLGQSRTITQSVEQRLSGSD

SEQ ID NO: 24602 - protein, 432 aa, Saccharopolyspora sp.
MQLRYRYRLYPTPGQKQALARAFGCARVVYNDTVAARRAAHANGDKYPSGTVLQKRLITDAKKTNERAWLTDAAAQMLQQAIRDCDQAYKNFFDSLKGRRGGRRMGAPRFKSRKDARQAIRFTRGAFSAVTDGKLTLAKIGDIKVAWSRDLPSVPSSCTVIKTADERFFASFVVEVGDETLEPVDAETGIDLGLSAFAVDDQGRIIDNPRFLRRAERKLKRLQRAVSRKQKGSNNRNKARKKLARQHAKVRDTRLDWLHKTTTTLIRENQAVYVEDLAVSGLARTRLAKSVHDASWGTFRRLLEEKAARYGRDLVVIDRWLPTSQTCFACGRIDGPKPLSVRTWSCSCGTHHDRDQNAARNILAAGRAERLNACGGDVRPRTGAVAAEAGTPEAPHKRSRNLPSRQERTSKQRTIAGRRVVSGAVVVLGCGR

SEQ ID NO: 24603 - protein, 420 aa, Streptomyces sp.
LKQQRGHKAKVYFTPSQEQAAEDQGHAARTMWNLVHDWWTMLPKDKRTLGAADEAIRQGRKDLPWLGVLPAQAAQQVLKTYLRAWVNCWEGRAEAPNFKGRFRSRMAIDIPQGRDLQIVRLNRRWGRMWAPKIGFVLFRWTRDLPVGKRADKLNKVTGARLVREANGWHVVFRIQTEVPEPAEHAGPTVGIDRGIAKPLALSDGSFREHDPWRTPGEAERLRRLEKAKERKRRTRKKGEPTSNRLRRTYDQIAQLRATAKRRAVDWQHKTTTEIAETFSRIGVEDLAITNMVKSAKGTVEAPGTNIRQKAGLNRAIAGEAWGRTVTMLEYKAAQRGGIVVKVPAPNTSRRCSACGFITPGSRETQARFACKAKGCGYQANADTNASRNIDHAAGSAVSGRGDLGSTRSAKRQPPTQPHAA

SEQ ID NO: 24604 - protein, 422 aa, unknown
  TnpB Polypeptide
MKINQGLKLRIYPNQQQQELLNKTFGCCRFLHNKMLEERKAVREELKDDKEQLYTHKYKTERQYKQEFPFLSEVDSKALQSETRNLLQAFQNFFRGIREGKKIGYPKFRSKKQKQTYTTYNINNNIRIDQTTKRIKLPKVGWVKYRDGREPIHPIKHVTVSKTRTNKYFVAIIVEVEIDVQPLTAIQFHKIEAFDMSAPNFLISETAELKNPRFYRTQERKLKRLHKLVSRKQKGSQNREKARLRLARFYERIQNQKMDWTHKLTYSLSNQFDAIILEDLNIQGMQQFNSGLSKSVTLDFSWYQFLSYLRYKMEWKGKHLILVDRFFPSSKLCSACGQINNALQLGEQTWTCLCGATHDRDVNASTNIKEEGLQILHDQGITIINNDTTVGTTGSHASGDRVSPVSAGSGQGRRNPPAFRQW

SEQ ID NO: 24605 - protein, 391 aa, unknown
  TnpB Polypeptide
MTRRQGFRFKIVPKSAEETLLRKTLGCARFVWNALLAENKVLLDANLKRMGYAAMCKRILELKDEFAFLREVHSQPLQQTAKDLDRAMSDTFNPELHRGFPVFKKKGRACGIRFPQGVKINANAVYLPKIGWSAFRKSREILGDVKNVSVRQDAFGWSVSFQTEREVAESVHPSESVVGIDLGVNRFAALSDGSFVDGPNALKKSKNRLTLLQQQVSRKVKFSKNWCKAKAKVSRLHHRIANIRKDALHKASTTISKNHAVVVLEDLRVANMSKSAAGTVESPGKSVAAKSGLNRRILDQGWFELRRQLEYKLAWLGGLLVVVDPKNTSRTCSACGHAAAENRQTQAVFVCIECGHAANADTNAAINILGRAGHARIACSELAPQEARRVA

SEQ ID NO: 24606 - protein, 430 aa, Bacillus sp.
LLYLKHLTEASKNLYNTTNFYIRQIYTALKTDYPLHPLQQEVMDQLHTYLPIINETQRKAYQNRLKKQQEKAIEERKDVQLRLFEMPTQEKPFVSYTFLDALFKAMNQPDYRALPAHTAQGMMKNVFQNWNSFFKSHADYRENPQKYTAPPRIPNYKKGTEKDAVLSNQEATIHSRRFLKLPKTKTRLNIGKLGLTDASLQQVRILPRYRQYVIELVFKEDGAEETKPNNGRYLSIDLGIDNVLAITSNTGMRPVLIKGTKLKSTNQLYNKMVARYRGILRHGQEPKEGQQTSKRLEKLHVKRFLRIKDFFHKASFHAVKIAVEEEANMIVIGQNKGWKQKSKMGKRTNQSFCSIPHRLLIKMIHTKLKKQGSRSSSPRKRIPPNQVFWMTIPSTAISQEKNQCFPGSGLSVASTEQAAERRSMPTSTAA

SEQ ID NO: 24607 - protein, 529 aa, unknown
  TnpB Polypeptide
MQATFQTRAKLTEPQARAFDSWGALHGRIERQLFAAFCGADSATKSIDLLKSATCARHGITARQFNAISALLKGKIASKAEVDRLALADVKSEIKHVTASLKRLAKKWGELDARQAKAWAGKTRRLARLKRREKTLSSSHVSLCFGSRKLFRAQFDLITNKFDSLDEWRASWRKARSNAFYLLGSKDEAGGNQSCTATVAENGTLTLRVRVPDSLVDANGGQKYLLVQNVWFEHGQLELYAALDAGQAVSYRFLRDAKGWRVFASTKRLDLRQMPDTHLGAVGVDINADHLAVAETDRFGNLVKSFRIPCVTHSKSSGQRQHIIRVAAKKLVQFASESGKPLVHEALDFTRKKQELRSSANPRYARMLSSFAYNATIQALASNALLSGVSTVEVNPAYTSVMGRVKYTKRLGITIHQAAALVIARRGMRYGEVAPARSEIPDGKGDHFVMQLPVRNRGVHEWSHWAKIRSQLLETLAGWHRLRSAALEDAAKAAASRGPTDACAVRSRTSNSPTQPFRSASLQKALPCG

SEQ ID NO: 24608 - protein, 440 aa, unknown
  TnpB Polypeptide
VKILKAYRFRLKTNPEIEDKFRRQSGCTRFVWNKALSLNKERLEHKIPLIWYNDMAGFLKLWKQSKEYGFLKEAHSQVLQQALKDLEKAFKDFLNHDKPAHEECRLQKNKGFPNFKKKNIHNSFRYPQGFKIEGNRIFLPKIGWVGFFKSRDIRGIPKNVTIKKENSHWYVSIQTEEEIPEQAHPKIGSIIGIDVGIVHFVSIADGTLNEQFIDFPSPLKMYSKRLAREQRKLSRKKKFSKNWIKQKNRISKIHEDISNIRKDYLHKASTAIAKNHGIVGVEDLKIKNMIKSARGTKENPGHNVRAKSGLNRAILNQGWGMFKEMLEYKLNYSGGILVRVFPKGTSITCPECSYESKENRKSQAVFVCKSCGFTHNADWVGAEIVRQRTAKKLGLVAPLIYPAVGHTVEACGGKGHKPPYEAGTSRKEQSSTAPLGISNL

SEQ ID NO: 24609 - protein, 245 aa, unknown
  TnpB Polypeptide
MTEQYRQACNFVSQYIFDHRFNMTYQSLNRELYSDLRSQFGLKSQLAQSSIKTTIARYKTIKQQLFQNPYRYKDEDGNWQRIIKTLEWLWKPIFFTRPQADLVRNRDYSFVNDGQILSINTLGKRTKCTFEGEHFAEYLDGSYELGTGKLVELKGLWYLHIPVTQAVEDFQKENVRHVVGIDRGLRFLTVSYDEQGKTEFVSGKKMLLNAINFRMSAVSSSLKAQSQQSVDSKPFQDERTVGCLM

SEQ ID NO: 24610 - protein, 381 aa, Spirochaetes sp.
MKTYCFKLYQSKQNKHLHKEINLAGSIYNHLIALHKRYHRLYGKHLNANKLMKHITKLKKQERFAYWNQLGSQAIQDIAQRIERGYRLFFRNKKLGIKSAPPSFKKVRKYKSFTLKQAGYWLLEGNKIFILGRVYKYFKSRDIEGRVKTLTVKRNTLGEIFIYLTCEIEEAPVESRLGESIGLDFGLKRFLVASDETIIESPLFFKQGIKKIRKLNRILSRKRRASPKRVSNNYKKASKDLARAHKRIANKRKDYHFKLARELAKKYALICIEDLNIKAMQKVWGKKVSDLGYSQFVNILRYQSLKAGSRVIEIPRFYPSSKTCSNCGYILEDIPLDAREWACPKCSSIHDRDINAAVNILRVGTSTLVGEGVRPASAGIL

SEQ ID NO: 24611 - protein, 318 aa, unknown
  TnpB Polypeptide
LKLKGKGKYDKPVKIPKYLDKKKGRQVVHYEKGAISFKEQGYIKLSKTNIKIKTKLTKDKVQFVRLVPKNNYIVIEIGYNIKEQEQKLNDNVLAIDIGVNNIASCVTTNGDKFLINGKQLKYINHNYNKRIANIQSKLKLTHNKNKSRYKSNITNRRNNRINDYLHKITTYIVNQAVSKNIGTIVVGYNKEWKQDTNMSKSNNQNFVNIPFYRFINMLDYKCKLKGINFQTITEEYTSKCSFIDDEEIEKHINYVGKRISRNFFRTKKGILINADINGAYNILKKYMKENATWNEKISQTLVKVCSIPSVRKINIRVS

SEQ ID NO: 24612 - protein, 444 aa, unknown
  TnpB Polypeptide
MKQVLTAKLKLHTTTAQVQALRHTQLAYRNGLNSVSRYAYAHGKMSSGRALQRDCYDAIRIQFGLPAQMACNVPRQVAATYKALWTKVKQNAAARKAGWTKKRYKGLDQPPKYISPTLTYNYKYDYSFKEHQQVSVLTLDGRVIVPYTGKDSHVALIQHGASIGAAKLWYDKPKQQFYLLVSLQVEVADPTPETHTSVVGVDVGQRYLAVTATLKNDATFYSGKQVRATADHYARLRKRLQQKGTRAAIRRLVVISGRERRLKQECNHLISRRIVEAHPHSIIGLEDLTHIRERTRRRTHKRKKNGKGHEPVSSKQRKGNRHASQWAFAELHSSIAYKALLAGSMAVKVDAHYSSLACPMCGYTSAANRPHKGLAFVCRSCQYTLHADLVGARNIALRTLLVRQDWMSTGVLSIRPDVSSDETKAARLQRYVELRWSPDTSSRA

SEQ ID NO: 24613 - protein, 440 aa, unknown
  TnpB Polypeptide
MSQRVERIVISRSHPNWKACHRLCGLARRLGNCATYILRHLFIEKKDFPNRQTLDRELREQYPSDYRGMPSAASAQRQGQIIREQFLSFINAKNEYRKHPDKFKGEPKLPGYRKRYRTFYVNRNGFCIRQGLLHLSGQDKVGFTPMRVICSPEQEFNAPARSAKVGDVRIVPAGNSFILELTYEENRTFDYKLDSDHACVLDLGVENFIAAVATRPGLAPFLVKGGILKSLNQKYNKDMAQLRALEKTGHYSIRSFKRDRCMNDLLHKISRMVVNYCVANDLGVLIVGRSKDWKQQVCLGKRNNQNFVMIPHAKFIEMLQYKAQGCGITVILREESYSSKASALDFDSVPNFGDAQIPKFSGRRIHRGLYRTGSGQLINADINGALNIGRKELGDEWLRKRLQVDEGAFVNAPTVYRHLHNCGHAGHCWKGDYGLPKPQS

SEQ ID NO: 24614 - protein, 395 aa, unknown
  TnpB Polypeptide
MLKAYKYRLYPNEEQQNLLASIFGQVRFVYNLGLETKITAYAGNRVNLNCFDLINQVIELKKNECAWLKESPSQALQMSLRNLDNAYHAFFRGKGFPKFKNKHGKQSFSLPQGVSLSEDNKKIFIPKLKWVGVDLHREFKGDIKTVTISKTVTNKYFVSILVDTKQEFPNKRPITEQTAVGIDLGIKDFVICSDGKKFENQNFFKSEMRKLRVAQRSLSRKTKGSNHYVRQKMIVALLHEKVRNQRQDYLHKISKYLVDNYDTICMEDLNVKGMSATCKPKQDENGKYLPNGQAAKSGLNKAILDMGWSDFCSMIEYKSEWQGKNVSIIGRFEPSSKACSHCGYINKNLTLADRTWTCPNCQTKHDRDVNAANNIKTFGLRNKPSVSQREAIACA

SEQ ID NO: 24615 - protein, 469 aa, unknown
  TnpB Polypeptide
MELWDRPTSKAEGVADVAVARHRRSRKARLYPSPVQAATLEGQGHVARALWNLLHEWYTCRRGGIATRPSVSEIDRQLREARVNPLPGWEWLSDLPAQATQQVLKHYLNAWNRYFRGISKAPKFKKRSPHMSIDVPQASALKLVRLSRKWGQINILLVGRVRFRWTRPLPGVSRGHPGRLTGACLVKDPLGWHVCFRIEEPVLSVPENLGSPVGIDRGVVHTIALSTGEMLDMPSLLSSGEQRRLRGLERKAARQQQLAFKQRTHDRHAVMSRRQRHTYEQIAVLRSRQARRRQDWLHKTTTDLAKSHGVVVIEDLRIQNLTRSARGTIEHPGSNVRAKAGLNRSILSMAWGMAEHMLGYKCPTQGGVLIKVDPRGSSTECPRCGRCSPISRLNQATFRCVACRHAANADTNAAQVLLERGLTALSGATPGCGGTAREARLPVPHREPLPAMPAGQGHPDGPGASSCRS

SEQ ID NO: 24616 - protein, 233 aa, Hydrogenibacillus sp.
VQTITLRLRLHRPTQAKINRYRELVARITAFANNLVAAGRPKGLTSRTAREYLAGDLPSAVINQALRDVLAHKEVKKFRVLWPSFNNQNLSLKKVGNFWTASFPTQAGRVRVPLAVTATQEAILARLGRDVKQGAAKLYEKRGRWYLALSVTLPIEEKAAEPARDKIAGIDMGLRYLAVVNCEGETLFFHGNQAAYIRRRYHALRKRMGKAKALKAIRQMKDKGATCCTISLA

SEQ ID NO: 24617 - protein, 378 aa, unknown
  TnpB Polypeptide
MNTNMLKAFKYRIYPTKSQRSKMNQTLELCRWTYNETLAYRKALYESEGKSSSKYATNALLPAWKVDKPELTEVFSQTLQNVQERVDLAFMAFFRRVKSGEEPGYPRFKGKGWYDSFTYPQLGFKLNNGVLRLSKIGDIKIKLHRPIEGKIKRLTVRRAATGKWYACFSVEVIDLPKLPWKDGSLVGVDVGLESFATLSNGEKIANPRFFRTEEAELARVQRKLSKATKGTPERKKALKVVMRVHERIANKRYEFAHRISNQLVNKHGLIAFEDLNIKGMTKNHCLAKSIHDVAWNMLVTLTTYKAASAGSMVVLVDPRNTSKMCSRCGILVEKTLSDRIHNCPQCGLSMDRDWNAAINILRLGLQSVGIQSVEAPVF

SEQ ID NO: 24618 - protein, 411 aa, unknown
  TnpB Polypeptide
LKNVAEEYVRRTAVTRLSVSGEQRALLEATIDAYRDGCQIATDMAWGRCNIKSDVQPLAYDSIREDTELGSQHAILATHQAAEAITGCHERRSKGLKASKPTFTAPTVTYDTRTMTLFEDNTVSLSTVEGRVRCQLVLPQDADGYQWQFLDDEGWELTESTLTARDGAYYLHMGFRRFRTEQEREAENETAENGTVLGVDLGVNNIAVTSTGMFISGGELTHWQNEYEKRRGSLQQTGTRWAHENIQSVGRKETARFTILLHEASNAILAEARGNDCTHIAFEDLTDIRERLPDATWQHRWAFHRLFEFVSYKAVEDGVTVQQVNPQYTSRKCSHTDCGFTHEDNRDGSTFECLKCGYTLDSDYNAAKNIAVKYAKRLRRSHKSSDGGVSVDIPLNSGSLTVERPSIVTVG

SEQ ID NO: 24619 - protein, 400 aa, unknown
  TnpB Polypeptide
MIAEAATMPTVCLRFRFEEHPKIRALMEACADIQRQAVDYALENGKTATFTLIKALYPSLRDQHPDLHSVWVQSAVRAGAAVVHSFRNRQRKGKTQLQKPEIRRPFVYVRRDLLRIEWDGETLTLTFPLSPHDPDPIVLTFRPHHKYRRLLDEWKAGRAKMGEPTLTAHSLSIPLKFPDPIPYEPEGVIGIDSHEGNLTAFVTSTSEIREIDTGYVGKVNRDHLRREIKGTRGKHNPKAKKKIASKHRRIRKQKVENFWHHLALALIAWAIGMKAALVLEDLQGMKERIGKGKSRRMRQRLLNFWSIMTFHRLLVQKARFYGVPVIFVGPQNTSRACPVCGKVGERLRGHVLTCPCGVRMSRHAAAAVNIARRGVEFLGGLGLRGRGRWATPVAGPLASG

SEQ ID NO: 24620 - protein, 416 aa, Haloplanus sp.
MDVRRTAVVKLDLSDEHRDALHRTADQYLSCANRTSDYCWSNTSYTECKTNKREVRDALYAELRDDTDLPAQLVQAAIKRAVEAVKACVERWKKRQRVSCPTFTAETMDYDTRSATFYRNNVSLATVEGRVEPSFVLPADSPTPYERYVLSENHEFRESTLRYDAVDDEFYTHVSTRRVDGDDTEVSRDTGHPDHTVLGIDLGVNSLAVSSTGTFWQGDDYDHWCREFKKRRSEMQQRETQAAHNALLRLGNRERAWRKQYIHTVANELVTEAVEHDCDVIAFEDLTDIRERLPHATWHHVWAFRRLYEYVSYKAPDHDVSVEHVEPEYTSQRCSRTDCGFTHKDNRHGERFCCQKCGYEVNADYNGAKNVGLRYARKQIHRLRSSPMSGSGDAEVDLRVNGGTVNGDGSRRIAGA

SEQ ID NO: 24621 - protein, 418 aa, Haloplanus sp.
VADDYVRRTAITRLEVTDVQRDLLEDTITEWKRGCQIATDLAWSKCNIKSDVQPLAYDDVREHTDLGSQHAILATHQAAQAITGCIERRSKGKKTSKPTFIAPTVKYDTRSMTMFEDGTVSLSTTESRVRCDLALPDAEDGYQRQYLDSDEWSVTESTLTARDGNYFLHIGFRRHKNDIERNTAGDGTVLGVDLGIENLAVTSTATFVSGRELTHDLREFEKVRAGLQQTGTRSAHRTLEQSSGRELRYVRDVLHRASNAIVNEAFRYECDVIAFEDLTHIRERTGASWGHKWAFRTLYEQVEYKAEAEGISVRQVGSAYTSQRCAECGFTADENRTSRNDFRCVKCGAEANADYNAAKNIGMRYVRRGQQSSRRTGDSQLALKSGTVTPSGGFTAYPDGFEAEFMDKPHPPRANPSG

SEQ ID NO: 24622 - protein, 444 aa, Haloplanus sp.
MQDAGLTQTLSFGLTIQTGSPDNLHDSCLEARRVRNEVNRLDREGWDWNDIHDTVVDNANHVKNTTQLLVQKALKEIETYHDHKDDDWGRPSPYIDEPYPMRMNHNEGYALTVDDSGDVRFRVSYKPYNYVKGVLRGSPTHLEQVKNALNSDSWRVGVSELVYKHNEWRLHVSVTHKTHSVASPDNAETVVGVDINEDCVALTAMCRNTGDVLDSVVIEYSDIKRVRHEFFTKRKRMQKVGQTAFETVVRTEERDFVHDHLHKVSRDVNRWVSQFNDPVLVFEDLKDMRDAIDYGTRMNRRLHSLPFAALRRMVTYKAAWNRTPSDAVDPKYTSQRCPRTECLHTERANRYKKRFKCKACGFQDHADRKAAVCVAQEWFKKQNKNVLSLDTLPRVKKVRRTASGLCEEADAHGAVFASGVTDTESAQNSPSQARAEVKTVAPSG

SEQ ID NO: 24623 - protein, 426 aa, unknown
  TnpB Polypeptide
VIELARKKKNSNNIPMQTLTAKAKVNNLSDQDALLLGLLGFFATKLWNVANHHRQCVWKETGKIPGFAEQCKELKLNRWYKLLPSQSAQEVLGEQDDSYRSWYSRRKNGDKKACPPGFRKKDSLSTVTFKQNAFEMLPDNRVKLKLPKTYDRREIVLEYQPPPDTTLGKVQQVKLVYEHKTGDWYLHVTHKVPVKYRETGNVMSLDLGIVNIVAGLISDGFSFVVPGGELLALDRYFQKEKAKCTRSTSKKCVELNVKWSRQRDHYLHTLTRWLVNLALTHNVSTIAVGELKGIRADKDWGDAGNQKLHAWPFSKLVSLLTYKAALAGIWVVKVPEKSTSTTCPVCSKRVKKARMHRGLFVHCGQSFNADLVGAYNILQRYLREAGLALPVWPGVVGALARPAVNLFVWRKTTPKGREQGTFRQAA

SEQ ID NO: 24624 - protein, 286 aa, Herbidospora sp.
LRNLLAVSRYRLTPTPTQEAALLEHCGHARYVWNLAVEQHSYWKPGRESAPGFAEQCRQLTEARAENAWLRAGSVVVQQQALKDFAQAMANVYRGTHRRPKWRRRGRDEGFRIVAVQGDDIRRLSRNVGEVKVPKVGWVRFRVEKTSTGLARRFDVIAVEDLKIAGMTRAGSARNVRQKAGLNRGILAAGWGRLVERLEHKAPGRVVRVSPAFTSQTCNACTHVARESRESQALFRCVACGHQDDADVNTARNIRDLAAGHAVNARGGDRGTGPMKREPQLVLLSA

SEQ ID NO: 24625 - protein, 295 aa, Burkholderiales sp.
MQSVRACNFVWNFCDDRQKDILRFGRRWHAGFDLNKLTAGSRKELACIPARRTPCVGNTFRVFHSRTLPEEKIKDGSNFSRDSRGNWFLNIVIDVACAAEARQPVKGVGIDLGLKDFAALSIGKKIGAQRIYRDAEAALAVAQRAGKKKRVKAIHAQMANRRSDFHHKLSTRLVKEFDYIAVGNVNAAGLARTSMAKSVLDAGWSFFRTQLAYKAVKHGAWFEEVNEAFSSQVCSDCGALPDSRPKGIADLGIRNWMCSDCGCVHDRDVNAAKNILNKSGFRAGHGTPVVGIPAL

SEQ ID NO: 24626 - protein, 365 aa, unknown
  TnpB Polypeptide
MQITVKCKLVPSKGQANLLQAITREYIYAVNQIIANFVAADQYLKYSSKDVVANLPSAVKNQAIQDAKSIFAKYTRAIRANTKRKPEQQKEVKIPQLKKPVVIWNNQNYALKGDLLSFPVIIAGKSKRIEVKTVLTEYQRNRLIGKLGSLRITRKSGKYIAQIAVDMPRQEINTDKMMGVDLGLKIPAVAVLESGKTRFFGNGRQNKFVKRKHRSMRKKLGKQKKLNTIKKRHDKEQRWMKDQDHKISRQIVNFAQQNNVSVIRLEQLSGIRRTARTSRKNEKNLHSWSFYRLAQYIAYKANLSGMKVEYVDPKHTSQKCPVCGKHNKADDRNYKCGCGFKTHRDRLGAINIISATVADGNSLPA

SEQ ID NO: 24627 - protein, 392 aa, unknown
  TnpB Polypeptide
MIIKSIKVRLHPNKKQLTKLFQYAGCARFAYNWAIARERENYKQGNKFLSDNDLRKEFTQLKKREAYKWLNDISNNVPKQAIKDACNTYKRFFKGQSKYPKFKIKKHSRLSFYQASDKIQFTDTHVKVEGFPMSKRKNKQQLNWIKLCEKGRIPPNAKYTNPRFTYDGLHWYVSVGIEIPDSTTIPSNEGIGIDLGIKDLAVCSDGYTYKNINKTHKVRKIEKRQRRLQRSVSRRYEKNKKGERYCKTRNLIKRQKELLKVTKRLTNMRRNHLHQTTSDIIKRKPSFICIEDLNVSGMMKNRHLSKAVQQQGFYELRRQLQYKAERNNISVIIADRFFPSSKLCSCCGNVKSDLKLSDRIYRCTCGNTIDRDFQASLNLKAYGEQVFHQSVA

SEQ ID NO: 24628 - protein, 377 aa, unknown
  TnpB Polypeptide
MDIKRAYKFRFYPTPEQEDVLSRTFGCARFVYNHMLRLRTDAWFEKGERLDYNETSAALTQLKKNPEYAWLNDVSSVPIQQALRHLQQAFSNFFAGRTRYPSFRSKHDRQAATYASSAFKWDGRVLTLAKMKQPLKIRFSRTLPKAAKVTTVTVSKDAAGRYFVSMLCDDAVAVLPKVEAAVGVDLGLSHFAVFSTGEKVAAPNVFRRNEKKLAKLQRRLAKKKKGSRNRTKARVKVARLHAKIADTRRDFLHKLSTQTIRENQTIVLETLSIKNMLRNGCLSKSIADASWSEFVRQLEYKARWYGRELVGIDKWYPSSKRCSACGFVMDKLPLSVRSWSCPDCKAEHDRDVNAAINILAAGRAVSAFGESVSPVCV

SEQ ID NO: 24629 - protein, 376 aa, Phormidesmis sp.
MSQKAFKFRFYPTAEQESLLRRTLGCARLVYNKALSARTEAWYGEQKRVSYNDTSKMLTEWKREPDLYFLKEVSSVALQQGLRHLQGAFTNFWAGRAQYPNFKKKRNGGSAEFTKSAFKYVDGHVYVAKCAEALPMRWSRLLPPGADPSTITVKLSPAGRWTVSLLVDVDIEPLPESSNQVGIDLGISSLLTLSTGEKVANPKGFKAKFRKLRKSQKALSRKQKGSSNRHKARLRVARVHAEIADSRKDNLHKLTTRLVRENQTIAIEDLAVSNMVKNHKLAQAISDASWGELVRQLEYKSDWYGRTLVKVDRWFPSSKRCHCCGHVVDKLPLNIRDWVCPSCGTSHDRDVNAAINVLAGGLSVLACGASVRPDKH

SEQ ID NO: 24630 - protein, 309 aa, Cyanobacteria sp.
LVNPRRGEAFASKDYANNRKIIYANASPVQTYSLSFPTIKGIKRVPFEVASRHWQPILDRLLIGDTLIDKGSAKLIKHRHKWYAYISVTMEVPQVQTINRIGCDRGQNNLAVVAPAKGFGKFFSGKEVKHRRRPNQKRRQSLQSAKKFRALKKWDKRERRWMESVNHTISSKVVRFAQYLNADVVIEDLEGCRDTMKQRKKNRVDSGESRHSWAYYSLEQKLDYKLALKGLRIIKRPAPYTSKSCSTCGTLGERKGHDFNCPNGHYHNADLNAARNLSRWDGFCCSLDLKRDAPQWRVPVDARIHVPLG

SEQ ID NO: 24631 - protein, 538 aa, Lachnospiraceae sp.
MEMWETVSYSVHEQDPNSRKKAAYMYHVECIDIHKADKKMYQYIDRACLCANNMYNVANFHIRNLMTGLKKSTAQCTDNESSVIRTFGSSIPGINSSLRVRRFLKVFRIFQDKNLSMAERKTRVSKVKCLRFSMPTADKWFASYELLDAVFRYTENADYRAFHSHVVQNAVSDCCEAWDGYFASLRAYSPSSGHTGKPRIPGYRKSGGRSTAVFSNLACSIKHGRLYFPYAAVEGGKKRVRPSLDISGLPHVSKAVPKSGEKLIEVRAVPYFDAYQVQIVTDDGMPEEDLLPKEEDIIGADGEPAGVMMLDPGLNNFAAMTDNKGNTPIVVKGGAVKACNQWFNKRMAFLKSEQMKGHDPKTYHPPTTKQMKRISHNKGQKQEINLKAKNNQAFVQVPFARFRLVLRTVSVQYGIRVILQEESYSSMACFGSRDYIPTYGKGDAEGVSFSGRRTKRGLYRQDDGRVMNADLNGAANTGRKYDGRIFPEGMDTEYLYHTVRPMTYRDILRASRERNKTNNNRSNPGQTGQRACVCPVTA

SEQ ID NO: 24632 - protein, 448 aa, unknown
  TnpB Polypeptide
MHKRKYTIVAQLHRVNNKELIEYFERAVGLFSKLQRKAFHMLKYETVSGNKTEYKRFRQSFMQQYGISRRTADSILKDVQGRMKALAELKKLEGKQKETRLAVLQSEIQILDRKITKLQDQLNKGVKIDHVQYWNLKKTRAFKKMRLNKLRLRLKQLQWEMKTGHLKICFGTKKLLKAGSKEFALRRDSRMSYMGSQDETARNQMLQLEYHNKTNQFAIKLRKDFGADEKEKYVYGKCYFNHHKNKLIQILSNANSSPLTYVILRRAGRYYLHCTFEERIKNHSCFVTGKANGTIGADFNKGLIAACETDKNGNLLGTQMYRYRFGQGNKTKSDLEKIILTMVRKCMNTGKNLCIENLDFKNTKAKAVQGKSEKGKKYNQMLHTLAYSMYDQLVSDISFRNRVYVEKVNPAWTSWMAEQKFCSRMKLNIHSGASYVIARRGMGIFDTL

SEQ ID NO: 24633 - protein, 392 aa, unknown
  TnpB Polypeptide
MKRLKAYRYRLYPTLEQEVLLAKHFGSCRWVYNYALSKKIEYYTLNKQTLSRFDIQKDLVTLKAQEDTSWLSEVNSQSLQASLVNLDMAYTRFFREKKGFPKFKSKRDIQSVQFPQKTKVDFGNNRLYVMKFREGIKCIFHRSFEGNIKTTTINKTCTNKYFVSILVEEEVFDVKKQLPVYEKAIGIDLGLKSFLVTSRNEVFENPKFFKKTLRKLKRAQRRLSRRKKGGNNYKKQKMKVARIYEKITNQRNDFLHKISKHMIDDPQINTYCVEDLNIQGMVRNHRLAQSIQDVSWNTFITYLTYKAEWVGKNILTIGRFEPSSKMCNVCGKINHELTLKDRSWKCVCGKTHDQDFLAANNIRDFAFDKQNMIGTDKPESNTLREIGGCTDR

SEQ ID NO: 24634 - protein, 226 aa, unknown
  TnpB Polypeptide
MQTAARTGPSIVPVRGERAIGAALKMPGEHMELPHTNQNTGIDLGIKELCITSDGKKYENPKIIRKYEKKLVKLQRQLAHKEKRSQNYYKTKKKIALCHEKITNTRKDYLHKMSHEIISENQVIVSEDLQIKNMVKNHHLAKAISDVSWYELTRQLEYKAKWNGRKYVKIDTFYASSQLCSVCGYQNTETKNLSVREWTCPVCGTNHDRDINAAKNILEEGLRQIA

SEQ ID NO: 24635 - protein, 442 aa, unknown
  TnpB Polypeptide
MTVTRRATYRLYPTATQEQQLYGWRRLHAYLYNAAISNRRTQYEKFGQTVDYFQQQNCLPAFKEVWPEYRNLGSHALQATLKRVDFAYLRFFKGLGGYPKFKSIRHYGGWSYPDKAGWKAHTTGDNGYLDLSNLGQIQMRGKAKTWGTPTTCTIVHRNGLWYASITINCEPESRKIGTGSIGIDFGTKTAAAIWDGEKGSFIENPRWLQQTLPKIKKASRDKRRKRAPNHKKKIKASRRYKTAQNQVTKLYRQAANLRQNWIHHQAAEIVSGNSLVASEKLEVKNMTRKAKKGSKRKRQKAGLNRSILDVGWGMLTQAIKYKLAEGEGVFVEIPTKTVKPSQTCPKCLHQRKKELGERIHFCQECKFTTDRDLASAEVMLSWATNSGAFGTSVLRCRASSSTKSTKERKNCGSMRQLGAKKRQKHHSAGGDSETPPSQSRVG

SEQ ID NO: 24636 - protein, 477 aa, Brasilonema sp.
MEKKKQQKTEYTYTQVVPVVSCSDESQIDRIMHLCGVPRRLTYNKLGSLQGWGLDWKKADPIVRTVLKPDDIGLPGKLWEWSVNDTMKAISAQQESAKTFLTQDIYNHTNDPDKRKRLIDLLKTNPTVDNWLHRQFRKQYLKGHTFVRNQIVYQGAGYSSKRLTRNTIQLEVAGLTRGKRITLKLRCRHIIKGQIRLIRNEHGGLEVHCIRTKTLILPQGEPNKKLGIDKGYTEGYYTSEGTKIAEGLGKLLTAKTNRITKTNRNRYRLFAISRINPAKSATILKNNLGYKTKKRRLQREKATIQNFIRKDLRLNITTPVEIFCEDLTQPIIGKQQAKHINRKLNQWMNGELQASIEKISLETGSKVSVVNPAYTSQVDSATGTLLGRRERDCFIRYTGDVIQADLNASINIRIRGTDNNITRYMKSSDVESELLTRTVRYLASIGSSVTDALNLGWLLPKFKAKALKLEDKYHSQG

SEQ ID NO: 24637 - protein, 487 aa, Undibacterium sp.
MNVIVLTVKLYQFRFKVIADTSKYGAQIIKNLFCKYAASVLCYKDQMYVQIKNAVSSSPNIVVVFAHRPEYDRLMQRLQAFKYELMPDGKQQRDMRRFAGSCRFVYNKALALQKENHEASGKFIGYVAMAANLPIWKRESDTEWLKETPSQALQHALKDLDKAYTNFFAKRADFPRFKKKGSGDAFRYPDSKQIKLDQANDRIMLPKLGWIRYRNSRDVLGEVRNVTVSQSGGKWFASIQTQHEVEQPLPTATSAIGIDVGIVRFATMSDSSFVAPLNSFKKHQQRLARYQRRMSRKTKFSSNWKKAKAKVQKIHTGIANARKDFLHKTTTTISQNHALVCIEDLQVKNMSRSSKGNSEQHGKKVAQKSGLNRSILDQGWGEFRRQLAYKLAWQGGMLLAVPPHHTSLTCPACGHVSKENRLSQTKFLCVDCSYENHADVVGAINILERGYRLLACGESVQSGRSVKQEPTEATRKSSRSAVGIPVL

SEQ ID NO: 24638 - protein, 426 aa, Streptomyces sp.
VSQGTLVKRQFGHRARLALSPAGIRAADDQARAARTMWNLLHAWWQMMPKQKRTLAHADAAIRQARKDIDFLAFLPAQAAQAVLKTYVQAWKNCWDGRADAPNFKGRLRTVMSVDIPQGRDLNITRVHRRWGMVNLPKVGRVRFRWTKDLPVGKRADTENRITGARLVKDALGWHIAFRVQTLEPRPDPHQGPDIGIDVGVTVPIALSNGETYGHGAWLTEKEKARLLHLEQRAAQRKQHRRPGERTSRRLHHTYDQIAELRAKAKRRALDWQHKTTTAIARTYGTVVVEALTLTNMVKSARGTVEEPGKNVAQKSGLNRSISQEAWGRTVTMLAYKTAQLGGTLVKVPAPGTSRRCSACGFTTPGSRESQAVFVCKNPDCGWSGNADHNAARNVLHLYRTSLALVPAAGRAVVRRAKRVKPAAAR

SEQ ID NO: 24639 - protein, 481 aa, unknown
  TnpB Polypeptide
MRTVEFKLSLNQSQQTKVDNWLNVQRWVWNQGLELLERFNTFNTWDKMTRSWVNCCPVPWEYYQSKDSNQLVPFCRLPWTYYQQEKQLIPFCRLAERNHHLPQEYQDSQIQLPTFFGLIYYFAQKNHTDKPWFCEVPSKFVSGTLKCLADAWSEYKSGNRQRPRYKRYQDKIKTLLNNNAKSIKVSGRRITLPKLGKVSVKTLDKRWDNSVPISTLKILKSASGYYLQITGVMPIEKKPLPQDKAVGLATGTEAVYTTDSGKAIESPQYYRRMEKRLKRLGRQASRRQSGSANQKKTYRQLARLHERIRRSRRAINHKLSTYLVREYGAIAVNESKSVKGANSTNNKALTDNAVGQLLTLIEHKAQIAEREFVRVLTQGLPVEQQAAARAIHTTAKPIFARNYRPWGWEVTPGESIVTLNQEVPQGIPLRDAGTTSNSSSSNYQLTKLRELVDVSPTRQRLRAAKLSVENQVQKGSQKSMK

SEQ ID NO: 24640 - protein, 292 aa, unknown
  TnpB Polypeptide
LLAVKAVQQNYTPNSQLLGLLEQFRQMVNNCIRIGLAENVTSLKSLSLKAYWQLEQYDAMSYYKLCAISKAAGILKNYRKAERRGKRVKQPYARRPQLTTCYGFKTCNDSLLLPIKPGNKIRIPLNHHALQVLSETGVTARSVTLTESTITVAYSKHVPTLEPSGLMGIDRNLGNVTVADSNGSITRHNLAQATEITAMYREVKSHLNRNDSRVRQRVYGKYGVRQRNRVRQLPHRASKQIIAEAKRSRSAVVMERLTGIRRLYRKGNGQGRDYRARMNARMNARARMNANT

SEQ ID NO: 24641 - protein, 481 aa, Erysipelotrichaceae sp.
MVFNSFFPQAILRVLIVNYGLLSFLFLKERRHGMRQTTSYAVDIRTKSVTRACRETLRVYQNAVSWLLGPVSAEWSDMLKTAFYLKKQQKYIEKKVHSTKKRKAVYDFDAVFPNMPSYLRRAAINDAIGAYSSYVSNHRNWLDNGKKGSEPGLGVSRLTCPTFYRDNMYVQDMSSDTASLKLFNGKTWDWYDVKLKHTDMQYLRVHWLSGEKVSAPTLEKHYGIWRLRFACTVSVELSDLPLEKQRVLAVDLGINCDAVCSLITYDGTVLARKFINFPGDKGRVWHELNKLKQFQKRHGSHDIGTFWRYVRNLNRQHAYKVARAIADYAIENDCDVIVFEHLDTSGHKIKGSKRQKLAMWRKNTIQADCENIAHRHGIRISRVCAWNTSRLAYDGSGPVERSVDGNYSVCRFQNGRIYNCDLSASYSIGARYFIRAIQKTMNESSWSRIKAEVPDAAKRTTCTLSTLWKITAVLGISNQSF

SEQ ID NO: 24642 - protein, 363 aa, unknown
  TnpB Polypeptide
MQKKTLRYRLYPTGNQTQALDHQLGEACRLYNAALQERRDAYQYAGISLSYYDQANQLKEIRALNGCDLANFSCSQDVLRRVDKTFKAFFARVQRGETPGYPRFKSRFRYDSITFPSYGDGARLRPNGKLYIQGVGEIKVKLHRPIACRIKTVTVKREAGRWSACFCVETAGAPDTRMYEDIGIDMGLESFAVLSDGTVIDNPRWYRQAHAKLRVAQRRVARRKRGSKGRRKAVELLQRAHEQVRNTRRDFHHKVARELVERYSVIFVENLNIKGLARGRLAKSVTDAGWGGFLQILRDKAAEAGCVVWSVNPCGTSQTCTCGAPVPKTLSQRWHKCLACGLSLARDHVSALLIQGLGRSLVS

SEQ ID NO: 24643 - protein, 484 aa, unknown
  TnpB Polypeptide
MKTTMKAILVNLSNEQKALLDHMMLVFCTAVRYSFKRLLEGQLVGDLEKVVAYKYNLNIRQAKDAVESARQTIASQHELVKLYHANFSKKVEVLVKKLKKPKLSERTVKASTAKLAKRQRKLDFWTAFLTSKTFPPVTFGTKEMFLRRCKGFVTKQEWNDRRNNRFYSRGDKSKGGNPNLRVVFKDGVSYLEISTFEKTVNNRAVKVLMPIYLPQKLSKKTGKVNGVPYRTLFIDSLERGVAYQVELIKRDGKYYAHITFEELEAKVIYTGHLSLIGIDTNPDGFALTKIDPFGNYQGHIYLKQHELTFCRSNRRTNLCGELVAQAVDMVKVRQCGVAAEDLKFKDDRDVSSKLARVSSQFVYATLLQMLERRCLREGVELVKVKPQYTSKIGLYKYCHQYGFDVHNGAALVIARRSYGFKETVPKLLEDTLVPRKKRITFRKMNEWSQWSEISKQVGKLFKKRKEVNTPGLWLVRRKELLGIA

SEQ ID NO: 24644 - protein, 416 aa, Nocardia sp.
VTGKRCARAAPVRPGSAHRLRLPEPVGGCRYLVFVQLRYNYRVYPTPGQRQALARAFGCARVVYNDGLRARLQARAEGVGYIPDTELQKRVITAAKRTPERAWLAGVSSVVLVQALADLHTAYRNFFGSVTGRRKGPKVASPRYRSRKDNRQAIRLTRNGFTLRPSGRLYVAKIGELRVAWSRTLPTVPSSVTIVKDATGRYFASFVVQVEDRPLPGATAEVGIDLGLTTFAVLSDGTMIASPRFFRRAERRLRKAQQALSRKQKGSANRGKARLRVARAHARVADTRRDWVHKHTTQIIRDNQAVYVEDLCVKGLARTRLAKSIQDAGWGMFIRLLAEKATRCGRHFAKVDRFYPSSQLCSVCGHRDGPKPLHVRTWTCRCGAVHDRDRNASINILAAGRAERLNACGGTVSLSV

SEQ ID NO: 24645 - protein, 382 aa, unknown
  TnpB Polypeptide
LRTPVWYNMSMKTYKYRIYPTKKQAQTMADTLESCRILYNSALEQRKIAYRQFGVSLCRLNQQAELLEIKDYFPEYRQIYSQVLQEVILRVDRSFQNFFRRLKTNEKPGYPRYKGRGWYDSFTYPQSGFSLSDNSKGSQRLKLSKIGSIKIKLHRAIKGKIKTCTIKREINNWYVCFSCEVEPELLPKTHKSVGVDVGIEKYAALSDGILIENPRFMRQSEAKLKHEQRLLSRKKKGSNSRKKQRDKLAKLHCKIKNQRNDFLHKESRKLVKNYDVIVLEALQIKNMGKNHHLAKCISDAAWAKFTEYLSYKAESAGKKVVFVNPRNTSQICSGCGETVKKSLSVRVHKCPSCGLILDRDINAAINILRLGTSPGGATALAG

SEQ ID NO: 24646 - protein, 395 aa, Chroococcidiopsis sp.
MKARYQFRVYPTDQQQQLLAQLFGCVRVVWNDALAICKQSEKLPSNNDLQKLVITQAKKTLERSWLSDVSNIPLQQSVADLAVAYKNFFDSLKGKRKGKKVGSPKFKKKTGRQSARFRIGGFSIKGDEVYLAKIGNVKPIWSRQLPSAPSSVTVIKDCANRYFLSFVVETEHIQSEAKNQSIGIDLGIKTFAVMSNGEKAVSPNYSKKDRKIRKLQRKLARQQKGSKRREVTRLKIAKLHNKIADTRKDFLHKLSTKVVSENQTIVLEDLNVSGMVRNRKLARVISLQGWREFRVFCEGKSQRLNRDFRVISRWEPTSQTCSCCGCRWGKIELSVRSVLCLSCGTEQQRDENASRNIEMVGMGHRHDLKRTGSDHKTTPVASRCEPSRITALQGQ

SEQ ID NO: 24647 - protein, 405 aa, Chroococcidiopsis sp.
MIVLEFKLKGYKHQLQAIDNAVRTVQFIRNKCIRLWMDSKGVGKKDIYAYTTTLRKEFKYVEALNSTACQQAGERAWSSIAKFYDNCKKKVKGKKGYPKFKKNVRSVEYKQSGWKLSENRKRITFTDKNGIGTLTLKGGWDLNFYPIDQIKRVKIVRRADGYYAQFSINVDVRKYVKQLEPTQECVGIDVGLKYFYADSKGNTVDIPQYYRQAEKQLNRANRKKSKKFRRGQKQSNNYLKARDRYARKHLRVSRQRKGFVQTEALRVIQSNDLVAYEDLKVKNMVRSKLAKTINDASWSAFRSWLEYFGWKYGKVTVAVPPQNTSQNCSNCGKKVNKSLSTRTHKCSHCGYEVDRDINAAINILQLGLRTVGHTGTYAWGVLPSWAVGESLLSNGEVLNQESSRL

SEQ ID NO: 24648 - protein, 422 aa, Salinirussus sp.
MVEESFQYHAEPASREVARRAWNDIQTCREVYNHALTQDYHPAPDGDKPSYTAMQNKLPDWKRQWSEWGEVYSKYLQMAVRRIKHGETVLDELETKGYDVGELKWKAPREYRSITYNQSGFDVDSNTGRANHATVDFSKIGCFHLSYHRPLPEDGTIKQIHLKKQKTGEWTVSIVVDYDPDYPDKPAVEDIEPEDCIGIDLGIRSFVHDSTGRAVDRLDLSDDRERLEREQRSLSRKQHGSKNWERQRRRVADVHQRMTDRKDDFKHKLAHFYTTECEAVFVEDLDVRGMLEGDGNARNKAGVGWRGFIRVLKRHGEKNGCHVVEVEPNGTTKECARCGVEVEKPLWVRTHSCPSCGFETDRDRNTALNAFSRGLEELGVVHSEDTPVETTLPTGTDSVPAKRVVEAGSPALKERTVLAVSE

SEQ ID NO: 24649 - protein, 434 aa, Salinirussus sp.
VGRKLTRYRPAAKLVPANSQRLCNLNLARENIVDCRRTAVIKLEAPEGADARLRETVEQFKYCANTASEWCWHGDDGYHVTSKVKAEDALYDQLREDTELTANLVQKGIRQAVESVKSGVERLKNGQDTSRPTLTADTAVYDKRSATFHRDHVSLSTPDRRIECDYILPDDTDVPPTKYVTDEDYEFRRATLHRRDGDWYLHASMLKEDDDTDTTTRHRTVLGVDLGVNQLAVASTGRFWSADEFNHWKREYEKRRGDLQQCGTRAAHEAIAGVERKEDGRFEMFLHRVANELVVEAVEHDCSHIVFEDLTHIRENVPQASWHHLWAFRHLYEYVEYKAREQGVEAVQVDPRNTSKRCSTCGFTHDDNRNGEDFECQDCGYQNHADYNAAKNIGLRYLRRRQNADDGGALVDVRLNRGTLNVSGEDDLPTADAA

SEQ ID NO: 24650 - protein, 429 aa, Nostoc sp.
VLHKVVQVRLYPSVEQQIQLAQAFGCARWWWNYALNKSIETYKETGKGLSRAALNSFLPALKKAEETLWLADCYSQVLQATTLNLTTAYKNFFEKRAGFPKFKSKHGKQSIQYPQNVKIVDGESSPEGGSPSVGNWRTRKGSVKLPGNIGVIKAKIHRPIEGKIKTVTVSKTPSGKYLASILTELEGENPVTCEGKIYGIDLGLKHFAVVTDGEKVSKYDNPRHIAKHEKNLKRKQKKLARKQKGSNSRNRYRRVVAKVYERVSNSRQDFLHKLSYKLVSDSQAVIVENLHVKGMVRNHKLAKAISDVGWGTFTNFLAYKLERNGGKLVEIDRWFPSSKLCSNCFYQISEMPLDVRDWTCPHCNTHHDRDGNAAANIRAEGIRMLKAEGSAVSAVGGEVSPVLGRKSKFGHSPVITEADTVLGTPSQCG

SEQ ID NO: 24651 - protein, 201 aa, Crocosphaera sp.
LKLLQHRLSRKDKRSKNSEKARKKVEKQHNHIAFKRKDYQFKLAHKICDMGDSIFMEDIDFRTMAKGFLGKHTLDAGFGQFRDILKYVCKVRGKYFGLVDHRGTSQTCPNCRAEVRKTLSDRLHVCHECGYGVDYPVDRDVASAQEVCNRGIETTTLGLREKETVCQVEVSGVMSLDNWRRGIPLWAGISRRESGSPTHNL

SEQ ID NO: 24652 - protein, 494 aa, unknown
  TnpB Polypeptide
MPEFIQASPTLAATGLCHPPSCLGTMSLLKQQPALKTKTSIFLLLWHIYVGCVNINMDRVQQLIMIVLEFKAYGKLDQFTAIDEALRTVQFIRNKCLRLWIDGLGMSQYDLNKYCAVLAHEFPFADKLNSMARQAAAERAWSAIASFYDNCKKKVAGLKGFPKFQKDNRSVEYKTSGWRLADDRKSITFTDKKGIGRLKMKGTRDLNFYQPDQIKRVRLVKRASGYYVQFCIQVDRSELIEPTHRTIGLDVGLESFYTDSLGTKVENPRFYRTGEKKIGRSQRLVFRKVKGSSNRRKARIKLARVYLKISRQRKDRAIKLARCVITSNDVVVYEDLRIKNMVKNHCLAKSINDAGWYQFRVWLEYFGKVFKRVTIAVNPAYTSQECSGCGVIVKKSLSTRTHVCQCGCVLDRDHNAGINILNSGLGTVGHTGTFALDVNNAWGDKPSTLIGENLSGQGMSRSQESSDYTNRSRSVFSERDATRTERETACGESV

SEQ ID NO: 24653 - protein, 482 aa, Streptomyces sp.
VRAGAGGGWAGGAGGGRQAARHHRTLPGRPVPLRRADGAAADPARACLSGPLASGSYPVPAAAACARHRGAVPAHRAHPPGAAASRSALRARRPEAGAGRTPHRGGIRLGPEDPAHRRHPPPHPRGPAAGGDRRAPGVLPRGRSAGQGRPTPHPRRAHQRPHRPTAHPDRIPTGARDTPEPLAGGQARRPGSRAGARRKAAYPAERGARQGRRPLHDRPRDRRRSPGHLPRRPTDMEARGKGRTLNTRLSQTVRGAIVTHLRHQATAHGIAVVIVPPRGTSKYCPRCLTEFRHHKAPGDRAAGWAWATCPNTACGYSTGRDNAAWQRIGARGLTHQHKTSLDRTAGTFVIRSVVDALDRASTVQQQTRDRTKSGPTAKRPVPGKRRRVPAPPDTRTPTRARPGGKRPAGRTPTHPTHRSQRCPRQQGPNTIGTPTRHQPDGARLGAGFHRHAHTTPVRRRPWPSHPPARSRTPGITQETQAD

SEQ ID NO: 24654 - protein, 392 aa, unknown
  TnpB Polypeptide
MPKKSQHIKPGYVTQYNTIKARLYPDEAQAELFEKTFGCCRYIWNQMLSDQQRFYAETGKHFIPTPAKYKNGAPFLREVDNQALIQEHNKLSQAFRVFFKSPESFGYPNFKKKKTDRDSFTACNHVFESGPTIYTTRDGIRMTKAGIVKAKFPRRPRNGWKLKRVTVEKTKSGKYYCYILYECAVKEPKPVVPTQEKTLGLKYSMQRFCVADNGSAADPPRWLKQSQEKLARVQRRLARMEPGSRNYEEMVQKYRLLHEHIANQRRDFLHKESSRIANGWDAVCVRDDDLREMAREIKLDRVPDAGCGMFRECLRYKLERQGKPLILVNRYQPTTRACSACGFVGEAVSDRVKTWACPKCGAVHNREINAAKNIKTQGLSQYFNRQELRESA

SEQ ID NO: 24655 - protein, 450 aa, unknown
  TnpB Polypeptide
MSQKVRIDGVKHAGASVFLGVDHCGNPRWTRNPERVMVWLCDGWRTRFNQRREQRTRNVPVKDKAGGIVDWVKEPLGGPDVAEPLSDKEVRLQCSWMAGIPNPILSSTDRIENTEWSAGLKRKKTIGGRVPGFKSRHRGLNFVCWRNKDKAGNAIFQKTGRKSGVVVITGMNPTRWRKPGERLHWRVVIHVRVSQPIRPYTSVHVDWTHKSLTFTNMPLPLPRTGDGKVGIDRGCVHTLASSDGIFMDMPKPSKAELKRLKYLQRRMARQDRVNEARGGRTAKFASKRRGKTLSEFNALQGRIVRRRNDWIEKTTTKLARENFLVAMEDLDVKAMTKRPKPKPDPNRSGHYLPNGAKAKARLNRSILGNNWSRLMKRLNDKMNANGGKLVIVPAAYTSRTCHKCGHVAKENRESQAVFHCVECGHKANADVNAAMNILSRALAKTGGGTA

SEQ ID NO: 24656 - protein, 190 aa, unknown
  TnpB Polypeptide
MLTFILSECYTKSKGGEKCDKNYKIYEFRLQRRISKKYSKNKKGVCYCKTRNIIKSEKQLLKITHRLTNIRHDHIHKATSEIVNRQPKFIVMENLNVKGMMKNKQLAQAVQEQCFYEFYRQIQYKCQWNNIEFVTADRYYPSSKKCICCGNIKKNLKLSDRIYHCDNCGNTVDRDYQASVNLMRYYELTA

SEQ ID NO: 24657 - protein, 316 aa, Ligilactobacillus sp.
  misc_feature (233)..(233): Xaa can be any naturally occurring amino acid
MKKMSDLAYHYGLKMRIYPSSQQKKIIDLNGNIARTVYNKMVAIDQELYKLKQVKLPITSILLRIEELEKRKNARNMSNHYSYMQDKNIDSLAKANAIQNYQKAWKMFRKVHRTGTPKFHKKGYRLSYQTNAQYKGAKMDVYSATVRFLDKSHIKLPKLGRLRVAGSHRHIIDNKDDIRIGTVTISKDTADRYFVSMQLGSDTPFVKKLAKTNSQVGVDLNTENFLTDSFGKXWRSFLQKLAYKAELYGKTFITVNPKNTTQTCSECGFIMGSGNTKKLTLEDRSWTCPSCNTYHIRDVNAAKNILSKGLKQLEKA

SEQ ID NO: 24658 - protein, 418 aa, unknown
  TnpB Polypeptide
MITLTYEFKLEPTPEQIQAFDQWLEVCRRVWNYALRERKDWFNSRKCEINACSLHHEYIIPSDAPRPTYAQQCKSLTAAKKEYPDLKIPHSQVLQQTLKILETAFVSMWERRFGFPRFKKTGRMRSFVFPQMDSSSLVDNYIDLPKIGKVEMILHRPIPEGFDLKQARIVKRASGYHVMLSLQCDVDVPSTMPHGEPIGIDVGLNAFVATSEGELVQRPRFYVERLRELKLLQRRLKHKKKGSKNWYKLNRRIALLHEQISNIRRDWHFKIAHHLCDQAGMIFAENLNLKGLARGMLSKHILDAAWDQFLGILSWVCWKRDVYFAKVNCYGTSQTCPRCDADAPKDLGVRVHLCPQCQYQTDRDVAAAQVVKKRGILSISTEGQSGNQQNVCGGDIGLGNPMKQKSLIAILGSPRYIA

SEQ ID NO: 24659 - protein, 375 aa, Thermoprotei sp.
MKTKFYYRILTIKFGEKERKEIQNFIEEWRKRVFLYLSGKSSMKDNYIYYYVDSGVAEIKEELKKHGRFKRVWPILNTAFYLNRKIIHGSGCAPVRIDTDKGILKFRWLNLVVKIPKSTVKKIENVLSKGVVKCIGQLILKDGVIFKLIFFKPFQRKLLKPPFEIIAVDINSRHGVKILNICVDFQSIKLIYQKRLKPPNHSNIWREIRKRQKLYSITFNKIYAKEIKQLGRRRKGLNKNFINNVIHILRKLVRKNDLPKVILVDPIDYKSLQGKRLQGTLLSIIDKIRNLAGFEDTLYVEYHGTSGRRCTLCNRAMKRIENNSPARIYRCERCRITIERDVNACWRMILKFLHKTPLKFPVYSKIEQLYRFHEP

SEQ ID NO: 24660 - protein, 391 aa, unknown
  TnpB Polypeptide
MEQECAYRYRCYPNTTQRVTLSRTFGAARYVYNWALWLRTDAFYERGERIGYAESSARLTALKKAEGQEWMNEISSVPMQQALRHLDTAYRNFFAGRAAYPSFRSKHGPQAAEYTTSAFKYRDGRLTLAKMEVPLHIHWSRPLPNGSKPTTVTLTRDTAGRYFVAIRIKVAHAPLPASDTTVGVDLGITSLVTLSTGEKIGNPRFAARDATRLAKAQRTLSRKQKGSKRRARAKRRVARIHARIADRRLDTLHKLSTRLIRENQTIAVESLAVKNMVRNSTLARAISDAGWGEFVRQLRYKAEWYGRTLVEIDRWYPSSKRCHCCGHVVDSLPLAVRRWSCPACGVEHDRDVNAARNIFAVGHTVEARGEAVRPKRETVAAGLVEARIPRF

SEQ ID NO: 24661 - protein, 315 aa, unknown
  TnpB Polypeptide
  misc_feature (3)..(9): Xaa can be any naturally occurring amino acid
MFXXXXXXXYSKAVTQAVNNGQAAFTRFFKHQNSFPRFKKKNRSDVKMYFVKNNPKDCRCQRHRINIPSLGWVRIKEKGYIPTTKDGYVIKSGHVSIKADRYYVSALVEIPNNKIANSFNEGIGIDLGIKDFAIVSNGKTYKNINRSVRLKKLGKQLKNLSRKYENLKKGESTQKANIQKQRLKVQKLHHKIDNIRTDHINKTIAEIVKTKPSYITIEDLNISGMMKNKHLSKAVASQKFYEFRIKLQAKCNKNGIELRVVDRWYPSSKTCHCCGAIKKDLKLSDRIFKCDCGYTEDRDFNAALNLRDATTYEIA

SEQ ID NO: 24662 - protein, 452 aa, unknown
  TnpB Polypeptide
MISVQLRYNFRLYPTPGQRTALAKAFGCARVVYNDGLRARQEAHAAGLPYIKDADLQRRVLTEAKKTPERAWLAEVSNVVLVQSLNDLHKAYRAFFASVVGKRKGPRMAAPRFKSRKDSRQAIRLTRNGFSIRPNGRLYMAKVGEIEVRWSRDLPSEPSSVTIVKDAAGRYFASFVVETVDEPLPVADTEIGIDLGLAHFAVLSDGRKIDNPRFLRRAEKKLRKAQKALSRKAKGSKNREKAKLKVARAHARVADARRDWAHKLSTSIIRENQAVYVEDLAVSGLGRTRLAKSVHDAGWSQFVAMLEYKAARYGRVFARVGRFEPTSQVCSACGVLDGPKPLHVRTWTCQHCGTVHDRDLNAAKNILAAGRAERLNACGAGVRPGLVPAAGGEAGTHRGAASSGAAGIPVLKDGKDVNNTILCILLVSTTEERFTLEITLTSSDRCQPTPST

SEQ ID NO: 24663 - protein, 416 aa, unknown
  TnpB Polypeptide
MTEYELSKTLKFDLNIISGDTSVLDDATAKSRTVYNKTIDYHFNTSKKYKTIRDEMSNEVDLIKNSVQLLVDKTYNAIENYYEYEEHNRPQQKDDDYYPLFSNHGEGYELTRENDDVTFRISAVPHGQKVRGTLEGSDTHLNLVKQALHSKKWRVGTSEVVYKNDKWRLHVTVTNTEATVQSPKDSQTLIGVDINESNVALAALTENDGVIDSTVIEYEEVKNKRHEFFVIRKRLRRNDKDGQVTQLGNEEERFVTDAIHKLTRQVVEWVDQFENPCIVLEDLKDMRESINYGSQMNRRLHAIPFGLIQKYATYKANFDGIPVIKVNPEYTSQECLNCGHTSRANRQKKRFKCVECEWQDHSDRKAGVSIADKGISKIGLDWIVPSLNKLPVVRTESCDGLASGCVKHPTTTHTIV

SEQ ID NO: 24664 - protein, 454 aa, Clostridiales sp.
MAIRTIKLPYETDEISKIEIERYIKNYNSVLRFTYNRLLDYEFKLSTREITTLQKTMKNVFIDSHFLNSAQQEAKQLKGKDKVIFGGKFNFLQRCRGKISQEEFQRNRLVPIYSIGEADKLGNRKFRILSENTIRFQPCKKVHCELKLPNLRNNLKSDIQQLLKLQNCRKMPITYKLSSDCIYIIFEENFLNEFVYADKVENRVFSIDLNPNYIGWSVVDWADAETYTVVDSGVVSIKQINDADCAIHEASNSSRRQYISNKRTFENTDTAKYLADTALHYQCQLFSIEKLEIKTKDNKLGKRYNRLVNNQWNRFIFYTRLQKYCDRYGIRFQEVVANYSSFEGNLIYRETGLPDMCLSSIELGRRAYEFYHQYVVKDKPKESNIMIDTSSKAHDRIVQSLEELHYDLVFDSIISLYNQIKTRNLKYRVQLEDSILTAVSSKKSIKSKVLLYSS

SEQ ID NO: 24665 - protein, 288 aa, unknown
  TnpB Polypeptide
MVPCIFKTYRYGISSQELERKEDIGPCVGKETPPYFLRFSCTEEVTLTKTPVKEQIICSVDLGINTDAVCTIMRSDGTVLGRRFIDHPSEKDRMYRTLGRIRRFQREHGSAQTQGRWAYTKRLNTELGKKTAGAIIRYAEENHADVIVFEYLEMQGKISGKKKQKLHLWRKRDIQRRCEHQAHRKEMRISRICAWNTSRLAYDGSGAVTRDRENHSLCTFQTGKRYNCDLSASYNIGARYFIRELLKPLPATERSLLEAKVPPVKRRTSCVYADLRKLHSEMELLKAA

SEQ ID NO: 24666 - protein, 246 aa, unknown
  TnpB Polypeptide
MLQMLVWSLSLYNTIESKVSFFYAKSRTCSFIVIKTIRVMLLPNNKQKSKLFQYANTARFAYNWALAKEQENSKSDGKFLSDIDLRKEFTKMKQTQEYKWLNDISNNVTKQAIKDACDAYKKFFKGLAKFPKFKSKKKTTPSFYQDNVKIQFSEMHVKMEGFAVSKKKNKQKINWIRLAEHGRVPTNCKYSNPRIKFDGLNWWITVGIEYSDSGVTPNKDGVGIDLGIKDLAICSDENKYKNINKE

SEQ ID NO: 24667 - protein, 376 aa, unknown
  TnpB Polypeptide
MMRVFHFRQNLKEKDLFPYKNKIKKFFSLSRKKYNKAVYKDTAFSTIETQLGNVICNSIQMNFNINIQNHLKSKGAFQKPTFRTPTSEFFVYFPSSHFKIENNQIKMLLGNLGEVVFPLSSNFQYIQSIKCIRFHTSKEGYYLVVEYYKEIISKPNQRIYHAAVDMGMDAIFAAYVDTPNPKYKNLVIEGDFIKERNAILKWKRLSLKKDNPKAWQEVFVKHKRVVKEACTFATKRLFDYLAYENVKEVFIGDFFGVKKRHFASYDFHVMPFYYLRHKITDYSKIYGIKVNFVDESYTSSCSFLDYEEVNEFNANKARRVQRDLFISDTGIELHADLNGAGNTLAKNKGVIYDRKNILNGIYRISLYKNKRGKATK

SEQ ID NO: 24668 - protein, 456 aa, unknown
  TnpB Polypeptide
VIKYIQIKTEKDVDILKYTTETRLYVKNNKDIVDYFEEVINQYSYIFRKVYYIIRNNPKIKTDLLNTELQSKYNVSKRTANSIIKTVQGRINSIKELKKTEIKQKQYKLEKISKKLEKLILILLDLKLKAKENNIEDLTKYRNFKTKVAFMKIRKDKLVNKIKSLNYQLETNKFKLTFGTKKLFRQNLEEFLNKRDNQIIFLGSKEEKGCNQTFQLRYISKINQFIIKMRKDFKYKNEKGEERYAYGKCFFNNHKKILKEILKSQNSPLTFRIIKRNNKYYLQCIFEIDNKNTILTRKDYGVIGIDFNKGFVTVSQTNKYGHLVKTDKMKYRFGSGNKTENDILLIINKLTELAIYTGKDIVVEDLNFLKTKSETMKGNSEKGKQYNKMLHSLAYRMFLNRTEQICNKKKIGLIKVNPAWTSWIAKNKFCDKMKLNIHTGTSFVIARRGMNIKDVV

SEQ ID NO: 24669 - protein, 444 aa, unknown
  TnpB Polypeptide
VDILRYATETRLYIKNNKDIIDYFDEVINQYSYIFRKVYYIIRNNPKIKISSLNTELQNEYSISKRTASSIIKTVQGTFNSIKELKKTEIKQKQYKLEKISKKLEKLIPALMDLKLKAEKNNIKDLTKYKNLKTKVAFMKIRKDKLINKINSLNYQLETNKFKITFGTKKLFRKNLEEFLNKRDNQMIFIGSKEEKGCNHNFQLKYVFKINQFIIRIRKDFKHKDKKGEERYAYGKCFFNNHSKLLREILKSKNSPLTYRIIKRNNKYYLQCIFEIDNKNTILTRKDYGTIGIDFNKGFVTVSQTNKYGHLVKTDKMKYRFGSGNKTENDILLIINKLTELAIYTGKDIVVEDLNFLKAKSGVMKGKSEKGKKYNKMLHSLAYRIFLNRTEQICNRKKIGLIKVNPAWTSWIAKNKFCDKMKLNIHAGASFVIARRGMNIKDVI

SEQ ID NO: 24670 - protein, 330 aa, Thermotoga sp.
MLITYKFRIYPTKEQEEKLAKHFGHTRFVYNFFLNYANIIYRVMERPTYYNEWASVLVKLKKTNKYSWLNEVNSQALQQSLKDLERAFKNFFKKQAGYPKFKKKKFSRQTFRIPQHIQLYIKEDNPKYGCIFVPKFKEGIKVRLHRKLPKDGKIKQATFIKTPTNKYYAAIVFEVQDVEVENKSTDALGIDLGIKDTITLSDGRKYSMPDLSKYERQIKRLHRRLSRKQRGSKNWEKARLRLAKLYEKIVNIKSDWLHKITHDLVSESQTGKIVVEDLNIKGMVQNHRLARHIHMQSWRRFLELLEYKAKRCGIEVIKTNRYYPSSQTVQ

SEQ ID NO: 24671 - protein, 189 aa, Okeania sp.
MSRSETRSDLNCGAVRQDGMARSPFPPGRYANFEALRSANAGLQSTKRKVLLNFLIFNSVTVKIRGNYQLSINERSFCYPQIKQNCIEGNQINLPKIGKVQLIQHRPIPKYFIIKTVTISRKADGYYVTLSLEDKSVPALTFNVEPTLKNTLGIDMGLKEFLVTSVGESVPIPQYYRKYQQRLKTVQKR

SEQ ID NO: 24672 - protein, 496 aa, unknown
  TnpB Polypeptide
VRQKVTITRARVHGSPVYLGDVTQPDGTVAPVWSADPAQVLDWLCDGFRFRFNQRRSTRCRYLTCEDRGGNRVVVAAASGQPVLVPIGTAVTDISDAEARRRHSFLAAMPGYVLEATLKTENTEWFSAAKRRKTNAANGRNPGAMPGFRRRDGAQRFVCWFNGGRNAVFTRTGRRPGMVMISGANPAAHRAPGVGPDGKPHKLVWRVTLHVRLSQPIRPYTSVRVNWTRRQLVFVNEPLPLAGRAGGGEVIGLDRGVVHTAADDRGGFYDAPDTAALERQRKFHQRRVAKSKLIAARQGRPFWESKRYQAHKAAAADLSAQQARVREDFAHKLSTRLVRGHDFIGIEKLSLDRMTRRGKGAGAAQKRGLNRALRLAAVGKLAKFIEYKANLAEVPFIEVPAAYTSQRCHQCGHTCKGTVKAKRCSVASRVLGPATPTPTPPSTSARRLSRGGRREPNNWLGHPVKSRAGSLPSARRGARARPTPSRVRPLGRRRLR

SEQ ID NO: 24673 - protein, 496 aa, Vulcanisaeta sp.
MLRRAVAVELEVPKDVSKLLYSVESAYLNIVRGVVEYAVENNVLNATELQKLFYRRYRLEYQGLHAHLIIQAIRQASEIAKSFIARRRKGLVSKPYPEVRSVSIRFTEKAWNYGKFIGSTAPVRVELSLLGGRREVWLRPHRRFWLYWWRVLSGEAELASTLIIKRKTNKWYAVFVFEVKPKEGTPQSVISFDINENTVAISRIDIETTVDKVAKWNRQYLTPQLYMIRTDFGRLARRYERVRNAIIEKLKPGFALPNGKYVNITNTREYRKRVRKLRERDRKVGRVRHVASELTKTSALIVTEELGNNPQEEMIDGIGKDELRHRIKQTPFKALEKTVEDKALERGSKLFHVSSYRNSKVCPIHFVRLEMTDDWHTLKCPLGHYVDRDYASVMNMDWKLTPESWTKGVWWNMKKDMNWREYEGRSNPLVPYFMAKILHATLRTFTASEESPAVLARGKPMNPARRADEGRARKPPALQGGEEVRNQLSCGVLSMD

SEQ ID NO: 24674 - protein, 411 aa, unknown
  TnpB Polypeptide
MHLVERHVIKRTDPRFRAIDAAAFASKNLYNAANYVARQSFIHEGVSLNTHDMHRRMQDHEAYNALPAKVAQWVLRLLDKNWQSFFAALAAWQQDPSSFLGRPKLPGYKDKQHGRNLLVYTIQALSVPALRQGLICPPMLGLVVQTKTRPQSVQQVRIIPRTRGGFYVVEVIYEQEPQLAALDPALHAGVDIGLNNVATITADKAGFVPRIVNGRPVKSINQFYNKRHAELQSLLGTAGRAGTSKRLERLTTKRTRRIDHYLHTASRHIIDLLIAEGVGTLCIGKNPLWKQEANMGRRTNQNFVSVPHARFVAMLTYKAELVGIQVKLTEESYTSKASFLDADPLPVFGTAEAESHAFSGRRIQRGLYRAADGRYINADVNGAYNIIRTVAPEAFAQGSRGCVVHPVRLAA

SEQ ID NO: 24675 - protein, 580 aa, unknown
  TnpB Polypeptide
MEQQRDSVRKTHKYKLMPTPTHERALERVLWRCRELYNAGLEERKAAWEQCGIYVSFAMQSAQLPSIKGVRPEYRDITAQVLQDVLHRLDRAFQAFFHRVKAGEQPGYPRFQGRSRYNSFTYPQVGDHGGAVLDGGILSLSKIGRIPIRLHRPLQGTPKTVTISKEADGWYACISCAGVPTEPLPLTGRETGIDVGLKVFLVTADGKYRENPRHHRTAEKRLKTAQRCVSRRKKGSKRWWKAVGLCAKKYQKVKRQRGDFHYKTALHLVREYDVIYLEDLQIRNLSRRPKAKLDGNGGYLHNGAAHKAGLNKSINDAGWYAFRRILTCKAEWAGKRVEAIAPAYTTQDCSGCGERVYHNVRRKHSTFQRIIDNPCAIVQNKNMKLSDYAKQMGVRYETAWRWFRDGKIQGRRIGPHTIIITEGQEEPQPAALQRVAIYARVSSAESKGNLDSQAERLVAYCAARGYQVAKVVKEVGSGINDARPKLLALLADQTVGLIVVEHNDRLTRYGFRYLDALLKNQGRAIEVVNQAENGTEDLLADFTAIVYSFYARLYGQYRAKQKTEAIVRELEAKGEADAPG

SEQ ID NO: 24676 - protein, 402 aa, unknown
  TnpB Polypeptide
MSGRGRNGPGEAAFKFRAYLTRPQEHRAVRLLADHCDLYNAALEERREAWRMRRVSVSYGMQSAQLKDIRRADPQVQGRHSFTAQQQTLRRLNTVFAAFYARAKKGRAGYPRFKPCSRFSQVGFVAGDGAKWAPAEAGRWARAAFQAVGSVKVRQHRPVPGIVKFLQLKREHRRWYVIVIADTRAEPLPATGRAVGVDLGVARFLTTSDGQIIASPRFLPASAETIVGLQRRKDRAQRGSGNRRRLGRALAKEWRKVRNRRRDFHHRTARALVDTCDVIALEKLNTAGMIRRPGPKPDPGTPGAFLPNMAAAKAGLHNAILDAGWAQFATILTAKAESAGRRVVFVNPAGTSITCHLCGRECTRPRQDTVICPAHGTVDADLNGARNIATRAGLGSGQAPAA

SEQ ID NO: 24677 - protein, 416 aa, Okeania sp.
MKSNRPQKLKSRYKYRIYPNQIQITKLNQLFGCCRYVWNSTLAHCHQLYSNGQNKPSYVDLTKQFITQAKKELFWLKEVASTPLQQSLKDLDQAYKNFFDSCAGKRKGIKVKPPKFKSKKSSQAARFVGANYKIGQDKIYLPKVGKIKIVWSRKLPSEPTSLTIVKDSANRYFASFVVEINPESLPKTDSSIGIDLGISTFATLSNGDKINAPKPLKQNLKKLAKFQRKFAKTQPGSKRREKRRLKIAKLHGKIKDIRTDFLHKLSTDLVRNYERIVLEDLNVSGMVSYGMLRKRNRKLAKAISDLGWRQFRTLTEAKCEKYGREFRVINRWEPTSQKCSCCGFKGGKKELNVREWTCLNCGTHHDRDVNAAINILEVVQPKTKVEIAVKNPVQLSLFEIVAPWAFGDSKQDEEQP

SEQ ID NO: 24678 - protein, 114 aa, unknown
  TnpB Polypeptide
LLTQSYSLIGIEDLNVKGMVKNHNLAKAIHDQSWSELGRQLTYKAEATGSYVHYSDRFFASSQLCSICGYQNAETKKLSVREWNCPKCSASHERDQNAAENLKQDAIRAVLGVA

SEQ ID NO: 24679 - protein, 402 aa, Escherichia sp.
VKRLQAFKFQLRPAGQQEREMRRFAGACRFVFNRALALQNENHEAGNKYIPYGKMASWLVEWKNATETQWLKDSPSQPLQQSLKDLERAYKNFFQKRAAFPRFKKRGQNDAFRYPQGVKLDQENSRIFLPKLGWMRYRNSRQVTGVVKNVTVSQSSGKWYISIQTESEVSTPVHPSASMVGLDAGVAKLATLSDGTVFEPVNSFQKNQKKLARLQRQLSRKVKFSNNWQKQKRKIQRLHSCTANIRRDYLHKVTTTVSKNHAMIVIEDLKVSNMSKSAAGTVSQPGRNVRAKSGLNRSILDQGWNEMRRQLEYKQLWRGGQVLAVPPAYTSQRCACCGHTAKENRLSQSKFRCLVCGYTANADVNGARNILAAGHAVLACGEMVQSGRLLKQEPTEMIQATA

SEQ ID NO: 24680 - protein, 445 aa, unknown
  TnpB Polypeptide
MQIYSTYSVKIKHYNHIFKDTVSVYRDAVDFLITVCLNEWEGITVFTGHNRLSYIESLIHVTGDHPDVKYTGFDKKFYKFPCYLRRGAINEAIGKVSSYKSNLKNWEETDIKVRGNKPSFPRAGFTYPCMYRTDMYKQTELYEAKIKVFIRNTWDWITVKLRKSDMDYIERRCPGRKKCAPTLQKRGHEWFLDFTFEERVTLCDTAVKDQTVVSVDLGINTAATVSVMCADGTILGRHFCKLPKEIDSLTHSINRIKKAQQHGNHRTPRLWAKTKGINHDISVKTVQFIMDVAVLYNADVIVFEHLDKQGKVKGSKKQRLKLWRSQEVQRIVADKAHRLGMHVSHICAWNTSRLAFDGSGYVLRGKYGGFKTYELCRFQNGKIYNCDLSASYNIGAQYFIREILKSLDESSRLLIEANVPQCSKRSTCTFATLINLNAELMSLPS

SEQ ID NO: 24681 - protein, 429 aa, unknown
  TnpB Polypeptide
VIKSSSHTFSRVNSGKQDILNEFLNEYRLAAQTIVNHIWKNGCSGGDGEFNVKESKLDMPSMLQSSIATDAGVDAALTGRALKCCITQCCGMIRAETEKQRKRLYILKKKKSEGVGKKKLGKLIKRIKENIPVKPNCSNINAELNSICMDIQDGNSFDGFVRLKSIFKDKREIKIPFDFHKKANELKAKSSRMLNSILISNKKINLRWEIPKAKKRINGEVVGADQGYKDVLNIANKDIAIKTPKTCIHDHSLESIICKVSKKKKGSNAFKRAKLHQKNFVNWSLNQLNLKDVKQINLEKIWNIGYKTGKSRKMSHWQNTLIRDKVIDLCLVNGVHFTEQSCTYKSQRCFGCGSVRKANRKGKVYECKNCGNVDDADENAARNHSIFLPEIPYSLRKLNLNRKDGFFWNPDGIFNLEGRSLQSLPCVEV

SEQ ID NO: 24682 - protein, 323 aa, unknown
  TnpB Polypeptide
MSFRSPSPTGREKGWRCRYRRTGMPCAGWNSMGISGSMRYTITAGGSLKLTCSFEKKTQTPEEHSAVIGVDVGITDAFHTSEGQAIESFQPVIDFYQTEVEPAFGNLSILRNRKQQLRRFLKKHKGVLPEKVILNLRKRIDHLEKDIRQAHAPYRRKRHYYQLVEHTVRNAVNTYIESLNGDKTVLTAMELLDIKEFNKSRRVNGMLSVFSRGKLAEKLMEELSWHGFPFVQVEPAYTSQICPVCGCLDKASRNGKVFHCTCCGHTDDADHVGSINIKARAEDKELIGICEKYPYSKKERHAAIQALQAERNREWKKEQAVTA

SEQ ID NO: 24683 - protein, 400 aa, unknown
  TnpB Polypeptide
MSSGDEGSLTLTVKVGVRAEPKTFRELTSLMYRYREALNHAIRVVIENKALTLSKAHRLLYNTLKEKYNLPPKIAQDCYREAIAIAKLWLNNPNRGNMPRAKTLRIWLTHKYSYRVNGGYVELLGGFRLEIVGWDMRYDNYPNGDARLLFKGGKLVLEVSKHVPRPRKYTPRGVLAVGVNEKHIVVGNSRLEYRVETPIERALHYKQLAERLQRKYSSPRYNVWLRRRGIKRRISYYHAKAKRIIEDWAKKTSREIVALAKRHQYAVAREDLTGLIESLRKLPREHKVSLLILSYRKLEYWIDWQCGKHGAPVVVVESKGTSSRCLRCNSKMRESGYRVFKCPVCGFEADRDTIAVLNIEKRALTQMGGSLVTPTAPQMTDVAPNRCGEPVNPLKGALAL

SEQ ID NO: 24684 - protein, 533 aa, unknown
  TnpB Polypeptide
MKLAYKINFPDNLKETYEFLQSELNRVLSDNKMRKQILSIDSKLHPGRYWRDLRNLIGEETQYQWKKDNRLPVPSWYFCAFAEQIRQIHASQREQIALYDALQKFGNCDNLKFYQYCIDNGIPFSKAKVKNLKQCKIAPDLPSNARFILDFAFINSQAAKMDNLIFNYAILDKNKKTTWCELPIIFHRSSKYQSGNRVSKPRFSKDSDGNYYGVVTFDFKENQTDGQNIGAIDLGQIHSYTFGYINSNGMMGGEFYIPSKLTERLSNKLEQLKNEREILLNKNQSVDELFLSADYIPDAAIQKWIERRGHIEGITKKITRIKDAINSEISVEIVELCKKHSCSALFMEDLSWLGSIGGKWNHSEQQESIARACSQESIEVYKVNAKNTSTEHPLTGEIGRPIGRDIIWSNGDIMDRDIVSTMNQVQREGKRKIKSGRFSKTKKKSGIKLVPLRDKNKPTPKRVKRKNSRRRENLKLLESMRNKNLSRASQMVVVLPRTSESATWSCVEKNSAQVIDYMKSKKVYKRRFLYIYN

SEQ ID NO: 24685 - protein, 407 aa, Hyella sp.
MLKAVKVRIYPTEQQKVSLAQAFGTTRWVWNHFLALTNKTYKETGQGIAKYDMIKELPLLKKQEETEWLKQTYSQSLQSVCLNLSRAFVNFFEKRARYPRFKSRHGKQSLIYPQNVKLAENQIYFPKLDWIDAVIHRPVEGAIRTVTITKNCAEQYYASVMFEDGKSLPTPRNLGGAEGEKIAESKTIGLDLGLNHFCITSDGKKFDNPRWFKKHSHNLKIKQQQLSRKQKGSNNRNKSRLKVAKVHNKITNCREDFHHQLSRRIVNENQVLVLENLAIKNMVTNHCLALAISQVGWGQFCTMLKYKAEQEGKIYLEVDRFFPSSKTCHVCLNQVGNLPLDVRVWTCNSCQTTHDRDLNAAISLKDEGLRLLASGTGATAYRPDVRPSKGGRKKSTTRQSEGRDARI

SEQ ID NO: 24686 - protein, 410 aa, Prevotella sp.
MRLVYKFYIRHTDELDRLFRISNNLYNQALYLFRQRLDADGVWTWYNDMDKLIKGVTNLEGECNYKLLKSQCSQQILRVLDKNMKAYCKSIKDWKKHPEKYKAMPQMPHYRKRGGMFNLYYTNQSCSIKDGRIKLAKDLFVDIPQWEKYSIRIVKFNQVRMLPNRHNIKVEIVYDYDVQHADVDTDKCAAIDLGLDNLATMVTEEGCVIFSGKYLKSYNQYFNKTLSHLQSIKDKQGIKRSTRRIIRMYDKRDRYFEDAFQKVSRQIVDMLVEKKIGRLIVGYNAGWKQESGMGKRNNQKFVQMPFARLTSYLRYKCEMVGIDFVEHEENYTSKCDALALEPIGKHEEYLGRRTKRGLFCSSIGKLINADQNGALNIMRKVVGDSYVSRIVNSGHSLCPVRYSNPFVRIV

SEQ ID NO: 24687 - protein, 291 aa, Gammaproteobacteria sp.
MNKSLKIKQSLKLTLEKRKLQTPFVFQLKLQNLSKSDIDTLNRLFLEAKWFYNFIIADIKNRLNSKSEKLKKVEVKTPNGFEERKLKTLSSQIKQGIIERIRNNLKSLNKLKEKGYKVGALNFKSDFKSIPLKQFGNTYKIDFKRNRIRIQGIRKWFRVLGLHQIPKNADIANAYLVKKPSGFYLYVVCFLWKEEVLKEINQKQVPLPIGIDLGVKDQLTLTTGEKFKWYVPETKRLKRLQRILARKKKGSKNYQKVKFLIQKEWEYIKNKRKDVINKVISYLKRFPFIAV

SEQ ID NO: 24688 - protein, 370 aa, Streptomyces sp.
VVTFTVEFGQLGAEVRAHVPHDLLAADQDLVGEGAAPAFRGEDQVGLKGVDNCSPPPQIGVWSEGAQPYDDRMLSWQHDRLRVSIWTVAGRVKDVAFTASPEQLTFLSRYRQGESDLLCRDGMWFLLATCEVPEVPLNTDPVDFLGIDLGIVNIATTSDGEIMAGRELNRVRVRERRLRAKLQKKNTPSAKRRLKKRRRKEARRTKDINHKIAKHVVAEAERTGRGIALEDLTGIRERVRLHKPQRATLHSWAFHQLGEFIAYKARKAGVAVVHVDPAYTSRTCAECGHADKANRVSQARFACRTCGFVDHTDRNGSRNIRARAWELWRRGARSTAPAPPRQHRRSGSGRKRSVTATDARCASPALAPGS

SEQ ID NO: 24689 - protein, 518 aa, Caldilineaceae sp.
MQHPGTYQTRVSAYADVERKTGDAALSAYGELYGRVQRTLFAEVAAGRSAVSLQSEYLKRYGIPARMFNAVRVSLEGKVASVKAQQKLRVDSLGRRMARVERRSRAAASRGCWEQVHQQKRRLAALQSQRAALQEDMEAGRVRLCFGSKRLWRKQHHLAENGYANHQEWLREWREARSDEFFVLGSRDETAGCQLCVATVADDGSLTLRLRLPNCLMARYGKYLVIQGVRFAYGHAQVLAALESNAEYTRYRREHGEQAVRATALGQAISYRFKRDAKGWRVFATTNMMEVPVVTDQRRGAIGVDLNADHLAVAETDASGNPVHAFRVPLVTYGKSRHQAEAIIGDAVARVVAYARAAGKPVVIEKLDFRRKKARLEGENRRYRRMLSSFSYGKVKACFLSRGYREGVEVQQVNPAFSSVIGRVKFMERYGLSVHQAAALVLARRLLGCSERIPRRRVAPVGPGVQVAFSVPARKRVKHVWTYWGAVSRQLGPALAAQHRLGRRRGPPNPVQVARRVA

SEQ ID NO: 24690 - protein, 252 aa, Crocosphaera sp.
LLTAEKLSQLINGIIVSLQNKNKRCSAVLGVSPTRCLHQEDKPQDYWDDSLEQATHKRNCQMKDAVNKAARFIVHYCLRHQIGNIVFGWNDRQKDSINIGKTNNQTAVAPLGETPRPHCLNFVQIPTARLKNRIQELAESVGIIFTEIEEAYSSQASFLDNDLVPKYGEKPKGYKFSGKRIKRGLYQTAKGWLVNADIQAAGNCLRKVATQLGLNLVKLGKEVLSLPKRYYLDSLSRSYRKQAEMWIYPIEA

SEQ ID NO: 24691 - protein, 374 aa, unknown
  TnpB Polypeptide
MKLSIKVKLAPNQEQKDVLLETIETYNEACDFVSQIAFENKTASVVKIHHICYYEIRKRFNLSSQMAVRVVGKVADAYKIARSKKLNLKQPHKFDKWGAAIYDQRILSWKGLEKVSILTLKGRQVIPIVLGEYQQTKLLYPRRGQVDLLYKNGNFYLIPIIEVPEPPQKMTKDFLGVDLGVVNLAVDSKGEIYSGKEVDNKRVKIDKLKSALQKKGTKSATKHLKKLSGKENRFRKDVNHCISKKIVEKCKRHSLSLAIEDLAGIRQRATVRHTQRRKHSSWAFNQLRSFLEYKTKLAGIILKAVDPHYTSQRCSNCGYIASHNRKNQSSFVCKSCNFSVNADFNGAINIAQLATVDLPIVSLVRVETSHLVFS

SEQ ID NO: 24692 - protein, 191 aa, unknown
  TnpB Polypeptide
LRFFGYFSGGFIAHLVARIHAQITDNRKDHLHKLTTQLVRENQTIVVENLAVKNMVKNPKLSQAISDVSWGEITRQLAYKCRWYGRNYIEIDRWFPSSKRCSNCGHIVEKMPLNVREWDCPDCGTHHDRDVNASKNILAAGLAVSVCRATIRPEQSKSVKAGAEPRKASAVSVSRTGKKQKPFGLRRETSA

SEQ ID NO: 24693 - protein, 528 aa, Thermus sp.
VKAKPKATHKRTSQKRAKAFTGVHALLLFPSGEDHKATLDLMRRFSAGVRYAYNRLLEGQPREELKRQDSPLCAFFGLNTRYADDAVLKAKATLDSAKELGENPRKVVFGGRGLFDQLKRRHLSGKPLKRLKREWREKRQGLLYSRGDKTKGGNLNLKLFVRDGVLQLRINLGDGSYAHALVKTSHPNLSALVERIHASLPYNVELSLKDGKIYAAFTWEEEPAPLMTTKENGVLGIDLNADPYHLALAVVGPDGNLRKHLTLSLEEVDRAPNKGAKELVLWKVAHEVVSLALEHGVAIATERLRHLPKGRKGDGSGRTFRRKAHRFAYASLLRKVHSLARKRGVQVVEVNPQDTSTIGMLKYAPQLSLSKDVAAAYVIGRRALGFKEKLPKGYGKLLRDERFRGHVQGFYASRVQELCAKRSAEPNPYLRRRLSREIGKAKRHLSLLSSLQGSPGSQEGSTEGRNLLGGNPWRVLRVGLFLPLLGREVPRDLSPLKVILHRGAWEGWKGGLGSPPGGGPKCANVHFG

SEQ ID NO: 24694 - protein, 402 aa, Shigella sp.
VKRLQAFKFQLRPGGQQEREMRRFAGACRFVFNRALARQNENHEAGNKYIPYGKMASWLVEWKNATETQWLKDSPSQPLQQSLKDLERAYKNFFRKRAAFPRFKKRGQNDAFRYPQGVKLDQENSRIFLPKLGWMRYRNSRQVTGVVKNVTVSQSCGTWYISIQTESEVSTPAHPSASMVGLDAGVAKLASLSDGTVFEPVNSFQKNQKTLARLQRQLSRKVKFSNNWQKQKRKIQRLHSCIANIRRDYLHKVTTTVSKNHAMIVIEDLKVSNMSKSAAGTVSQPGRNVRAKSGLNRSILDQGWYEMRRQLEYKQLWSGGQVLAVPPAYTSQRCACCGHTAKENRLSQSKFRCQVCGYTANADVNGARNILAAGHAVLACGEMVQSGRSLKQEPTEMIQATA

SEQ ID NO: 24695 - protein, 533 aa, unknown
  TnpB Polypeptide
MAKARRRKDTQFETSMTKSVFLYGSPNKDKSKIIRDMQNEFTKMVNGYIRLLAGNDKFTLQIVKNDKKSSDIRKFEKSIRPKNANSAFSQNAFDMAVTHLSNRMDSIRQDMYTEEQSVFTSSKVLFAMSIDSKTKSEMLSTMKQIASKTKKDKAFYEDCIRILNEMSDDEFTFKQVEFMDMYISLSMEYRVPELRRAHMPLDSRLMKIEVSTDTVMPYVIKISDALHKNAERIVIPINTSRHPANKIKSHKMAGTVMASIDENGILQVGWSYESKMKQPKTSNVVGVDVGISDTLHTSEDKAIGSMKPVIDFYHDTVEKSFASLSDMRNKKRSISHYLRRHKALPEDVRRSLIKKMDRLDQMIQKADAPYRKKRCYYETLDHEIKSSIDRYIESISHDTLTVLEKLDIREFNKSRKSNGMMSTFARGKLQKKLMETLNWYGYDFKEIIPDYTSQTCPVCSHLEKDNRNGKSFKCKCCGYEADADYVGSLNIKARIDDQEIQEICEKYKYKHNELQKNLKMIYKSRNDQYKAAA

SEQ ID NO: 24696 - protein, 444 aa, unknown
  TnpB Polypeptide
VRKRKYTVIAQLHGQNNKDLIEYVEVARQAYAKAVRETFYVIKNSNDFNKSSFNTYLQNSYGITRRTANSIILDAQGHLNALKELKIYEKTQLELKIKHLETSVIPKLEQKRDDNSTMLKLGLPVSLISQQNLRRKIVAKKQKLNRLKQKLANLTYQIETSSFKLCFGTKHLLQRDYTEFVEHRDSQMSFVGGKDETCCNLQLQLRYNSKVNQFELKLRKDFGGFKHLEGSARYTFGKVYFRHHKDKIIRILKDKNSPLSFKIIKRNGRYYLYCTFEVRLESEDFLTRSTYGTIGLDFNKGFITLSETNHHGHLVQTQFLPYRFKSGNKTRTDLQQVVSKVVDLALAKGKDVCIENLNFNTKKAKTETKQGKKYNEMLHSLAYSQFVDLVESIAYRNKVFIRKVNPSWTSWIAKQKYCPQMKLNIHVGASFVIARRGQGYKDTV

SEQ ID NO: 24697 - protein, 301 aa, unknown
  TnpB Polypeptide
MWRRKRVFLSAYDVSEYTKGAGEELGLHSQTLQAIGEKHYQSRKQHKKVKLAWRTNRKDAKRKALGWIPFKASAVSHVKTYKTGRKALKSQLQLSCSKEKLILTVFDQYDLRRFSGFKMAEVVQDSCGNWYLCLVVKVEAKTCTATGEIGIDYGCKTAATCSNGDKLETKFTQQYAEKLATAQRAGKKKQVKRIHRKIKNSRADATHKFTSKLVRENWLIVAGNVKSSSFTSGKLAKSVYDANWFAINRQLEYKSRRAGCQFIVVDEKFSTQTCSNCLQITNSSPRGIAGLGIREWTVAVS

SEQ ID NO: 24698 - protein, 374 aa, unknown
  TnpB Polypeptide
MIKKHTRKHVNSIRRTSRIYLRDANRSKVEELKNFLNLYQNVVNYYIVRFWSPEDIDENLATKEITKSAQERFEITARLSQCAAKQAKEIVRSQNEKSKRKRRMPRFKEKTANLDGRFVKIEPFNGSFDMCLKFGSGVPKVIIPFNLTKHTNKFIDDGREMSNSIRLGYSPKKDGLFVDLIFEKERPPVKEEGKVIGIDRGFNIMLVTSDGQFIGEELKETIKRGGKRRKSWHHFIETEAYRYLKGLNLDNIRLISLENLKNVKRGKRGKFSRKMNRLLSFWIYSKVGERLKQICEEKGICISLKNPWKTSQRCAVCGNIDRRNRRGERFLCLSCGHEANADYNASKNLEALGLAGVYSLRSLPTLSTVEYFSI

SEQ ID NO: 24699 - protein, 372 aa, Nostoc sp.
MWSKHLSCPKLQSHIAKLRKRNPFWQSVGSQAVQDICQRIEKAYQLFFKHNKKGVRPPGFKKIKKYKSFTLKQAGYKFLGGNSVKIGSRVYQYWNSREIEGKIKTLTLKRTPLGELFMVVVVDSGEAASIFSQGETRSAMAVSVDSAALASHRASGGLPFPLGNEPEIKFTTGKIAGFDFGLKTFLTCSDGTTIESPQFFKQSLNAVKRANRHHSKKLKSSSNRERARKNLARAHEDIVNRRSDWFWKLAHDLTDRFDVLCFETLNLKGMKRLWGRKVSDLALRDFLDILEWQALKKGKQVVYIDQWYPSSKTCSCCGHVLETLDLSVREWRCPSCQSVNGRDDNASRNIQTVGASMVGLGDVRLATPAIAV

SEQ ID NO: 24700 - protein, 405 aa, Nostoc sp.
MTQKAFKYRFYPTPEQETLLRQTMGCTRLVYNRALAARTQAWYEDQKRVGYIETSAMLTNWKKQDDLQFLNDVSSVPLQQGLRHLQTAFSNFFAGRAKYPNFKKKHNGGNAEFTSSAFKFRDGQIFLAKSPTALDIRWSRQLPQGIEPSTITVKLSPSGRWTVSMLVDVEIQKLPESLTQVGIDLGITSLVALSTGEKIANPKSFKAKKAKLSKAQKALIRKQKGSNNRHKARRKVAKVHAQISDARNDFLHKLTTRLVRENQTIAVEDLAVKNMVKNKKLALSISDSVALASLRASASWGELVRQLEYKCDWYGRTFIKIDRWFPSSKRCGHCGHIVDKLPLNIREWDCPKCSTHHDRDINASKNILAAGLAVSVCGANIRPDSLKAEGQLQKTRKGKKQKPKS

SEQ ID NO: 24701 - protein, 423 aa, Nostoc sp.
MQKAFKVTLIPNHNQEVLINKTIGCARFVYNHFLALRRDLYSNEQKTLNYNSCSQHLTLLKKEIEWLKRVDKFALQNSLKNLETAYKNFFANLNKVKDKKNVGFPKFKKKHAYKQSYKTNLTNGNIQVIENRLKLPKLGWVRFHKSQDIIGKLINVTITRTSRGKYIASILCKIEIKKYSQVTQNIGLDLGIKSYLVTSNGEVVENPKYYRTQKRKLRKAHKKLSRSVKGSSNRVKAKIKLARTYERITNLRDDFLHKLSTRLIKENSIICIEHLRVASMVKNHKLALSITEASWSKFVTMLEYKSFWHDRIVQKVSTFYPSSQTCNCCKAINPLVKDLKLREWSCPSCSNYNERDGNAALNILGEGLRLIAKSEGINTAGETPAVPRLFKAAAVGITEALNACGESVSPGAIQAGLVETGIA

SEQ ID NO: 24702 - protein, 521 aa, unknown
  TnpB Polypeptide
MNVLNKNTNIKPPDKKKAKIKKQKVDKITKEEWIAMSNERLAEFQKLIVKHRNTFKIPQKCSNNHFTDVDIHSVIDVREAINNNNFKEIPKNITFDTIVHDGFSTAPFLKLYLTKHQKIIIDKWIDCYTEMYNATIRYFNYKKFNNLSYETVNTLKLSMKNAKNKIHQSSKIIVKVNNKWTDVYVNKSILDYAINDAKNRLDACLTKMKKGIIRHFRLRYIKLTKKDRIMKLEKKCFSENTFCASVMGPRVKCSLDNYGDICSLKSLNKMYGSLCSSKNNTFNYVDNIDTVSILKKIGNEYFLLLKHSATKCTSSKTDTIAIDLGVRTIGTGYSEKKVIEMGTDMYDKMNKRLLDIDHIETLNKTKEKKAKMIHKRYEKIKNIVKDIHWKMSNYVTDNYKNIIIGNFSTKEMGENDNVRKMVKRVGQMMSMYKLRERIKSKCVEKGVRYKMINEEFTTQCCGRCGNQKKDVGAEKIYRCDKCDYEVPRDIHSSRLHIIKAMTKITKRQQIEWRKLDKERYK

SEQ ID NO: 24703 - protein, 233 aa, Agitococcus sp.
LWDSYGLNQYNVKTGAFVQDSRGRWYVCLVVDCSTTLTNLTPNAVTERSRSVGIDLGLKDLATLSNGQKIEAQRTYRKYEQKLGIAQRARHKKRVKAIHAKIKQIRSNHLHQESTALVKNYAAIFVGNVNAKSLAKTKLAKSVLDAGWTLFRTLLKYKCENAGVWFEEVNEQYTTQTCSCCGSRDSSPKGRAGLGIREWTCVQCGTLHDRDINAAKNILALGHERLVEGIPLL

SEQ ID NO: 24704 - protein, 325 aa, unknown
  TnpB Polypeptide
MELKNHWQNCKKNGHKTGSLKFARFSKYNTFVYNQSGFAIKDSFLHLSKIGKIKIITHREISENNTIKQITVSKSKSGKWHACVTCDIVESLFNITKISFAKAVGIDVGIKSFVYDSDEHNTPNPLNLKKMLKPLVRVQRKVSKCVKNSNNRIKHIKRLQRIHERITNKRNDFQHKLSSIYANHYDVIFVEDLQLTNMVKNHKLAQSIMDSSWSSFLQKLEYKCKLLIKVPARNTTIDCSRCGSKVPKNLAIRIHRCTVCGLVLDRDYNAAINILKKGLKIFNQSKLPQELWEVTPVEITKWSRKQEKATGRPVVVHSVNGEMVQ

SEQ ID NO: 24705 - protein, 376 aa, Pelistega sp.
MMIYKSFKFELILNNEQIRSLRKNFGCVRFISNNALAWHNKCRESGSKLRFDSRDAMRELESWKKEFPWLNEYQPQIIKEAIRDLETAFKHYYAKRLAYPRFKAKGVKESFRVSEGFKVEQQNNRCYLPEIGWIRYINSREIKGTIRSITISYKCKKFFISILALLEAKPVNHPEREVGIDLGIAQFATLSNGVIYTPLSVYKKYRIYAQKLEKQLKNKQLYSNNREKLKDKLAKLHSKMANCRKDFLHKLSDKLTKRYRQIYVEDLKINRMATSGNLLSKKELVDNKKELNKSIMDQAWYEFRRQLEYKSNWRGGKSIKVSSVNTSKECPICHFISSENRPYRGLFKCVRCHYSNNADVVGALNVLARGRIFAKS

SEQ ID NO: 24706 - protein, 437 aa, unknown
  TnpB Polypeptide
MLTRRITYRIYPSATQAAKLYLWKRMHCNLYNAALANRITQYKKFGKSVNYFKQQNSLPAFKTVWPEYVELGSQALQATLKRVDFAFERFFKGLGGCPRFKASRRYSGFTYPASVGWKCVTDAGLNGHLTISNLGKIQMRGQARTWGDPTTLTVFVRAGKWFASITVKCNPTRATGEGAVGGVRDRTPIDLGCKEAVTLSTGEQISKPDFIKAGELKVKVASRQLRRKRVPNRNKKIKASRKGKKARAIVSRHQRKVTRQRDNWLHQTTSNIVSSNSLVAGEQLNVKGMTARAKKGKRKKQKAGLNRSILSVGFAKISKMFEYKLAEGGGFYVESSTRQLKPYQRCAKCWELTPKTLKDRVHVCSNSKCGHVEDRDINAAQVNLIWAQGLGTSLLDGDGSSSTACGSMKQLAQMKRQKSQAVEGLGDLETPSLYRVG

SEQ ID NO: 24707 - protein, 184 aa, Peptoclostridium sp.
MYCGQHIKLPKLGMVKIRDKQVPKGRILNATISKEPSGRYYVSLCCTDVDIEAFENTNNHIGLDLGIKEFCISSCGEFIENPKYLKKSLNKLAKLQRELSRKTIGSLNRNKARLKVARLQEHIANQRKDFLQKLSTKLIKENDIICIEDLQVKNMIRNRKLSRLISDVSWSEFIPRLIGMVDKL

SEQ ID NO: 24708 - protein, 513 aa, Caldivirga sp.
  misc_feature (466)..(511): Xaa can be any naturally occurring amino acid
VGRLPTLFTTLGTPYPPKSKGRGGKSNNGNEEMRTVRLRLLPNGAEERKLRRIADATAKLWNELNYVRLVQFRASGKIDFKGTGREFYHRFNAMLGVNAGQVINLNNWMWDSFFELSRLYKQGKLPRFNGKPSPPGFWKDRLLGRRVLRILVRNDRYYLEPINGGEGYIMLKDWNLRIKYAGRVKWSGKQGTLVIKLEGNRWFAYVPISIGEKPARSNPRGYVKGIYEKIQVEKPKGGNKAFIDIGLNNLFAVVFNHTDTAMLIKGSTIKAEYYYWKREIKTYQSIRDWLRNRGFKTWRKYHAFHLHAVYKRRERLRHYYRTAIRFLAKALWQMGIGEVFVGYPYLVSQDDGNEYNTNVWWFSKIINWLNDVLEEYGIKLHVVNEHGTSRQCSICSMRHENGRVKRGLYICETTEIKINADLNTARNIARKVGYETPMPRKILSFIITTNGVKPLTPKEGKQPRPXXXXXXXXXXXXXXXXXXXXXXXXXXXXXXXXXXXXXXXXXXXXXXGI

SEQ ID NO: 24709 - protein, 502 aa, unknown
  TnpB Polypeptide
VVTAALNPIYRCDAVSHAMNQGKESQILELLCAWRHVAVLHSREQWRLFFEKGKFDGRAMTRTGYEVVGTSFGQMIRQQCVGILGSFISCRATEFRNAANSSSLDDATKHQLHFINRWKAWFSLSRPLVMRDGTVIPVEVRRLARAIMRGILRRHRLPRLHRVGMVIDQRMVTLAASQSSRRYGWWLRLSTLEKGKPVWVPLVQTERMEARPGKRALTIQVNQDRETGGLRFGIVTDCSAQFAASREAYMPRCGSLALDVGLKTLLAANDGSRFGQRWGERLAWYDRRITALDKRLQRQGIRLNRSARYRAYVRQLRGWIESEIGRIMNRLVQTHAPASIVTELLDFRAPGLSRRLNRLIGAFGKHALQAKLLDLEQRFGIELVKVNPAYSSQQCNRCGYVDKRNRPRQSVFRCLFCGSQRDGDVNAARNLWDRRSAPAEGAERHPRSILAGLVQHFNAQHPEPRERLNGTKGRAADPRPSNPYFRGWTDGVGLTGSNVRHR

SEQ ID NO: 24710 - protein, 283 aa, unknown
  TnpB Polypeptide
LLYNRLLEERILEYRTKGKGLSYYDQVNTLYERKQYIPALKQVHSQVLQDVARRLDKAFQAFFRRVKQGKTPGFPKFKAQQRYNSFTYPQSGYAITGNKIYLSMIGNVKIKLHRQPQGKMKTCTILVNGGKYYACISCEVEHQPLPLSDKNIGVDLNSMRLAHHQEPEISKHLLRNQNRLNEIRVSLSRKKPESNRRKKAVLYRAQIYEKMANQRKDYAHKFSRQLVNRYSHISFNDHDEQNSNECIQKPYVSWLQLIQFTKYKAESAGRVVVCTESNCSKND

SEQ ID NO: 24711 - protein, 583 aa, unknown
  TnpB Polypeptide
MSITSASLVAPVLEKSSSRLGRSSGEFKKTAECILTPVGIPIMGTFMSTASRTSLAVPSPPAKMTMSAPSLTKARTAAMVSFRLVSAGGSCTTTDRMPARSSSSFPISPEQVMNWASTLRFNPRRARLVLSGDCFIAPRTTASFRMSSPSVPFRPTEPPIPATGLTTNPILMKTVLRRPPNSLGGSRLPDPPHRPIYHMKINLFVERTITVKLEPSEAIGQTVRIFNEATNFFLRLGFHNRTHSKRKLQALGYYAARDKWPALQSSLVQGARDCAADMLKRERCRRLPIKRADSSARFNQRTFKAFLDSGSLSLTTVEGRLKVPLRIPEYFRRYAGGKVKALRVRDVGHDLTADLVVELPDVPIKDVANPRVVGVDRGINNIAVTSDGGFFNSKHLRNVRGRYAYLRDELQSAGTRSAKRHLKRLSGRERRFQADVNHSIAKEIVGTDFDVLALEDLSIRKDKRLGKGFNRKLGRWAFAQFEAFLRYKSEDCGKQVISVPPYYTSQMCSRCGNLGIREGHSFRCPVCGYSLNADLNAARNIASLGSALVGRPTVNGPIVATGDAEHRTSVEVSCKPPISMGGS

SEQ ID NO: 24712 - protein, 446 aa, unknown
  TnpB Polypeptide
MQKHKFTVVTQLHEKNNQDIIAYIESSRHTYAKAVRETFYAVKRNEFNRAEYNAYLRHKYDIVYRTANAIILDAQGCFNSLKESKRYEVNQLKRKINYLEERVIPKLVKRRNNNSNLLQAGTPVSPIEQRNLRLKIVAKKNKLNRLKQKLNNLNYQLDSGRLKLCFGTKKLLKQNYDKFVEQRDSQMTFVGAKEETCCNNNLQIRYNQNDNQFSIKLRTDFETCENSKAVDKWIYGKAYFNNYKNKIISVLKNKNSPLSYKIIKRNNRYYLCCTFEIQVDENSFITCSDYGTIGLDFNKGFVTLSETNQYGHLVRTRFLPYRFKSGNKTKTDLQKIANHVTVLACQTGKNICLEDLNFKITKSKTETKQGKQYNDMLHSLAYRKFVETMESIAYRNKVTLTKVNPAWTSWLAKKLYCPTMKLNVHVGASYVIARRGQGYKDTVKSL

SEQ ID NO: 24713 - protein, 397 aa, unknown
  TnpB Polypeptide
MKTMISYKFRLYPDKKQEEKMFEVLDRCRFVYNKMLEGLNKQDKPNRFELQNSLPELKEKYLELKKVYSKVLQYESYRLFSNLRSLAGLKKNGKKVGRLRFKGKGWFKTFTYNQSGFKIIETSKRHDLLHLSKIGDIKIRIHRKVEGKIKQVTVKRYSSGRWYAFLCYEQIIPDKKEVEKVVGIDVGIIRYVTDTDGRQIEHPLYLNNSLKSLRRNQRKLSKKKKGSNNYNKQKIKVAKMYEKVKNQRDDFLQKLSRFYADNYDFIAVEKLNIKGLIRISYNARNVMDSSWRKFAQFLSYKAERAGKTVVEVNPRGTTQECYKCGKEVKKSLAVRIHKCPYCGLEIERDYNSSFVVLKRGLEELLGQGLSEFTPVEIEPLPREISASSVVEAGSFLR

SEQ ID NO: 24714 - protein, 240 aa, Lactobacillus sp.
  misc_feature (187)..(240): Xaa can be any naturally occurring amino acid
VKISEPEKYSLTGKRVGIDVGVADLAILSNELKYPSFDSSYFEKKAKVWQRKYARRRHLAKLLVLQDRNKKVLCPRSLESFTNWQKAQKSKAKCQAKAANQRRDYLHKLTTHLVKQYDVIAIEDLKTKNLQKNHHLAKSIANASWRMFRQMLEYKCEWYGKKLIAVDPKNTSRICSKCGYNSGAKPXXXXXXXXXXXXXXXXXXXXXXXXXXXXXXXXXXXXXXXXXXXXXXXXXXXXXX

SEQ ID NO: 24715 - protein, 195 aa, Coprobacillus sp.
  misc_feature (170)..(173): Xaa can be any naturally occurring amino acid
MRIVVKGHDLVAQIVYDAKEDAASSNDNVMGVDLGIKCPAVSYCPDGSVKFYGNGRKNKYIRRHYNNLRKRFQKAKKPKAVVKINNKEQRIMKDIDHKLSREIVNTAKAHDISVIKLERLQNICSTTRTSRKNNHSLHTWSFYRLATFIEYKAKLAGIKVEYVDPAYTSXXXXKDFKKLRSPRQLLRSTTKNNVS

SEQ ID NO: 24716 - protein, 505 aa, Scytonema sp.
MARKKVVQTTEYTVTRIAYSVGGVPDELSKLAQALGDLRSELWNKYGSLQAWGIDKNTIIKNIRNTPELRKLYGSERFNLSSEIWERTVQAVIDDIHAVQEAAKVQVIRKIYLKFKPEKKEVLKGKKTILVDNPETSFRDELVKSLNSQEWQQYPLISRWVRQYYKRGHTWVDNQIVINATGSTMKGKVSHKGKVTIYQIPGFMDGKKCQWIKVSILTGRVTPKAGRLRFIINALGKVELHYPKTTKIEAKRCTDTLGIDKGFTEGFYGSNGVAYAQGLGTIINNASENRTQKNKKRQKLFAISRRVDAAKSTRILKNNLGRQKANKLDSKKRQTITQLIRTATNQIFNEFGEVVAEDLSKHIKGKKRAKVVNRRLNEWSKGELQKALDEISIRKGAKVTLVNACYTSQVDHRNGTLLGKRKGDRFFTFDGEVSQADRNAALVIQNRASDLEITRFMKKEQVHNILLKRTALFLADNGHSLESAISMGWLDEKHINQGKPLRRKR

SEQ ID NO: 24717 - protein, 296 aa, Coleofasciculus sp.
MYAIKRELKLNNVETSLMRGLAGFRRWVYNFGLDLLIASWDFEGVKASDAKRFDAIKKVFTQVTMQKPEYAWMKNYPSTVYQSAFIDLKDAFSKWRKRQGAFPAKKSKKKGDSFTVYKTSGIYPEKGKPALPFTNRVVIEAGKHVKLPGLKVFRLKEQINNMCSSQTFTVSRSADRWFVSFVLDAEKIPPKFHPIQRVGVDLGVKSLATVSDGTRYEMPVTTKKAKTKLGKIQWRNRNLVLGNRRLGVKASGKARRYYVKLSDRVFNCQKCKHCQDRDENASINLENAPSDRVRLA

SEQ ID NO: 24718 - protein, 389 aa, unknown
  TnpB Polypeptide
MKQRWTFRAYPTEEQVFQLARTFGCVRYVWNWALALRRDGLVQHRRRIGYAETDARLTQLKGHPETAWLREVSSVPLQQSLRDLQIAFVNFFEHRAAHPTFKQKSRRQSANYTHRGFRFDPLTKTLTVAKIGRLHIRWTRDYLPMPSSVRIIKTTTGKYFVSLVVEIEPLDWPKSGEAVGVDFGLTSFATLSNGEKIDNPHHAERRQHRLTLLQRRVSRKQKGSRRRSVALQRLALLHERIRNARWDTLHKFSTNLVKRFDRIYLENLHIRGLVKNHHLARALSDAAIGSACRLIEAKASRYGKEVVTIDRFFPSSKTCSGCGHVVGKLPLTIRAWSCPSCGTAHDRDINAAQNILAVGQTVSAHGAGRSTRRLPGRRATWRRSANPSR

SEQ ID NO: 24719 - protein, 379 aa, Archaeoglobales sp.
MNITLKMKIREKTKWKIKALREVMLAFRQAVNDWIDVAWKHKITDRSLHSLAYKELRQKYPNLYSNSLQDAMNWAIQIVKTELKLNPAKKPEFNTLMISFKNVDFKFENNGFVIPLNGKRVYIPVYVPKKYYKWLVNGKFGRLYFKEKNGEIYAYLTVKVEDRQPYKPRLWFGVDLGIHNLVVVADNKGREVLRFNGDIVNRYKELLEKERVRRQRRQMKYLNNNKFKLGQKHKNFSRYINHVIAKEIVRKAKEYKACIVLEKLKGIKRRSAKKPKWVRKLLHRWSYHDLIQKIKYKAKLEGVPVVEVSPRNSSKTCSRCGYMYKRFKNQRLFHCPNCGLVIDRDLNASINIARKGLEEFNKQAFLSALKSEASSPQGV

SEQ ID NO: 24720 - protein, 219 aa, Enterococcus sp.
YISLLCKEEVRELPKSNSAVGIDLGIIDFAILSTGQKFDNNKFTSKMEKKLKREQRKLSRRALLAKQKGINLFEARNYQTQKRKVARLHEKVMNQRTDFLNKLSTEIIKNHDIICIEDLNTKGMLRNHKLAKSISDVSWSSFVSKLQYKADWYGRKIIKVDKWFPSSQICSNCGHKDGKKSLEIREWTCPICHTHHDRDINASINILTEGLRLHSMGLA

SEQ ID NO: 24721 - protein, 323 aa, Burkholderia sp.
MACMILVYRYRVKSLNGLLNQQSRAVNYVWNFCDDTQKHALKWNKKWPTGFDLNVLTTGSSKALGIHSGTVNATCEQYAKSRSQWRRPYLRYRGKKSLGWVPLKGRDLKREGDAFRFAGNTFRVFSSQPLPDGKIKDGTNFAQDARGNWFLNIVIERPDVPARPIRSGVGIDLGLKDFATLSTGEKLQNDRFGRRAADKLAKTQRARKHKRHIAKLHAKVANARADFQHKLALDLVRRFDYIAVGNVSAARLAGTRMAKSVYDASWSSFREGDGARSHVRGSGRKRFYPVLFGVRVERQHDAAERYRRTANKSVGLQWLWCRA

SEQ ID NO: 24722 - protein, 363 aa, unknown
  TnpB Polypeptide
LKVPVTPKDGGFRRMLRSELLKDCPYASHWIDSVIRTAYSMMESWRRRYLRGRAKKAKPKIKRRFARCKITLTKIDYNTKTIRITLKPWEYLTVSWKGTWFDRRVKGWTVGEVIIKDDRVIIPFKNSKVVKVKRIIGWDGNELSLDGYEPGTGFIHIDLRPLQSIKVVYEKKKAVAQAKNKKELYEKYEARERSRVRDFINKLSAGLVRLLPNSIHVFEALDKGNLTSKERVRRVRRKRNARTPWRKIHKRVSEIALTGSASPKYTSRECPKCGFRVKTQVGHEFKCPRCGLKMSRHNVAAMNIRRRYLKGKHKMWGFPRSEDPEETMKVELRAGVTLNGRSPMIWAPMKWGSEGDEAKGRGA

SEQ ID NO: 24723 - protein, 397 aa, unknown
  TnpB Polypeptide
MKKSKTPTFLLELPLRIDAGQAKHLGAHFEAARALYNALLGEALARLHRMWADPAWQAARALPKTQKQERAAAFSHLRQVYGFSEYALHDFAKRANCTWIADHLDAMLAQTLASRAYQAVNRICLGKAKKVRFKSKGRGLDSVENKWEKSGLRFLLQPPEEGNQGWLVWGKDHLPAIIDWEDPVVKYGLDHRIKYARLVRRKASSPQAKGADCQGYRYSVQLALEGTPYQKKPKNQPGHDVIGLDLGPSTLAIVPREGEARLVPLCEELRPNARKKRRLERKLDRQRRANNPQNYDEKGRITKHGKRRFTWKNSKGYLATRRRLAHHERKLAAHRKSLHGRLVHEIIRVGNDIRIEKIAYRGWQKQFGKSVGLHAPGMLIDHLRRTVYDKKFVVDNV

SEQ ID NO: 24724 - protein, 285 aa, Halorubrum sp.
MSLRGGFRVPVEEPTTDGNATHIGLDIGETALITGCALKDGSPTDPFVCSGSGAKLLRKEMHTTLKRLQERDASEWRIEDRFSHYQNALTDIVEKASRQAVEYAQQFENPVLVMENLTYIRERLDYGKYMNRRLHSWAFARLQGRIEDKATEAGIPVEYVNPAYTSQTCHSCHRIGQRESQIEFRCPHDDCHVSTFQTDINASANIARRIDPWGESVPLDKAKHDDSPRDGSGSDTVTTPSETATPSRGHERRAASLERHRETSETPSQMTLTAFQESEPSTSDD

SEQ ID NO: 24725 - protein, 396 aa, unknown
  TnpB Polypeptide
MDTTTMRRVYRFRLEPTPLQEEGFRRYAGARRFVWNWALATRQAFYRETGKTLSRVALSALFTALKKEPDTAWLSEVDSQLPQQAIIDLYRAFEAFFERRAKFPRFKSKRRDTARFRIPQRIALADGFVSVPKIGRVKVRQSQSVEGVTKSATFKRDACGHWFVSLVAEMEMPTVALPLPVEERTVSVDLGLKDAVVTSDGDRVAAPRFYRAAQRQLRRAQRAQSRKVKGSKNRAKARQRVARVHQKIAAKRNDFCHKLTTRLVKNHDAVCIEDLNVKGLARTKLAKSILDASMGTIRRQLAYKGVWYRTHVVAVGRFYPSSKLCYECGYKHDGLTLADREWACPSCGSVLDRDLNAARNIKREGLRMLAVGHTDSLNACGETVRRPMGAGLAIPA

SEQ ID NO: 24726 - protein, 301 aa, Lactobacillus sp.
  misc_feature (237)..(299): Xaa can be any naturally occurring amino acid
MMLRTQKVKLCPNRTMQKVLDDLCDYRRYCWNQGLALWNDMYNASVILADKKQRPNERKVRDELVANKADWQFQLSARCLQLAISDLGKAWQNFFDQAQPDWGKPHFKSKKASCQGFKTDRAKLVNGRLRLDKPRGVKTPWFDIKFKGAHNLTGELKVVSIYRENGQYWASLPLEVMVPAKLKTGAKTAVDVNVGHLNYTGGQIKTLPSHLQAIYKRIKHYQRVLARKRKVNGKQAXXXXXXXXXXXXXXXXXXXXXXXXXXXXXXXXXXXXXXXXXXXXXXXXXXXXXXXXXXXXXXXPK

SEQ ID NO: 24727 - protein, 325 aa, Belnapia sp.
LQQAIKDLDRAYQNWWAGRARAPSPRKRELNDAMRFPDPATFAVRRLSKNWGEVKLPKLGWVRLRWDRAISGEVKNITVSRRAGIWQVAAQYEREIADPEPLDLPVVGIDRGVTVFAALSNGTMIEPANCGKKALRALARAHRTLARKKRGSNNRRKQVQRVARLHMRVSNARRDFLHKTSTHIAKNHGVIVLEKLVVRNMVRSAAGTMDEPGKNVRAKSGLNRAILDQGWGMFDRFLGYKLAERGGLTAHVPAPNSSRECSSCGLVDQRSRNGARFLCVGCGHAEHADTNAAKVVQRRWDTPLLPVEVPGCRAVEAGTRQRAAA

SEQ ID NO: 24728 - protein, 509 aa, Firmicutes sp.
VPTLVKTVKIGIHKEVHAAKWRAILATQELYNQTIAFYMEFFVGHLAVLDARKEVHRKDDMPYERSWKNQELLTFAEVYTLDTKAHPHPLQPLIESLPSARTMPVSLRRAAINHAIGKVKSWYSLRKLWESTDRKKRPPQLGQPNEPITFYADMVAYPDVDLAVQRQVRHDFVAVELFYEGKWQSVPLPVSLHRQAQAVLSESQAESARIHVATSQIKSRKNPKEKWTAEEKATVRPQMWHALSLSLYARRDKQYPGGLRFALHVPFEKWVDAPQKAKTQFATNPGMPVVTVDLGVNRLAVMGAFLNDKLIATKFVHGGELNHKRHLLLNAIYKKRGQSGRLQKDVQDNVNLWEKVRNMDENAARQVARQIVNFALQNEAKVVVFEYLRGYRAPKEKMSKSGRKNHKRAYWLRGKIVEWVRDLAFREGILTVERNPAYTSQMCPHCQHEHREVGQRVKHSFTCLNPNHSYQADADFVGMMNLYCKWNGTFAYPRKKKCADESKPAQAIA

SEQ ID NO: 24729 - protein, 234 aa, Lactobacillus sp.
  misc_feature (177)..(232): Xaa can be any naturally occurring amino acid
VLSPHHLRIGKKNGITLRTSSLHNLRNVRIQKAVISYRQDLDRYYISFSVVKDKRQLAQYQVKSKKTGKAVGIDVGLGKEWLVTSDGKRFGVPDTFKLEKEMLKRQSHCDRNRTAIEKRAARFNHEHEEKIDKHDYANWQKLRKTKSKYQLKIRNIRYDYLQKVTTELVKGYDVIAXXXXXXXXXXXXXXXXXXXXXXXXXXXXXXXXXXXXXXXXXXXXXXXXXXXXXXXXFD

SEQ ID NO: 24730 - protein, 442 aa, Haloferax sp.
MGDVIRTVKVKLNVPTERCDDLHQTKQQFLHCANTTARWAWRHPNDYCVTSKQKAENALYERLRGETELTANLVQKGIRRAIEATKSGVTRLKKGAKTSQPHFDAWSVVYDKRSATFHRDHVSLSTVNGRVECDYVLPDDAEGTPIHKYLLNEDYEFRMSTLQYDRSTGSFYLHARMRRTTDEQEQSKTDSSDVHQMSPDAAHQNAKHRTVLGVDLNVDGSFAVTSTGAFIGNADEMNHRRREFEKTRGSMQQAGTRSAHLSIQSMKDREHRWMQDELHHASNQILDEARDHDCTHVAFENLAGIRDRMAGAKRFHAWAFRRLYHYVEYKAEMYGVEVDQVSPAYTSQRCSSCGFTHESNRQSKHQFVCQKCEYELNADYNASKNIARKLLKRLHSGQKSSSGGAPCQYALASGTLNLNGDYNASVSTTVEGESTDKPTTSQ

SEQ ID NO: 24731 - protein, 428 aa, unknown
  TnpB Polypeptide
MKLTFRYPVYPTKTQETTLFQWLDHLCDLQNSARHDRKVAWETEGERVSCNDQQQKLKVAREKYDDFREVPQDMQVCALERTDKAFDGFYRRCEAGAAKKGYPRHRKQIKSMSWKLRKHTLKSGERVRQNPIRETAWKHDRLKVPKLGEVKIYMYRPLQGDPTGVTLVKKASGWYAHITCELPDTPKVEPTHAIAVDMGTTHYLTTSEGEKEDNPRWYRQAEGLLHKHNQTMARRKKGSHRWYKAVHASALHQERTTNKRKDFIGKLVYNLYHHLENNVLVAEDLSISNMVKNKHLSKSISDASWGTFFKWAGNIAKWAGNIAERDGFHFHQVDPKNTSQICSSCGKKSPKKLSLAIRAFNCQACGTSLDRDHNAAINILLKAAAAFRGERWVATLYEARNKNEAKKISGWKHAEQLLLFDPVTSPSL

SEQ ID NO: 24732 - protein, 435 aa, unknown
  TnpB Polypeptide
MFEAVKVALDPTPAQERRLLSHAGGARFAYNTMLAHVKGAIAAGEKPEWSFYSLRKRWNADKDTLAVDTEGSPWWQENSKEAYSSGIEALAKGLSNWTKSRRGDRKGRKVGFPKFKVKDKVTPKFTYRSGSFGLVKNDPKALKLPRIGRVHCMEDVAKRVGDAKVLRMTISQRSGRWYASLTVEREDKTVANPPKGGAVGVDLGVKTLATLSDGTVIKNPRYLQKSERKLKRAQQALSRKTKGSNRRAKAKAKVTRIHAHVANQRQDAIHKLTTWLAKQYSDISIEDLHVAGMVKNHHLAKSISDAAFGEFRRQLEYKTARTGAKLHVISRWYRSSKTCSDCGSVKAKLSLAERTYRCDSCGLVLDRDLNAAINIQVAGGAPETLNAHGATVRRGGQRGCATQVAVKCEPSVRGGRRAVRLGADGRKAVLQARTK

SEQ ID NO: 24733 - protein, 224 aa, unknown
  TnpB Polypeptide
VCVDAGYPKFKSKKNRHKSYKTNRTNKNFVRTDKYVGIDLGIKDFAITSDGYKYSNHKYLKQSLTKLAYLQRELSRKTKGGSNWEKARIKVARWQEKIANQRKDKLNKLSSAIVKSYDVICLEDLQIKNMVKNHTLAQSISDASWSAFTRQLSYKAKWHGKEVVKIDKFFPSSQTCHVCGHRNKGTKHLGVRTWICPNCHTEHDRDINAAVNILHEGLRILKIA

SEQ ID NO: 24734 - protein, 404 aa, unknown
  TnpB Polypeptide
VLAIKSAKQNYSPSTEVLELLDLFRRMVNRCIVIGLSQNVSSLKSLCLLSYKELGSYPTPSCYKLCAISRAAGILASRKKSLRRGFVTKSPHAVKPLLISCYNFKIQNGHLRIPIGRKRFETIPLTNHTASVLSDRTLCVRSFTLTANTLSLCISKEAVTLECVGTVGVDRNLRNLTCGDEETVVQYDLSKAVEIANTTLSILSSFKRNDHRIGQRLALKYGKRRHNRTVSLLHKTTKSIVERAFEKRKAIVLENIRGIRRLYRKGNWQGRSFRGRMNSWSFGKAQSQIEYKAAWIGPPVVRLSRRETFGTSSTCPRCGERLQSDRNHRRQLWCPKCKVWTDRDVVAVVNLSRRGRLRFDRSKGEAVEAVKGNPTPTVIPGVDASKPTYLEKVGGTMLSSTDYH

SEQ ID NO: 24735 - protein, 359 aa, Alkalibacterium sp.
MLKAYKYRLYPTEQQKDYFANCFGCARFIYNQMLSDKIDHYKETKQMLRNTPAQYKKEFPFLKEVDSLALANAQQNLERAYKNFFRDKSVCFPKFKSKHKSKASYTTNNQGGNIRMEDGKIKLPKIGFVKLKQHRKFEGVIKSCTISMNKSGTYFVSILVKSEEEKMEFTKRKIGIDLGVSDFAITTNDLGEVKKHENPKHLYKAEKRLKKAQRSLSRKQKCGKNRNKARLQVAKEHEKVSNQRKDFLHKLTKKITDENQVIVIETLSSKNLMKNHKLAKSIGDAGWYEFVRQLEYKAGQKGRTIIKADRFYPSSQMCSACGHRDGKKPLHIRQWVCPHCEECLDRDINASQNLLALAK

SEQ ID NO: 24736 - protein, 425 aa, Natronorubrum sp.
MYYSYKYRLKPSDAHREELDRHRDICRQTYNHFRYRLGEYREENGELPSMTSLRSELPDLKKWWNDLTDVYSKVLQTVVERLFDNLKGLSALKRKGYGVGMLKWKPPREFRSFTYSQSGFKLDKKGGRTLLRLSKLGDIPIRLHREIPDDAKLKQVTLKKEPTGEWYATFGVELDREPPTKPENPEQCVGIDVGILKYAHDTDGYAVGSLDLSNERERLEREQRKLSRKEYGSNNYERQRRRVAKCHADLKRKRRDFLHKLSAYYAREYDLVAVEDLNVRGMLESPSNSRNTASAAWRTFLSLLEYKCERNGTHFVAVEPAGTTKECASCGVSTDKPLWVREHSCPACGFTADRDANAARNILSRGITKVGVGRSESTSSESPCDSDGLRRTPVETALPVDTSVSAKRVVEAGSPTLKREPSGER

SEQ ID NO: 24737 - protein, 397 aa, Erysipelotrichaceae sp.
MLYNGYIKSKGVLIMKILRGYQFRLYPNNKQKELIHKSFGTYRFIYNYFLNEKKKEYEEKGKSKTAYEQIKTLPFLYDDYPFLKEVDSCLLRCCIFNLEDAFKRFYKGSGYPNFKKKDVHESFRTNNIKSTYKGKEYNSIKLDLINRTITLPKLKEVKIRGYRSKKEIKGRIINATIKREANKYYVSVLVEDEQEIVKQKPKSIIGLDLGIKDTIITSDGYKVSFPNITRKIKRLKGLQRGLARCETSSKNRYKLKIKIQRLYLKIRNIRKYFIHDITNKLVQDNDIVAVEDLNIKEMYQNKYIAKSLTNIPLFSIIEKLKYKTKWNSKYLIQVDRYYASSQECNRCGYKNKKVKDLSIRKWTCPNCNNNHDRDINASINIMYEGLKKYINEELQVI

SEQ ID NO: 24738 - protein, 383 aa, Actinomadura sp.
VQLRYQFRLYPNPGQQQSLARAFGCARVVFNDALRAREEALAAGLPYPSDGDLSKQVITEAKKTSERAWLGEVSAVVLQQALADLNTAYRNFFASVSGKRKGRKVSPPRFRSRKDQRQAVRFTRNARWRITAGGKLCLPKIGDVRVRWSRDLPSAPSSVTVIRDAAGRYFASFVVEMPGEPLPEVAAEVGIDLGLTHFAVLSDGRKITSPKFLRRAERRLRKAQQALSRKQKGSQNRRKAVAKVARLHARVADARRDHHHKLSTRLVRDNQAVYVEDLAVSALARTRLAKSVRDAGWSQFVGMLEYKAGRSGRAFARVDRWFPSSKLCGACGTVAEAMPLNVREWACPCGAVHDRDINAARNILAAGRADRLNACGGTVRPSA

SEQ ID NO: 24739 - protein, 410 aa, Streptomyces sp.
VIVMQLRYAFRLYPDAAQQAALARAFGCARVVFNDAVRAREVAREAGQPFPTAGQLSTSLITEAKRTPERSWLGGVSAVVLQQSLRDAETAYRNFFASLKGTRKGPRTGPPRFKSRKDARQSIRFTANARWNITDSGRLNLPKIGAVKVKWSRTLPATPTSVTVIKDAAGRYFASFVIDSDPAADATRMPETDRTLGIDLGLTHFAVLSDGTKIDSPRFLRRAEKKLKTAQQELSRKQKGSKNRAKARLKVARAHAKVADARREFHHQLSTKLISENQGIAVEDLSVAGLARTKLAKSVHDAGRSSFISMLAYKAERYGRTLVKIGRFEPTSQTCSTCGVKDGPKPLDVREWTCTACGTVHDRDTNAAINVKTAAGLAVSACGAPVRPGAIPAQREETGSHGLPTGPRAG

SEQ ID NO: 24740 - protein, 389 aa, Euryarchaeota sp.
LEWLLSEFRLLVNESIRIALREDIRSRTRLARTAYQALSRGHTVYKQYIPSAFDVALSVLKAHRRRLKRKQRSSVPYMRKLMLKAENQSYWLDRETGRLRIPVRGTEGVQLHLPLSEWHRSFLSDPIWGLGSLTVVPGKIILVVRREAPKAYEPEGAIALDTNEDSLDGVVASDGGKVLTSLPFGGVRLIQQTHFRRRRRLAARKSKDRRVMRRLLNREGRRERNRVRQRLHLVSKRLVHFAKDGKAAIILEDLTLHGAGGRSKSMNRRLSSWPRGEIHRQIEYKAALAGVPIIKVNPQWTSKTCPVCGARRRDRVGKDFVCLMCDWEMDRQINAGMNILKTALASNEALARAVRFQPGALRHDVVSPLYDLLREGGGARDEPSGVESR

SEQ ID NO: 24741 - protein, 366 aa, unknown
  TnpB Polypeptide
MKLIAQVRLNPTPEHATYLLETLEAANALCNRISAFAWENYLFGKFALQKALYHPLRADTGITAQMVVRMFAKVSDAYKLDKKHLRTFKSHGAIAYDDRILRYYTDKEAVSIWSIGGRLHIPYSAGERQKELLQYQQGESDLVYSKTSKEFFLLATCDIPDPDQRQTDEALGIDMGVTNIAVTSDGDIFSSESIEYTRKRYAKLRKALQQCGSKSAKRHLKKMAGRQQRFQKDVNHVISKRLVMSAKDTNRSIKVENLTHIRVRTTVGGSDKRAKYSNWAFAQLQYFLAYKARMHGVKLEQIDPRYTSQRCFVCGHIAKANRKTQDAFLCCACGYIAHADINAAKNIAFWAAVKPPIVTGRLGQPS

SEQ ID NO: 24742 - protein, 406 aa, unknown
  TnpB Polypeptide
MKLTQKIKINPTLSQELVLNALSERCRLCYNFALSERRDAFKNNSKISYIDQQNDLPKIKAKFPEYKYVYSKVLQHTLRTLDADYKSFFALNKKGDKNARLPKFKGKQFFTTMTYNQSGFKTGKGFIELSHKHPIETKLWFRIPEQFTFSKTYQITIFKDKNEYFLSVVYEKIEPKFVDNQQYQAFDLGLMKQTAVNLSGKFVEFPNARPDKYWQKPKEQLQSRIDHCKKYSRRWHYLKASFNHCSTKSANQLKDAQHKLSRKIPNNTHANTIIVGDLNTKEMSQKSKSKGMSRSLQNTGSISRLVRFLTYKTKLIGKRTIEISERDTSKTCCLCGAKKDMPLEQRQYICDCGNNIDRDKNSAVNIMLRFLSKNGLWKSYWQFVSNLRHTGLTIVSHSQEALTSKC

SEQ ID NO: 24743 - protein, 556 aa, Micromonospora sp.
VLTGRHGWRRAHLPDRPPGHGRRSGHWNGGRGRADRGVCPGVVGRSEGGSGPSGRPGVRVGHRPEARRGLAVRPPVRSSRRREPRPPRSRSRRRGSGVKTIQAYRFALDLTPGQERDVLAHAGAARVAFNWALVKVKAVMDQRTAERSYGVPDEALTPSLSWSLAGLRKAWNAAKPGVAPWWGEVSKEAFNTGLEALARGVKNWADSRRGARAGRPVRFPRFKSRRRTAPSVRFTTGAIRVEPDRMHVVLPRLGRLKLHESARKLARRLDNGTARIMSATVRRGGGRWHVSFTVEVERAEGAPARPRSVVGVDVGITHLAVLSTGELVDNPRHLAAAQRRMRSLGRALSRKTGPDRRTARRPSKRWERAAARLGRAHARVAHLRRDGLHKLTTRLAREHATIVVEDLNVAGMLANRKLARCVADAGFAEIRRQLAYKTGWNGGRLLLADRWYPSSKTCSGCGTVKTKLALSEREYTCQACGLVIDRDRNASLNLAALAAEFDTAGSGPVAARGADQKTRVRGQVATKREPGTASAGQTGTVPPQGRTTNRVLAKAH

SEQ ID NO: 24744 - protein, 439 aa, Micromonospora sp.
MLAHAGAARVAHNWALAKVKAVMDQRAAERSYGVAEEHLTPSLSWSLAGLRKAWNATKPEVAPWWPEVSKEAFNTGLDALARALKNWADSRNGKRAGRPVGFPRFRSRRRTTPSVRFTTGAIRVEPDRMHVVLPRLGRLKLHESARKLARRLDNGTARIMSATVRLDGGRWHVSFTVEVDRVERTPAHPGSVVGVDVGIKHLAVLSTGELVDNPRHLVAAQQRIRSLGRALSRKTGPDRRTGRRPSKRWERAATRLARAHARVANLRRDGLHKLTTRIATTHGTIVVEDLNVTGMLANRKLARHIADAGFAEIRRQLAYKTGWNGGRLLIADRWYPSSKTCSGCGTVKTKLALHEREYTCNACGLVTDRDRNASLNLAALAAKFDTAGSGPVPARRADQKTHVHGQVATKREPGTTSVGQTGTVPPQGGTTKRVLTAAH

SEQ ID NO: 24745 - protein, 381 aa, unknown
  TnpB Polypeptide
MLRAIKVRLYPNKEQERAINQLLGCYRFVYNYMLALKRKEYIDNKINLSLNDLSKYFFETLRKNEDYQWLKEQHTHIMQQAIRQMCIAYDRFFKLHTGFPKFKSKKDKQYALFSINAISKKNTFKERKITLIKSLKDIKFRCSDLYFKRLQIYKDKIRSATLSKTKSGNYFLSILVDINESDIAKFEKTNKSVGLDLGVKDFVITSDGKKFENKYFLKKQENKIKKLQRQLSRKVKGSNNRNKQRIKIAMAFEHLVNQRENYIHSVVNTLLTKYDTIYMEDLNVSGMLKNHKLAKAIQEVGFYKFKMILQCKAFVNDKKVVLIDRYYPSSKTCYDCGYVYKDLTLNEREWACPQCGLIHDRDINAAKNILNEGQRNYNSSL

SEQ ID NO: 24746 - protein, 463 aa, Mycobacteroides sp.
MARFEVPEGWSVQAFRFTLDPSEDQVISLARHFGARRKAYNWTVAAMRADIEAWHATGVAAAKPSLPVMRKRWNQVKDQVCVSAETGQPWWSECSKEAYADGIAGAVAAYWNWQTSRTGKRAGKRVGFPGFKRKGRDTDRVCFTTGSMRVEPDRRHVTLPVIGTVRVHENTRRIERLIVKGRARVLAISVRRNGTRLDASVRVLVQRPQQPGVVLPDSRVGVDVGVRRLATVATAGGVVIDQVANPRPLDGALRELRHVSRARSRCTKGSRRYRERTVEMSRLHRRVNDVRTHHLHVLTSRLAKTHGRIVVEGLDAAGMLRQKGLSGSRARRRGLSDAALGSPRRLLSYKTAWYGSELVVADRWFPSSKTCHMCQHVQDIGWAEQWTCDRADGGCGATHQRDDNAGVNLARYEETSSVVGPVGAAVKRGADRKTGPGPAGGYEARKGRSRTAAEQPRDGAQVA

SEQ ID NO: 24747 - protein, 466 aa, Mycobacteroides sp.
MARFEIYEGWTVQAFRFTLDPTDEQALALARHFGARRKAYNWTVAAIRADIAAWRAMGVETVKPSLPVLRKRWNTVKNGVCVNAETGQPWWPECSKEAYADGIGGAVAAYWNWQQFRAGTRAGKRVGFPRFKKKGRDADRVTFTTGSMRVEPDRRHVTLPVIGTVRTHENTRRIERLITKGRARLLAISVRRNGTRLDASVRVLVQRPQQPNVALLQSRVGVDVGVRRLATVADADGTLLEQVPNPRPLDAALTELRRVSRARSRCTKGSRRYRERTTELSRLHRRVNDVRTHHLHVLTTRLAKTHSRIVVEGMDAAGMLRQKGLPGARARRRGLSDAALGTPRRLLSYKTSWYGSELVVADRWFPSSKTCSVCGHVQDIGWNETWQCAACMAAHQRDDNAAVNLARYEETPSAVGPVRAAVKRGADCKTRPVRAGGREARKGTGHQAGKQPRDGVREAIHSQQRN

SEQ ID NO: 24748 - protein, 268 aa, Coprococcus sp.
MQIVSSYGVEIKKKNIPLRPTLDIFRKAVSYLISVYEETWEELSEIRNPQKRFNEAEHLVHETKKNHARFPFDRDFPKMPSYLRRAAIQYALGAVSSYRTRLSLWKKGELKGKPKLVCENHVMPVFYRDVMYKEAEPGEDVAWLKLFDGREWRWFHVKLLHTDMEYLRKKWSGKKASAPTLERKHHKYFLRFSYTEEVSLSKTTVKEQVICSVDLGINTDAVCSIMCADGTILGRKFINFPSDKDHLYHVLGRIRRFQREHSSRQVQS

SEQ ID NO: 24749 - protein, 390 aa, Granulicatella sp.
MIRAIKVKLYLTKKQEELMWKSAGVARFSYNWGLGYLNDYYEENKKSLSIEELRKDFTKLRKSDEYPWLKEVSSDIPQQALKDLGTAFKNFFNGESKYPEFKKKGKCKVSFYHLNNKIIVKDKHIKLEKIGYVKMKDEGRLPVGNYKKDKIKVLNPRIKHNGKFWYLTVAFECENNQAPELTGESIGIDLGIKNLAIVSNIDKPFKNINKSKEIRRLNKKLKRLQRKLSRKYNMQKKGKTFEKGERVVKTKNIIKLERKIKLVHKRIVDIRMNHIHQTTNTIVKTKPSRIVVEDLNVTGMMKNKHLSRLIAEQCFNKFITILEHKCEWNKIEFVKADRFYPSSKMCSCCNTIKKDLKLKDRTYVCINDKCNLVMDRDKNASFNLANYKLA

SEQ ID NO: 24750 - protein, 214 aa, Natranaerobius sp.
VYISGKSNRIAVKAILTEYQQNLLKNKLGTLRITKKSDKWIAQVCVTVPEPKPKETDTVMGVDLGLKAPAVSVTSTGKTKFIGNGRQNKYIRRKYKSKRSELGQAKKLNAIKTLNDKEQRWMKDQDHKISRKVVDFANIRNTARTSRKNEKNLHTWSFYRLALFIEYKAKLRGIAVEYVDPKYTSQTCPICRNRNHEKTETINAHVVLKPTEIG

SEQ ID NO: 24751 - protein, 353 aa, Brockia sp.
LQTITLSLRLHRPTKAKIKRYQELVERTTAFANNLVAAGRPKGLTSRTARVYLTGDLPSVVINQALRDVATHRDVRTFRVLWPSFNNQNLRLKKVGDFWTASFPTQAGRVRVPLAVTSRQAAILERLGRDVKQGAAKLYKKRGRWYIALSVTLPVEEKKILSADKVAGIDMGLRYLAVVYAGGETLFFPGDQAAYVRRRYHALRRRMGKAKALKAIRQMKDKEARWMKDQDHKISRAIVDWCLARGVGTIRMEKLEDIRRRKTRKRDLGRSLHSWSFYRLQQFIAYKARLSGIRVEWVNPKDTSRTCPRCGHCASENRSGIQFRCRNCGFEAHADVVGAWNISFAISGLAEAE

SEQ ID NO: 24752 - protein, 506 aa, unknown
  TnpB Polypeptide
MKRSNTPSFITELPLKTTSADEATILIRLDAGRQLYHACLGEALERLALIRQSKEYQKIQKLPKTINGKQNQERTKAFDDLNKKEEFTDYDIQHYATGIRNSWIKKHIHAHIAQKLATRAFKAVQKKAFGKAKNVRFKGKNQMDSLEGKNNETGLIFRDNTLSWSDLEIPCIIDPDNDVITYGLNHRVKYCRIVRRKINCKNRFYLQLINEGTPFQNPKNKIGIEEIGLDVGVGTIAMVADTKATLKQFCGELTSDQKKKRKLQRKLDRSLRATNPDNYNKNGTVKKGKKFKKSNRYKTISKDLAETDRILAAHRKSLHGKDINEIIAMGTRIQTEDVSYKGWQKRYGRSINMRAPSMFMNSLKRKAENAGGYLFEFSTQTTKLSQTCHICEQAIKKPLSKRWHVCCGIRMQRDLYSAFLAKCVDKETSALDFVRAKQLWQGIESILSEAISRAKQTAIGMVCPASFGFTGIQSQSGSLVNPVRIISEAMDAVILPDENHRELIGA

SEQ ID NO: 24753 - protein, 158 aa, Burkholderia sp.
MRCSSFAPRDPAIDGGKERRAVDRQVLPLVRIICMILVYRYRVKSLNGLLNKQSRAVNRTRMAKSVYDASWSSFRNKLRYKAIAHGAMFEKVDESGSTQSCSACGSKDSTARPKGIAGLRIREWTCSDCGVEHDRDTNAALNILRCGRASPGVGILSF

SEQ ID NO: 24754 - protein, 409 aa, Megasphaera sp.
VYDLTKTIKLRIHVSPEQEILFRQMTERYRQACNFVSQHIFDNHFSLAYQNLNKELYSDLRKQFGLKSQLAQSSIKTTIAQYKTVNEQLLHSPFKYKDQDGTWKYITKTLEWLWKPICFKLPQADLVRNRDYSFVDDGKMLSINTLGKRTRCTFEDKPFVEYLNGSWKLGTAKLVELKGLWYLHISITKAVESFRKENVRHIVGIDRGLRFLTVSYDEQGKTSFVSGRKIAAKRHKFLKVRQQLQSKGTKSAKRRLKAISGRENRWMSDVNHQISKTLVEKYGKDTLFVLEDLTGISFEESNLSQHTKVQRSDLRSWPFYQLEQFLTYKAHENHSEVLKISAKYTSLRCPKCNIIHKENRDHSKHLYRCQCGYQSNDDRIGAMNIQHLGIRWILGDNHPRYERIITASE

SEQ ID NO: 24755 - protein, 438 aa, unknown
  TnpB Polypeptide
LVFVKNFDSLYTAQPSKVELTITISTKLVYLLSMRREPTLKAYKYRIYPTDTQVVFFAKTFGCCRFVWNKMLDEKLQAYKKKELIPQDTPAKYKEEFPFLKEVDSFALCNVQLQLEKAFKDHFRNRKQFKLPKFKKKRDKQSYTTNNIHNSIRIDFEKSLLYLPKIREGVKIELHRRFDGKIKSVTVSRTNDGKYYASILVETGDRRNKVVEPKSKSCGIDLGLEHFATVTNDFGSYKVEHPKYLLKAEERLRRLQRSLSRKQKGSKNSEKARLRLARQHAYISNARNDFLQKLSKAIIDENQVVVVEDINVKGLLKTRLAKSIADSGWSKFLNYLKYKAEWYGRTFIQVDRFFPSSKLCHRCGYKNEDLALNDRTWCCPACGEKHDRDVNASKNLYFVGLGRSERGTVERALVDDRSPYGLPKKPSCDEAGSSIFCG

SEQ ID NO: 24756 - protein, 135 aa, unknown
  TnpB Polypeptide
LHKLTTDLVNRATIVIEDLNVSGMLANRHLSRAIADLGLFEFRRQLDYKAGMAGSTVVVASRWFPSSKICSACDVKNDTLTLSERTWTCSSCGTFHDRDMNAAVNLARYPESWAGSACGAEGAGDGQQTVVKPAA

SEQ ID NO: 24757 - protein, 212 aa, unknown
  TnpB Polypeptide
MTCYDSGNGKTFILGRNIFRWKILSQRNQQVQSIWYAQQVENGIKYPRSSKHIKRLYRKKQNAVKDYLHKVTRWLAEYCKKERISCVIIGDIRNIRKGKDIGHKTNQKFHGLPYNKLYIMLEYKLKLYGISLTKQEESYTSQCSPFSPEVSKRYAEASNRKERGMYITDGVRYNADAVGAFNILRKYLSVSGKQKELSVTGLKNPEIIKVAA

SEQ ID NO: 24758 - protein, 440 aa, unknown
  TnpB Polypeptide
MPSRWARLIGSGSRRGAEAGCHMPPACWRHEIGQGRRAFYWGGTQPQEPSVMRRAFKFRAYPTRPQEGRAARLLRDHCDLYNAALEERREAWRRRMVSVGYGDQSAQLREIRAADPMGQGRHSFTAQQQTLRRLDATFRAFFRRARAGTCKVGYPRFKPYQRFDEVLFVAGNGAKWEPAVGSHWARARFQAVGRLKVNQHRPVRGRVKTLQLKREYRRWYVIVVTEAEAEPLPPTGRAVGVDVGVARFLTTSDGVVVANPRFLAAKQERIARLQRRKERARLGSGNRKRLRRALAKEWRKVQNQRRDFHHQTARVLVDTYDAIALEDLSINNLTASARGTVEEPGRNVRQKAGLNRSILDAGWGQFTSILVAKAESAGRRVVRVDPSYTSLACHTCGSRCTRPRQDIVVCPNCGVQDADRNGACNIATRAGLGSGQAHVA

SEQ ID NO: 24759 - protein, 587 aa, unknown
  TnpB Polypeptide
MRDSRTHQPLTYDVRLPAEAQADALRLLDASRSVVNTALILLWPSLDEFATDRVGPAWKQVGKYMGSPQYHGDRQWRCESEVIGRVLRAQAERKQAFDLAVPILTDGFIRPKTEKRPAAKQRAAIKEAIATLQKSLEEDETSFVALQNVVEQCCNYFFAYDRFPTTYEELQPIPLLKVGMLTYAGDDGSAKGQAYRLALDLDACVAQFRFRYPDESGVWQWRKTDTVIPLPKIVQGRLAAGELMAPTLREERSADGERFAVLDFIIEVEKADLPTWESVERVLGADWGVHTLLTATAVDEHNEQVGRPFFLNTGGFDGRQARTRQQIDKLKKKVARYEEQRDTLPEDHPKRLWFNQKLATYYGEIDLCWRKYEQRNRALAHLASNVLLLLARVHGCSLLSMESLKTLKSTGRGKGVRGRWRNYRNNSTIRGEIWRLLRYKCHLLGLRFHTEQPRGTSHTCPHCGQPAKTYRSPSDRKEVVKWGRWMSCDACSYNGDRDYCASVNIARLGVAYLVQMKQTSKARSCSISDPRVKSVSYTGAGSALLLPPTGSHARPSISGKICYYPGWLGSAFLQSSQKKFVFLRLCG

SEQ ID NO: 24760 - protein, 366 aa, Erysipelotrichaceae sp.
MQKGIKARLYPTIEQQETLNKTFGSCRFVYNHFLAERVRSYKEDETSLSYNKTAHLLTELKRDEDHLWLNEVDSMALQESLRNLDRAYQNFFKGNAGFPKFHSKHNRQSYRTRNQGNGIRIVGNAVRIPKIGLVKYKGLQPFEGTILNATVSKSASGKYYISLCVEMKETVRTNAGCLIGIDVGIKEFYTDSNGNTVSNPKTYSKHEKKLIREQRRLSRKQRGSNNRNKQRIRVAIQHEKIANIRSDFLHKVTTKLADENQVVCVEELNVKGMLHNHHLAKSISDVSWGEFFRLLDYKTAERGGRVVKVPTFYPSSQTCSNCGYKNPLVKDLAIRQWTCPVCGKTHDRDRNAAINILNKGLEVLAS

SEQ ID NO: 24761 - protein, 372 aa, unknown
  TnpB Polypeptide
MIRAHKIRLNPTPEQEVHFHKAAGTARFVYNWALDRWKAVHAEHPGTPYGMMAAKKDFNGLKEKQFPWVYDVAKDVAEGAFANLGAALKNYFDWRKGTRKGAKVGFPKFKTKKRSKQSFRLNNDKFTVDGHHIRIPHLGWVNMAEALRWQGKILGAVVSKVADWWFVSIRVEVEKPTPVPFAHASVGVDLGVKTLATLSDGVAFENQKLLRSHLNRLRRLSRSLSRRTQGSTRWWKAKRTLVRFHKTVTDKRADMQHQMTTAIAKNYHTVGVEDLHIRGMVRNGKLALSIADTGMGEVLRQLAYKAEQYGGQVIKVARFFASSKICSHCGHVNKALMLSDRQWTCAGCGVSHDRDWNASKNIEAEALRLACA

SEQ ID NO: 24762 - protein, 390 aa, Lactobacillus sp.
MIKTHKIKMYPNATMRIVLTQLFNYRRYCYNQALEIWNEMYDESVLMADKSLRPNERKVRNDLVNNKQDWQFEQSARVLQLAVSDLAKGWQNYFNPKMPNHARPRFKSKKRSKNSFKTDRAKIIDGKLRLDKPRGTKDWFDIRLAEKPRWSGEIKLTTVVEEADGYYVSLAIEVNENVEQKTGKQITGVDANVARFDYKGANGYQSVSTMNAKLLSLYGRITKYQRLLARKRVANPTNFRSNNYRSARAKLKRDYQKVTRIQADILHKFTAQLVRDNDVIAIEDLDNLHMRMNKHLAKNLHRSMFGQFKQIMQYKCEWNGVKLVLVDQFYPSTQRCCRCGYVKTGDEKVRLSGNRKHHTGHNEYVCYKCGAQMRRDENAVENLIQYAQVN

SEQ ID NO: 24763 - protein, 734 aa, unknown
  TnpB Polypeptide
MSTGPNANSCIKCSLSGLGCSRALRGAIDDLAVRIHLVAVRGTHLANHIIAEEVRAGATSEPLQNLSDFLEPKWWQQCFKAAANPRSGKEDVLHVMSAQMFGDGDVIRLGGPGTHAIETLAKDIVTNIHVMLILNFHKQLRKAFRRDILSYATIRDFVFDAADRERLVDYCIWRCVQQGSLCKEVKFPLAECDPMEFGIELQAELDSKVDEWRLLYGPVLLCPMPSFIANMRSSGQKMQLFRWFVDLQRQRKRLQEEMTDHLDGDAESARKCFGKAAKAMRALPLSKLRVGHILVDRTLLKFLLLELQKAGEPISDLEIPLLTSVVTNLDENGEPLQKRAKLNEDGTQKQTRNRRKGDDDAHQTELFWSHFPNAKRLLKGRKDARLDKSIRTDGISSSVPLVIPGRPESKTEMKEVKMMEKCCDLTPGNPTPMPRKPGQRLVAIDPGRRDMVFCYVKTDEAHETPSTCSSSTSTFFGSSQFFGISTRQHVKEAKRRRIATVTIELQKRTLLSSPVYRDADLHTDLHSALCHLPSNKAFETYASYEAMMLPILEEAVLAMSARRLRREAFLSFQSKDKALDLICSKICGGVSVSKVQMHEDPRVLVAFGNGGTVSTTGCGYAPVPQARLRHRLKHVWGAHISLINEFRTSKCCCQCGMFLSCIFKRRNKGTVLKKAVKIHGVLRCKDQDGIRGHGFVHRDKNAAVNIMSIYEALADEERKERPLQFRPERGSRYS

SEQ ID NO: 24764 - protein, 374 aa, unknown
  TnpB Polypeptide
VLDEIYDEAKRVSDLYLLRLDKKQTAKFAGKDLYNLVTEQDSWLTARLKQQCCAFAVSTLKSVHARISRLKWIQDQQDDKTTNACKKREKLIKSLESAQPKITDFSLNLNGNSVKFNAVKNVAKHENWVRLTSIGNSIKVDLPFMITPPFKKWSAKGGELSKFLQIKGRIIKCVFTMPVPKLRETGHVVGCDIGMRNVCTFDNGCQTQSNNLGRNLMNINKKIKRCKSKVKQSKFRTEYVQHVKWAVNLINWGTAKCVKVENIFNFHAKGFTQGWLPTVILNKIESVCQEKGIKFVKVPAPYTSQRCHECGWTAKANRPNGEKMFKCKMCKIYANADVNAAKNIKSEHSKFNYKRPSSTPGVYISKKWWKTGKQ

SEQ ID NO: 24765 - protein, 382 aa, unknown
  TnpB Polypeptide
VQLRYNYRVYPTPGQRIRLAQAFGSARVVFNDALRARQDAYTAGEKISDTEVQRRVVTLAKRTDERRWLADVASVALVQACQDARMAYRNWFDSMSGKRKGRKVGAPRFRSRKDNRQAIRLTRNGFSIRDNRRLYVAKVGELDVRWSRELPSPPSSVTIIKDAAGRYFASFVVDVAQHPLPETDSEVGIDLGLSTFAVLSNGTTISSPKFLRRAERKLRKAQQNLSRKQKGSNNRAKARLRVARVHAKVRDARTDWAHKHSTMIVRDNQAVHVEDLCVVGLARTRVAKSVHDAGWGLFLRMLEDKATRYGRTFHKVDRFYPSSQICSTCGALDGPKPLSIREWACKGCGAVHDRDLNAAKNILAAGRAESLNACGGAVSLPA

SEQ ID NO: 24766 - protein, 375 aa, unknown
  TnpB Polypeptide
MVRKAKSDSLSKKAYKFRIYPSEEQKIFFAKTIGCTRFIYNQMLADKISYYEKTKGMLHNTPAQYKEKYLWLKEVDSLALTNAQKNLETAYDNFFKNTKIGFPKFKAKRKTKKAYTTNNVNNNVKIVNNYLKIPKIKSLIKIKIHRNIPDNYKLKSVTISQSASGKYFASILFEYENQVIEKKSKTFVGLDFSMHELYVDSEGIYANYPKYYRQEQLKLAREQRKFSKMEKGSKNREKQRIKLAIVHEKVANQRKDFLHKLSKKLIEKFDCVCIEDLNMKALSQVLNFGKSVMDNGWGMFVNFLAYKSKEVGKKLVKVGKYFASSQICSNCGYKNKEVKDLSIRQWKCPNCKVVHDRDINAAINIRNEGMRIVLG

SEQ ID NO: 24767 - protein, 406 aa, unknown
  TnpB Polypeptide
MQRLQAFKYDLMPNGQQERQMRRFAGSCRFVYNKALAVQKERYARGEKKLGYAGLCKLLTEWRNSVDTAWLADAPVHPLQQTLKDLERAYSNFFAQRADFPRFKKKGRSDSFRYPDPKQIKLDQTNNRLFLPKLGRLRYRKSREVLGTVKNITVSRSCGKWFVSIQTEREVERPIPQGDAVGIDMGIARFATLSDGTFYAPLNSFKRHETRLRKAQQAMSRKTKFSSNWKKAKARVQRIHSRIGNARRDYLHKTSTAISKNHAMVCIEDLQVRNMSRSAAGSTDDPGKNVRAKSGLNKAILDQGWFEFRRQLDYKTAWNGGYLVAVPPQNTSRTCPCCGHVSADNRQTQARFACVECGFEENADVVGAINVLRAGHARFACAVSDAVRSPAAGTHRSDSGVAQCRA

SEQ ID NO: 24768 - protein, 392 aa, unknown
  TnpB Polypeptide
MILSERHIIKKNNSLYGELDNLCFLSKNIYNSALYAIRQYYFENKKYLSWVNVNNNFVKDKQVDYYALPCKVAQQTIKMVDNNMRSFFNALKAKNSKPKLPKYLDKTSGRYVAIYTNQAISKKELKNGFIALSKTNVRIKTKVSDVKQVRVVPRNNHIVVEVLYEAKCKEHVSTDKKYCGIDFGLNNLLTCAFQDERPIIFNGRPLKSINWQYNKRKSHLQSKLPNGRKASKMIGNITLKRNNRVSDYLHKITSMFINYAVSKGISDVVVGYNKEWKQGINIGRVNNQNFVGIPYYKLLNMLTYKCELHGISLTVTEESYTSKCSFLDGESLCKHDSYCGKRIHRGLFKSSSGKLINADVNGALNILKKVIGNYVYDPIKVCSMPLVFEPRN

SEQ ID NO: 24769 - protein, 366 aa, unknown
  TnpB Polypeptide
MKLVMDLMEEYRCVVNEASKLQFSDPKGLGNLKALHNAFYHKTRGNHADFPSQMVIRAEMECLASYKSIKSNKHKTNKPFEKKNLSMRIDKRLYSHVKGEPTKIKITTKEKKKEFQIKLYPKLEQLMSQYQFLDPLIFVRDGKLMVSLTFDNTPKEKLKSSLCLGVDLGIRRVAACSDGRLIIDKKFNKEKRMLRYLKRQLQSKGTKSARKHLKKLRSKEKNKNKNQTYLVANEILKTSANVIALENLKGIKAKKYKTQNKNGVSQVPFFDLRRVLTYKAENMGKHVCLVSPAWTSQIDSISGIKEGERRGCRFYAKSGLVYDADINAAINIARRSKHPVSQGNLLDGQGIVNCPIACQSFQLERV

SEQ ID NO: 24770 - protein, 395 aa, unknown
  TnpB Polypeptide
MPVLMFKFRLYPSKKQIGVLEDQFELCRQTHNWLLASCKGTYEETGKTLSQFDLNKNLVCFKVQRPEVAKVYAQVLQNISKRIKDGYNNFFARRKSGLNAGVPRFKKYGSYKSITYPQKGFKIKAKKLHLSKIGGIRIKQHRELRGQIKTLTVKRMPSGKWYASFSCIVESQHKKKSFKDVGIDVGLKSFAVLSDGTQIENPRHYRKSEKRLGHLQRQLAKKKKGSSNRNKARLKVARLHEYIQNQRTDFLHKAARKIADTYESVYVENLKITNMVKNHCLAKSINDAGWGRFIRMIAYKAESAGGRLIQVNPRNTTQNCSQCGEYVKKSLSNRVHNCPFCGLVMDRDLNASKNILRIGKELAEYMPVEDKTTTPPSEVVQAYPMKQEGSLLVGR

SEQ ID NO: 24771 - protein, 418 aa, Prevotella sp.
LRKAFGCARLAWNWGLAETERIYKEEKRQIGSNELSVLFNSIKKERFPFVCDVNRYATKSVFRELSWAYKAFFKSGFNKPKFKKKKLNTGSFYIGGDSVVLKGKNTNLKDIKKSYCHKYYDGPCKYIFIYKLGCIKMTELLRFNGKINNVVISQNGEKYYASFSMEITEDEYFRTHPQSKIQKGESVGIDLGLKQTMTLSNGIVVRNPRIAKNAKRRLARLQHNLDKCVYAKTKQERLKGITFSQNYRKRCLKLNKFEKSIADKRKDFIHKVTSVLVSSFSIISIEHLYPSKLVHNHFLAGSINDVSFSRIRLYIEYKSVCRGVRIVLAPEKYPSSKTCCRCGYVRSLLSIRERVYVCPKCGLSIDRDLNASINLEKLTGKRKIGVGHPEFTSEDLTALLSFFHKNGIATSKVDTEIR

SEQ ID NO: 24772 - protein, 245 aa, Bacillus sp.
  misc_feature (11)..(12): Xaa can be any naturally occurring amino acid
  misc_feature (232)..(232): Xaa can be any naturally occurring amino acid
MLCQTSCHEEXXFKKQTSTPRFKSKKNNVQSYTTKQTNENIAVVGNKIKLPKLGLIRFAKSREVKGRILNATVRRNPSGRYFVSLLVETEVQELPKTQSYIGMDMGLKDFAILSDGTIYKNPKFFRSLEEKLAKAQRVLSRRTQGSSRWNKQRVKVARIHEYMTNARKDYLDKVSTEIIKNHDVIGIEDLQVSNMLKNHKLAKAISEVSWSQFRTMLEYKAKWYGKQVIVVXPIMFLLWISKQRR

SEQ ID NO: 24773 - protein, 460 aa, Microbispora sp.
VDVVVFAGELDQLGAKTVAHLDHDFFAAAQEFAGEYTRRYLGVKTKCVCSVETTLRPRRISGLDSHRGDRVRAIMCSDLRLVVQVRLMPTCGQAAALEATLRAVNEAANHVSRVAFTTGTRREYALRRHTYRELKTRGLGAQAAQHVIKKVADAYTALHANIRNGNLGPQGSPRRARATSKPITFRADAAQPFDDRCLSWQIDARTVSIWTTAGRVRDVAFTASAEQLTALAAYRKGGSDLVCRDGMWFLIATCDVPDRPIAVPDAFVGVDLGIANIATTSDGDRHSGKGLNAHRHRQRRLRRRLQAKATKSAKRLLKRRRRKEARFAANINHIIAKQIVTEAERTGRGIALEDLGGIRDRVRLRKPQRVTLHSWSFHQLGSFIAYKAARSGVAVIHVDPAYTSQTCSSCGHVDKRNRPDQETFACTSCGFAEHADVNAARNIAARGVAGWAVSHAADAA

SEQ ID NO: 24774 - protein, 517 aa, unknown
  TnpB Polypeptide
MASNQTYKAFPARPSHITDLNGELLDTDSIMAELAAEVRGISGYATFVVRNDTKLADELAQAGAVQPATAGRRAGVRMPDFLVTGKSGKSRKEALIQHRVVTEYRSWQERIDAVNGESDKYVSQGWKRTVNTSSPSYGEDFVNLGAVDKQYAVIENNPFMDGEIVLKLVIKGNWYRLIFPFDNTRFPVGKVTLPVVKIQDNKPVFIFTVATDNPVVQFSSAYVIGVDVGINNYATVVVRNTKTGRIVYESTLSQRVHSLRNSVRASEKQVKQLRKKAKPIVYDRQGKMAALDEAQLHREAASRKKRELAILAAQEIADLSHQYDNAVVAVEDLGWVANTMQNGRWNRGAFVKWLTHYVAQNGGWVVAVNAANTSQICHECGSEVTHPEHKVSECPKCGVTDRDVNAAANIAARAVPKVTTARNTRAKSKKLQKKTSLKTPTTRKALKHPGGSRNKNYPTPKRKKRRSSQGVKLPLRPASVNTTTVLADCLTSGVAETSTAALNQGNMSYECGLCSLN

SEQ ID NO: 24775 - protein, 538 aa, unknown
  TnpB Polypeptide
MAKKQTYKAFTVRPSHVMDLNGVLLDSTSVLRQLAAEVRDISAYATYVARNDTVLGVELAEITVSQPAEAGRLAGIKIPDFLVPDKKDEAGKLLKDKKAGKPVKVKTGRSRKEKLIQHNAVTAYRSWQERIDAVNGESTKHVSQGWKRTMNASPPSYGEDYVNLGATDKQYAVIENDPFVDGEIVLKMVVQGNWHRLIFKFDNTRFTEGKVTLPLIKIENGNPVFIFSVATDNPVVQFSGKYIIGVDVGINNYATVVVRNIETGGIAYSTTLSQRVHSLWNSIRASERQVKQLREKADKLLFERQSKMAALDEAQLHREAASRKKRELAILAAQEIADLSHQYDNAVVAVEDLGWVKNTMQNGRWNRGELVQWITHYVSQNGGWVLVVNAANTSQVCYLCGGKVTHPTHKVSKCAKCGEMDRDVNAAANIAARAVKKVGTARNSRAKNRKLQKKTALKTPVGRKALKHPGGSRNKNCPTPKRKKRRSSKGVRLPLRPARVQAFCVDTRVLADWATPETNTAALKQGNTTYECRLCSLN

SEQ ID NO: 24776 - protein, 377 aa, Psychromonas sp.
MRERAYKYRFYPTTEQADLLAQTFGCIRVVYNSILKWRTDAYYNNGESTNYNSASAKLTELKKQDEFNWLNDVSCVPLQQSIRNQQTAFTNFFKGRTKYPNVKKKRSNQSAEFTKSAFKYKDRKVYIAKCKAPLNIKWSREILSAPTTITISKDCAGRWFVSMLCRFEPKSLPVVNKTVGIDLGLTDIAITSDGFKSGNPRHTAKYAAKLKKAQKHLSKKKKGSANFHKAKLVVAKIQAKIGDSRRDFTHKLTTKLINENQVISCESLSVKNMVKNKKLSKAISDANWDEFVRQLAYKADWYGRTLVKINKWYPSSKRCNCCGHVVDSLPLHIRHWTCPACESKLDRDTNAAINIKGAGQALLACGVKVRPKQPLCC

SEQ ID NO: 24777 - protein, 441 aa, Clostridium sp.
LYNIASFHVRNAYSASIKSNEDRFPHELQVLEELNGVVDELNVIRQKHHSTPIHIIDHDHRFVSMQHLDGFFKLRDQIDYRALPAQANQNVLHMLYRDWKSFFAALADYKAHPDKYEAIPHIPRYADKDGYKPLIFTNQICKLRKDKHGWYVKFPKAVLQAGCVRDRYDLGKMDLHEQKLKEVRLIPNGDTINLEIVCEIEIKEPTITIHEATRVAGIDIGVDNLMAIAFTSGHHPVLIKGNEIKAVNQFYNKQIAHYRSLLRTGKKDSKGIHQTKRMKRISEKRNRRVKDILHKASRKIIDLCVEEGIEVIVVGNHAGWKKRIHMGKKNNQTFVQIPFRTLIEMIKYKGEAAGIRVVVCEEAIQSKASSIDEDQIPVYGNDVAHTFTGKRIKRGLYRSKNGILMNADINGASNIIRKVYPCMPKRERWSRGTVNVPVTCI

SEQ ID NO: 24778 - protein, 376 aa, unknown
  TnpB Polypeptide
MLKTFRYRLYPTKAQQTRIDDTLESLRWVYNETLAVRKNSWEQEKKSVSLFKTNKLLTQWKKEHPQLKTVFSQVLQDAQGRVDLAFQAFFRRIKAGEKEVGYPRFKGYGRYDSLTYTQFGFKLEGNVLSLAKIGNIKVQLHQPVEGNVRRVTVRRASTGKMYVSFIEVESELLPFKEGAVVGVDVGLESFATLSTGEKIVNPRFFRSEEYELAKAQRKLSAEKKGSVEWRRRLRVVQRVHERIGNRRSDFIHKESRKLVDRFGVIAFEGLNVKGMQQNGNLAKSIGDAAWGLFVNATRCKAVEAGSKVVLVNPKGTSQACSRCGLIVKKGLSERMHRCGCGLVLDRDLNASINILRLGLQSLALTDIEAHPLQGWE

SEQ ID NO: 24779 - protein, 442 aa, Nostoc sp.
VIITNIKEVILLYGCQQILIHADKELKAILDFTCSESNKLSNCAIYYARQIWFKAKRYINKFELNNELKSNRHFQVLYSQAAQQVCGSVYESFASFKQLNVLYRRGELADKPKPPKYRKNGCNLVSYPKQALRLKDGQIRIPLGSQVKAWFKLDSFFLPMPSNLRFEDIKELRILPRNRCFYAEFVYKTSAVKSDVDKSNVLGIDHGLNNWLTCVSNVGTSFIVDGKHIKSLNRWYNKQVATIKDNKPQGFWSNKLAAISEKRNRQIRDAINKVARIVVNHCLDNRIGRIVFGWGQGLKQEINLGKKRNQQFVQIPTARLKERIKQLCQQYDIEFVETEEANTSAASYVDGDTLPKHGEKPEGWKSSGRRVKRGLFRTAMNWYINADCNGAANIIRKVSTTLGLDLGGVSRGALTHPTRIYVWVTAKKKRSNVSLDHCKVSV

SEQ ID NO: 24780 - protein, 367 aa, Lactonifactor sp.
MLKGYKYRLYPNKEQQEYFSKCFGCVRFIYNRMLSDKIEHYKETKQKLNNTPAQYKKEFPWLKEVDSLALANAQMNLQTAYNNFFSRPEVGFPKFKSKKSHYYSYKTNNQNGSIIISDKYIKLPKIGLVKIKKHRNFKGIIKSVKVSQEPSGKYYVSVLVNCEEQEKLPQLENEIGIYLGIKEFAITSDGEMIENPKYLRKSEKRLRKLQKDLSRCQKGSKNREKSRIKVAKQHEKITNQRKDFLHKLSKRLTDENQVIVLESLKVKNMMSNHKLAKSIADVSWSEFVRQLEYKADWYGREVVKIDTWYPSSQICSNCGHKDGKKGLSIREWTCSECGTHHERDINAAINILNEGLRMKTVGTTELA

SEQ ID NO: 24781 - protein, 432 aa, Aliterella sp.
MYLTQKNQIRELSKSEFASLRELCRLSKNLYNVGLYTVRQYFFQEHKHLRYESAYHLCKTNENYKGLNTDIAQQTLKVVDRTFKSFYGLISAVKNGSYHQKVKLPNYLPKEGHFLLIIPRIVIKEGKFRVPMSNAFRKQFGEVWIPFPKRLNINQIKEVRIHPKYNARYFEVEFISAVEPEPIEAKSDSAISIDLGVNNLAACVDTNGASFLVDGKPIKSINQWFNKRNAKLQSLKDKQGIKGITNQQVKLTAKRNNQVRDYLNKTARFIVNHCKGNQIAQMVVGYNPGIKQEINIGKCNNQNFVQIPFHSLRSKLKAMCARYGLKYIEQEESYTSIASAIDGDEIPVYNADNPKEYQFSGLRIKRGLYKTKDGHLVNSDLNGSLNIGRKSKHNGFTGVSRGSLTAPRRINLLKLERKTRRNTALACQVASF

SEQ ID NO: 24782 - protein, 447 aa, Mycobacterium sp.
MLTGRRFRVEFTDEQAEFAEQIGAACRAVWNTGLEQRREYRRRAAWMNYAPQARELAEAKAEHAWLATVPGHCLQQTLMDLDRACRDHGTFRVRWRSGRRWPPGFRFPEGNKMAVEQLNRRHARVKLPKLGWVKFRASRSLDGETLRSATVSRQGRHWFVSFLVYDGVSTPRVHCSPGCAVGIDRGVVVAVATSDGELTDREFVTGGERRRVVALQRKLSRSARGSANRYRTRTQLARLRGAERDRRKDFCAQTAHRLTQTNAVVVLEALKTAQMSKSAKGTLYEPGRNVRAKAGLNRAILAKGWHQFDLALHSAARYSGTLVVTVPAAYTSQRCSACGQVDPKSRESQAVFRCTSCSSVEHADVNAAKNVLAAGLAVTACEDQPLPSGEQRSPKQEPAGNREEVLLQPTRATAAGPSWNPPASAVGRKSSSLSIGCEGPVGRVESA

SEQ ID NO: 24783 - protein, 400 aa, unknown
  TnpB Polypeptide
MYAIKRELKLNNKQRSLMAQHAGYSRLVYNYGLSLYNQLDHKEFKGGLTKKIGAIKKILTNHTSKQIEYSWMKKLSSRVYQSALQDLQSAFGRFFKGLGQYPVFKKKKDKNSFTVYSGNGVVVLEAGKKIKIPTLRTFTLKEPLGARYVSQTFTISRQGDRWLVSFSVNAEYIPLLFHENTKVGIDLGVKCFATLSDGSTYVAPQPLKKAKTKLGKIQWRNRNKQLGNRRQGVFKSKNAAKYYVKLANQHARISNQRSYFLQKTTTEISRKYAVIRIEDLNVSGMIANHKLSSAISDLGFYEFRRQLTYKQDRYGTRVELVNRWYPSSKTCSRCLHIQPMPLRERVFDCQRCGFQVDRDLNASINLENAPEDKVGRASSELNACGEVGADTPHRNRKRTP

SEQ ID NO: 24784 - protein, 434 aa, Psychrobacter sp.
MKINKAYKFRLEPNAEQQVILNNFVGSARFVWNQMLAISLEMFAKNEFINATNLVNKIMEVKNNPDFEFLKTHSNAVSLQQKIRDLASAWSRFFDPKVHIRLKENKKMPKKAKFFKLADGTEIQLRPLMPRFKRKSDGRDSIRLVQFDKYCRIKGNRIKLPNGIGLVKFRKSQDIIGTIKNVTISKKSGHWYVSFGTEHEVENPRHPATSALGLDLGITKLITTSNGATIKPKNSFKANQVKLARLQRQLAKKVKFSENWKKQNGKIQKLHHHIGNVRHDYLHKITTTLSKSHAMIVVEDLKVSNMSKSASGSMENKGRNVKAKSGLNKSILDQGWGMAIDMLEYKQHWRGGLLIKVNPRFTSQTCFECQHVAKENRQTQSKFECVKCGYIANADFNAARNILAAGHAALSVEGGCSKGRPMKQKTCDTREKVT

SEQ ID NO: 24785 - protein, 402 aa, Escherichia sp.
  misc_feature (86)..(86): Xaa can be any naturally occurring amino acid
MKRLQAFKFRLRPGGQQEREMRRFAGACRFVFNRALALQNENHEAGNKYIPYGKMASWLVEWKNATETQWLKDSPSQPLQQSLKDXERAYKNFFQNRAAFPRFKKRGQNDVFRYPQGVKLDQENSRIFLPKLGWMRYRNSRQVTGVVKNVTVSQSCGKWYISIQTESEVSTPVHPSASMVGLDAGVAKLATLSDGTVFEPVNSFQKNQKTLARLQRQLSRKVKFSNNWQKQKRKIQRLHSCIANIRRDYLHKVTTAVSKNHAMIVIEDLKVSNMSKSAAGTVSQPGRNVRAKSGLNRSILDQGWYEMRRQLEYKQLWRGGQVLAVPPAYTSQRCAYCGHTAKENRLSQSKFRCQVCGYTANADVNGARNILAAGHAVLACGEMVQSGRPLKQEPTEMIQATA

SEQ ID NO: 24786 - protein, 239 aa, Bacilli sp.
LERLDKAYQAFFKRLNKSEKAGFPRFQGKNRFHSFTYAQSGFKLNGKFLSLSKIGDVRIKCHRQIQGKIKTCTIVHKNGRSYVCFACEIEEATSVLKTNRPVGIDLGVAYLAITSDGQFFNNPKHLQKAERRLKQLQRAVSKRKKGSNRRQKAVRLLAKWHEHIANKRRDTAHKVSHQLIRQYDFIVFEDLNIQGMVKNHHLAKRIVDSAWRQLIQFTTYKAENASTHSWVWSNCWSCC

SEQ ID NO: 24787 - protein, 375 aa, Clostridia sp.
MQQTITAKLQILVNFSDKQILCNTMKAYSDACNYVSEYIYKTHNLSRYSVQEDTYHQVREIYGLRSQMAVSCVRTVIAKYKTVLENQKEWIKPIFRLPQLDLVWNRDYSLNSKNNIFSVNTLNGRIKVSFYKNGFEQYFTDNCKFGTAKLVNKHGKFYLHIPATYEISELKKSDISNIVGIDRGIRFLAATYDSKGKSAFYNGNTIKQKRAHYKALRKQLQQVGTPSSRRRIKTIGQRENRWMNDINHCISKALVETNPDGTMFVIEDLTGIRSATERVKVKNRYISVSWSYYDLEQKLYYKALRHHQLVEKVNPAYTSQTCPKCGHTKKANRNKKMHFFCCKNCGYKSNDDRIGAMNLYRMGIELLVSDAVVME

SEQ ID NO: 24788 - protein, 351 aa, unknown
  TnpB Polypeptide
VIQVQLKLRPNVKLEKRLDEWLWHLTGVYNWAVRKIQLDADDKIYHSPMNFQNLLAGHAKKVGVPGHCIQGVLSTVHAAWQRCFRKQGGRPKLKGQRNKLVSIPFPDPIRCPEGSHVKLPVLGLVRFHKQFLPEGRIKCGRLIKRASGWHLCLFIDAAPKEIERVGFGKIGIDPGFKSLLTFSTGEKVEHPRELEASAKRLAQAQRGKDKKLVARIHERIANQRKDRNHKLSRKLVAENTVIRFSKDNIKGIAKKFGKSVTSSGHGQLRAMLAYKSSHIGGTQYDEPASKNSTRICSNCGCLSGPTGWAGLSVRNWVCQECGSLHDRDQNAAINVLNFGAGTALERGLCQI

SEQ ID NO: 24789 - protein, 313 aa, Selenomonadales sp.
LPHYFDKEDFFSLILPATHVTFKGDFFILPMSRAFKKEHCELKFRVPPNIDIKTIKEIRIHPKHKAQFFELEFVYDREVIKAKLEAGKFLGIDLGLDNLATCVTSDGSAFIVDGKNLKSYNRLFNKENARLQALKDKQGIKGLTRRQYLNLRKRNRRVNHALSVSARRIVNYCIENRIGNIVVGCNAGWKREINIGKQKNQNFVQIPHGKLREKLKYLCKLYGIVYVEQEESYTSKASFFDDDFLPTYNADNPQKYKFSGRRITRGQYKTATGIVLNADVNGALNILRKCSLISLTALQDRGCVNQPRRIRIF

SEQ ID NO: 24790 - protein, 401 aa, unknown
  TnpB Polypeptide
MKILKAYRFRLRRNAAKEKKMARQAGCSRFVWNEALARQKERLGNKERLFSYVEIANQLPEWKKKWPFLASVHSQPLQQKLKHLDRALKDAFNPKQPKKFPRFKKRGRNDSFTYPQGFKIDEKNSRVCLPKIGWVRYRSSRTVEGKPKNLTVSLRGKHWYVSIQTEMEIGEPKHPSVTEIGIDMGVANFATLSSGETLAPLNSFRKHETSLAKSQKKLSRKKKYSKNWRKQKVEVSRIHIRVADARKDFLHKASTTISKNQAVVYLEDLKVSNMSASAKGTEEEPGRNVKAKAGLNKSILDQGWYEFRRQLEYKQKWRGGEVVVVEPRYTSQTCSACGNVDRASRQSQELFECVRCGYEENADINAAKNILRAGRARMACGSNSNGSRKQEPTEREVSAVA

SEQ ID NO: 24791 - protein, 379 aa, unknown
  TnpB Polypeptide
MAAPTKVNRSFRFRIYPTRRQRLALEAQLGFACDLYNAALEQRRYAWRAGQRVGYVSQCRELTVLRAAGDGPPQMSCSAMRSPLRRLDRAYQAFFRRVKAGDTPGYPRFRSRRRYDSLTWDSAWSIQQRRLALQGIGHLKVKWHRELPASAKVSTVTVRRVVGRWYASFALALQVFPVPDRKSMPAVGVDLGVQNFAALSTGELIPGPRAYRAALRKLRVAQRRVSRRVKGSRRRRKAGLLLARLHERIRNLRRNHAHQLSRRLISDFSLIAVEDLHFRALSRGFLAKDINDQGWAEFSKLLGYKAEDAGIQVVRVPPGGTSQACSGCGTLVPKLLSERIHQCPSCGLVVDRDINAARNILRLGMSRQAPTWPSGACVA

SEQ ID NO: 24792 - protein, 365 aa, Thiotrichaceae sp.
MIVLSHKIQIKNPTVKQEQYFRQACGTSRFAYNWGLAEWRKQYEAGLKPSALEIKKVFNAIKPVDFPWVFNVTKCAAEQAFSDLGTAFKRFFKSVAGYPRFKKKGVHDSFYLSNDQFKLSGNRIKIPKLAWVKLTESLRFEGKILSATVSRIADKWFVSINVQMETTLVKVSENQADVVGVDLGVKYLITKSNGETVVGRKPLKKLSRRLARQQRHLNKCTKGSKRYNRQKRKIARLHYHISCIRHDALHKLTHHLCQNFKVICLEDLNVKGMLKNHKLAKVISDMGFYEFKRQIDYKATLFGNWISTISKWFPSSKKCSNCDHKKEDLKLSERTYHCHNCGFEIDRDLNAAINIEREGTRILVY

SEQ ID NO: 24793 - protein, 324 aa, Escherichia sp.
VKRLQAFKFQLRAGGQQECEMRRFAGACRFVFNRALARQNENHEAGNKYIPYGKMASWLVEWKNATETQWLKDSPSQPLQQSLKDLERAYKNFFRKRAAFPRFKKRGQNDAFRYPQGVKLDQENSRIFLPKLGWMRYRNSRQVTGVVKNVTVSQSCGKWYISIQTESEVSTPAHPSASMVGLDAGVAKLATLSDGTVFEPVNSFQKNQKTLARLQRQLSRKVKFSNNWQKQKRKIQRLHSCIANIRRDYLHKVTTTGSCGHTAKENRLSQSKFRCQVCGYTANADVNGARNILAAGHAVLACGEMVQSGRPLKQEPTEMIQATA

SEQ ID NO: 24794 - protein, 370 aa, unknown
  TnpB Polypeptide
LEKTYKFRIYPNKEQKILLAKTFGCVRFVYNHYLDLRQKKWKNEQITFNFYDCSKDLTTLKQEKEWLKEVDKFALQNSLKDLEFAYKMFWKKNSGYPKFKSKHSNRFSYKTTCDYSGKPTIEFLGNSIKLPKLKKVKIKDKTLRPQGRILNATITQVPSGKYYVSIVCTNVEIQPFKKTNKNVGIDLGIKELATLSDNTKYENKHYLKNSFKRLELLHKRLTRKPKGSQNRNKARIKLARLYEKITNQRQDYLQKITTEIVRKYDIICIEDLKISNMLKNHKLAQAISDCGWYTFTEMLKYKCNWYGKQLIKVPTFYASSQLCSNCGYKNKDVKDLKVRVWTCPICNEVHDRDINASKNILQKGLEILNN

SEQ ID NO: 24795 - protein, 464 aa, unknown
  TnpB Polypeptide
MIKKKPENRKKFIIDFNSNLYKFTSNLPNIINQNNNIPINSTSWFDINKIKAIKTINNLKINTKFPTEVISCQKIKMILTNTQKLILNKWFYTYTEMYNKTLNYIRINCDTLKNEVIKIKLKDINKKLYVNPIKLRTELKTIRDEIINSSQLAEIKTNTKIQTHTLDYAIRQLVSNIKSAITNLNQGYIKRFRIKFWKNNRPSKTIEIEKQYIRDNKVCPNILGNIKYEYNNQEYLLNGINSNVKINFNSITNEYYLLVPITNSPIKEENKYGNFISLDPGLRTFMTGLSETDCFKIGTNVNKIIKKQINRLNKIKQNKKIPLKIKKKNEQLINRKIFNKVDDLQWKTIKFLTTNFNNILLGDMSAKSIVAKNKSILKQDMKTACLRTRFYDFQKRLEYKCMLTKTNYRLVNECYTSKICSLCGNYNDKLKGEKVYSCIKCKKSIDRDVNACRNIMIKCLMESK

SEQ ID NO: 24796 - protein, 393 aa, Streptomyces sp.
  misc_feature (263)..(343): Xaa can be any naturally occurring amino acid
MRRPPGPSGVAFEKVVKKNFALREHTYGEIKARWRLGAQAAQHVIKKTCDAYATLKANLKAGNLGRPGSKRYRKATGKPIAFRPDGAQPYDDRMLSWQVGERRVSIWTVSGRVKDVAFTASPEQLAILALYRKGESDLLCRDGMWFLLATCEAPEAAPNTDPVDFLGIDLGVVNIVTTSDGEIMAGREINRVRARERGLRAKLQKKNTPSAKRRMKKRRRKEARRAKDITHKIAKHVVAEAERTGRGIALEDLTGIRERVRLXXXXXXXXXXXXXXXXXXXXXXXXXXXXXXXXXXXXXXXXXXXXXXXXXXXXXXXXXXXXXXXXXXXXXXXXXXXXXXXXXASKAPTGHPLQLVVCPAGGIHCVQGPPGGSAGRVRRSGVHVPHLRRVRAH

SEQ ID NO: 24797 - protein, 382 aa, Sulfolobus sp.
MARRGNKAIRATVSMKIALSDSLLVLVNNYVKALRFTLFWLKENVKNPEEKGVLSKVHEELYTRLREEYNLPSKVAEDCYREALATYKGWYNNPKKGRFPRVYKPTVWLTPKASYNVDFEAMTVRITKVGELPILGYPRNLKEYLSWRMREARLVIRNDKAFLKVVFEKKKEKVEPKESIAVDINMAEVVVGKDDEHYVRISTRLHEVHHWKSLAERLQRKYARRWRENKRILYRIRAFHQKAKRIAEDFARKVGKWVVEIAEGFGANVIKLEGLKNLIKNVDKLPKEFHDKLYLMQYRRIQYWIEWQARKHGMVIEFVNPSYSSVSCPKCGKRMVEVSHRWFKCSCGYENDRDVIAITNLNRRGSLTLSTAPQMRDVNPNR

SEQ ID NO: 24798 - protein, 414 aa, unknown
  TnpB Polypeptide
LPRDGHGGFGRRLGETHRRQRRQGAPGRPHYPTDAQAAELSRTFGCVRKVYNLALAARTEAWARQERVNYNATSAMLTAWKKTEELAYLNEVSSVPLQQTLRHLQTAFTNFFAKRAQYPRFKSRKKSRRSAEYTTSAFRFRDGTLTLAKMTEPLDIFWSRPLPEGAAPSTVTVSQDSAGRWFVALLCEDPSVRPLPATSTAIGIDVGLDHLLTLSTGEKITNPRHERQDRDRLALAQRRLAKKAKGDGANRAKARRVVARIHARIADRRRDGLHKLTTRLVRENQTLVIEDLTVRNMVKNRRLARAISDAAWAEFRSMLEYKAAWYGRNVVAVDRFFPSSKLCSHCGTLQERMPLNVRTWTCACGTTHDRDVNAARNLLAAGLAVSACGAGVRPQRRTPGGQSATKQETPRREP

SEQ ID NO: 24799 - protein, 457 aa, Lactobacillus sp.
LKQCFFAYDFFGISYEKCYKVNGVNNQREHVMVRLPKNQIGGGFMSDFGQLPYRFGIKVRIYPSDRQKQLIKRNAEAYRFVYNEHHAIQQRLEHLHQIKHPPTKVHTLIQHLTKSLDYQRMALNHSFLADPRIDAHVRLQAIIDYHDRQMAYQLGRAKRPHFLRKSYTWRYQLACQYHHRRHGSLRNGSIAFTDTHHVTLPIIGRLRVAGSQRRLLSREALIQITLVTLTKDAVDHYYLSLQLTSLVPFVRHLDDQPRPIGIDLNTANFLTTSTGKTVASPHFNRRLSFRFRRAVQRLNWQRHLAQKERRPLRTARNYQKQRQCVAKLLIKLHQQRENFLQQLSTQILRHHDLVVAEELRGQDPARNYAMSWRFRDPGWISLLTMLRYKAQLYGRTFITVNPVSTTQTCSHCGYVLHGQQKLTCRERTWWCPHCLTFHRRDQNAAQNILNRGLIRLA

SEQ ID NO: 24800 - protein, 299 aa, unknown
  TnpB Polypeptide
MAEFVKTLKLHIKPEKEDIVALQELTSFYRNGCNFVSKYIFEHEFLLNTIKLQELLYQELRTTCGLKSQMAISCIKTAVARYKGIRTQLGKKPYRYQDAEGKWQSIPKTLDWLWRPVLFARPQADLVRNRDYSFVSDGQMLSINTLRGRIRVAFDVPKYFEKYFKEPWIFGVGKIVSLKNEWYLHISMTKEIEEKDAFSREEVKHVVGIDRGLRFIETIYDEKGKTSFESGKKILEKRAKFQEVRSQLQAKGTKSAKTCLNDISGRENRWMTDVTISIEDTRFYLRDGHVICPGKLNWR

SEQ ID NO: 24801 - protein, 358 aa, unknown
  TnpB Polypeptide
MAQVKLQPTPEQRDMLKITLEEANTACNWISKCAFDEKVFKQFDIHRLVYKDVRADFNLSAQMAVRAIAKVADSYKISKKKRCGFKKHGSFPYDNRILSFNLDRREVSIWTVSGRQKMSFLCSDRAFKLLQGKRGESDLCFVRGEFYLFVACEVETPEPIDIDGVLGIDLGLAAIATDSDGNQYSGAHVISIRERRYRQRRRLQAKGTKSAKRVLKRLSGRERRFMTHVNHTISKQLVERAQYTGRAIALEDLTGIRDRVKARRSQRRKLHSWSFAQLGRFIGYKAELAGVPVVFIDPAYTSQTCSNCGHVSRSNRKSQDSFLCVQCSFSANADVNAAMNISVLGWAVRNSAIQLAHS

SEQ ID NO: 24802 - protein, 152 aa, Nostoc sp.
VKRSNRKGFEHFIFRYIVRFVYAHLLKFLGGNWVKIGSRIYQYWNSREIEGKIKTLTIKRTPLGELFMVVVVDGSEKEEIKFTTSKIAGFDFGLKAFLTCSDGSKIESPQFFTSSLNAIRIANRHHSKKLKGSSNRERARKNLVRLGHQWLG

SEQ ID NO: 24803 - protein, 497 aa, Nostoc sp.
LLTNYAYKLRPNVTQSKEMDGWLDMLRSTYNWSLADRIAQYNQQFIQGDYCDIRTRGEACPLTCFVSKNGASGEPWKDTKVDKDGKLKNPRRSAGDIQITGLPELKKARPWFSEIDSTVLQQNVKRLDTAYKNFFEGRGFPKFKNRSNFTSFTYQMGVKVQGNKIYLPKLGWMRFFNSRMIAEGFTIKAATIRKRQDGWYVSIRIEDKSIPDYLPKPLDEVKSVLGCDLGITKLVHLSDRYQIDNPKFSTNKKARRTLKIRQRRVSRKVKGSKNRKKAASKLGRFHKKITDKRVAYQWDIANKIVSRNVDAIALEDLNISGMLKRCKVKTDEITGRFLKNGQSSKKGLNRAISDASWSELILKIEYLAAKQGKVVIKINPKHSSQECRKCGHIDKSNRDGEKFICTECGYHEHADIGAAKTIRDRGLEIVRGDSAKLAGFSAKRPKDITTHLRANVVSLGICANRILRLQSLKNLRGFSPESVNQGHFSSLSNACGG

SEQ ID NO: 24804 - protein, 313 aa, Nostoc sp.
MRIAYQYKLRPTKVQAAEIDRWLSMLCAQYNYLLADRFNWYEQNRSPVNACPLVCHLPELRDNPDYYSQKKTLPELKKSHPHYGDIYSQVLQDVVKRVKVTFDRFLKGDSNGKKSGKPRFKSRSRYKTFTYPQMKEDCLQDNLINLPKLGLIKVVLHRQLPTGFKIKTAAVTKKADGYYITLSLEDPTVPTVKPDINPESITGIDLGLKEFLTTSEGEVVAIPKHYRKAQKRNIVVQKRVSRRKKGSKGRQKAVKQLGRQHKKVADKRRDFHFKTANDLLKKYDVIVHEDLNIKGLSKSKLAKSVHDAGWSSF

SEQ ID NO: 24805 - protein, 256 aa, Nostoc sp.
LSITDGENHFIVDAPKFLRSAEHLIKKASKDKRRKRAPNRKKKIKASKRFKKAQLKVRKLNRKVANQRQNWVHQVAIEIVSSNSLIATEKLEVKNMTAKAKRGKRKKQKAGLNKSILDVGFGMLRNAIKYKIEQIGGVFIEVPTRQVKPSQTCPKCGHQHKKTLDIRVHNCNACGYIQDRDIAAAEVMLYWAKGNLPGAGTVLADADVTSSTLRTRKKAGILKQLGQTKRQKSQGKLAKNDLGNVETPSSGEASLG

SEQ ID NO: 24806 - protein, 251 aa, Nostoc sp.
MLVFEAKLEGQDGQYKALDEAIRTARFVRNASLRYWMDNKNIGRYDLSKFCAVLAANTEFPWVAKLNSMARQASAERAWSAIARFFDNCKKNKPGKKGFPKFKKEQTHGSVEYKTCGWKLSDDRRYITFSDGFKAGTFKLWGTRDLHFYQLKQFKRVRVVRRADGYYCQFCIDQERVERREPTGKTIGIDVGLNHFYTDSNGETVANPRHLRKSEKSLRRLQRRMSKTKKGSNNRAKFRNKLARAHPFVTG

SEQ ID NO: 24807 - protein, 138 aa, Nostoc sp.
LVRENQTIAVEDLAVKNMIKNQKLSLAISDASWGELVRQLEYKCGWYGRTLVKIDRWFPSSKRCGNCGHIVDKLPLNVREWDCPECGAHHDRDINASKNILAAGLAVSVCGANIRPERNISEGQLRKPISGKKQKPKS

SEQ ID NO: 24808 - protein, 403 aa, Nostoc sp.
MSIKHKSMFAIKRELKLNNVETSLMRGNAGFKRWVYNYGLDLIQSSWDFEDIKASDSKRLDTIKKVFTQVTMQKPEYAWMKLYPSTVYQSAFIDLKKAFERWRKGISGFPKKKSKKKGDSFTVYKTAGIYPVIGEPPLAFTNRVVINRGQRIKLPGLKELRLKERIDFICSSQTFTVSRTADRWFVAFMLDAQKIPPIIHPIEKIGVDLGVKILATCSDGTKYDMPITLQTAKTKLGKLQWHNRNKVLGNKNLKIRASKNAKKYYTRLARQHSKIANIRQDTTQKMTTDISRKAYVIRIEDLNVQGMKENHKLAQAVSNNCFYEIRRQLTYKQAHYGTRVELVDRWYPSSKTCSKCHHIQDMRLSDRIFNCQKCKHIQDRDENAATNLENTPPVQSTVGLTGT

SEQ ID NO: 24809 - protein, 361 aa, Nostoc sp.
MLLGFKTELKLNNLQRTQLLQHCGVSRHAWNWGLRLTKQILDHNQINPTEKIKFPSAIDLHKWLVALVKPECPWYYECSKSAPQEALRSLRTAWDRFFKKTSGTPNFKKRGLRDRFSLEGAIKVIGCNKIQVPRIGILKTYEQLPQFNPKSVSISRQADRWFISFRFDVEEKQSSSTSIVGVDLGVKALATLSSAEVIVGSKSYRFFEEKLSRLQWLNRHKVKGSANWKKAQIEIARLHRKIANIRSHTLHKLTTLLAKNHGTVVIEDLNVKGMMANHKLASVIADMGFHEFRRQMTYKCELYGSKLVVVDRWFPSSKTCSNCGTKKETLVLSERVFECEHCGFSIDRDLNAAINLSRVAS

SEQ ID NO: 24810 - protein, 403 aa, Nostoc sp.
MQLVERHIIKQSHPNHSEIDQICFLSKNLYNAANYLIRQTLFKTGEILNYNQVQKVLQTEVDYKQLPAKVSQQVLMVLDKNWKAFREATKAYHKNPSKFLGKPKLPKYKDKIKGRNLVIYTIQALSKVGLNKGLIKPSQTNISLPTQQTMIAQVRIVPKLNHYIIEVIYNKKEKEKLPDNNRIASIDLGLNNLASVTFNQAGLKPFLINGRPLKSINHFFNKRKSELQSILKTGTSKKLQKLCTKRNFKVDDYLHKASRYLIKKLVSLNISTLVIGQNEGWKQEINIGSRNNQNFVQIPHSRFIQQLTYKAELEGITVIIQEESYTSKSSFLDQDEIPVYKKDVKYSFSGKRIKRGQYLSSNGSLINADVNGSLNILRKAIPKAFAEGIKGIVVSPVKVKLLK

SEQ ID NO: 24811 - protein, 471 aa, Nostoc sp.
LLTNYVYKLRPNITQSTKLSSWLDMLRSTYNWSLADRIAQYNQQFIQGEYCDIRTRSEACPLTCFVSKNGASGEPWKDVKVGKDGKDKNPRRSAGDIQITALPDLKKARPWFAEIDSTVLQQNVKRLDTAYKNFFEGRGFPKFKNRSNFTSFTFQMGVKVQSSKIYLPKLGWMRFFNSRLIPNGFTIKAATVRKRQDGWYVSIRIEDKAIPSYASKPLDEVNSILGCDLGITKLVHLSDRHQIDNPKFSTNKKSKRTLKIRQRRVSKKVKGSKNRKKAANNLGRFHKKTVDKRTAYQWHVANKIVSRKVDAIALEDLNVSGMMRRCKIKVDEKTGRFLKNGQSRKKGLNRAISDASWGELILKIQYLAAKLGKVVIKINPKHSSQECRKCKHVDKSNRDGEKFICTQCGYHEHADIGAAKTIRDRGFEIVRGDSAKLAARQLNAQKILPRSMSKRGEFGNLSNQDIKIVKS

SEQ ID NO: 24812 - protein, 429 aa, Nostoc sp.
VYRCQQVLINQDLDLKALLEFVCIEANSLINCGIYYSRQLYFKTGKLPSKADLHKEIGTLQKNKHYQALYSDTAQQILTGVAESFKSFVGLLKGIKNGTVAQKPKLPNYRTSGGLAVATFTGRSIKLKNGMLRFPLGSLVKTWFGVDSFYLPMPSNLDFKDIREVRILPRNRCFYAEFVYKTNTTIIELDKSKVLGIDHGIDNWLTCVSNTGTSFIVDGLHLKSINQWYNKSVANIKEGKPQGFWSKRLAAITEKRNRTMRDAVNKAARIVINHCIDNKIGTVVFGWNEGQKDGADMGKKNNQKFVQIPTAKLKRRIAQLCEQYGIVFVETEESYTSKSSFIDNDFLPKFGEKPEGWKSSGLRITRGQFQTSTGIKINADCHGAVNIIKKVAAIFKFDLSRVSRGCLSQPKKVRLWTLQKSPSLQRGEA

SEQ ID NO: 24813 - protein, 400 aa, Nostoc sp.
MKTSYQYKIKPSLEQAEKIDKTLEMLRCQYNYLLAQRFDWYEQNRCSIDRCPLICYLPELKEQPNYYNQKASLVQLKIDRPWYKEIHSQVLQEVPKKVELAFDRWLKGDVNGKKSGRPRFKGKGQYKTFTYTQFKQQTLEDSLTLRYHFVNNRITLSKIGDVKVIVHRLIPGGFDIKTVSVTKKADGYYVTLSLDDKTVPTVKPDLNPDNIVGVDVGLIDFYVASDSSRIAAPKHLRKAERRLKSAQRRVSRRKKGSNRRRKAIQKLSKQHKKVADTRKDFHFKTAKLLLDKYDVVAVEKLNIKGLVKTKLAKSINDAGWGKFITILSNKAENAGLKVIAVNPNGTSQECSNCGHKVKKPLSQRMHNCPVCHTSLCRDLNAAINIKARGTHALKAQLMSS

SEQ ID NO: 24814 - protein, 277 aa, Nostoc sp.
VSKTPSGKYLASILTLVDGISTPLNTSENPEICEGKIYGIDLGLKHFAVVTDGEKVSFYDNPKHLAKHEKNLKRKQKKLARKVKGSNSRNRYRRVAAKVYERVSNSRQDFLHKLSYKLVSVSLAVIVENLNVKGMVRNHKLAKSISDVGWGTFINFLAYKLERRSGKLVEIDRWFPSSKLCSNCFYQIGEMPLDVREWTCPHCHTHHSRDVNAAQNIRSEGIRMLALISDVGIKAEGSAVSAVGGEVRPKLGRKSKLRHSPMSTEADTVLGTPSQCG

SEQ ID NO: 24815 - protein, 428 aa, Nostoc sp.
MPQVEKHIIKEGHEWFDYCSDISTISRLLYNAAQFTQRQGFFYGWGTQTQASLDTLFKQNENYKALPAKVAQLVLKQNADAWIAYYKALTAYKTDSSKFTGIPKPPSYIDDKNLIKFNHQAIGKREFGKGYVVPSMSPIRIPVKPGLRFDDLCEVRIIPKTGCFVIEIVYEIPERSQFFCSLNPGLNAAIDIGLDNLATIVFNNLTIQPIIVNGKPLKSANQFYNKQVAKFRGFLPNGRGKSRRIANIVRNRNNFVDSYLHQSTKMIVDEFLQHGVTHVSIGKNEQWKTHLNLGKRTNQNFTQIPHAKFIEMLTYKLERVGITVKVTEESYTSKASFIDWDIIPTYQPNNKVKHVFSGRRVKRAWYVSKNGLKIHADVQAGYNIGRKSNPEGFDCLKSILRDRGCLVVHPRRITPLFKRVHAKSRVGF

SEQ ID NO: 24816 - protein, 443 aa, Nostoc sp.
MTFRLYPNEKTELTLRYHRKLHKDLYNAAVNNRFNQYKIYNHKVDYFEQQNCLPAFKEVWLEYKELPSHALQATLKRVDYAFERWFKGLGKRPRFKSIRHYSGWTYPDCAGFKLESDGENGYLGLSKIGRIQMRGQAKYWGKPTTCTILYRNGKWYASITVNVLDQALKPEILPCGAIGIDFGCKSALSITDGENHQQIDAPKFLRNAEHLIKKASKDKRRKRAPNRKKKIKASRRFKKAQLKVSKLNRKVANQRQNWVHQVATQITRSNSMVATETLVVKNMTSKAKKGSSHKQKAGLNKSILDVGFGMLRNAIKYKVEQIGGVFIEVPTRLVKPSQTCPKCGHQHKKTLDIRVHECGVCSYRQDRDIAAAEVMLYWSKGNLPGSGTVLADAESSSSTSSTKARKQAGSMRQLGAKKRQKSQSNFAKNKLEDAETSSSSEAS

SEQ ID NO: 24817 - protein, 358 aa, Nostoc sp.
MLLSIKTKLKLSKTQETIMSKHAGIARFTYNWGLAAWNNLYKDGLKPNKYILKKFFNNHVKPEFDWIKEKGICQKITQYAFDNLGDSFSRFFSKKGGYPNFKKKGHHDSFTIDAGGKPISVGGKSIKLPTIGWVRTYEGLPHTTCKSITISRTADSWFIAFASEQEYESTIKQHEIVGVDLGVKELATLSTGKVFPNPKHYKTNLEKLRRLSRKFSRKVNVSENKHKAKLKLAKHHAKVANLRIDTLHKITTYLCKNHAKVVIEDLAVANMVKNHKLAQVISDCGFGELRRQLEYKAKKFGCEIIIADRWYPSSKTCSNCGHIQDMPLKERIYNCQSCNFILDRDLNAAINLSRLAKP

SEQ ID NO: 24818 - protein, 301 aa, Nostoc sp.
MGVKVKASKIYLPKFGWMRFFNSRLIPDGFTIKAATIRKRQDGWYVSIRIEDKSIPDYVSKPLAEVNSVLGCDLGITKLVHLSDRYQIDNPKFSTNKKAKRTLKIRQKRVSKKVKGSKNRKKSANKLGRFHKKILDKRTAYQWGVANKIVSRKVDAIALEDLNISGMLKRCKVKVDENTGRFLKNGQSRKKGLNRAISDASWSELILKIEYLAAKQGKVVIKINPKHSSQQCRNCGHIDKSNRDGEKFICTQCGYHEHADIGAAKTIRDRGSARVRGDSAKLGVNHQNAQKVSPRTCVQTW

SEQ ID NO: 24819 - protein, 404 aa, Nostoc sp.
MSIDYLHCKWYYGCMKTLKFKLYSHKRNRYLKRSINAAGVIYNHCIALHKRYYRRWGKHLNCAKLQAHIAKLRKRKEFWQSVGSQAVQDICQRIDKAYQLFFKHHKKRKVCGEGLLPQNFSRQGVRPPNFKKVKKYKSFTLKQAGYKFLGGNRVKIGQKVYQYWNSREIEGKIKTLTIKRTPLGELFMVVVVDSNDDPEIKFTTSKIAGFDFGLKTFLTCSDGTKIESPQFFKQSLNAIKRANQHHSRKVKGSSNRERARKNLARAHEDIANRRTDWFWKLAHELTDRFDVLCFETLNLKGMKRLWGRKVSDLALRDFLNILEWVAHKKGKQVVYIDQWYPSSKTCSCCGHILENLDLSVREWRCPSCQSINGRDDNASKNIQTVGASMVGLGDVRRATPAIAV

SEQ ID NO: 24820 - protein, 393 aa, unknown
  TnpB Polypeptide
MLLTRWYHRSKIELWKGGDIMLKAYKYRLYPNKEQQILINKTIGSCRFVFNHHLSERINNYKNNNKSLSYNDNANNLKELKKEYEWLKEIDSIALQQTLKDLDQAYKNFFRRVKKGEGIGFPKFKSRKNSKQSYRTQFTKTSAGGNIRIEENKIMLPKLGYVKFTNSRQFNGQIKNATISKTSTNKYFVSVLVETENIKLRPSENQVGIDLGLKDFAITSDGVVYENPKFLRRLEYKIKFQQRALSRKKKGSKNYNKNKVRLAKLHEKIVNARKDYLHKISTELINENQIICLEDLKVSNMLKNHNLAKAISEVSWSEFRTMLEYKAEWYGRTISIIDTYYPSSQLCSKCGYQNKDVKNLGLREWICPQCGTKHDRDINASKNILKEGLRLIA

SEQ ID NO: 24821 - protein, 330 aa, Geobacillus sp.
MEIMPDHVHLLIQCDPQFDIHRVIKHLKGYASRILRQEFPHLKSRLPSLWTNSYFVATVGTVSLDVVKRNCPKKGKPTVEVVGNKIKLPKLGWVTFAKSREVEGKILSATIRRNPTGKYFVSIVCETEIEPLPTSKKAVGVDLGLKDFAILSTGEKINAPKYFRKYEKKLARWQRILSRRQKGGSNWNKARLKVARIHEKIVNARRDFLHKLSTKLIDENQVICLEDLQVKNMVKNHHLAKSITDASWSEFVDMLEYKAKWYGRTIVKMDKQFPSSQRCSGCGYQNKEVKNLNLRVWTCPSCGAHHDRDVNAAINILQEGIRLFTAGPAG

SEQ ID NO: 24822 - protein, 385 aa, Erysipelotrichaceae sp.
MTIIKKGFNLQLYPNEEQTKMLSRTFGCVRFVYNQMLNMQKERHDNGGKYVSTYGMNYVLTQLKRENAWLKEADATALTSANDHLNAAFQKLFSGQGGYPKFKSKKTCTDSYTSKCVNGNIYVIDAHHIQIPKIGAVYFRSGKLPHGKIKSITVHQNPDGRICASVLCEYNEADFPKTGRSVGVDVGLKDLAILSDGTKIPLPRWDKSEDDHLHYWQKIAARRLRKAKEAMKADPSLKLTDFKNYQKARKMCAKIHAHIANQRKDYLDKVTTALVRKYDVIVIEDLKTKDMMHNHHLARAIANAGWSEFAGMLEYKCAFYGKTLIKTDPAYTSQTCSACGEVNNRLGYNHYGWLKVREWTCPACGAHHDRDINAAKNILMAASAA

SEQ ID NO: 24823 - protein, 427 aa, Escherichia sp.
MHQENTMLPRRISVSLFIDQSIIWPVKRLQAFKFQLRPGGQQEREMRRFAGACRFVFNRALALQNENHEAGNKYIPYGKMASWLVEWKNATETQWLKDSPSQPLQQSLKGLKRAYKNFFQKRAAFPRFKKRGQNDAFRYPQGVKLDQENSRIFLPKLGWMRYRNSRQVTGVVKNVTVSQSCGKWYISIQTESEVSTPVHPSASMIGLDAGVAKLATLSDGTVFEPVNSFQKNQKTLARLQRQLSRKVKFSNNWQKQKRKIQRLHSCIANIRRDYLHKVTTTVSKNHAMIVIEDLKVSNMSKSAAGTVSLPGRNVRAKSGLNRSILDQGWYEIRRQLEYKQLWSGGQVLAVPPAYTSQRCAYCGHTAKENRLSQSKFRCQVCGYTANADVNGARNILAAGHAVLACGEMVQSGRPLKQEPTEMIQATA

SEQ ID NO: 24824 - protein, 425 aa, unknown
  TnpB Polypeptide
MTDAQALVKTLDFQLDIQSDNESLLYDATLEARSVYNETIHLAKEGVDWDAIPDRVANDANLVKNTTQRVVAKALGAMENYYEYDDFGLPSHTKDGVYPLRANYEEGYTLSLTDDGNVAFRISAKPYKHVRGVLEGDDAHLDILKTAIESDEWKIGTAEALFHDDTAELHVTVTNTEQTVRDTQDSQTVIGVDVNEDNVALTALSEDGVEDTLVIDFPEIKFERHRYFTMRKRVQNAGKDSIHDTLEGREERFVRDRLHKVSHHIVEWCQRFETPCIVFEDLKEMRESIDYGTRMNRRLHHLPFRALQYYSSYKAAFEGIPTAWIDPAYTSQQCPMCGHTERANRNKKRFKCRSCQHQDHADRGASINIAVKGIETHQDWNVPALNSLPQVQKVRRQASGAVDAPTVTSDTARGYHPDGIRGVSD

SEQ ID NO: 24825 - protein, 380 aa, unknown
  TnpB Polypeptide
MRLRSWKFRLYPSRQQENLLGNYLEACKNLWNVLLEYSKSYYEKTGKFPTRNHLNALTKGTPLFSQVAQNAADRLAKSMRGMVARKRAGIKAGFPRFKPIERMKSFTYPQFGFVLGNKLGLSGIGEIPIKKHREIAGAVKTLTLKRMPSGKWFAIFTSEIEGKQVPKKDATSVGIDLGIEHFAYMSDGAIIENPRHLKHAEEKLADAQRHLSRKKKGGKNRRKARLKAAVRFEKLTNRRRDFLHKLSRNLANKYSLIAMEDLNTKRMARGFLAKSILDCGWAEFSGMLAYKAEEAGCEVVLVNPANTTSECSGCGLVQKKSLAERWHKCACGASMHRDLNAAINILIRATAGHAGSQASGEETSTQKWASVFHEGGSPAL

SEQ ID NO: 24826 - protein, 393 aa, Bifidobacterium sp.
MTKRKIAQRIPFTPSKTQAVLLEQCFGARRFAYNQQVEVFNTYDKDTNPRPAYPNVTVMKNTHAWLKDSPVPSNALSNAIMDFRKSVTAYFRKAQYGKNRPRFASRHDAVQSFRNTMPIRRMDGNRYPLSKKLGSIRIGKRHKPRFPLDQLSSWTVKREGDKYHIVFLFDVDVQPKPAVPGRVGIDLGVKDFLVLSTGEKINYPQRLHQLEQTIIREQRRLSRKRKGTGAQSNNYYKQKTRLRKAYRKLHDWRDDYQHQVSHRLIEENQFIGMETLMVANMSRKAKKRVDETGRPVRNGQARKRTMNRNIRRVAWSGFADKLAYKAQWYGRTFQQVDRFYPSSRLCHECGWKNTGLTLRDRQWDCPACGARHDRDVNAARNILGEALRLNGYN

SEQ ID NO: 24827 - protein, 364 aa, Microcoleus sp.
MFAVKRALKLNNREATLMAKHAGFRRVVFNMGLSLRVQMYGAGEFSDSKVINQVKKVLTNHVKKKPEFAWMNQLSSRVYQNALIDLKDAFSRYRSGKAGHPRFASRRDGQSFTVDSSHGKVLLAAGKTIKIPTLGNFRLCEPLECGFVSQTFTISKKGSRWFVSFCVDAERLPVKPPESCVGIDVGIKYAATLSNQQVFDAPKPLKVRAKTKLATLQRKASKQVKGSNNQRKTYNKISRLHARIACIRSDFLHKLTTYLAKSFKLIKIEDLNVKGMMANHKLAGAISDLGFYEFKRQLDYKCKMYGASLVLVDQWFPSSKTCSNCGTKKDMPLSIRTFDCPACGRSFDRDWNASLNILNWEPSA

SEQ ID NO: 24828 - protein, 365 aa, unknown
  TnpB Polypeptide
MQKGIKFRIYPNKEQQNIIHQTLGCCRLIYNKGLAMRNEAYEKGDKVGYSQTSAMLTGLKKSDDFAFLKVVDSIALQQSLRDLDRGFVNFFQKRASHPTFKSKHNRHQSYRTINQGDNIRIAGKYLKLPKLGYVKARQSMEIGKIHNVTIEHTPTGKYFAVLNVEFEPQPMPNKGGMIGIDVGIKEFYSDSNGNVVSNPKYLEKSMRKLMREQRKLSRKEKGSGNRNKQRVKVALVHEKITNQRKDFLQKQSTMLIRENQTICIEDLKVKNMMRNHKLAQHIGSVSWSKFFDMLTYKSVWYGNDVVKVPTMYPSSQTCSACGYKNPLVKNLAIRSWMCPECGTKHNRDTNASINILNKGLQIQSA

SEQ ID NO: 24829 - protein, 417 aa, unknown
  TnpB Polypeptide
MDRTMIVQLSPTPEQARILKATLEQHTACFNAVAHEGFTTACSNGVELHKRTYYPLRAQYPDLPAQLVCAARVKATEAVKSALTWKTKKEQAYPKKVEKAKKQGKPIPAFKPVRCPHSEIACIRYDQRSYWVKWETLTCSLATVDGRIELPFTVPAHLAQYIGHKTCSADLCYRKGRYRLHIVVCILEPSVVASDEVIGVDLGLNRPAVTSTRHFLGERRWKEQERRTFRLKRKLQAKGTRSAKRHLRKLSGKQFRRRRDHDHLLSKRIVEHTPAGATIVLENLKNLRETSKMGRGKKNKNVDNKRRLHSWSFAQLYSFVHYKAEARAIAVVKIDPRHTSQTCSNCGHQHRSNRRSQSLFLCKQCGYCLNADLNAAKNIREKHLTSLAQDGTSVLRGSPRQAAYRLDASASGTSPRL

SEQ ID NO: 24830 - protein, 480 aa, unknown
  TnpB Polypeptide
MKKEKIIQCVSIYPRLSKTQFKIVDTLSFLSKNMFNVGLYNVRQYFNIIQQNEVETQNYRPDITKNLVVLTSSYLPYSRKKEHPFKEICNYNSSTPNENYGLLHSHAAQQTLKSVEEGYKSFFKLLVMRSKGEYDKPVHPPSYLKKNGRYKVDFPKASLSFKGNKVILGMSTKFRKLNGYTGKELTFTIPSSVKAHQIREITLLPIHNGRCYKILFSYEVKNLPVVNLDNTKHMSLDLGVNNFATIVNQVTGTTTILDGKYLKSINQWYNKENARLQSIKDKQDITGITKRQHQMLIKRENKIDEAMNRFVNQVINYALEHKIGNITCLRWDGIKNKRKARKKDNQNFVQIPFDNFRQKLKGKCKLYSIKYHGDESEAYTSQTDALAFDKIGRQPYGKTRRIERGLYKSITGHVINADVNGSLNQMRKVAGDDPVKDIISRGLFNLPRRVRLAYEPATLFKKLQPVVNINCSPSIAIPRL

SEQ ID NO: 24831 - protein, 399 aa, unknown
  TnpB Polypeptide
MIVMKLTNVALVEGNYKTLEELAKITNGLWNRAVYFEKLEKGRFAFYPELCNKLKDDPLYRLLPSQTAQAVLQKLDGAIRAYIKLKKKDRRARMPGYHKPKTAWLVPYKAQQFKVEGDTLKLTLSTRYRKEKGAQWLTFKTHGRKRDGKIKYLELYPRNGLWFASIVYEVEAPPQMKTTGEISVDPGIINLAAIWNGENSEIYKGGAVSAILRYREKENGHLQAILATHGEKTSRAKKELNRKLTGQARHIIHALTKTLVEKAVKERKGIVVGDPTGILNKKRGRKANQKLHRWMYRLMIFQLNYKCKLAGVPFRTKPEWNTSRNCVVCHVAHKGGRVHRGLYRCKLYGQYNADSGAAYNLNVSPSRRVGVVAALAQPAVVLWNGHSWVPRDETNPLNP

SEQ ID NO: 24832 - protein, 436 aa, Halobacteriales sp.
VVEETFNYVVTPDCDETAAAAWSDIQTCRDVYNHALTQEYRPRPDYDKPSYREMQNKITAWEERWPKWSTAYSKCLQMAVRRLKQSESVLGSLQARGYDVGGLKWKALHEFRSIVYNQSGFDVDHHTDRTAHAVVNFSKIGDFHLTYHRPLPDDGAITLIILKKEKTGDLSVSIVVDYAPEYPENPAVEDIDPEDTVGIDLGITKFIHNSDGLSFDSLDEQRDRDRIDRRHRDLSRKEHGSNNWEKARQLLARAYDRLHNRREDYRQKLAHEYTTRYDAVFLEDPDMKAMKEDGRNSRNIAAMSWRQTIQAFKRHGEKNGCYVIEVPPEGTTKRCSQCGCKTEKPLWVREHSCPSCGFEVDRDHNAALEIKRLGLQQLGIETSAEDVGQGMAESTPAETALPGDTEKTPDDVSPKRVVETKNPCLKEPPKAASRQG

SEQ ID NO: 24833 - protein, 414 aa, Halobacteriales sp.
MEKRRTVPVKLDVDSDDDALLRDTVDEFLWAANYVTRHAFKGEYVTTSKTTLHDDTYEDVRDETRLHSNHVQAARNKAAEACKSVVEKWKQGKQASMPHFTSPHLVYDHRTATFHGDYVSLATVDGRIEADYVLPDEERDTPHAEYFFSGEYETTGAELHHSDGNWMLHIHCKRDVEAETPEQATTENGTVLGVDLGVNDLAVASTGTFWTGDEFDHWRREYENRRGNLQEHGTRWAHENMQAVGRKEEGRFKITLHRISNELVVEAHNHGCSVIAFEDLTDIRERTGASWGHKWAFDRLYEYVEYKAAEYGINVEQVDPENTSRRCSTCGFTHPDNREGEEFECLKCGYENHADYNAAKNIGLRYLRRNQTGSGGGAPVGVRLNSGTLNTNGEYEPPASDEARAGVHAESPRL

SEQ ID NO: 24834 - protein, 357 aa, Halobacteriales sp.
VGYRRTAVIKLDTPEGADAHLRETIEQFKYCSNTASEWCWHGDDGYHVTSKAKAENALYDQLREDTELTANLVQKGIRQAVESIKSGVERLKNGQDTSRPKFTADTAVYDKRSATFHRDHVSLSTPDGRIECGYILPENPETPPTKYVANEDYEFRRATLHRRDGDWYLHASMLKEDDDTDTTTGHRTVLGVDLGVNQLAVASTGRFWSADEFNHWKREYEQRRGDLQQCGTRAAHDATAGVERKEDGRFEIFLHRVANEIVAEALTHDCSHIVFEDLTDIRENVPEASWHHLWAFRRLYEYVAYKAKEQGVEAVQVDPRNTSKRCSTCGFTHDDNRHGEDCSISGVGKTQTTEAHP

SEQ ID NO: 24835 - protein, 397 aa, unknown
  TnpB Polypeptide
MIRATKVRIYPTPEQVVFLNAQFGAVRFAYNKGLHLCRHFYHRYGATLKPKHDIKPLLAIAKKSRKYHWLGQFDSIALQQAVINLDKAYTNFFNKSLNAKKPTFKNKHGYQSSYHCTGLKITANSIKIPKLSPITAKIHRDITGKVSSITVSRSATGKYYASILCDDGIAAPDKPSVIERSVGLDLGLTHFVIQSNGKKTANPRYLKNASRNLRRKQKALSRKKKGSANRKKARLQVAACHERAANKRADFQHKLSNAIVVENQAIMTETLLPRNMLKNRKLARHIADAAWSGFVEKLKYKAEASGVHLVKIDQWYPSSKTCHCCKHKLDELPLKIRFWTCPTCLSVNDRDINAAKNVHDKGLTDLIAAGLVVSAYRGLRNSVISAVAACEVGSLVR

SEQ ID NO: 24836 - protein, 390 aa, unknown
  TnpB Polypeptide
VTLKRATKVRIYPTDEQAAFLNAQFGAVRFAYNKVLQIQRHMFKRHGVSLKPKRDLKPLLAVAKKSRKYGWLKEFDSQALQQAVINLDKAFANFFNPKLKARMPTFKSKRGRQSSYHPNGKVLAAAIQLPKMTPIRAVIHRDIIGVVSSITVSRGPTGKYYASILCEDGSEALAKPVFITEVTGCDMGLSHYLIESSGKKIANPRHLINASRNLRRKQKALSRKKKGSANRGKARRQLAALHERVANARADFQHKLSRNMVDDSQAIIVETLKSANMMKNHKLARAIGDAGWHGFIMKLEYKAQAAGRHLIKLDQWFASSKLCSCCGHKMPEMPLYQRQWACTVCGVEHDRDINAAMNIQQQGILELKAAGLVVSTHGGQRQSANSAVVA

SEQ ID NO: 24837 - protein, 380 aa, unknown
  TnpB Polypeptide
MQVVKSVIQRYEPTPDILELLEAFRQMVNDCIRIGLKEKTTSLKSLSLKAYHQLEQYNLPTCYRLTAISKTTGILKNYRRSLRKHPTKTPYCIKSMLIDCYARRIIDGKLRLPLTPRNYTYIPLNKHTLSVISGHTLRSVTLTTCTISVCYSKEIAETVPRGLIGVDRNLDNLTTATNMGETRRFDLSETTRIKSVYREVKSHFKRNDARIRRRIYEKYGTKQRNRVKQVIHRTTKAVIEDAKARGLGVAMEKLTGLRKLYRRGNGQGNEYRSRLNGWSFGEAQRQIEYKAKWEGIKVVYVQPGGTSSRCAVCGSKVLESTDRMVYCPTCKALVDRDINAAKNIVKRGLRFGPIGGASEAMVPVQRWPVDAPQPSQVITP

SEQ ID NO: 24838 - protein, 395 aa, unknown
  TnpB Polypeptide
MYKAYKYRIFPNKKQQELLEKHFGCVRFIYNWGLSNKIEAYQKDKKRLSCFDLINQVAILKKEKDFEWLKEVNSQSLSMSLRSLDNAFTRFFREKKGFPNFKNKKKNINSFQIPQHLKLTDKLSLPKIPDIKIKQHRKLEGKIKTATVSKTPTGKYYISILTEQNGDFPRKPKINEKTTLGIDLGIKTFATFSDERKIENPRCLKKSLKKLKKQQRWLSRKIKGSNNRKRQIHKVALIHEKIKNQRSDFLHKSTHQLTHDNQVKSIAIEDLNVKGMIKNHCLAQSISDVSWGEFRRQLEYKTEWYGKNLLIIGRFEASSKTCVCGYVNQDLTLIDREWTCQKCKIIHDRDLLASQNIKRFALIPQGLRKYTPLERTALAGSLKEEAIGLKSNSIS

SEQ ID NO: 24839 - protein, 295 aa, Scytonema sp.
VLKAIKVRLYPTTEQEIALAKSFGCARWYWNYALNACIQHYSETGKSLNLSVYKAYLPQLKVEYPWLKEDCYSAVLQCVAINLNKAYANFFEGRAKFPRFKSKHHKQSIQYPQNVKIVGDCLEVPKIGVIKAVFHRSIEGKLKTVTISKTPTEKYFASILCEVEEGGGQSSGDKILGIDLGIKDFAIVHDGEQITKHSNPKYLKRHEKNLARKQKKFARKVKGSNSRNKYKKLVAKVHERVSNSRQDFLHKLSRKLVDESQVIVVENLNVKGLVRNRKLSRVNIRRGLGNVRQLP

SEQ ID NO: 24840 - protein, 399 aa, Streptomyces sp.
VQDTHVKRAFKYRFYPTDAQAAELSRTFGCVRKVYNLALAARTEAWTRQERVNYNQTSAMLTAWKKTGELAYLNDVSSVPLQQALRHLQTAFTHFFGRRARYPRFKSRKKSHKSAEYTTSAFRFRDGRLTLAKMSEPLDIVWSRPLPEGALPSTVTVSQDAAGRWYVSLLVEDPSIQPLPATDAAVGIDVGLDHLLTLSTGQKVANPRHERRDRARLSKAQRQLARKARGEGANRRKARQKVAKVYARIADRRRDHLHKLTTRLVRENQTIVIEDLTVRNMVKNGKLARAISDAAWADFRGMLEYKAQWYGREVIAVDRWFPSSRLCSTCGTLRGKMPLHVRTWTCDSCGTTHDRDVNAAKNLLAAGLAVSVCGAGVRPQRSTPGGQSAMKQKSLQREP

SEQ ID NO: 24841 - protein, 345 aa, unknown
  TnpB Polypeptide
MILAHQIRLVPHAVQEDYLRRACGTARFVYNWALAKWKWLYEAGEKPNGRNLKKCFNTIKYKEFPWLKNIHRDAHAQPFVNLQRAFSNFFKKKAKYPKFKKKGCNDAFYVANDKFEMDGRQIRLPKIGWIKTREELRFDGKIMGATVKRIADAWFVAVQVDVGDVKKERVNNEIVGVDLGVKTSVILSTGEKIDGPKALRRAQKRLVRLSRQHVRKQKGSKNRAKLAMKLARLHRRISWIRHDFLHKLTTRLCRENQTVVVEDLHVKGMMRNHKLARVISDEGWGELRRQLEYKAAIYGTKIVIADRWFPSSKRCSVCGEVKKEFLLSEREKVAALFSTGMRTPL

SEQ ID NO: 24842 - protein, 606 aa, unknown
  TnpB Polypeptide
MSTQQLSFSFVLHSSHNAEYETILSTTQEIARTFLANEYWTDEHLHRFTEQNYHNRQNSYNYISQAEYNPFEEYYADTYYYNRYKRCVSQKITRIFAAHADEYLAFKEILQTCKENLIKRVGMGKLRQKVFKDDSDTYVNWNSVQQCVDKLNQYYKKHGEFPKKYTELVNTPRPNGTLPFSPDDTSIHSITHNSESQQLRFTLNIPDETASKHQDWDEISTVFNTTPRFEQFAKNNQLGKPTLHKQDMKNGHPAYVLDIPIKTETLESDTVNDRVLACDLGVKTQVTSVILEDTGDDSLLQHSQPDFINHENKQKLFRLASERESLSNTIAQLADTNRQNTEYFNTVYQEHKQVARKERNLRYQIQHDLTNQLILIALETKCDKIVLEDLASLDAPAGKHTTSRSITTWARGDFKRLLEYKAELVGISVAYEPPYKTSRTCPRCGSDGVTIKAPDNPVETRDGGWFSCTEADCQCNMDRDYTGALNIGRLHLSDSWRLGRAKPTAYIDVGQSYASFPTQNDDDKCNQVVESMGGVDRFTGVRPQRVNAREWTRQDLVLELTCPSKTSCEWSVNNRTGMRRNGSLSHFSTRRLSCGNLSTCTESYQK

SEQ ID NO: 24843 - protein, 433 aa, unknown
  TnpB Polypeptide
VNLTQKIRIFPSKNQKLILWDLSEKCRLIYNFALAERIENWNKNKYKPKDDKKYISYLEQQNKLPLLKKKYPEYKWVYSKVLQMILKRLNSDYKSFFTKWINGDKQARPPKFKSKKRFTTICYNQSGFKLEKKVIQFSHKHPSKIPLIFSLKYPYCAVEIVKQVEIFKDFQNRWFISITYEVQALKYKDNGLYQAIDLGVSNIVSAVNLHSKFIQIKNKRADLYWKKKIESIQSRRDHCKKYSKKWRKYHYKFRKMHQKCAYQMRDFQHKISKHIVTHTKANTIIVGDLNVKEMAKKKKSMGNAQKNKANKTLNYSVNNTGSLGRFVEFLIYKARLVGKRVIRIDESYTTQRCSICGKLKKRNLSERIIQCDCGNYLDRDLNSVINIMIKFLKHKHCYVFLSHQPSLNEESFLQKKDLLRYTAPSVVKVMADS

SEQ ID NO: 24844 - protein, 428 aa, Fervidobacterium sp.
VDEWRTYAKRPCILQKHDIIVSMEVMKTYKFRIYPNAVQRERFERQFGACRFIYNHFLQARIDYYAAHKDDPTKKGLTYHDTALALTQLKKAEGYEWLKETNSQALQHALRDLDTAYNNFFNKRAQFPRFKSKRGEQAFHIPQFFKVDGNHLTLPKIGTVKMVVHRPIDGEIRNVTIRKTASGRYFAMLACRVELPEPQPKQGEVSIDVGLKSFLVTSKGEVVEHPRHLLKAEKRLKRLQRSLSRREKGSNNREKTRLRVARQHEKVANARQDFLHKLSRRLVDENQVIYAEDLNVKGMLANRHLAKRIADSGWGELFRQLTYKDAWYGTDFHQIHRFFPSSKRCHVCGFIYQDLRLSEREWVCSECGATHDRDKNAAINIEIFGYAERTVGTTETHTRGESGAARSLNHEATRFSGWQFTIAYQQNV

SEQ ID NO: 24845 - protein, 440 aa, Haloferax sp.
  misc_feature (384)..(384): Xaa can be any naturally occurring amino acid
VSDDLDSLGFAASKLWNVGRWVCDRVWSEIGHIPGHNELTSYLKSHERYDDLHSQSSQRVLQELAEAFTGWYGKRRNGDTKANPPKYRKHNDEHPRSTVTFKAAGFKLDTQYNRVRLSKGSNLKEYWSDFILCEYQIRPDVDLSTVESVQQVRAVWTGDEWELHFVCKVEIEVAEAPGEKTVGVDLGINNFAALAYEDGHSELYPLNCLKQDDYYFSKRIARCDDSDSEQATRLNQKKSARRTYYFHGLSKHIVQRCVEEGVGTIVVGDLSGIREDEGNNESKNWGKHGNLDLHSWAFDRFTDLLEYKAEMEGIAVERVSERDTSKSCSCCGRKRKVNRVERGLYVCDKCGTVANADVNGAENIRQKVSPSSPSLSVNRSNGWXTVANADVNGAENIRQKVSPSSPSLSVNRSNGWLAQPSTLLFDKETGAFAPQEQVTS

SEQ ID NO: 24846 - protein, 415 aa, Streptomyces sp.
MVIRVKVVVQVKIMPSPEVASVLGATLRTANDAANWLSGEAHRRGETSRKALQGFAYHDLKRRGLSAQPALHVLRKVADAYTTLRANIRAGNLGKPGSKRRARAESKPIAFRPDAAQPYDDRCLSWQVDEQTVSIWTTAGRVRGVRFACSEQARKLLAEHRKGESDLVHRDGVWFLIATCEVPEAEQYEPTDFLGVDLGIVNIATTSDGKIYAGRELNRYRKRQLALRAKLQKKGTRSAKRLLKRQRHKEQRKATETNHIIAKRIVTEAERTGRGIGMEDLAGIRQRVRLRKSQRVALHSWAFAQLGQFVEYKARLAGVPVLFVDPAYTSRMCAECGHTDKLNRVSQGRFACRSCGFVDHADRNGSRNVRARALELWRSGAESHAPAPAQGAGRRSQPGSQSGSTFKPGPSGPGS

SEQ ID NO: 24847 - protein, 382 aa, Bacilli sp.
LKIYKAYKFRLYPTDEQRTLIHKTFGCSRFVYNYYLNYQKENGVQKSFDLCKDLKELEKSREYLKEVDSCALRCSIFDLEDGFNNFFAKRSGYPKFKSKFSRQSYRTSCIRSRYKDKEYSTIEVDLLTRNIKLPKLGKVKIRGYRNKDKIDGKILNATISRESTNKYYVSVVVVEDILIEKVTPTTIVGIDLGIKDLVVTSDGIKYGNEKILMKYEKRLKRLQRKLSRQVKGSKNYLKTKEKIARLYAKIKNYRKHYLNDIANEIVNEHDIIVTESLLVKNMFKDKRKAFNKSLSDAAVSTLRSLIEWKCKIKGKIYYKINTYYPSSQICSHCGYKNSKLKALSIREYDCPKCGLHNDRDINASLNILFEGLKLHYNLESLV

SEQ ID NO: 24848 - protein, 424 aa, unknown
  TnpB Polypeptide
MTNAQALVKTLDFQLAIQSDNWGLLYDACLESRSVYNETIRLAKQGVDWDVIPDRVSDNADLVKNTTQRIVAKALDAMENYYEYDDFGLPSHTKEGAYPLRANYEEGYNLSLTDDGDVAFRISAKPYKHVKGVLEGDDAHLDILKTALTSDEWKIGTAEALFHNDNAELHVNVTNTKQTVRDKQDSRTVVGMDVNEDNVALTALSEDCVEDTLVIDFPEIKFERHRYFTIRKRVQNAGKDSVHDTLDGREERFVRDRLHKVSRHIVEWSRQFEKPCIVFEDLKEIRDSIDYGTRMNRRLHHLPFRALQFYTSYKAAFESVPTAWITPEYTSQRCPICGHTERANRNKKRFKCRSCEHQDHSDRGASVNIAVKGNKKLDWNVPALNSLPTVRKVRRRASGAVDAPTVTHPIVRGYQADGRRGVSE

SEQ ID NO: 24849 - protein, 315 aa, unknown
  TnpB Polypeptide
MKTAYQYRLRPTKNQSAQMETWLELCRRQYNYRLWERFNWWDSNRCPINACPLVTSIAPLADQPEYYGQKRDLVQTKVKYPEYKEVYSDVLQDVVGRVKKTFERFIKGDSSGKRSGKPRYKPSSRYRSFTYPRMKVNCIVGKYINLPKIGGVKLILHRPIPDGFVIKTCTLVHKPDGWYVMLSLSDKTVPTVSPDINMEKTVGIDVGLKDFLVTSEGVVVPIPRFARRSEKRRKLLNKSLSRKRQKGTRRRQKAGKKLSKHYQKVARQRKDFHFKVAGQLLKQYDVIAYEALNIKGLCQNEVEQVDSRRRMGRIH

SEQ ID NO: 24850 - protein, 415 aa, Prevotella sp.
MILRAIKIRLYPNKTQEQTLNKLLGCYRFVYNQMLALKQNAYNRDKSNIGLCELSKFFHGTLLKKDEYSWLKEQNTKVMKQAIRQMLSAYDGFFKLGKGFPKFKSKHDNNSALFPYEAISKSNLFETRHISLTKSLKHIKFHCSNLYFERLQKYKDNIKSATLSKTKSGKFYLSVLISMNEEEFKQFRHTNNKVGIDLGVKDFIITSDGEVFENKHFFKKSEDKIKKLQRRLSKKAKGSNNRNKIRIKIAKEFEHLTNQRMDYIHNAVNSLLSTYDYIFIENLNVQGMLKNHKLAKAIQELGFYAFKNTLKNKAMMNDKFVIEVDRWFASSKTCHKCGYVYKNLTLGERKWSCPICGEHHDRDLNAAMNILIEGNKILVGSRTAEFTLVEKPTVDGRTISFLKSSVSLKQEIKTK

SEQ ID NO: 24851 - protein, 380 aa, unknown
  TnpB Polypeptide
MLKAIKIRLYPNKEQEQNINKALGSYRFVYNHMLALKQEAYNKDKTNLGLCELSKYFHGTLLKDEQYSWLKEQNTKVAHQAIRQMLIAYDNFFKQHKGFPKFKSKKDRQSALFPIDAISRCNTFETMHISLTKPLKNIKFRCSDLYLRRLQKYNKNIRSATLSKTKSGNYFLSILVEMEDTELKKFEHTDKQVGIDLGVKNFVITSDGYVFENKHFLKKEEKKLNRLQRQLSRKVKGTNNREKQRVKIAKLFERMTNKKDAYINYVANELLKSYDTIFMEDLNVQGMLRNHNLAKAISEVGFYKFKDVLTIKALENDKQVISIDRFYPSSKTCHKCGYVNHDLKLSDRSWVCPQCGTKHDRDINAAVNILLEGKRMLTTA

SEQ ID NO: 24852 - protein, 397 aa, unknown
  TnpB Polypeptide
MVTHYRAYRGSGVWLSQYAAMKLADFYDTQAERSRLLHAHSVDAAQEGFYKACKTARACKQVGLKNAHHPYKRKCYRTTIWKKTGIRVEAGLLLLARARGLEPVRVNLPAHLAGLAPKVFVEMRLVWDKASRHYTWHMVVDDGQPNAEPPGQQIAAGDLGEIHPITLTDGEETLVVSARALRAVKQRTHKRLAEIQRLQSAKVKPSRQWSRLQRRKKRFLAQQKRRTRDIEHTVSRTAVNWAAARKVGTLALGDVRDVAEGKRLNAKSQQKVSNWSHGQLRQQITYKAEAAGLVVERVDEAYTSQTCPQCGQRAKPKGRNYICPACGFAAHRDAVGAVNILSRHKYGAVGRIMPPADTKYRRPFCCRKTGRRSRLDTAELAGAKGCGKPKSSEAAGL

SEQ ID NO: 24853 - protein, 402 aa, Escherichia sp.
VKRLQAFKFQLRPSGQQEREMRRFAGACRFVFNRALALQNENHEAGNKYIPYGKMASWLVEWKNATETQWLKDAPSQPLQQSLKDLERAYKNFFQKRAAFPRFKKRGQNDAFRYPQGVKLDQENSRIFLPKLGWMRYRNSRQVTGVVKNVTVSQSCGKWYISIQTESEVSTPVHPSASMVGLDAGVAKLATLSDGTVFEPVNSFQKNQKTLARLQRQLSRKVKFSNNWQKQKCKIQRLHSRIANIRRDYLHKVTTTVSKNHAMIVIEDLKVSNMSKSAAGTVSQPGRNVRAKSGLNRTILDQGWYEMRRQLEYKQLWSGGQVLAVPPAYTSQRCACCGHTAKENRLSQSQFRCQVCGYTANADVNGARNILAAGHAVLACGEMVQSGRSLKQEPTEIIQATA

SEQ ID NO: 24854 - protein, 443 aa, unknown
  TnpB Polypeptide
VQYRDGGEIDFRGTGHEIYYKYNNVLSVNAGVVIQLNNQAWKSYFELSRLYRQGRLPKFMNKPSPPSFWKDKLLGKRELRILVRNDRYYLEPINNGEGYLVLKDWGLRIRYAGRIKWSGKQGMLVIKLEGNRWFAYVPITVGEKPAKSNPKGYVKGIHEKIQIEKPRGSNKAFVDIGLSNLFAVVFNHTDVAILIKGSTIKAEYYYWKREIGTYQAIRDWLRNHGFESWRKYYTYYLHAVYKQHERLRHYYRTAIRFLARTMHGMGVDEVFIGYPYMLSQNNGNEYNTNIWWYAKIINWLKNVLEEYGIKINVVNEYGTSKQCSICNMEHENGRVKRGLYVCQTTGIKINADLNAARNIAKRVGYEAPIPRKILSYIVTSNGVKPITPKRGSNGRDPQGETPPIRAGRGSLFHLLPSCGFSFAINSNNNPPQLRPQRNGAKRN

SEQ ID NO: 24855 - protein, 400 aa, unknown
  TnpB Polypeptide
MAIFGFNHLIYNGIKIIYQMLKAIKIRLYLSTEQEIYINKLLGSYRFIYNQCLDFKIKKYNNHKETATFKDLGKHLTSLKNEFEWLRESHSKVLQQSLINLEQAYKSFFKNGNGFPKFKSKHQKKQSCRFPVDAIMGVKGNRINITRKLNDIHFKCSKRDERELNKYQDKIKSGTLSKTKSGKYYFSILIDTKIKKELPDTDKIIGIDLGIKDFIVDSNGEKFENIKVIRNNKTKLAKLHRELSRKQKNSSNKNKARIKLAKFHEKLNNIKENYLHKVVNQLLSENQTIVMEDLNIKGMMKNHCLARSIQELSLYRFKEMLVYKAKWYNRDIIQVDKFFPSSKKCSCCGEKNINLTLSDRHWKCQFCGCEHDRDFNAATNLRNEGLRILGLSSSLMPLEG

SEQ ID NO: 24856 - protein, 409 aa, unknown
  TnpB Polypeptide
MKTSYQYKLRPTKQQTMELDRWLSMLCAQYNFLLADRFNWYEQNRSPINACHLVCHLPELRDNPDYYNQKKTLPQLKKTHPWYKDIYSQVLQDVVKRVKVTFDRFLKGDINGKRSGKPRFKARNRYRTFTYPQIKDSCLQGNLINLPMFGKIKIILHRPIPVGFKVKTASITKKSDGFYLTLSLEDLTVPEIKPDLNPDLITGIDVGLKEFLTTSEGETVAIPQYYRQAQKRLRITQKRVSRRKKGSNRRQKAVKQLAKQHKKVADKRKDFHYKTANYLLSKYDVIAHEDLNVKNLARTRLAKSVLDAGWSSFLLILTFKAVNAGKLAVPVNARNTSQNCSNCGEKVPKKLQVRWHDCPHCGCSLDRDLNAAINIKNRAVGHPVLKAQLMSDGIPGVSEKPTLYSSQLV

SEQ ID NO: 24857 - protein, 417 aa, unknown
  TnpB Polypeptide
MKREVVKAVELNLLPLTGGKRSELSALFSEYLSVANEALSALKSERPPSNTELHHLTYARIRKKSKLPAQLVCAAQQEVWAKRRHKISKFKRLPVSYNVPRSGSLKQTKRGNPILSIVTLNGRLGLPIAQDGAWQRFNRLLGDGWTFTEFKLLNLKMVRVTLRREFEVAEPTPDKAIVGVDVGVGTLAAVTIFRAGKIERQLYFGRDVWQVKRDLGIRRSKLQAHASKGSRRARRVLRELRGYERNFDKTRCYQEAHRIVALAKQYNATIAMENLNGLNNAKLSRKSNRKVKRMPYSMLRQALQQVAWQEGIEVGLVGARYTSQRCSRCGAKGVRKGSLFKCKCGFTTNADRNASVNIAKLLWERVEHAQTPTCFAQPSQSGAAVNQPVLCHDGGQVLVRNHTSHHEHKLPFSKGGS

SEQ ID NO: 24858 - protein, 394 aa, Anaerobranca sp.
MIKTYKVMLLPNKKQKTKLKECAGVARWAYNWALATEQENYNNGGKFLNDRELRKILTELKKTKEYSWLNDYSNNITKQAIKDVCIAYKNFFEGRADFPKFKSKKKSKPSFYVDTEKIKITPTHVKLEKLTNSKKPNKQKLNWVKLAEKGRIPVGDNIKYYNPRVTFDGLNWYLTIGVEEVEYKNKEYTEGIGIDLGVKELATISTGQKYKNINKSKKVKKLEKRLKRLQRKLSKKYELNKIQTEGGEYRYRKTNNIKKLEHLVLKTRRRLKNIRKDYLHQITTSLVKTKPEYVVMENLNTKGMLKNKKLSKAIQEQTFREFRRQMEYKCQCNGIKFILAEKFYPSSKICSSCGSIKDKLSLSERTFICNVCGYKIDRDLNASINLKNYGKSIA

SEQ ID NO: 24859 - protein, 395 aa, unknown
  TnpB Polypeptide
VDTARCYKFRLDPTPAQEDAFVQFAGCRRFVWNWALSRKPEVYEATGKGIGYNALAADLVALKKAAPFLTDCHSQVLQQTLMDLDKAFKSFFEKRARFPRLKSRRRTPHAFRIPQNVSIVGERVSVPKVGLVKARLHRPLEGKVKSATVEQESDGHWYVVFVGHVEIPDAVPACDKNFCQPCGIDAGLSSFLTLDSGLKVSPPKFYRRGQRKLRRLQRVLTRCQKASRNRAKARARVARQHHRTAARRSDFLHKLSRGLVARYDTICVEDLNLSALVRTKLRGHGKSWSDAAVGSLMRMLEYKALWNGGQVVKVGRWFPSSKTCHCCQSVQPLELSDRQWACAHCGAVHDRDHNAAVNILSEGLRILHLQVAAGSAETLNASGGSVRPATAGGSR

SEQ ID NO: 24860 - protein, 370 aa, Veillonellaceae sp.
MIKTYKFKLYAAKRNKKLHRQINAAGLAYNHCIALHKRYWQLYHKLLNKFALQKHLTKLKKLERFSYLKEIGSQALQDVTDRIDRAYNLFWTNLDNKRKTAPPGFKKVCKYKSYTLKQAGWKLDEGHGTVYIAKQKYRYFKSRNIEGRIKTLTVKRDTLGDIYLYFVCEQKITEVKLRTGKSVGFDFCFKDKMLVAPDEENDIAAPSFFQKNQKAIRTACRNLSRRQLCSKNRQEYRKVLARLYRKQANQRRDFHFKLAKELCQKYAVICLESLSMKAMQQGHGKKVNDYGFAAFENILEYVGRQMGTKIIKVDTFYPSSQICHDCGYQNKEVKNIRVSEWTCPSCGIHHDRDRNAARNILSEGLRLLTA

SEQ ID NO: 24861 - protein, 446 aa, Streptomyces sp.
MSRFRMHPTGGQEQQMLLHCAHARYVWNLAVEQHAHWQRGRKSAPGFVEQCRQLTEARGDSEWLGAGNADVQQQALKDFAKAKDARFTSGFGEPTWRRKFRHEGFRVIGTDRVPEYNEDGTPRLNAKTGKQVMGRSVVVRKLNRRWAQVKVPGCGWVRFRLSAKGKGARLPSAKTFRVTFRNGQWHAAFAVVPEPGPAPGTGEVIGIDRGVRITAALSDGRTLNCPQLTVKERAQIRKHQRRAARAPKGSDCKPAEYAKAARLKAREANRRKDWCEKTSTMLAKSFDLIRFEKLNIKNMTAKAKPKPDPDRPGRHLKNGRAAKAGLNRGILAQGWGLLRQRTEHKAPGRVEDVPAPYTSLRCSDCGWIDKNSRKSQAEFVCSSCGFTCNADTNASINVAAGQGGIFRPRPTAGAGGTTPRNGSNVREPQPEQAGIPLFQEGEDVNS

SEQ ID NO: 24862 - protein, 402 aa, Streptomyces sp.
VIRAYKFLLRPTRGQAAALVGMLRDHCSLYNGALQERRDAYRHTSKTSIKYGGQSAQLKAIRAFDPERQGRWSFSSQQATLRRLDKAFQAFFRRVGAGRTPGYPRFKGVGHFDTVVFPKDGDGCRWDSTPHDPHTRVRLQGVGHVRVHRHRPVRGRVKTISVKREGTRWYVVLACDEVPAEPLPATGAVVGIDLGVARFLTTSDGAHVANPRFLQTMAGELAEAQRHLATFPKRARQRTKKHRAAARKVARLHTKVRRQRADFHHKTARALVAGHDVIVHERLNTAGMTRAPEAEPDPDNDGVFLPNGAAAKAGLNRSILDAGWAQFLGILANKAESAGRRTVPVDARNTSRACPECGHVAKENRLTQARFRCTACEFTANADHVGATNILNRAGLVLCDAA

SEQ ID NO: 24863 - protein, 443 aa, Escherichia sp.
MVKNLASVSGDKDQVNMHQENTMLPRRISVSLFIDQSIIWPVKRLQAFKFQLRPGGQQEREMRRFAGACRFVFNRALARQNENHEAGNKYIPYGKMASWLVEWKNATETQWLKDAPSQPLQQSLKDLERAYKNFFQNRAAFPRFKKRGQNDAFRYPQGVKLDQENSRIFLPKLGWMRYRNSRQVTGVVKNVTVSQSCGKWYISIQTESEVSTPAHPSASMVGLDAGVAKLATLSDGTVFEPVNSFQKNQKTLARLQRQLSRKVKFSNNWQKQKRKIQRLHSCIANIRRDYLHKVTTTVSKNHAMIVIEDLKVSNMSKSAAGTVSQPGRNVRAKSGLNRSILDQGWYEMHRQLEYKQLWRGGQVLAVPPAYTSQRCAYCGHTAKENRLSQSKFRCQVCGYTANADVNGARNILAAGHAVLACGEMVQSGRPLKQEPTEMIQATA

SEQ ID NO: 24864 - protein, 396 aa, unknown
  TnpB Polypeptide
MFKITIFAKVLKAFKYRIMPTRAQAELINKHIGSCRFVYNLALETKQRAYAGNRVNLSCFDLAKQLPGLKEECAWLKEINSQSLQQSIINMDTAFTKFFKGQTDFPKFKRKDARQSFNVPQNVLLKDGKLSIPKFKEGIKIIQHRAISGEIRQATISRTPTGKYFASILVDNKKELPNKKAIKEATTIGIDLGIKSFLITSAGKAFDNPAFLKRSLSKLKYTQRKYSKHKGKRTKYILASIHERVANQRKDFLHKASTQLIRENQSIAIEDLNIAGMVKNHCLARSISDAGWGEFVRQLEYKAEWYGRNILRIGRFEPSSKTCSNCGNINKDLTLQDREWTCSGCETVLDRDVNAAINIKNFALKNHLSAEHRLKNRNELPTLVGVMTSEAATPLG

SEQ ID NO: 24865 - protein, 359 aa, unknown
  TnpB Polypeptide
LAKNKELYELYKEGKIDKKQAFMSAYDFDKYINNEVKILDEFKWINNCGSKARKKAIINAEMAYKRFFKWQSKFPKFKKKKNQDVKIYFPKNNKTDWTIERHRIKIPSLGFVELKEKGYIPTNSKVVSGTVSMKAGRYYVSVLCDIVDRNNYSDSKNEGIGVDLGIKDLAIVSNIDKPFENINKSIVIRKLKKKLNRLQRKVSRKYETNKDGKKFIKTNNIIKLESQIRVIHQKISNIRLNYIHNITNTLVKSKPEYITIEDLNVRGMMKNRHLSKSIQEQCFYEFRRQLTYKCLWNNIELRVVDRFYPSSKLCSECGGINKNLKLSDREYICVECGVVIDRDKNSSINLKNAKEYKIA

SEQ ID NO: 24866 - protein, 403 aa, unknown
  TnpB Polypeptide
VNFILIYKTITVPVNCNKSDYQYLMQCNKYSAIIWNNCVKEDQKSRKEHNKSLTRSELQFMMKKTVPIILANSINMVIFKYITARDSMWKSIKAKHENSKKVKLPYKEKKYFNTGWTHQNIKIYKDKGYLTLSKPVLADEQGIDRKQKPLKCHMREIPDNIVEIELVYRNDLYLLIKTKNINDNILIQSDNEASIDLGEIHSITSIDNNENAIIITGRKLREVKQLRNKHMGKLKSRRSKCTKGSRQYKKYSMAIKRLIYKTDKRILNIIHKTTKYYLDYCIKNNIGKVYYGDLDSCTRNTKKENRGSRKTRQKLNQWNYGLIILELTNKLTRYGIELVKVKEYYTSKKCPVCGSLNTPKGRNYECECGYVMHRDVNGAINILNDNSTYKVTRYKELKYLQII

SEQ ID NO: 24867 - protein, 458 aa, unknown
  TnpB Polypeptide
MVTLAEKVDRPAELAAARTDESAVSAGRIMRTFRTRAYLSKAGHIRFDEVLRQQALLYNAALEERSTAWKRHQKSISCFDQSKSLTQVRADFPDFERAIDRRVQVGTLKRLDKAYQAFIRRLKGGEAPGHPRFKSSLRWKTLEIYSGASRYVRYDAERGKGVVRIKGLPLLRFKDKRLPEGIQPLEIRISRRPNGVYLCLMFDHLRAKPVVEVPEAPVGINAGLSGVRWALSDGTLIDRRRQDNKRKRRLQRKIARQRLGSNSRRKTVSLLGKLSDREKVRNRNELHRFAARLIEKYDHFVVEDLDIKGLAASAKGTVEEPGTGVRRKAAINRGMLEQNWGEFAQMLEYKAEGAGIKLVRVDPSHTSLTCSACGVVKEVTTDRERFATRYRCSSCGAYSLATVNAARNILARGLALSTPSAGESVIAGRASVHEPKSGLPDLRPENHTPLRTDDTAPT

SEQ ID NO: 24868 - protein, 353 aa, Archaeon sp.
MKSGCIMHKSYKYRLYPNKEQRVALEATLDTCRHLYNTSLGSRKLQAELYRLPIEKQWITVKKQSKALPVQKKTNEYLPLVHSQVLQDVLRRVNKSFDNFFRRLKNHEKPGYPRFKSYNRYNSFTYPQTDFKIVGKKLELSKIGEVNIKLHRNLTGKIKTCTIKRDIDMWYASFSVETDDSLPEKTVIKSAVGIDVGINPIVALSNKDKKSPPKFLLQSEHKLAKEQRKLSRKQIGSHNRNKQRIKVAKVHRHVRQQRADFHQNLSRKLVEKYDFIAFEDLKIKNMMRNHHLAKSISDVSWNMLQSFTAYKAEWAGKVVTFVNPKNTSQECSYCGKIVKKNLNIKIHKCPYCG

SEQ ID NO: 24869 - protein, 391 aa, Streptomyces sp.
MDGRAHAARALWNCLHDWWSMLPKGKRCLAAADAAIRQDRKEIDWLGMLPAQAAQAVLKTYFQAWRNCWDGRVGAPTFKVRNRTVMSVDIPQGRDLNITRVHRRWGMVNIPKVGRVRFRWTKELPVGKRARGDDRITGARLVKDTLGWHISFRVQILEAGPEQHTGPDVGIDAGVNLPLALSDGSHQDHGRPPRLADGTADRDKWLNPPEKVKLLGLERRAARRKQHRGRGEKTSRPRHLPALLGMRFHRTGQPQGPGHVRVQGPRLRMVRQRRLGRGPEHPAPVPEGPRARPGCREGSRQTSPWRQARHRKVDGNLPHSRGRTLQYNGTWYDNGSKYFRLSSTGVSKVELTGECETGWRARVRSSYVDSSSGDTVNSTTHGAWKYFTFTS

SEQ ID NO: 24870 - protein, 314 aa, Streptomyces sp.
  misc_feature (314)..(314): Xaa can be any naturally occurring amino acid
MDGRAHAARALWNCLHDWWSMLPKGKRCLAAADAAIRQDRKEIDWLGMLPAQAAQAVLKTYFQAWRNCWDGRVGAPTFKVRNRTVMSVDIPQGRDLNITRVHRRWGMVNIPKVGRVRFRWTKELPVGKRARGDDRITGARLVKDTLGWHISFRVQILEAGPEQHTGPDVGIDAGVNLPLALSDGSHQDHGRPPRLADGTADRDKWLNPPEKVKLLGLERRAARRKQHRGRGEKTSRPRHLPALLGMRFHRTGQPQGPGHVRVQGPRLRMVRQRRLGRGPEHPAPVPEGPRARPGCREGSRQTSPWRQARHRKVX

SEQ ID NO: 24871 - protein, 334 aa, Brasilonema sp.
MFAVKRRLKLNNKEKTFFNGCAGYSRFVYNYRLGLFTEYRRDGGTGGNTKVLDTIKKVFTNHTKKTHKYRWCNDYSSRIYSNAFIALKKAFINWREGRAQAPKFKKRKDGKSFTVDACNGKVLLEAGNKIKIPTLGTFRLHEPLDCSYVSQTFTLSEQAGEWYVSFALCAEKLPIPSHNKWERCGVDLGVKCFATVHTHELGDNVYESPQPYKKAKTKLRRLQWRNKNKVLGSKWIDDPNLGKRKKIYIVPSNNAKKYFKRLARTHGRISNVRNDFLHKSSTELATCHSVIRLEDLNVKGMIQFGKLSSAITDQGFGEFRRQLVYKAALGWWSS

SEQ ID NO: 24872 - protein, 569 aa, Streptomyces sp.
LRTIAPPFTVAAPTGARIRDRLRVDGTDEQVLTLVGQHLGRHQRADFAERLALGLVPVKGNRRAERKKKLTVVSSSRWAGAMTRASEDQYQLSLRCLYGERVALRRAMQAITRRLAVPCGQRRGRVRGYADQNERFQKQRRLQILQRRLAVVEQRLAEGCPAVVVGGRRLLHARHHLAEAGLSLAQWRERWEAARLFLTADGESGAPHGNYTICVDPADGSVTIVLPEPMRHLANAPRGRYRLGSVVAFSHLRQEWLDRVTANRAVRYDIVYDPARARWYLDASWATDTTVPPAPQEIRAAGARLLAVDLNADHLAACVLDPHGNPVGRPVTVPVDLAGPASMRDGHLRAAITALASLAEEHGCAGIVIENLGFTDARTTGRETMGRGQRGKRFRRTVAGIPTARFRERLRGIAYHRGLVVIVVDPAYTSRWGAAHWQQPLQQQNKQTTVTRHHAAAVAIGRRGLGHRIRRRPGVTANDQRIVTRRATGQTGPGPGLRGTTSPPRTTGTPHEGCRTRLNRDDQLVLFPVPKTVRGAPGARCLTPGPDCVARPTPVDHARNGTDESCASP

SEQ ID NO: 24873 - protein, 345 aa, unknown
  TnpB Polypeptide
MDVLVLEREVWNYISSIVFEKKTILSLKTIHNERYYACKEKFPTAPSQMIIRSEKSVLSTFKSIKSNKHKISKAPFRKNLSIQLDKRLYSLKENCNIRITTLEKNYPIQVEFHSYDKLMTMFDNYEVADPKLFVKDNVIWIAFPFKTPVKTNIANQTSTGVDLGINRVAVTSDGIIFRDKHYNGLKRKVRHLKRELNSKNDLRKGGKGKTKAIRRKLKKLSSKEKNISRLAAHRLSKKIVETSSGNVIVFEDLKGIKKSTKKSKKFNNKQSQIPYYMIKEFTTYKAQLSGKKVVTVNPAYTSQIDFRTGNKDGERQKGRYVGSDGKILNAASITSSKCSVVYVSC

SEQ ID NO: 24874 - protein, 314 aa, Oscillatoria sp.
LVKYVKPKEAAKALGVHERTLCRWEKEGRIEAIKTPSRQRRYNIESYTSKSIGRYRGAKTVIYARVSRRDRQPDLNRQVAFVSAEPIPSACEQGTQFIFSGKRWFAIFPEPAQMSPTKAEGGIALDPGVRTFLTSFDGRKFLEFVNGDIGRITRLCQHLDNFVGRIAKESKKRRRRSMRRAAQRMRGKIRDLIDEAHKQIAHYLIRNYRLIFLPAFETSGMVARAKQKIRSKTAKAMLTWAHYRVKMTLKHQAELTGTTVVDVTEEYASKTCTRCGHVHSHLGGSTIFHCPTCGFTLPRDWNGDAWDLPESFAG

SEQ ID NO: 24875 - protein, 395 aa, Mycobacterium sp.
MRRSYVFRLRPTARQHVSLGRCLDAHRELYNAALQERRDAWSHNQTRIYYGDQSAQLTEIRAARADHAVWSFSSQQATLRRLNKAFDGFFRRVKTAKPGVKSGYPRFKGKTRFDSVGWPKDGDGARWLPESKRVYLQGIGQVKVELHRPVAGRVKTIQVKRQGRRWILVLSCDDVADNPLPATGRQAGIDVGIASFAITSDGEHIDNPRWGRAAADELAAAQQRLQRAKRGSKNRQRRRQTVAARHRKVANQRKDFHHKQARALVESYDVLVVEDLKIVNMVRRAKPVPDPDNPGQFHKNGTRAKSGLNRSISDASWGGFVSKLRAKAEEAGREWIEVDPRHTSDGCEKCGYAARENRVTQAEFVCQRCSHRAQADEHAARNILRAGLALHANAA

SEQ ID NO: 24876 - protein, 500 aa, unknown
  TnpB Polypeptide
MQRTVRRTSLPVNKQKWNELNRLAEQYAEEKNIHVRVFNSGRYFSVCRSDRTRRDNLVKTGYVSHLQARMWKTALKDGYETVVKYHAGQAVSLRQKVGRKDWTDNQKRYAYWLSYTSSRIAGFLSGNAPVPEHFRTEYQERKPVINYLRRHARQENGKKPSVKSARSVCLDSDMYSVFVHNGVQYIRIMGLIKGKRIVIPLTGSTPIKGNIRIVLDKDRQRIEVHYTAEIKTKKLMGKPCALDAGITEVFTDESGNRYGTEFGKVTGNASESLKVKGRHRNRLHQIYKKKKNKNIKKFNLGRKKQKTEKKKLRSEFARQINTATNSVARKRKPAAVITERLDIRGKAKSKKMSRLVSMWTRTILNDRMEFKALAEGFCHKQVNPAYTSQTCPFCGYVHKNNRKGDMFQCLKCGHADVSDRIAAINLLARYNDPEITLYTPKEQVKSVLDRRFIAGWKAGNSDCSGQDFNPAAKPGKERNCRRQLNKNSGHEHIQLHLNMF

SEQ ID NO: 24877 - protein, 381 aa, unknown
  TnpB Polypeptide
MPAQKLNRAIKYRAYPTDEQAELFAKTFGCVRLVWNNMLADAQRFYDETGELFITTPAKYKKRFPFLKEVDSMALCNCQLDLKGAYHKAFSEPGVGFPNFKSKKKAKCSYTTNIHVGKKKDGSRSATIYVGKDFVRLPKVGDVKICKHRSPKNGWHVKSATVERTKSGKYFITVLFEFGDVIVPVEVKSSIGLDYSSHDFYVDSNGDVANYPRFYRRTEAKLAKEQRKLSHMKYGSKNYEKQKHKVQLLHEKVANQRRNFCQELSTAITKRYDAVFVEDINLRNMAGSLKLGKSTNDNGFGVFRNMLEYKLRDNGKVFAKIDKWYPSSKMCHVCGTLNEKLTLSDREWTCTCCGTHHDRDHNAAINIRNAGLQMMQRSVSA

SEQ ID NO: 24878 - protein, 450 aa, unknown
  TnpB Polypeptide
MKTVKLPITLDKESKELLTTLRRQQSTVIRTSYKSFLVNITEKEIKTKLKSYNLTNIDSWFIQSGIFKSKSLVKKSNNKTIIFGGKKNWYDFQEKKITKEEFKEKRLSPLVSIGEALSNGNRKFSLDIVENNSIIFKPKCGTKIRIELPKLKKNLKKELFKLEELCKNKQVPFSIELYNDNIFISYELNEIQRLKSIIKRPITKKETRDKAKETLKKLVKPKKSNRIIGIDQNPNYIGLSILEFDKKDKFKIIHKEVVSFKELNSKKKYNNNKKKHELIHICKYIVNLAEHYKCGKFAVEELKFDKKLNGTVLNRLCKNVWHRTLLLDQLTKRCNESDIELVEVNAWYSSFVGNLIHGSSSCPDMVASSVEVARRGYNKYTKGWFYPELKSSYLKNQWKKDLDSNDLESWIKLYNKLKEMKVKYRFSLSENLEFFRNSSHKSNVDRFIFV

SEQ ID NO: 24879 - protein, 409 aa, Streptomyces sp.
MIVQLRYSFRLYPNGPQRAALGRAFGCARVVFNDALRARKSAHERDLPYPKIGDLSKRVITEAKKTEARAWLGEVSAVVLQQSLRDLDTAYSNFFASMKGTRKGPKIAEPRFKSRKDNRHTIRFTANARWKITPGGDLVLPKIGDVRVKWSRALPSIPSTVTVVKDAAGRYFASFVVETGPETLPEVTPQVGIDLGLGHFAVLSDGRKIDAPRFLRRAEKKLKREQRRLSRKAKGSNNRDKARVKVARAHAQVADARREFHHQLSTQIIRENQAIAVEDLAVKGLARTRLAKSVHDAGWSSFVAMLEYKAQIHGRKFFRIGRFEPTSQVCSACGVQDGPKPLHIRVWTCGACGTVLDRDINAAVNVAKAAGLAVSACGAQVRPGLVPAQRVEAGTHRDGQPTVVGIPAL

SEQ ID NO: 24880 - protein, 358 aa, Acidobacteria sp.
MILVAKVKLLPTTDQSVILRDTLEQVNAACNWLSEQAWEQKVFQQFSLSKLFYYPIREKFGLSANIVVRLIAKVADAYKKDRRSLRHFRSHGAIDYDDRVLRWYVTKAEVSILTVDGRQHMPFVCGEKQRRLLEQRQGQSSLALVDGKFYLLACCNVETPDPSDVKDFLGVDLGIVSIATDSDGTTYSGAEVNGLRHRHRRLRQKLQTKGTKSATRLLKKRSGKESRFAADVNHKISKSLVATAQGTGRGLALEDLKGISGRVSVRKSQRATLHSWSFFQLRSFVGYKSALAGVLLVTVDPRNTSRTCPSCGHIAKANRPTQAKFLCVSCGFSGPADHIAAINIGRRAVTDQPYAAVA

SEQ ID NO: 24881 - protein, 466 aa, unknown
  TnpB Polypeptide
MGEEKTQVHLIKINLSKLETSILEFICKRSSSLFNQALYFVKRNHSMTHPGNLPNVPYEEIAGSLKDEWNYMMLYSQVPQQTLKSVAEAFKGYKALIQLWREGGLKDEPRQPHFRKKGGLYPCTYPSQALTFDLEQPFVRIPLGLGFAELEGIKELFIPAPTSLKPEQIVELSIVPRNRCFYAAYTYKTIPPKLAIELDKSKALGIDHGRDNWLTCVSNTGDSFIVDGRHLKSINQWYNKRIATIKEGKPQGFWSNLLSAITEKRNRQMRDAVNKAARIVVNRCLEQGIETIVFGWNEGQKQRSDMGRKSNQSFVQIPTAKLKDRIKQLCDFYGIQFVETEEANTSVASFFDSEAVASTRASGDSLPKHGEKPVGWEASGRRVKRGLYRTGAKNWYINADANASANILRKVSAMLGLDLGGVCRRQLTALARLTFWHDSSKNPLQSVTRLKESPHMNGRGVVNSSV

SEQ ID NO: 24882 - protein, 518 aa, Thermus sp.
MAMGQSYFQGVQAKLIFLHEEDKRAVLDLMRRFSSAHRFAYNRLLEGWSRKELKKQDGPLCALFDLNTRYAGDAILKAEMVLSSARERGENPRKVIFGGRKLFLDLQKKHNPKLLKKRKQEWKEKRQGLLYSRGDKAKGGNLNLRLEVEKGALWLRVNLGNGTYAYALVQTSHPNLGQLLQRVYAKEPYNVELNLRNGQVYASFTWEEKAPPLVHTKDKGVLALDVNADPYHLALALVGPDGNLLRYSTLSLEEVDQAQSRGAKETLLWTMAHKVVDFALASGVAIATERLKYLRKSRRGDGSGRAFRRWQHRFAYASLLNKIHTLAKKRGVEVVQVNPQDTSTIGMLKYAPQLSLSKDIAAAYVIGRRALGFEERLPKNYRALLEDPRFRENGEAFYREKAKELRERRKHEKNPYLKRRWSRELRKAERALLLISSQGSSGSREGSTDGRNPYGANPWRVLRVGLLLPLLGHEVPRDLSPLKPVLVQGLWEGRKAGLGPPLPVGGRSLRADAVNDSA

SEQ ID NO: 24883 - protein, 516 aa, Thermus sp.
MGQSYFQGVQAKLSFPSEEGKQAVLNLMRRFSSAMRFAYNRLLEGVSRNELGRIDGPLCTLFGLNTRYAQAAVMRAEMTLSSARELGRDPRKVVFGGRGLFLDLQKKHDFKRLKRRKQEWRERRQGLLYARGDKTKGGNLNLRLEVKDGALWLRVNLGNGTYAYALVQTSHPNLGQLLQRLYASESYNVALTLKDGQVYASFTWEEKAPPLVHTKDKGILALDVNADPYHLALALVGPDGNLLRYSTLSLEEVDRAPNRGAKETLLWTVAHRVVDFAATHGVAIATERLKYLRKSRRGDGSGRAFRRRQHRFAYASLLNKVHSLAKKRGVEVVQVNPQDTSTIGMLKYAPQLSLSKDIAAAYVIGRRALGFEERLPKHYEALLADPHFRENGEAFYRERAGELRERRRHETNSYLKRRLSREVGKAEKALLLLSPQGSPGSRKEVTDGRNSYGANPWRVLRVGFFLPLLGREVPRDLSLLKPVLVQGLWEGWKKGPRSSLRWEGRSTRVGAVNGSS

SEQ ID NO: 24884 - protein, 414 aa, Halobacteriales sp.
MEMRRTAVVKLDVSDDQRDALHRTAEQYLHCANRTAAFCWNDDSFTKCKTNKRQVRDALYADLREETELQAQLVQAAIKRAVEAVKACAERWKKGQRVSRPTFTSETMDYDPRSGTFYRRKVSLATVDGRIEPSFVLPSDSPTPYEQYVLSEDYEFRESTLRYDPTDDDFYLHISTRRYASDSSEVSEDAGHQTVLGIDLGVNSLAVSSTGTFWQGDEYDHWCRELEKRREEMQQKGTQAAHNAIQRLGRREEAWRKQYLHTIGNEIVTEALDTGCDVVVFEELTDIRERLPQAQWHHVWAFRRLFEYVSYKAAERGVSVEQVEPNHTSTRCSRTDCGFTHEENRHGENFCCQKCGYEVNADYNGAKNIALRYARKQTHRLRSSPTSGGGDAPVDVRIPGGMLNGDGFQRIAGT

SEQ ID NO: 24885 - protein, 447 aa, Dolichospermum sp.
MPKVQKFMGVQQVLLSPDHEMKAILEYLCQQSGKLYNSGVYFARQTFFKTGKLLTGKFDLAYEPSVAKTMIAQSMPSTPAQQTLLSVIEAFKSFKGLRSLFLNGQLPFKPKAPGYLTGSKLFKVAYPNSGGQRPTLINGQLRFSLGLTVKRWFGISEFFLPMPLNIDISKVKEFTILPKNGAFYLEMSYEVEKQNHVLDINQALSIDLGTADNLAACVDTLGNSLLIDARAMKAMNQLWNKKVSTRKDGKPEAYWDNWLDRVTRKRNHQMRDGINKAAKLIIDHCLKYGIGTLVIGWNDGFKSNANMGRINNQKFVQMPLGKLKTRLMQLCDLHGIRFQETEEAYTSKASFLDGDSLPKFGVSEAGRSPKPDGWKASGKRVKRGLYKSGNGSLINADLNGAANILQKVASNLGIDLSLLGRRCLTNAARIRVWVLPKSILSVESQSL

SEQ ID NO: 24886 - protein, 222 aa, Dolichospermum sp.
MIIYEFKVKGKDKQYRAIDEAIRASQFIQNKCLRYWMDNKGATKYDLNKYCAILASEFPFADELNSMARQSAAERSWSTIARFYDNCKKKVKGKKGFPKFKKNCRSVEYKVTGWKLSETRKAITFSDKKGIGTLKLKGTYDLNFYDIKQIKRVRLVRRADGYYAQFAIDVKIRIESQPTNQIVGCINILKLGLTTVGIRSATLQEICPLGRLVQTCRLTASL

SEQ ID NO: 24887 - protein, 443 aa, Dolichospermum sp.
MLRVVKVRLYPDVQQQQSLAQAFGSCRWLWNYFLNLMNQTYQETGKGLSGYEVKKIIPQLKKEHEWLSLTYSQCLQQVCLNLGVAFNNFFEKRAKYPRFKSKYGKQSIQYPQNVKVSASLNLDPERSRRVKITDNQLILPKIGKVSAIIHREIEGKIKTVTITKSCSEQYFAAILFDDGQEKPESIAEGKAIGIDLGLTHFAITSNGSKFDNPRILNKHDKNLKIKQQQLSRKQKGSSNRNKARKKVARVHRKITNCREDFLHKLSRRIVNENQVIVVENLHVKGMMQNHCLAKSIQQVGWEMFCTMLKYKAENEGKIYQEVDRFFPSSKTCHVCLNQVGSLPLDIRFWTCGKCQATHDRDINAAINLRDEGLRILRLRSVQVLTSGTGDKAMKCGLGGFPHEQLHQEACRPEVSRSHRGRKKSTTALSVGQEADTVPSGQCG

SEQ ID NO: 24888 - protein, 417 aa, Dolichospermum sp.
MLVLEYKVKGKQHQYNAIDDAIRTTQFIRNKAIRYWMDAPRELKIDKFALNKYSTELRSDFTFAAELNSMAVQSAAERGWFAISRFYDNCKSKKSGKKGYPRFQKDCRSVEYKTSGWKLHKTKRRITFTDKKGIGELKLLGKWDIQSYELKDIKRVRLIRRADGYYAQFCIGIDVVDIQPKTGNEIGLDVGIESFYTDSNGHHEPNPQFLRKAEKSIKHSQRRIYKKVKGSSCRKKARKLYAKKHLKVSRQRIEHAKKIARNVCKSNDLVAYEDLRVSNMVKNHCLAKSISDASWYLFRQWIEYFAVKFDKITIAVAPHYTSQKCSSCGVIVKKSLSTRTHNCSCGCELHRDTNAAVNILNLAKNRELSEVVSEPCRTVETRGGHPRINATGVETATLLGVSLVEQVLTMNVESPCL

SEQ ID NO: 24889 - protein, 242 aa, Dolichospermum sp.
MYGCQQILISPNKELGAILEFLCGESNKLANCGTYYARQLFFKTGKIPGKFDLHRELASNSHFGAMYSQAAQQCLTTVAESFKSYIGLLKGIKNGTVTQKPKLPGYRKGGLNLVTFPGQAIKLKDGKLRFPMGSRVKVWFGLDAFYVPMPSNLEHKDIKEYRILPRNNEFYLELIYKITSHKPDVNIENVLSIDHGLNNWLTCVSNVGTSFLIDGRKLKSVNQWYNKRVSVLKENQSFWFLV

SEQ ID NO: 24890 - protein, 408 aa, Dolichospermum sp.
MIIYEFKVKGKDKQYRAIDEAIRASQFIQNKCLRYWMDNKGATKYDLNKYCAILASEFPFADELNSMARQSAAERSWSAIARFYDNCKKKVKGKKGFPKFKKNCRSVEYKVSGWKLSETRKAITFSDKKGIGTLKLKGTYDLNFYDIKQIKRVRLVRRADGYYAQFAIDVKIRIESQPTNQIVGLDVGLKYFIADSKGNVEPAPQFYRKSEKQLSRANRKKSKKFSRDKKKAKQPQSKNYIKAKNRYARKHLRVSRQRKEYCKRLAYSVIQSNDLVAYEDLNIKGMARNRHLAKSISDAGWATFRQWLEYFGLKYGKATVAVPPHNTSQNCANCGQKVKKSLSTRTHNCHHCGFVEDRDINASINILRLGLTTVGHTGSYATGDLPSWAIGANLSSNGESVNVESPRL

SEQ ID NO: 24891 - protein, 433 aa, Dolichospermum sp.
MVKNKPLMGVQQVLLSPDKDTKAILEYLCQQSGKLYNSGVYFARQTLFKTGKLLTGKFDLIYESTVSKTRLASSLPSVVAQQTLISVSEAFKSFKELKNKFNKSELLFKPKPPSYLEGSKLFKVAFPNTGAGKPTLENNQIRFPLGLTVKRWFGISEFFLLMPINLDFSKVKELTILPKNGAFYLELSYLVEKKITDLNISEALSIDLGTADNLAACVDTLGNSFLIDSRKLKADNQLWNKKVSTKKEGKSSDYWDSWLDRVTRKRNHQMRDGINKSARLIIDHCLKNKIGNLVLGWNDGFKLNSNMGNLNNQKFVQMPLGKLKDRLNQLCCQYGINFHLTEESYTSKSSFLDGDSLPKYGVSEAGRSPKPQGWKASGRRILRGLYLTGEKFLVNADLNGSANILKKVTGKLKLNLSKLTRRCLTTVTRIRLN

SEQ ID NO: 24892 - protein, 294 aa, Dolichospermum sp.
MIIYEFKVKGKDRQYRAIDEAIRASQFIQNKCLRYWMDNKGATKYDLNKYCAILASEFPFADELNSMARQSAAERSWSTIARFYDNCKKKVKGKKGFPKFKKNCRSVEYKVTGWKLSETRKAITFSDKKGIGTLKLKGTYDLNFYDIKQIKRVRLVRRADGYYAQFAIDVKIRIESQPTNQIVGLDVGLKYFIADSKGNVEPAPQFYRKSEKQLSRANRKKSKKFDRDKKKAKQTQSKNYLKAKNRYARKHLRVSRQRKEYCKRLAYSVIQSNDLVAYEDLNIKGMVRNRHLAK

SEQ ID NO: 24893 - protein, 424 aa, Dolichospermum sp.
MLSYHRQLHKDLYNAAISNRITSYKKFGKSVSYFEQQNCLPDFKEVWIEYKAINSQALQATLKRVDFAFQRFFKGLAKYPRFKSIRHYSGWTYPSFTGWKVHSTGDNGYLELSKIGQIQMRGQARLWGHPKALDILNRNGKWYASIVLEIDDVLLHNSRKTDDGIIAIDLGCNDAIAWTNGSENGLVQAPRFFRKAEQRNKQLGKAKRRKRAPNFKRKIKASRRWKKTTKLVSKLNRKVANQRQNFVHQETTRIISSNSTVVTEKLEVKNMSAKAKRGKRKKQKAGLNKSILDVGMGMIKDALKAKLSDIGGLFVEVPTKKVKPSQTCPQCGNQEKKTLDQRIHVCHNCGYTQQRDIAAAEVMLLWYSNNLPGLGTSLVDVDDSSSTSNTSKRKNAGSMKQLGQKKRQKSQLTDGDVETPSSTK

SEQ ID NO: 24894 - protein, 298 aa, Dolichospermum sp.
LRFPLGSKVKAWFGIDAFYIPMPSNLDYKSIGEVRILPRNRCFYAEFVYQQDIKSSEVDASKVLGIDHGLNNWLTCVSNIGTSFIVDGLHLKSINQWYNKSVAKIKENKPQGFWSNRLAAITEKRNRQMRDATNKAARIVINHCSDHKIGTVVFGWNVEQKDSINLGSKTNQKFVQIPTAKLKNRIAQLCEQYGIKFVETEESYTSKTSFLDNDFLPTFGAKPEGWKESGKRISRGLYRSQDGTKINADCNGAVNIIRKVAAIFKFDLIGVGRGCLSQPTKVLLRTLQKSPRLQTGEA

SEQ ID NO: 24895 - protein, 405 aa, unknown
  TnpB Polypeptide
MSKANKSNKAIKYRLYPNDEQKVMFAKTFGCCRFVYNQLLALQKQRYKDGESHLSKLKSNEFATRTLKKDYDFLKEIDKFAVSNAVFHLADAYDRFFKKQNHFPKFKSKRKSKKSYTTNFTNNNIELKMIDGIPYVKLPKIGNVRFILPRGKTLIDIQPQEVSIKGATVSREPDGSYRISLRMESVIDKPVFPTVINAREIVSVDLGLKEFGVFGNLEESVPVPNPRWIQVHAKRLRRFQQSLSRKQYDQNTHRGSKNWEKARAKVAKEQRKTADQRRDFHHKLARAIADNYTAFICEDLAVKNMMKNRHLSKAIASVGWSQFLTIVKYKMEKAGKYFRKVSRWFPSSQTCRCCGYKNTEVKDLKVREWTCPQCGTWHDRDENAQKNIHAEGLSILKSEGIQIIM

SEQ ID NO: 24896 - protein, 379 aa, unknown
  TnpB Polypeptide
MISYKYKLYRTDKTKHLDKMLREAAFVWNHALALQKRYYRMYGKYIGINRMRKHFAKRINRNLLHSQTVQEILDRLDDAYLRFFKHLAARPPKFRRAKDFSSFVFRQGGYSINGNVLTINRIKKRFKFSLSRPCDGKVKTLTVKRSPLGEYFIIMVLDKAPVSLGKTHNGASVGIDFGLKTYMTMSDGTTVENPQFLKSGLRQLQRKSRNLLKCVPGSHNRERKRQDLDRHHEKVVNQRNAFQWRLAHQLCRQYDRIFIEDLQLTGMTALWGRKMSDLAHGEFVTKLEYVASKYGVIVHKIDRFYPSSKTCTCGYVNKQLQLKDRQWTCPECGAVHSRDLLAAQNILRQGIAELESTSKTPSTRMAHVRLHPRISSLQG

SEQ ID NO: 24897 - protein, 367 aa, Holophagaceae sp.
MKRTASLKLLATPRQTEAFSALANLFVEACEAIVPFVLAHRCWNRVALHHLVYYPLRERFPALGSQMVCQAIHRVADAYKTLRANEGIPKDQPVPALKFAPASVNFDHRTYSIKGDTFTLFTLVGRTSVGFACGSLQKALLEAGKPKEARLIERKGTWYFNLVFDLPDPTTLPGAVAMGLDVGENNLAATSTGKVFGGEKLRDKRDRYLAKRRRLQSNGSRASKRKLKAISGREQRHVRHVNHEVSKAVVAQALQAGAPTIRMEDLTHVRDRIKAGLRVRTRLHRWAFRQLQDFVRYKAIAAGIMVEFVDPAYTSQTCNACGRLGKRVKHRFTCSCGNLAHSDVNASRNIARFAKLSSSARGVVNRP

SEQ ID NO: 24898 - protein, 521 aa, unknown
  TnpB Polypeptide
MNPGMPKGEAPKLFLDVHARLVFPDHRDEAAVLDLMRRFSSATRFAYQRLLEGKTREELKRENGPLCRLFGLNTRYADGAIEKAQATLDSAKELGQDPRKVVFGSREVFEQLKRKHLSGKALLALKREWKERRQGLLYSRGDATKKGNANLRLEPGDGALWLRVNLGDGSYAQALVKTAHPQLNALRERVYASLPYNVTLRLEDGKVYAHFTWSERLPPPVHTKANGVLGIDVNSDPYHLALAVVGKDGNLIRHHTLSLEEVDRAPNKGAKELLLWKVAHQVVAVAEEHGVAIATEKLKYLRKSRRGDGSGRLFRRKQHRFAYRALLEKIHSLARKRGVEVLEVSPKDTSTIGMLKYAPLPHLSKDVAAAYVIGRGALGFEEKLPKGYEALLKDDAFLAHVHGFYGNRLQELQSLRGAEKNPYLRRKLSRDIGKAKAALTLVSSLRGSPGSRKGVTKGRNPSGAHPWRVLRVGLFLPLLGLEVPRDLSPLKPILHGSWKEWKIGLGPHPGGGPGCTNVHFY

SEQ ID NO: 24899 - protein, 411 aa, Sporolactobacillus sp.
MPDKQKIAIKERMAEVKEQFKYVSGFRVRVYPSAQQADIMRFNANTSRYIYNALVFREWSTKKHAKWLNNDKRLDTNMPSLANAAYQSAWNRWRKVNNAGTPKPKRKDSYRLSYQTKNSYVAKARIAGYDIFNGSKVRVVDSHHIQIPKVNVLKASANNIKHLPREKGIRIGITTIKQEPNGNWFISFQVKSDHPFKEKLVKTNKAVGIDLNLSNFLTQSDGKVVENPHFYKRIKGQIAKAQRVVSKRAVRAKKEKRALRNSKNYQKARLRLSELQNKVARQRLDFLHNVSTTLIKNHDVVVSEELRGKNLLKNHALAMSISDVGWRTLINQLDYKAKLYGRIYLPVNPAYTTKTCHVCGEINHNVKLGMEEWMCPHCCTFHIRDHNAAINIKRKGLLILSKTGAVATSES

SEQ ID NO: 24900 - protein, 382 aa, Gloeocapsopsis sp.
MINLTYEYKIQPTRQQEQTMLRWLEVCRKVYNYALAERKDWSNSRKCQVDSCSIKHEYIIPADAPYPNYVRQCRSLTLAKEAIAFLREPPAQVLQQALATLDKAYDSMRVRGFGFPRFKKTMHSFLFPSLGKSPLVGNALTLPKLGTVKIRLSRPLPDGFVLKQCRIVKRVSGWYAMLVLQCDVNVPQPMPHGELLGIDLGLTSFVATSNGKLVHRPKFYVDAQSKLRLLQRNLKRKTKGSNNWTKYQTRVAKLHEYISNCRKDYHFKVAHHLCNQVGMIFAEDLNLKALASGMLCKHTLDAGWGQFLQILEFVCWKRGIYFARVDARGTSQTCPICDTHTGKKPLSQRVHHCDSCGYHTDRDVAAAQVVAKRGIAALGHRV

SEQ ID NO: 24901 - protein, 179 aa, Okeania sp.
VINGKPLKSINQYYNKVKSLLQSQLRESKSSLRLKKLCNKREFKINDYLHKASRLIINTLINQKIGTLIIGHNEDWKQKINLGKRNNQNFVCIPYNKLIEMLSYKAKMVGIDVIITEESYTSKASFIDNDFLSVYKKDKKNQVTFSPKRVKRCSAVLGVSPMSDCIKTKRNAIVLPAKD

SEQ ID NO: 24902 - protein, 546 aa, unknown
  TnpB Polypeptide
MSDRPICTYQTRPVLGADQVLVLDAYAELYGRAERSLFAAMQAGGSINDLKRAFQPRFQITARQFNAIRVGLEGKIESIKARRPELITELESRIKKAAKVVAKLSLKPSAAAKLHQKKRRLHILRTKLSSLQGDHKSGAVRLCFGSKRLFNAQFDLAVNNYATHEQWLSDWRASRANQIFVLGSMDELAGNQSCQATVACDGSLTLQLRLPDAMRASHGKYLTISGVRFAYGHEAITAALASSQRVASVTKAGKSTVKRIGSALSYRFVRDDKSWRVFVSCEAAPVQTTTKSALGAIAVDINADHLAVSEVDRFGNLVELQRIDLHTYGKTTNQAKALIGDATVAIVALASKTGKPLVLEKLNFAKKKTELEGTHARHARMLSSFACNKVISGLKAAAFRAGVEVIEVNPAYTSVIGAVNHAQRNGISVHMGAAVAVARRGLSLSERCPKREATVPTRNGGHVTFGVPARNRTKHVWSQWGKVRSSLKAAHVAHGRSGLPKGMPAPLSPEMRALSATRPFTAKSRDANRQHNCSVGVHGQLADVPF

SEQ ID NO: 24903 - protein, 375 aa, Firmicutes sp.
MITAPKVRLEPNNKQTSKLFQSAGTARWAYNWTLAKQEESHKSGGKFINDRDLRKELTILKQTKEFEWLNKYSNNITKQAVKDACDAYYRFFKGLSEKPKFKSRKKSQPRFYQDTHKIKFKDGKARLEKIGWVRLSEKDRIPENAKYTNPRVTFNGVHWYVSVGIEIQSESVELTGESIGIDVGIKDLAVCSNIEKPYKNINKTKKIKRLEKKLSRFQRKVSNKYENNKKGESYVKTGNIIKLEKDIRKLHKRLDNIRTDYRHKVTTEIAKTKPSRIVMESLHVSRMMKNKHLSKAIQQQGFYEFSRFIQYKAERQGTEFIEADKWYPSSKTCSVCGHVKTKLSLSEREFKCEYCGAVIDRDKNASINLSRYRVS

SEQ ID NO: 24904 - protein, 359 aa, Marinithermofilum sp.
LQLSRQFYLDNGKWITKSELQKATKGRFHLHSQSIQAVCHKYLFARDSAHQAIQKGIKTARYPYKKKTHYNTKWAKDGFKIHANGKIELSMGIHDGKREKPITVYTKNLPKGIIKEIELCYDNGLYLSIAFEDGKENQPYKKKLSAGVDPGEIHTIAAFCENGEALILTGRKVRSIHRLRNKKLAEIQRLQSKCKKGSRQWKKYQKAKRYILSKSEKQLQDALHKTTKQFVDWCVEQSVSDVYIGNPEGVQRKTRKKKKATRKQAQRLSNWSFGKVKKYLQYKLAMMGIQLHQVDESYTSQTCPVCKRRQKVSSRIYRCSCGYQEHRDTHGARNILSKSLYGEIQHLDVPTKQTYLRIA

SEQ ID NO: 24905 - protein, 362 aa, Marinithermofilum sp.
MLRTYKFRLYPKPEQQERIDFTLERCRLLYNRLLDERIHAYRTEAKTLSYYEQKKTLPARKKAIPPLKEVYSQVLQNVVERVDKAYKAFYRRVQNGEKAGFPRFKGKNRYRSFTYPQSGFVVEGKYLKLSKIGEVRIRLHRQITGTIKTCTIVRKNGRYYACLVAELDLQPLPKTGKEVGVDLGIKHLAVTSDEQFFASPHFLRRSERRLKQLGRLVSRKKKGSHRRQKAVRLLANMHEKIANQRKDYAHRISHVLVKRYDLIAFEDLNVQGMTKNHHLAKSIVDVGWRQLVQYTTYKAESAGKRVVQVNPHQTSQRCASCGEIVKKTLAERVHRCPFCGYEQDRDVNAAINILQLARQKAS

SEQ ID NO: 24906 - protein, 422 aa, Acinetobacter sp.
  misc_feature (337)..(420): Xaa can be any naturally occurring amino acid
MKTLKLRIKDRHYKVLDQLASEVNFVWNYVNDLSFKHLKRKGEFLSSYDIDKYTKGASKECGLHSQTIQAISAELVTRRKQFKKAKLKWRVSNKKSARRSLGWIPFKKVAIKYADGFVQYGKHQFKIWDSYGLSQYSIKTGSFVEDARGRWYVCLVVDSPKTEKSTGTKAIGIDLGLKDIATCSDGTVISNPKFYRQYEQKLGIAQRAKNKKCVRALHAKIANSRKDHLHKASTELVRENALIVVGDLSAKKLVKTKMAKSVLDASFSALKTMLKYKCENAGVMFEEVNERFTTQICSCCGEITAGSPKGRADLRIRVWECECGSVNQRDLNSAKNXXXXXXXXXXXXXXXXXXXXXXXXXXXXXXXXXXXXXXXXXXXXXXXXXXXXXXXXXXXXXXXXXXXXXXXXXXXXXXXXXXXXMA

SEQ ID NO: 24907 - protein, 433 aa, Natronolimnobius sp.
MEDVIRTVKVKLDVPTERCDDLHQTKDQFLHCANTTADWAWRYPHDYCITSKQSAENALYDRLRSETELTANLVQKGIRRAIEATKSGVARLKDGDKTSQPHFDTWSVVYDKRSATFHRDHVSLSTVNGRVECDYVIPTKPEGTPIGEYLLNEDYEFRMSTLQYDRSTESFYLHARMRRLERDDREQSTASSDTKHRTVLGVDLNVDGSLAVTSTGVFIGNADEMNHRRRAFEKTRGSLQQTGMRSAHLSIQSMKDREHRWMQDELHRASNQILEEARDHDCTHVAFENLTGIRDRMAGAKRFHAWAFRRLYHYVEYKAEMFGIETEQVSPAYTSQRCSSCGFTHESNRQSKHQFVCQKCEYELNADYNASKNIARKLLKKLHSRQKSSSGGAPCQCALTSGTLNLNGDYTASVNSTAEGESTDKPTTSVVGY

SEQ ID NO: 24908 - protein, 429 aa, Natronolimnobius sp.
MKYSPRFCLFPTTQQRKLLEENVDIVRQLYNDRLKRFKEIPENAGTLTQRVRMARDELPELKQWWDDLNDVYSTVLQTATMRIRDNKRSLQELQKNGYDAGELRWKPPREFRSFTYNIRGFELDKNNGPSGRGVLTLKRVAGENIDVPIRLHRDLPDGEVKQLTVKKEPTGAWYASFTVETDDPEKPSIEDITPDDCIGIDLGVLSFIHDSDGRSVSCLDLTEDRERLEREQRSLSRKQRGSNNWEKQRRQVAQVHDRMSNKKHDFKHKLAHFYTTEYDAVFLEDLNVKGMLEEDGNARNKHEVGWRDMISVFEHHGEKNGCYVELVDPAGTTKECAHCGSETRKPVWVRTHDCPTCGVEMDRDLNAACNVLERGLKQLGVVHSEATPVETATAVSTDGCGFSASNQVDASRVVEAGSPCLKEAASAAE

SEQ ID NO: 24909 - protein, 449 aa, Blautia sp.
LWERGKKMRTVSSYGAEIRKPNIPLRLTMKTYRQAVSYLTEIYMQVWEELREIPETKKRFNAAEHMVHTTKKNTARFDFDLCFPKMPSYLRRAAIQHALGSISSYETRLEQWTKTGKLTGKPRLSCENHAMPVFYRDVMYREGGEGKDEAYLKLYDGHDWKWFRVCLKHTDMEYLRRNWKGKKASAPTLEKRQRRYFLRFFYTEEVTLTKTAVEEQIICSVDLGINTDAICTIMRSDGTVLGRKFINFPSEKDRMYRVLGRIRRFQREHSSVQAGGRWEYASRLNAELARKIAGAVSAYAEEHHSDVIVFEYLEMQGKIAGNKKQKLHLWRKRDIQKRCEHQAHRKGMRVSRICAWNTSRLAYDGSGAVLRDGKNHSLCSFSTGKRYHCDLSASYNIGARYFIRELLKPLPATERSLLEAKVPSVKRRTSCVYADLRELHLQMEILKAV

SEQ ID NO: 24910 - protein, 111 aa, Clostridioides sp.
VEKAYKFRMYPNKKQQELINKTFGCCRFVYNKYLAKRIDAYKNNKETFTYKQCSSDLTNLKKELKWLEEPDKFSLQNALKDLDNAYEKFFKKRQDFLNLNQRKIKTNNNSK

SEQ ID NO: 24911 - protein, 251 aa, Clostridioides sp.
MYCGQHIKLPKLGMVKISDKQVPKGRILNATISKEPSGRYYVSLCCTNVDIEAFENTNNQIGLDLGIKEFCISSCGEFIENPKYLKKSLNKLAKLQRELLRKTIGSLNRNKARLKVARLQEHIANQRNDFLQKLSTKLIKENDIICIEDLQVKNMIRNRKLSRLISDVSWSEFVRQLEYKANWYGRQIVNVGKFFASSQICNKCGYKNEEVKDLNIREWICPSCNETHDRDINAGMNILKEGLRLITIQNK

SEQ ID NO: 24912 - protein, 365 aa, unknown
  TnpB Polypeptide
MLKALRYRLYPTKAQASQLAWTLGTCRQVYNSLVNDRKFQYEVNGKARSWVEQKRSITAWKPNHPELSDVHSQVLQDVSKRVDLAFQAFFRRVKAGETPGFPRLKGGGYDSFTYPQSGFGFQQGKLHLSKIGDVAIRLHRSIDGNIKTCTVRRINSKWFVCFSAEYEPELLPPSTEAIGIDVGLKTFAALSNGENIGNPRFFRAEEKALAKAQRKLAKQKRGSRERKKAKKVASRVYERIRNRRHDFVHQTARKLVNRFGVIAVEKLNVRGMVKNHCLAKSISDASWSMFRTVLTNKAESAGRVVVAINPAYTSQMCSGCGNIQKKPLSVRTHKCLSCGLVLDRDTNAAVNIKALGQQCLPASTG

SEQ ID NO: 24913 - protein, 406 aa, Nonomuraea sp.
VSVRQGYRVELAPTRGQRARLGQHAGLSRVVENFCLEKVKAALEQREAEKTYGIPAADLTPVPWSAPAFERLWRLGHRDRYPWFAGESLSSRVPKEACRVRAAGFKNFFDSRSGRRKGRKVGFPGWRKRKHGSRFRYDADRARPETARMVRLPGVGKVRTFEDMSWLADRIADGQARVIGSTVRERAGRWWVSFQLEIDRTDINSKRAVSSDAPACGIDVGVKTFATIVDDDGTVTQIDAPKPLKAALRKVRKAGRAVSRKRLGSSNRAKAVKRLARVHFEVANRRADFLHKTTTMLARSKRAIAVETLNVAGLVKNRRLARAISDLGFGEFFRQLEYKAAWYGSSVWAADRWFPSSRLCGGCGAINQELTLADRSWTCGCGLRHNRDVNAARNLLNAMSLVRDAT

SEQ ID NO: 24914 - protein, 372 aa, unknown
  TnpB Polypeptide
MKHCAYKFRFYPTDEQTKLLAQTFGCVRFVYNTILRWRTDEYYQSKAKIGYIQANAKLTELKKQPEFSFLNDVSSVALQQGIRHQQTAFKNFFEGRTKYPTFKKKTHKQSAEFTKSAFKFTDGKIYIAKSKEPLNVRWSRQLPSEPSTITISKDCAGRYFVSCLCEFENQILPKSDSNIGIDVGIKHLFVTDSGIKIDNPRLTAKYATKLAKAQRALSRKKLGSANRAKAKLKVARIHAKISDCRLDNLHKLSRKLINENQVICVESLRVKNMIKNPKLAKHIADASWGNFVNQLEYKADWAGRTISKIDQFFPSSKRCSNCGYILNFLTLDTRYWDCPECKTTHDRDVNAAKNILTAGLAGLAFGENVSLV

SEQ ID NO: 24915 - protein, 371 aa, unknown
  TnpB Polypeptide
MANKAIKYRIYPNTEQKVLLAKTFGCCRFIWNTMLNDKNEYYKANKSMLKNTPAQYKKDYPFLCEVDSLALANVQIQLQNTFTRFFDKVCSYPNFKSKHRAKKSYTTSFVNGNINVYDNYVKLPKLKNVKAKIHRTAPSNWIIKSATVSQSGSGRYYVSVLYEYEKTVVPITPTKEKVIGLDYSTPNLYVDSNGNFPIEKLKYYKLSAEKLSKEQRKLSKKVFGSNNWIKQKQKVNKIHCKIANQRNDSLQKISTAIAKQYDVVAIEDISIKEQIQSRKYKNYRKSTLDNGWHNFTTMLDYKLKERGKQLIKIDKYYPSSQICSCCGYTNPLLKEDSVRKWVCPSCGVVHNRDTNSAINIKNEGIRILGIA

SEQ ID NO: 24916 - protein, 429 aa, unknown
  TnpB Polypeptide
MNKKQINIGCQQNLLHSDKDLSAILEYLCGEANKVFNCSVYYARQIWFKENRFVGKGELCRQMKWNRHFRAMYASSAQQICNGVVEALASFRQLLKLFKEKKIENKPRPPKYRKKGLFTVSYPKRWLKLTEKGIRVPLGKSVKAWFGLENFYLPMASNLDWEKIKEIRILPRHGCFYVEYVYQRESTLNSAKEGNPEKVLGIDHGIDNWLTCVTNVGTSFIVDGRHLKSVNQWYNKQTATIKKGKPQGFWSKRLANITEKRNRQMRDAVNKAARLVINYCLENDIGRIVFGWNKGQKNGIGIGAKNNQKFVQVPTAKLKERIKQLCEQYGIEFIETEESYTSKASFLDDDFLPTFGAKPESLSPSGKRVKLRLYRSANDSLINADCNGAANILRKVATTLRLCLEGVSSGALTTPVRVHFWAACESPSL

SEQ ID NO: 24917 - protein, 381 aa, Gracilibacillus sp.
MIIRKREVMDMTKQNKAYKFRVYPTEEQALMIHKTFGCVRFVYNKMLAERKETYDHLKDDKETLKKVKLPTPAKYKQEYAWLKEVDSLALVNAQRNLDKAYKAFFKGIAKFPKFKSKRHKQSYTTNVVNGNIQLLNGYIQLPKLKRLKMKQHREIPSEHTLKSCTLSITSSGKYYISILTAYEKQIDPKEIHTMVGLDFTMDGLFVDSDGKKANYPKFYRQMLGKLAIEQRKLSRKKKGSSNWNKQRIRVANMQEKVANQRKNSLHHLSKELVTHYDAVVIEDLDMKGMSQALQFGKSVADNGWGMFTSFLKYKLKEQGKHLIKVDKWFPSSKTCSSCGNIQPMPMNMRVYACSCGLKLDRDYNAALNIKKEGMRLLASAS

SEQ ID NO: 24918 - protein, 461 aa, unknown
  TnpB Polypeptide
MIVTRIIKSKNLNHGKYEQLSAQAKRLGKVRSEVWHSYGSIKGVSIKSDRKIRDCWLKEKRLFKVSANAWKETLRDTFGDIKANRESAKEKVRKVVYKQVSDEKKRLELYKELKSEGWTSNNYLRRLMRQYCKHGRNHTENQIVVRSDNYKTFQLGGHAWLKIPGLQKGKRIAIPLNTLVEPTGTLRLILKDGEVEVHYTIEVAQTHNCGTATIGVDKGYTEVFVDSNGEHYGEGLGQILTQQSDKLKKKYQARNKLRAIANQKSHKKRNLIENNLGRKKLNRQNETVQSQIKDTIYQATHKLVDKAEVIAAEDLTSPIASNKLGKNVTRRLSAWTKGVIANALDTISRRRGSSVILVNSAYTSQMDSRHGVLLGKRFGDSFYCFDGVVLQADENAARNVLARLHDPEIDRWMPFQKVKSILLERTERLRLELLNQDSSCNLSGLSTESELPKNVQLCLTF

SEQ ID NO: 24919 - protein, 324 aa, Escherichia sp.
LQQSLKDPERAYKNFFRNRAAFPRFKKRGQNDAFRYPQGVKLYQENSRIFLPKPGWMRYRNSRQVTGVVKNVTVSQSCGKWYISIQTESEVSTPVHPSVSMVGLDAGVAKLATLSDGTVFEPVNSFQKKQKTLARLQRQLSRKVKFSNNWKKQKRKIQRLHSRIANIRRDYLHKVTTTVSKNHAMIVIEDLKVSNMSKSAAGTVSQPGRNVRAKSGLNRSILNQGWYEMRRQLEYKQLWRGGQVLAVPPAYTSQRCACCGHTAKENRLSQSKFRCQICGYTANADVNGARNILAAGHAVLACGEMVQSGRPLKQEPTEMIQATA

SEQ ID NO: 24920 - protein, 367 aa, unknown
  TnpB Polypeptide
MVKLDPSSEQHEVLCETMKRFNEACNHIAETVFALHSANKVEIHKTVYYPVREHFGLSAQLTIRAISKVCEAYKRDKSIKPQFRLDGAIVYDQRILSWKGLEKVSLITLQGRQIIPVRFGDYQKARLDRIRGQADLILVKDVFYLCVVVEAGEATPYDPVGVLGVDLGIKNLAVDSDGEVHSGKQVSQTRDKLDSLKARLQSKGTKSAKRHLRKLSGRMARFSKYVNHCISRKLVAKAKDTLRSIALEDLEGIRQRATVGRAQRRSLHTWNFGLLRMFVDYKAKIAGVPVVFVDPRNTSRTCPSCGHISKANRPTRDDFRCESCGYAGAADRIAAMNIAFRAAVNLPIVAGKHLNLSYKPTTSVVGS

SEQ ID NO: 24921 - protein, 436 aa, unknown
  TnpB Polypeptide
MRLTRAVTHIRLCDANHAKVEALDAVAMDYQSLCQQYTTYFCTEAQPDKYAAPCFASPLSQRWQRWQRVAIQQAAGMAHSWRSNYTAAYQDYLDLLAEYQEAPYGDPPAWKEWNTPVLNETVIQANANVALLQPAKDSSFDYWLRLSTLEPGQPVLLPVKLAAYHRQALAGKTLNSSTTLTRKPTGWWLTLSYDEQVPVVTLHNAPVLGVDVGIANFITTSTGKQYGTFHGKLAARHKRDRAKRRRKAKLRACLKKKGVKRLPSTQNKKLARHVRQEINRAVNELYADHPETQIAYEHLNIAGMKFKARRMNAYLYASNLAYLPEQLAWGAAKRGVRARKVKSAYSSQECHRCQFVARQNRPTQQTFCCRVCGHTTHADVNAAENLASRLHDHQLAACTDRQAIKVLLARRHQDWLQNQQRLAVVQPPAELSRQPA

SEQ ID NO: 24922 - protein, 371 aa, unknown
  TnpB Polypeptide
MNKTLTRTICIKLDVDGHGATLAATMRAFNAAASWIVQVCWDEGITNTNTAHHRVYGETRGRFGLGAQLAVCARAKAVEAIKAVQAKQRETCPQFGPRGSVRYDARTYHLMSLDRVSLNTLDGRVVCRMLLGARQHGMQVDPAWKIGGADLVWRAGVYSLHLTQSREAPALAVTDDVLGVDLGIVNLATDSDGQTFSGVQIHVVRTRYHLRRQRLQKVNTKNAKRRLRKNADKECRFQRDVNHGISKTLVAKAAVSCKALALEDLSGIRERTTVRHEHRYERHSWAFFQLRQYITYKAAWAGIPVHLVDPRNTSRTCSHCGHCAKANRKSQAEFLCQRCGVALNADVNGAINISRKQWAAVNRPMASALAG

SEQ ID NO: 24923 - protein, 532 aa, unknown
  TnpB Polypeptide
MSTKSFIITLPIITGSEERRWLRKSFSFGCNLQNAVMGGGWDRVQQMRATPEWQAARVMPKSKERTQAFRDLRIRFRLSEYDFHADVAQHRKASGRGHLLGINECQKIASRAWISVERHIYKDGSPRFISSKRGLHSVEGKTNKTGIIWKAEKSVFKFAGHTYRVRINKHDDWLTRALQDPTDPAKPRKVKYCRIVRNVRKGKECFDLQLIAEGTSPLKHAYAGKDQRMAIDPGLGSLTYATEDGKIAKVQIAPSADMDHRAVCKIQRAMERSRQATNPDNYEVVDVVRHGKKRQSLKVKSGRLEWRFSKRYEKLRAELAEAHRLAAATRKREHGEVCNWLLGHAGTIIVEDNSFKAFQKGRFGKSIGRYAPAAFYTQLTSKAESAGLQVKVVSPRKLKPTQHNLLTGRFVKHELWERRVQLGDRTGVCWIDRDAAACVNLLYADLDQQTYDPKRIREAVLAGVTAWLDAGVVVIQAREGTTERELRRFRRQGIPSLAVQGLRQKGFRGRSDSKSGAIPEAKSLGYIETFPL

SEQ ID NO: 24924 - protein, 391 aa, unknown
  TnpB Polypeptide
MFDVTKAVKRAYKYRFYPTPEQAAELSRTFGCVRKVYNLALEARTAAWYRRKECVSYVQSSAMLTQWKRSDDLAFLTEVSSVPLQQALRHLQSAFARFWDKQARYPRFKSRKKSRASAEYTRSAFRYRAGQLYLAKMTGPLALVWSRPLPDGAEPSTVTVSRDPGGRWFVSLLCECAVEPHPASDTVLGVDVGITSVATLSTGEKVANPRYERRDRARLTLAQRRMARTQKGSANRDKARARVARVHARISDRRRDFLHKLTTRLVRDNQAVVIEDLSVRNMVRNHHLARAISDAAWRQMRGMLEYKCEWYGRDFVVIDRWYPSSKTCSRCGQDAGPLPLHVREWDCVHCGVRHDRDVNAAVNIRAAGLAVLACGAGVRPVRESSRAGARR

SEQ ID NO: 24925 - protein, 185 aa, unknown
  TnpB Polypeptide
MIEGKARKTSIRALLVDKKNRNFDLLKHKLGTLRITQKSGKWIAQISVTIPTVEGTGLKVMGVDLGLKVPAVAVTDDENVRFFGNGRQNKYMKRKYRSVRKALGKQKKLNAIRKLDDKEQRWMKDQDHKVSRAIVDFAKENKVSVIRLEQLANIRQTARTSRKNEKNLHTWSFYRLSQFIEYKAN

SEQ ID NO: 24926 - protein, 382 aa, unknown
  TnpB Polypeptide
MIRSYRFRLQMDDRLGRSFEAAMAASNQIFNAALEERISAWRKAERSITKYAQFKSLTQVRADDPELAIYAATMLRMPLTQVDEAFKGFYARVKSGHSKAGFPRFRSYRRLRSFGFTEASGWTLKDGVLRIKGLPTVRLRMHRPLEGEPLKLTVKRDGRGRWFAIIVMRLSEMFGPTGQGAVGLDAGVENLVTDSDGSAYGGVSPDRHAPRLHIEHALARQKRGSRRWRQTRKRLARQRAREADARRTGHFQIASRIVRSGPQIIVVEKLQLRNMTRSAKGTVEQPGKNVKAKSGLNRSVLDAGLAQFIRILTDKAASAGRLVVAVDPKGTSQRCSDCGDTVTKPLRQRWHSCPCGAEYHRDHNAARNVLQRGVVVPLRQAA

SEQ ID NO: 24927 - protein, 392 aa, Herbidospora sp.
LRIVAQIVKRTYKYRFYPTPEQAEELTRTFGCVRLVYNKALEERTRAYRLEGRKISYVQSSAVLTGWKRTKDFAFLNEVSSVPLQQALRHLQAAFTNFFARRAKYPVFKARKRSRQSAEYTRSAFRWREGKITLATMGGPLDIVWSRPLPASAEPSTLTVSRDAAGRWFISLLVEEKIAPLPPARTVVGVDVGITVLATLSTGEKILSPGHKRAERKKLAKVQRALARKVKGSRNRAKAKLAVARFHARIVDRRQDHLHKVTTRLVRENQVIAVEDLAVRAMVKNRSLARAISDASWRELRRMLEYKAAWYGREVLVADRWFPSSKMCSTCGAVQQSMPLNVRTWGCACGASHDRDVNAAKNILAAGLAERRNACGAGVRPQRDSSLAGGWQ

SEQ ID NO: 24928 - protein, 384 aa, unknown
  TnpB Polypeptide
MYTTKKIKVKPTPELDALAIEAGRVYCKVISLLWKVKRKKGFWLSEKSIRNYMRLRGYNLHSQTVQAIIRSYFDSLKSYFQVVKSNPDAKPPQRTPRFYKVRWIQNGVTFKDGVIRLSNGKDNAPITLQSTVEPVYVEMYFQRGSYYFSLVYKVHTPPKRDTGKAVAIDMGEIHPIVSHDGQHTIIYNGRALRAIKQYINKFKAYIQSKMDRCIKRSHRWYRLKRIKTKILAKLNAQLKDAEHKITSRFISDCIKAKADTIVIGDLKGIRKRAKFSKKSNQKVHQWAFARLQSMICYKAELAGLKVKFVSEAYTSQTCPRCGNRKKPINRNYHCNHCGFQYHRDGVGAINLYNKVSGFSFRPVVGAMASPIGVRFNPHLSKLAS

SEQ ID NO: 24929 - protein, 483 aa, unknown
  TnpB Polypeptide
MLAAEMSRHTTFKYCLDPTVAQHEVMARYAGASRFAFNQCLQMVKAALNQRKTYPDNDVPWTGFDLINAFNAWKKTADAGRLFIVDSDGVAQTVVTGLSWRREVCQQVFEEAAVDLGKGIKCWSDSRSGKRKGQRVGFPRFKKKIGAVPSFRLRNKHSKERPPAMRIGDNSRPRSVALPGIGQIAVHDDTRRLRRMIAKGRAKICFATVTHRAGRWWVSLNVEGADLHPEHRHPAHDPDDDGGWVGIDRGLSAFLVAARADGEEVARITDAPKALGIGMKQQQRLAKSLARKKKGSANRRTAAAKLGRHHHHIANIRRNFLHRVSNALVKTHDRLVIEDLHVSGMLRNHRLARAISDAGWAEFARLLDYKQAWRGGELIVADRWYPSSRLCLGCGAVRGDLTLADRTFTCSCGHSVDRDTNAAVNLARWGQNHHNPSPDPRTPKQRGRATNARRRDGADQHHSYAGETSPDDAGTDVHTAPAA

SEQ ID NO: 24930 - protein, 483 aa, unknown; identical to SEQ ID NO: 24929
  TnpB Polypeptide

SEQ ID NO: 24931 - protein, 578 aa, unknown
  TnpB Polypeptide
MKKWKKKSSSPDSGISYTVCGEFFPEVYPTFRSGKWSRGDEDPLDTEMRLFCSCTRWAFNRLLEGTCRDDVKKRGQEIFGINSRYADDARLKAKAIIDSQKELLEIEIGETESKLSRARGKLGQAMRQLARAEKKGAAPEEIEKLRLVINGKNARVASLEKKLAELKAHQENGTIPKVVFGGKKLWKDVCKRRTTREEWRAARKNRLYTQGDETKGGNPHFKVSHQNGEFRLAVTISHLSEQRGTDAKGRPIMTRAPKVEGKLWLPEKHRDMVRIWVAMGLPYTVELIRTVDGRYLVHLTFSLSGAPEPDFARGCLSVDTNPDGVGLCNVGPTGQPEPWPEGMEIPYPLNLSKYEGEFQVIPYPNGFIYIRIPDLEYARGFRRAYLIGVLARVVVDIAKFLGKPIALEDLDFGKDRLDTNRKFNRMASNFPYAKVVEAVCRRAVKEKVPFKLVPPRHTSTIGYWKYMRRFAVPVHCAAALVIGRRAMGCREKVTRELKQLFERIKQNLAQKATPDKPREGRGMTRWVRACLKRLEKKMQVHNALPLWEQIKFYSLWHDFKLLARVPAVTPFSRCRTNR

SEQ ID NO: 24932 - protein, 490 aa, unknown
  TnpB Polypeptide
MSGWCRRRRREDTPLRLLTKVDNATLGGYSTSRWTWSSSPCVSTKAASKSWQILVKMSRNVSWAASVKTPLRYLVTKTKWTCRANTQCLPVRKSFAFSIDQFYNVVMRICKGYKYRLKTNNPTARQFVRFAGACRFVWNKILAINEGRYLAGVPRLSYADSTRLLTLWKQSEEYGWLNTVHSQVMQQCLKDLDRAYTNLYAGRAEPPAYRKKFLSDAFRYPQGFAVEGNHVYLPKIGWVRFWKSRAIDGIIKNVTVSRTGKHWFVAFQVEMDIPDPVHPADAWVDIDLGVATFAACSDGTLIPPINALRTQESKLARAQQKLAQKVKFSQNWKKQQARIRCMHTRIANCRYDFLHKHSTTISKNHAVVVVEDLQVRTMSQSAKGTVDEPGKHVAAKSGLNKAILDQGWGMFRRLLEYKQTWRGGAVIAVNPRYTSQWCPACGHVSAKNRVQQALFSCQTCGYSYHADIVAARNILALGQGERLNAYALRQ

SEQ ID NO: 24933 - protein, 381 aa, Clostridium sp.
MILAKKVRIIPNVEQEQKLWQSVGTARFIYNWTLGRQDENYKNGGKFIKDEDLRKELTILKKSELNWLSEVSNNVAKQAVKDACNAYKNFFKGLADKPKFKSRRKSKPSFYNDTHKLKVKENLVLVEKVGWIKTAEQIPMDTKYTNPRISFDGKFWYISVGIEKREPIPENTGISIGVDLGLKDLAIVSNIDRRFKNINKTKEVKRLKKKLKRKQRQVSKKYEKGKIQIGKEGENRYKFTKTNNIKKLEREIKLIQRRLSNIRLNHIHQTTTAIVKTKPSRIVVEDLNVKGMLKNKHLSKAISEQCFHKFISILEYKSKFNGIEFVKADRFYPSSKTCSCCGTIKKDLKLKDRVFICPSCNSSIDRDKNASINLSKYKESA

SEQ ID NO: 24934 - protein, 566 aa, Mycobacterium sp.
MTDRRLRQWRGVKPVASPSGVAVVTRIRTTPADDRVLDVVAEHLGRLRRAGLMAVSRPVAVDAGLDADERRQVRRDRLNARKKVLTALSSARWASAIIAGNDDQYRLAREAQYRLIAGLRSAIATIEARLAAPTADTLTVSERKARRSARTPKGYATQAERFAKQRRVQHLRGELVVVECDRAAGVVHVVEGGKRLAHMRHHLGAAGLTETQWRQRWDASRWRIRANGSPDEPFGNLTITVTPAGQVSVRLPKPLENMANAPRGRYVLSGVAVFTHRSEQWIERITGGNSIAYTLTRKPGRAGVYLTGSWAIPSLPYWAGRDDTDPGGDVVASGPVVGVDLNDGHLAVRRLDGHGNPVGAPVRIDIDLTGPGTRRDAQVRHAITQLLHYTRRHGSGTIAVEDLNFADARTTGRETLGRGKRGKRFRRTVSGIPTAVFRDRLAAMTAHAGVELLAVNPAYSSIWGGQHWQHPYTNVTRHQAAATVIGRRAQGLTARRRKGVTPQRPEDRPVRATNQTGPHSPTATGSRHEPGTRGPTSRRPTSQRTRQPGRVTVTPAPLANNGQLQL

SEQ ID NO: 24935 - protein, 412 aa, Thermaerobacter sp.
MIGPMQATFQTKIQDRSVYPALDALAALYGRLLRRLFVDLYVRKRPLVECKRESIARYGITARYFNALATELKAKVKAAEEAHRHHLAHLRGQIQSTERAIAKLHKQEKALASGKGRWATLSPEERAARRRRVRFRLHQKKRRLAMLRARLEAAEARTGSPPICFGSRRLFHRQFHLEANGFASHDAWRKAWRDARSQSFFCLGSKDERSGNQTCSLLGDRLRLRVPNALAGRFGRHVWLHGVRFPYGQDVILAALASGQAISYRFVRKNSAWYVFATTERPAAPITTSRRAGALGADLNPDRLAVAEVDRFGNPVAARDIRLPLQGKRREQVKAILGDAVADLVAWAKGAGKPIVVEHLDFRERRPVFEKTTSDTPASCPLLLTANFTPCSWPGPPGKAWRCSASTRPSPA

SEQ ID NO: 24936 - protein, 446 aa, Okeania sp.
MYGCQQVLLHPHKETKAVLEFICSEVNKLTNCGIYYGRQLYFKTQRFIGKYTLDKELKSNWHFKALRANVAQQALHKIYDSFKGYQALIKKWWAGELDNKPRLPNYRKKGGLEVAVYPARFVKCLGNKIRLGLGRQVKAWFGLDNITIPLPSNLDFKKIKEIRILPRNNCFYAEFVYKINPTKAVVNYGNALGIDPGLNNWLTCVSTTGKSFIIDGKKVKSQNQWYHKRIAALKKGKNQDYWDSELGLITEKRDCFVPRNQMRDAINKAARFIINWCFKNDVGVIVFGWNKRNKDSINIGQKNNQELVMIPTARLKDRIAQLATQYGLKFIETEESYTSKASFLDQDFLPKFGEKPNQWKPSGKRGKKGDGLGRGQYQTEKGAKINSDCNGAANILRKVSSQLKLSLVKVRRAVLSMPKRYDLTNLSKSYRKQSEERGFNPLRTTA

SEQ ID NO: 24937 - protein, 391 aa, Bacillus sp.
MLINKAFKFRIYPNQKQIELINKTIGCSRFVFNYFLGKQKEKEAYWYIVEEMMQTGQFPANNWKGTFLNKYETVKSLPELKKHYSFLKEADSIALQKSVEILADPFDRYYKKQNKQPRFKSKKNPVQSYTTKYINGNIAVIDNQIKLPKLGNVRFAKSREVEGRILSATIRRNPSGKYFVSLATESEVIELPKTNTAIGIDVGLKDFAILSDGAIYSNPKFLRSLEEKLVHAQKILSRRTIGGANWYKAKRKVARMHEKIANARKGYLDKISTEIVKNHDMIGMEDLSVSNMLKNRLLAKAISEVSWSQFKRMIEYKAKWYGRQVVTVSKNFASSQLCSCCGYKNKDVKNLGLREWECPKCHTNHNRDINAGINLKNEAIRLQTAGTAGIA

SEQ ID NO: 24938 - protein, 326 aa, unknown
  TnpB Polypeptide
MSGKSFSVWLNNEYLPRHPEYFWIREVSSKSIKNAIENACTAFSRFFHHQSSFPRYKKKGRSDVKMYFVKNNPKDCLCERHRIKIPTLGWVRLKEKGYIPTSKDGYVIRSGAVSMKAGRYYVSALVDIPAPEADGNFTDGIGIDLGLKDFAVVSNGTVYRNINKTARIRKLEKQLRRAQRKLSRKYESLKKGETTQRANICKQKLKVQKLHHRIENIRTDHINKVISEIVKTKPSHITIEDLNISGMMKNRHLSKAVASQKFYEFRTKLKTKCAEYGIELRVVDRWYPSSRICHCCSCIKKRSETFRTGSTDAHVDILRTEISMQH

SEQ ID NO: 24939 - protein, 404 aa, unknown
  TnpB Polypeptide
MSIYKSFKFRLYPSEEQAIFFEKSAGCSRFVYNQLLDASIKEYEKSGKFIFGFNLTNLIVGLKVEFPWLKEVNSQSLQQASMNLATAFKNRFSKSRKVKAGFPKFKSKHTSGSSFMVPQHFTIKPNQIKLPKIGWVSCKTHRKLEGKAKSLTISKDVDTWFVSILCELPDKISYYDPTNAVGIDLGLKTFAVTSDGECIEAPKLNSQYKKLKKLQRRHSRKQKGSRNKDKARLKVAKQYRKIRRINKNFIETTSAAIAKLYDVVSVEDLNIKGMKSNRRLSGAIQKVSWGAFVDCLKRKVPIVHRVSRWYPSSKTCSCCGWIQKDLSLSDRIFDCQECSLVLDRDANAALNLLNEWKRTVATTGLACGEDVRQDKNLLIPILQPSVKQEDGIIGFRAEHTKVCS

SEQ ID NO: 24940 - protein, 415 aa, Thermus sp.
MWVTQAFRFELDPNRTARIALAQHVGAARFAYNWGLSLCKKALEEGKAIPNAAQLHREWNRWKRESAPWWTEVSKCAPQEAFRDLEKALRNWRQKRARFPRFKKKKHMDDNTARLTGSIRVLYRYVQLPRIGRIRTKERTDKLLELLEAGRARILSATISREADRWYVSLTCEVERPDPPQREGEPIGVDLGLSSFLVLSDGTRVEAPKPLAKSLRLLRRRSRQLSRKQKGSNNFRKASLRLARLHRRVQNIRRDFLHQVTTWLAKTKPVMVVEDLNVRGLARGPLSRPVADVGWGAFRRMLEYKAGWYGARIIVAPRYFPSTKMCSRCGWVVPEMPLSVRTFRCPRCGLEIDRDLNAALNLRQYGLAVLSGPTGSSPGSDACGDPSGGGTAGTSRSTSYGSMKQEAGSGRLFAG

SEQ ID NO: 24941 - protein, 464 aa, Sulfobacillus sp.
MQETTVFTYRVSLSPTEWERASDTRRAAGDLWTRLVKIHRFCRRRHWPWPTEPQLKAHFKRRFPLHSQTVQAIIEKFCATIDGVRTKRKHGDKQARYPWRFRRYFNPIFKGQALKIQGQHLLLPLGRGREPIRVHLPLAMPSGTIAQAELGYDEIYLTVTRTIPDPVPVPSSKAGGLDMGVIHLGVVSDGEEALAISGRGLRSVKQGHAKAQAKLRKKRSRTKPGSRRRKRLNRAQHRASQKVDRITHNALHHTANQIVAFCLATGITVLYAGDLGTLNHKKRHRRSRRTNQEVGALEFGRLDLYLEYKLRRYGIQLIKISEADTSQTCPRCGHLNKMAGRTYRCRACDYRAHRDGVGAVNILNKGMYGAIRPGEFLVPPRITYRRPVPLKRALRRSPAEPRHVAGGISGGESGGSLRGSLDPRRSHSGSPRISALRAGRFKSRCLARSSQGNGPRRFPDARTR

SEQ ID NO: 24942 - protein, 604 aa, Pandoravirus sp.
MTMSRPPPSAAVPVGFEVVERPSASREEVIASSKKRRKAKRASASCNTKVDPAKTDRRVFALRIRPTTAQKRLFQRAFSIACLAKRLAYKFIGDQRDGITKTRLYAIKQAICTENIQSRERVNPDDPEDKRMRIVKRTENTTLPPATRRILFEQRLPKGDRLISSVRTNAVIQFCHAINATKALVEEKTINWDRAAQAHERYLMMREDTLVPITTPQTASASTPTAKRRPAATKRKRGNREDTDEGIRTDRYGVARMWTCRHPPRGDRPEMRPRQVKPPDRNRPRHSFSVDAHPRKTNPDSFTVRWDSKECRDNSTVVFMRQKVALWGCPSKRKRQLDRLTARMPNGEQASRTQTTLRYADGRYHLMIQCLSDKVPPRDRRPVRAVALDPGVRTFMASYDTDGRFGTVGDGQIGRIIKVAKRADRIKSHIDTRLVNQGFTNDDDNKARRKRARKRARQLNAKCRDLKADAHWKTARALCQRYDHILLPKFNSRAASQALDKTTTRQMLHWSHYEFRQRLQHKAEATGARVHLVSEHYSSMTCGRCLYIEESFRKNGSKRFECRNCGYAIDRDANGARNILIMNAERYIGRLEVSPLGSDAVAID

SEQ ID NO: 24943 - protein, 648 aa, Pandoravirus sp.
VCESGWLKADMARRAADPPPVEFRVTHPPEPSAAARDAANKAARASKRRKTAKSVKTKDVPRRIFSLRLDPTPAQKRFFQRAIGIACLAKRLAYRHLGDQRLPVTAKRINDLKKKICTEHFQTRVLTGEVSAKGKPRFHKQKADQPNTFLPEKTRRRLYEQDLRERAKVHRDTTEAAWCAERKWKRSRKTWTPPLDQRPIPAVVRCNAVIRFCQTVSTIQALVEEEGIVWDARSAASRVSPPIARSGRARVQSATSKKRKRTKEPNAPTTTAGGPPRRPRPSMGPRQVKPTDRNRTRQSFSIDATPGNANPYSARWDIVGDDRVHFMGTAVRLWGKPAKRRRELARLSARMPDGQRATGQQVIVRYESGRYHLLVQCLFAEPPKRAAEPDRAVCAVALDPGVRTFHGNYRSLVFVSLECRRLTLFACPYIHIGMYDLDGRFGEIGAGQIQQIVRIAKRAGRIRSHIDRHLQDRRPGDHNKAKRKRARKKVRAAMLKTRDLKSDAHWKTAKSLCERYDHVVIPRLPVAKMVQTLARSTSRQLMHWSHYQFRQRLQHKAAQLGVCVHVVNEAYTSMTCGRCLWIEESFRRNSSKHFECRRCGYAADRDLNAARNIMLKTIEAAVGTLEAVPPRVDVGGAAGLALAATTID

SEQ ID NO: 24944 - protein, 446 aa, unknown
  TnpB Polypeptide
VRLRLKPTNTQAAVFLRAAGARRFAFNWALAQIKANQDQWAAEATYGIPKGARTRPLSYFDLVRAWDATKNMAAPWHAEQSAWTFRYGIRAAATAHTDFLRGKSRFPKFKARHSDRLRFTVAGDEGLHLQPGRLRLPKYGWVALAAPCRAQSKLRRLLARGRARVLNVTVSRDAGGVWYASVCFERAAPAGPASYNRPTGATVGVDVGIKTAAVVATSDRVLVETLEASRALRDALAHIKHLQRALCRAQKGSANRAKARLRLGRAHAKVGAARNTRLHQFTAELSKSHGVIVVEHLAIANMLRNHCLALAISDQGWGELARQLGYKAPRAGGTFVPADRWFPSSKMCSACGAVKSKLLLSERTYRCDACGLVVDRDINAAANLAAWGERKLGLVPASNSQDGDRHPGGPLAQNFGHACGGDNEPVKMTAGVPCEAGTSRPRTRVA

SEQ ID NO: 24945 - protein, 478 aa, Lactobacillus sp.
MRPFCAVKHTYFCIVSLVFKLHRFFVTKSSLILFLGNICFDICTWFIYNIFSNLWKQVKIVAKLSMKKLPYHYGLKVRCYPSSQQKAIIKRNSDASRFVYNELVAISRELYELKRIKLPIDTVQQRIHQLEQRKKSTKNISDEHLFLCHKDIDSLSLANAKQNYAKAWKAFRKVHRSGVPVFHKKNYTWKYQTNAQYSSKASRPSLLNGTVKFLGRNHAKLPKLGVIRTSAIRSKIWKMREVVRIGTVTVTKDSADCFYLSFQLGSTQPFIGAVTFNNEKLGVDLNTENFLTDSNGAIVANPRYYRKVLKQLNQQKRKLSRRQLRAKKEHRPLREAKNYQKQRLLVAKMQVKVAHQRLNFLHNLTTELVKNHDFLVAEELRSKNLLKNHALALSISDAGWRLFLQQLQNKAELYGKTFVAVDPRNTTQTCSKCGYLLSGSNKLTLKDRTWQCPQCHTKHQRDHNAAKNILVKGIDQLA

SEQ ID NO: 24946 - protein, 437 aa, Spirochaetales sp.
MKNVVSYAARIKDEFVCFLPTIRIYQDAVDFLINVCNENYALMEDLPSQKAMTAIERLVHSTSARKAVYPSFDKIFHKMPSYLRRQAINAAVGHARTYRKNLELWESNGCKGKKPRLGRCGNRMPAFYQGNMFALCEDGSYQARLKIFIRNDWIWRTFTLNKSDMDRIAVKMGFSFDKASSPVLKKRGRRFSLAFAFETEGRLPEATERICSVDIGINHPAVCSVMDRTGTVAGRTFIRFPVEEDRFAKVLAYTRKAYSNGSRGCHKLWRWAENYNGCLAIKTATAIVEFAVKNNVDAIVMENLSGMGGRIHGSKKQRLALWRRREIARRVEEMAHRRGIRFSTVCAYSTSQLAYDGSGKVARDKDNHSLCTFKTGKRYNADLNASYNIGARYFIREILKTLSGRKVSEVHAKVPELSVRTRCTLATLYSLTAALAA

SEQ ID NO: 24947 - protein, 344 aa, unknown
  TnpB Polypeptide
MLKNFQYRIFPTNKQLNSLESTLEECRWLYNHLLENRKNAYEQEGKGLSCYGQQATYPMLKEQRPSLNSVHSQVLQNVAVRIDLAMKAFYRRVKAGEKPGYPRFKGVARYDSFCFPQSGFSITHDNRVSLSKIGAVKMVYHRPVRGSIKTCTLHRSSTGKWYVTFSCEYEPEHLEPVPTEVGIDVGLKTFAMLSTGEEIANPRFFRMEEKALAKVQRKHAKLAKGTQERRTHRKVVARVHERAKFKRHNFTHQQSRQIVDCFGVICVEDLHVNRMMHNHCLAKSIHDAAWPAFSRNCPAKRQKLADNSSRSTPPTPRRIAAGVIIDKRCHSRSECIIVPAVSCR

SEQ ID NO: 24948 - protein, 89 aa, Halomonas sp.
LVRQLEYKAAWAGRQFIQIDRWYPSSKRCHGCGFVQEALPLDVRVWDCPSCGTQGIDRDLNAARNILHAGTALLAGAESCSKYRGALGN

SEQ ID NO: 24949 - protein, 330 aa, Halomonas sp.
MTKRAYKYRFYPTPEQAELLAQTFGCVRFVYNSILRWRTDAFYQRQEKVGYVGANARLTELKKDPELAFLSEVSSVPLQQCLRHQQTAFKNFFEGRAKYPVFKSKRHRQSAEFTRSAFKYRDGKLYLAKSKTPLNIRWSRELPGEPSTVTVSKDSAGRYFVSCLCEFEPSKLPVTSNMTGIDLGLKDLFITDQGERVGNPRHTAKYAARLAKAQRRLSKKKLGSANRAKARQKVAKLHAKISDCRQDNLHKLSRRLINENQVICVESLKVKNMIRNPTLSKAIADAGWGEFVRQLAYKAEWADAHWSPLTSGSPAPNAVRVVGTHCRRCR

SEQ ID NO: 24950 - protein, 264 aa, Halomonas sp.
LAFLSEVSSVPLQQCLRHQQTAFKNFFEGRAKYPVFKSKRHRQSAEFTRSAFKYRDGKLYLAKSKTPLNIRWSRELPGEPSTVTVSKDSAGRYFVSCLCEFEPSKLPVTSNMTGIDLGLKDLFITDQGERVGNPRHTAKYAARLAKAQRRLSKKKLGSANRAKARQKVAKLHAKISDCRQDNLHKLSRRLINENQVICVESLKVKNMIRNPKLSKAIADAGWGDFVRQLAYKAEWVGAHWSLSTSGSPAPNAVRVVGTPCRRCR

SEQ ID NO: 24951 - protein, 108 aa, Halomonas sp.
VIAAESLQVKNMVKNRHLSNAISDVGWGELVRQLDYKAAWAGRQFVQIDRWYPSSKRCHSCGFVLESLPLDVRTWDCPDCGTQGIDRDVNAARNILQAGTALLAGADG

SEQ ID NO: 24952 - protein, 351 aa, Halomonas sp.
MTTVHRAYRYRFYPTSEQADQLARTFGCVRYVYNHFLRQRTDAWFERQERMGYNATAKALTTLKKQPDTAFLAEVSNVCLQQSLRHLDRVFSNFFKGQARYPTFKKKQRKQSATYMANGFRWRDGKLWLAKHKDPLDIRWSRYFSGTPSSITVSCDTAGRYHVSFLVEEAVTPLPVTPKMVGIDLGLTHRVITSDGDKIPNPRFLHRTERKLARVQRNLSRKQKGSQNRAKARHRVAKVHAKLADQRRDATHKLSTQLIHENQVIAAESLPVKNLLKNSSLAKAISDVGWYQLPNNWRTRPSGTGAISSRSTSGIPAQNAVFTVAISPRRCRSMSALGIAHTVAPKASTAM

SEQ ID NO: 24953 - protein, 378 aa, Halomonas sp.
MTKRAYKERFYPTSEQAELLAQSFGCARFVWNNTLTYRTEAYQQRGESVPHSSAEKRLVGLKAEFPWLRDVSSVILQQTLRDQKAAFDNFFNPKLKARYPRFKRKDCRQSIRLTKAAFRYRDGEITIAKAKTPLPIRWSRSLPSAPSTITISRDRAGRYFISCLCDFVPKALPVTRKTVGIDLGLSDLFITSDGAKSGNPRHLKRYEAKLACLQRRLAKKQAGSNNRNKHRWKVARLHAKIADCRRDATHKATRALINENQVLCVESLNIIGMIKNRRLSKSISDAGWGEFVRQLEYKAAWAGRQLVKVSQWFPSSKRCHGCGYKVEKLPLSQRHWHCESCGYPIDRDINAARNIQTAGLAGLACGATGAEGSGLAAI

SEQ ID NO: 24954 - protein, 242 aa, Halomonas sp.
MKAERAYQYRFYPTPEQAALLARTFGCVRFVWNAVLRYRTDAFYQRQEKIGYNDASAFLTQLKKQPDTAFLAEVSSVPLQQCLRHQQSAFKHFFAKRARYPSFKSKKHRQSATFASSAFSYRDGQITLAKCREPLNIRWSRDLPAAPSTVTVSKDAAGRYFISCLCKVDTEALPITFKMVGIDLGIKDLFVTSDGHRVNNPRHTARYARKLAKAQRRLSRKQRLEQPSQGTVKGRSLSHQDC

SEQ ID NO: 24955 - protein, 151 aa, Halomonas sp.
MLTPSANRVQAFLCQAGTLPHFKSKKHRQSATFASSAFSYRNGQITLAKCREPLNIRWSRDLPSAPSTVTVSKDRAGRYFISCLCKVDTEALPITPKMVGIDLGLKDLFVTSEGQRVNNPRHTARYARKLARAQRQLSRKQKVRITAPKRG

SEQ ID NO: 24956 - protein, 331 aa, Scytonema sp.
VYQPQAYSCTRISRYLVKLEVQGLARGKRISLIVKSNRIITGQIRLIRNASGSLEIHSFLTLYNRDYGKLINREEVKAVDRGYTEVFYTDDNQSLGQGFGQQLNQKTERITRRGQNKNKLWALAHVRYKNHPQKSRSIRENNLGFQTELKRRHRDDAYVETVVNQACRSITFQAKTLGVESLVEPIRSTKKLSKRAKNRLEKWEKGTVADRLTHWSARNRTHICWVSAAYTSQIDNRNGTLLGTRCRDQFFTFDGVVFQSDHNAAINVRHRMTDSVITQFMPYKQVQAVLLERTARFLSAMGLTLQDAVERQWLNIKYTKCQAFKKLLYGL

SEQ ID NO: 24957 - protein, 224 aa, unknown
  TnpB Polypeptide
MHLSATVSLPEYQPEEAEHVVGIDRGLRFLASCYDEKGKTLLFNGQKALRTRRKYKKLRAQLQAKGTKSAKRRLKQIGQRENRWMSDVNHRLTKTLVDHYGANTLFVLEDLTDVRFATEKTAKDKRYEMVSWAFYQFEQFLTYKANLNSSAIVKVPAKYTSQRCPKCGRIRKENRDHQLHLYVCDRCGYKSNDDRLASMNIQFLGTLYRSGEEAPQFNKQASAE

SEQ ID NO: 24958 - protein, 481 aa, Bifidobacterium sp.
MPAKPGKAYRSYAVSVPLNRGKAMRLRVMLRPWRLGLRRTLLLLEDGLIRGERLPRYVDAKQWEGFSQRQWDSITRQARAMMGSWIELRVIDFRSIVSHSTLDDGMKRELWRINLRHAWWEPVDDEAHRMARRIMKHLRKRHRFPNPMRCRTLSMDGKIAEIQPSAMGGTFPYWARISTLDKGRPIHAPLDIHSDLNPHLDPRDLETLANHLQIRFDEDGGMTVRLMTTQDKAEPRVQGDVVGLDWGLSSLFATSEGRLYGLRLFAWLQQRDEELLALTRDLARSNVGYRDSKRFRRLNKRIRDHVTNEVNRVLNLIADDRVMELVVEDLDFRHGGLSKRLNRIVTRAGRNAVRAKLERLHALKGITITRVNPAYTSQECLRCGWTSPGNRPDQKHFRCECCGYTCNADIVAATNIKARRSRPEDWRWIGRHTILSRLRKEHAQRCPDRSHCPSRRPEYGSPTSAKTKAKTDARVKKTTTS

SEQ ID NO: 24959 - protein, 446 aa, Lachnospiraceae sp.
VKIFSTYSVKIKHYNHIFKNTVKIYREVVDFLIDVCLKEWNDISSIKGNLKQQQYIERLCHKTADNPDVRYISFDKRFYKFPSYLRRGAINEAIGKVSSYKSNLCNWENSDIKTRGRKPSYPKAGYVYPCLYKTVMYEETGTYEAKIKVYIRNTWDWIYVQLRKSDVDYINRRCKSRKKCAPTLQKRGSKWFLDFPFEERTELTDIGVFEQTIVAVDLGINSAATISVMKSDGTVIGRHFLKLPKEYDSLNHSINKIKKAQQKGNRKTPKLWARAKGINKDIAVKTAAFIIETAVLYNADIIVFEHLDRNGKKRGAKKQRLHMWRSQYVQSMVENKAHRHGMRISHICAWGTSRLAFDGSGKVLRGKESQLKCYSLCRFSNGKVYNSDLSASYNIGSRYYVREILKSLPAKERLELEAKVPQVTRRSTCTLSTLINLNAELMSIVV

SEQ ID NO: 24960 - protein, 416 aa, Lachnospiraceae sp.
MYLTVKQQLKHLSKNDYHTIKELCHIAKNLANEAIYNIRQYYFTEGEYLRYEKNYVLLKNSSNYKALNSNMSQQILKEVDGSFKSFFGLIKLAKKSKYSFKDCKLPHYLPKDGHTTLVIGFVRLNGNKLILPFSQSFKKTHKPVEITIPPILTDKKIKEIRIIPKANARFFEVQYIYEAECIQRNLNKNNVLALDLGINNLVTAVSSNGKSFIIDGRRLKSINQWFNKENARLQSIKDKQHSGKKTTNRQKAIARDRNNKVNDYMNKAARIIIDYCINNDIGILVVGYNETFQRSSDIGKTNNQTFVNIPYGRLREKLEYLCELNSIEFVKQEESYTSKASFWDKDVIPEYNNDNPKTYTFSGKRVFRGLYRTSDGYTFNADINGALNILRKSSVVDLSVLYSRGEVDTPVRIRVA

SEQ ID NO: 24961 - protein, 532 aa, unknown
  TnpB Polypeptide
MARKNTNINNNLADMSCLNNTEIIRSYCLKNQANKSKNNKIKSVLLEYRKIAHIVANYHWLLFFKEGKKFSDFQDIKELHTQNSAQKAMLSERYKQTCQSQVVGTLKSYIANIQNRFTDTVFNSATEFSAEVRHQLFYINRSQQWFVNDVTMNVCKNKSEGENKKEVIINKEIILLARKIFKRLTKNKPQFSNYNMILDEKVATVFKKNDIGAKKFDYWIKFSTLQKGKPIFLPLQTNDFFDGKEGVLKKAIQVNYNKDGNLSIRLIKQLTPEVIQQTSNTLGIDIGLVNLIATEHGDLLGVKLMKWLKKYDNIITVLQGNLMRQGIKPNTNPRFKELNRKVKEGMKNEICRIINKLVKQYNPKEIALESLNFQQSNIGRKNNRLLHRYGQRILGDKLASVSQEKNIAIRYVPSPYTSIGCTSCYYVADSNRKTRSLFHCKCCGYKCHADVAGARNVSSRSSAEFSLNLTKKEILQILYSKHNKWTAAHRKNAAYSSAEDLVVGILYGSSITKVSKIEGCNIAFAMNESSLS

SEQ ID NO: 24962 - protein, 419 aa, Oscillatoriales sp.
MLLSFRTALIPNNKQITAFKKASGVARHSYNWGNALIQDLLKKRESDKTLKIPSAIDLHKLLVAEVKSVNNWYYETNKNVPQKALGDLRQAWDRCFKKISKQPRFKKKGQKDSFYLESGTKTKPGINNDGKRVKLPSIGWVKIAEPLPLTAVHNCVISRTANRWFIAIKYEIELPEVATSRPVIGVDIGIKELAVCSDGKVFANPKSYRRMSKKLKRKQRDVSRKVKGSKNRAKAIKKLRKLHAKVANIRKDAIHKLTNYLAKNHGEIKIEDLNVKAFLKNHKLAGAISDCGMYEFKRQLEYKTQKFSSKLTLVARLFPSSQICSSCCNHRHKMPLKVRVFECPNCGKVQDRDLNAANNIERWFEGIFVPERSDLAVSSTASACGVDKPDNSHAIATTKQEVNTIITHVQLSRDLGSFG

SEQ ID NO: 24963 - protein, 412 aa, unknown
  TnpB Polypeptide
MDDFRLLVNQCLREALAHSTTSRGSLSRFARDRAREARVTGGIGLAAADVALSLASGHRRRLRQRVTCRVPYVRIPFVRAPSDCFHFDSESGKLRLSLRRGEWTSLVVPVSDYHRRVLANPDHRVTQVHIGLRRVVLVYAKTVPEPYAPTSLVALDTNESSLDGVWVREEGATFVRVRFPELREIQARHFGARRYLGRKKAHDRRLSRQLLRREGWREHHRIGSRLHDLTRSFVDRLASEHAALVLEDLTGMPRPRRTQRTGRTAAQGPPLFRPRTFRRRMSSWPQSELHRQLAYKAQDRGVPIVWVDPYRTSRTCPRCGEVAEHRKRVGTRFDCAHCGWSCDRQLNAGVNLGLAVLRRGSGAGLGGLRLDPDALSEDVVRPLYPSANDRRARVERREREGIELKGDPKVSS

SEQ ID NO: 24964 - protein, 420 aa, unknown
  TnpB Polypeptide
MEKTTQKKTGHTILTYRVRLYDRHFAWLVATKELYGKVVEHFFNVLQKEEELLQQSDFILLRALEEKCIGTKEMKAVGRAPEYPLTDFPKVPLYFRRSAINTAIDLARKGAETLNPNMVLYKGMYDNFTDKTIDIKLFNGEKWVWVTYPFTGREFPAEAERLSPMLVIEKKTAWLEVPLSFTVDDVRTIKERMQTEEQICAVAFPDNDALAVAVCLDREGNELEHRFFRGGKQKEEQRRRILTRIRESEQSRGLEAGKQRRAEDAEKPDIPQTKENATLYAELRNLNKHYAHHISRQILEFCLEQNIKVIVVPNYESSIDFRDKKYLKTDAYRWLGRSIIKNLKYKAFGAGIVVTTIRPYHISDCCSVCGAKIRKYNEGHTAGQQYYGGRLFRCPNGHSGNTARNTANNVGKSFLTYYKR

SEQ ID NO: 24965 - protein, 450 aa, Iningainema sp.
MVEPMAKTKKTMGVQQVLLTPDLETKALLEYLCQQSGKLYNNAVYFARQTFFKTGKILSGKYDIAFEPTVAKTLVAQSMPSTPMQQTLMSVTQAFKSFKELRILFFQGQLHFKPQVPNYLTGSKLYKVAYPNSGAQKPTIVNGQLRFSLGLTIRRWFGISEFFLPMPLNLDYSKVKEFTILPKNGVFYVEMSYEVAPQKHELDVNQALSIDLGTADNLASCVDTLGNSLLIDARAMKAMNQLWNKKVATRKEGKPQAYWDSWLDRVTRKRNHQMRDGVNKAAKLVIDHCLKYGIGTLVIGWNEGFKLNANIGRVQNQKFVQMPLGKLKDRLKQLCDLHGIRFQKTEESYTSKSSYLDGDTLPVYGEKPEGWTASGKRFPRGLYRTANGSVVNADLNGAANILRKVAGNLGIDLSDLGRRSLTTVARVRLWHVSSKKPLLQSTLSAESQCL

SEQ ID NO: 24966 - protein, 204 aa, Okeania sp.
LPTKVSKQIIKCLVATWRGYFQAIKEWLKHPKMFLGKPKIPKYKNKTQGRNVVIYSKESVYQAPLKDGICHLSMSDIKIPVVVDTVIEVRIVPATSCYIIEVVYEKKNQPQINSRYVAGIDLGIDSKVALSTNKPGVKPLLINGKPLKSVNQLYNKRKAKYQSALSGQKKTSRKMEALTYHRNRFVENYLHNTSKLVALVFNHK

SEQ ID NO: 24967 - protein, 337 aa, unknown
  TnpB Polypeptide
MIIRKAFKFELMANGEHIRKLKQFCGCSRFVFNQALAWQKEQYEQDNTLKFSYTKIANLLPEWKRQHEWLKNCHSQVLQQSLKDLESAYRNFFRKQSDFPKFKKKGVKESIRFPQGTKLDENNKRIFIPKVGYIRYRQSQLIVGTIKNVTVSLVCGKWFVSIQTEYEQAEPIHCSMTEIGIDMGISRFATLSNGTHFEPLNIFKQNQLKLKKLQQQLSHKKKFSQNWLKSKRKVSKLHHQIANTRKDYLHKISHAISQNHAMIYIEDLKVSNMSKSAKGSQEQLGRNVKAKSGLNRTIRDQSWYEFRRQLEYKSYWRGGLVYSYKPNLSLLFSCSKR

SEQ ID NO: 24968 - protein, 421 aa, Planktothrix sp.
MAGHQKTNYRFRIKMFCMTEKAYRYRFYPTPEQEDLLRRTLGCVRLIYNKALAARIQAWYEKKERVGYCETSSQLTEWKKEEELNFLNDVSSVPLQQGLRHLQTAFTNFFAGRAQYPNFKKKRQGGSAEFTKAAFTYKNGEIYLAKNKQPLPIRWSRQLPKECQPSTITVKLDPSGRWFVSVRIDDPTHNKLEPTDKNVGIDLGISSLLTTSDGVKVANPKHFNQLYKKLRLAQKSLSRKIPGSKNREKARKTVARIHAKIVDCRRDSTHKLTTQLIRENQTIVVEDLAVRNLVLNTKLARAINDANWAEFVRQLTYKAEWYGRKLIKIDRWFPSSKRCGNCGHILDKLPLNIREWDCPNCGTHHDRDINAANNILAAGLAVSVCGATVRPEQSKSVEAGAKTRKGRKQKIQVVSLGNPTP

SEQ ID NO: 24969 - protein, 443 aa, unknown
  TnpB Polypeptide
MGSVRVVRALSFPVGTLPPSLLGLLAEFRLIVNKAIRSAIRDDIRSRIGLQKAAYRQLSDEHLVYKQYIPSAFEVALGTLKPYRRRIRKGKKTNIPYVRQLFLKAENQSYRLDRGTGRLQVPIRRREHVLLDLPLSEWHRSFLSDPSWSLGSLTITPSRILVTVRKRGPEPYEPTSALALDTNEDSLDGVEADGTSSRLVRVSFGGVRQIQATHFRRSRRLAKKKAQDRRVWQRLLAREGTRERHRVKQRLHRVSKALVGDARAKMAAIILEDLTLSRASGRSRRRNRRLSSWPRGEIHRQIEYKAALAGVPLIKVHPAWTSKTCPACGARRRDRVGQDFVCEVCDWEMDRQHNAGLNILKSALASNEALARGVRFHLGALRRDVVIPLYDLPARVGAREDPSGAEYVAAVAQYVPPPTRSRNRRRLPYARVSRKGGTVQNQS

SEQ ID NO: 24970 - protein, 368 aa, unknown
  TnpB Polypeptide
MEKAYKYRIYPNKRQKELLAKSFGCCRFVYNHFLNKRIETYQTEQKTLTYNQCSSELTKLKSELEWLKEPDKCSLQNAIKDMDKAYKNFFKNNAGFPKYKSKKTHRFSYRTNATNGNIAYLEKHIKLPKLGMVKTRTRLMPQGRILNATISQEPSGKYYVSLCCTEVEIPKLEKAGKEIGIDLGIKSFAVTSSGETIPNPKYLQKSMNKLARLQRDLSRKTRGGSNWNKARIKVARLQEHITNQRTDFLQKLSTKMIRENDVICVEDLQIRNMIQNHKLARNIADVSWSEFTRQLEYKADWYGRKLVKVDKWYASSQICSCCGTQFPITKDLSVREWICPNCHMALDRDGNAARNILREGKRLLAGVA

SEQ ID NO: 24971 - protein, 416 aa, unknown
  TnpB Polypeptide
MAIEVTRTYVGSIQNHRQVCDGLDSLGDSASKIWNVARWTADRIWDATGEIPEEGTLKSYMKNQSCWKDLNAQSSQKVIEELSDAFQSWFDLRQKDPEANPPGYRKHGDTRLKSTVTFKADGFKHDPENNRVRLSKGSNLKESWSDFILCECQTRPDVDLSEVNKVQNVRTVWNGEEWELHFVCKVELETLDSAGDKVAGIDLGITNIATVAFPDEYVLYPGNSLKEDKHYFTQAEYDTEGGNDPSETSMWARRKLAGRETHFYHTLTDTIITECVERGVGTLAVSWPEDVREADWGKTGNKKLHSWAFDRIYQYLKYKGEIRGVEVVKKNEWNTSKTCSRCGDDTTSNRVERGLYVCSSCGLVGNADCNGAENMRQKITPSPHGEDRSNGCVAQPSVHLFDRESGTFTTREQAVS

SEQ ID NO: 24972 - protein, 240 aa, unknown
  TnpB Polypeptide
MTIYSTYKVKIKHYNHIFKDTISVYRAAVDYLIHVCIEDWDNITSYEKPLEKQRFVETLIHKTKDNPNVAYDFDVHFYKFPCYLRRGAISEAIGKVSSYKSNFASWKANPQGEAPSVPKAGYIYPSMYRTNMYEQTGTYQAQIKVHIRNTWDWITVNLRKSDIDYINRHCSTRKQCAPTLQKRGKEWFLDFPFEEKAKLCDTDVDKQTILAVDLGINTAATISVMRSDGTILGETFLSPQ

SEQ ID NO: 24973 - protein, 212 aa, unknown
  TnpB Polypeptide
MALFLGRHFCHLNKEIDHLIHSINRIKKAQQHHNCKTPRLWSRTKGINHDISVKTAQFITDIAVLYNVDIIVFEYLDRNGKLRGSKKQKLHMWRSQEVQAIVTNKVHRLGMRIRRICAWGTSKFAYDDSGMVLRGKDADLATYSVCKFTNGKIYNCDLSASYNIGARYFIREILKSLDESLRLDIEAKVPRCSKRSTCTLSTLISLNAALAA

SEQ ID NO: 24974 - protein, 406 aa, Bacillus sp.
MARKTVKQRNKELAKDGVQLHHYGFKMRAIATPEQLEKMYQFAGCARFAYNFYLNEKQEVYRKTGETLKYGEFKKAFNGLKDHPEFLWLKQTDKFVLECGMEQVEDAFDRFFKGQNKYPKFKSKHNSKQSFSTKSTNGNIKLDVENNQVKLPKIGWVKVKFSKKQRKLYQENGFNAQIKGATVSIHSSGQVHISMKLEEVIPMKQETDWSSISDDQIIGCDLGLTHFLIDSNGNKIDNPRYLKNDLYKLAKLQRQLKNKIKGSSNYKKLQKKIAKLHLKISNTRKDFLHQQSRKLVNENQVIVLEDLNVRGLIKNKKLARSISDVSWSMFVAFVSYKANWDGKKVVLIDRFFASSKQCNSCKSKNTLLSLSNRIWVCPNCGTEHDRDENSAKNIKEEGIRILQNLP

SEQ ID NO: 24975 - protein, 435 aa, Moorea sp.
MILTYCYRIKPSPEQIVTMERWLELLRRHWNYALGQRLDWLRRTRCPIDRCSVSYEPIGEIPELVNYYTQQAALKETKRLFPEYKKIYAETQQVNLQRLNKAWDKWLKPDANGKRGGRPRFKKPGKLRSFVFPRINSPKAGAHLVDGVLKLSRIGSIPVVMHRPLPVSEACPKGVGFTLKQCTVVKKADGWYCCISMKDDTVPEILPVDSIKSAVGIDVGLEKFLVTSDGEAVPIPQFYRKAQGKLAEAQKVMSRRVKGSKNWKKAKHKVALMHLHLTRCRKEFHYQVAHWLCSKYDLIAHENLNIKGLARTRLAKSVNDAAWGAFLEILQTVAVKRGLLVQEVNPRGTSIECFNCGSRVEKSLSDRVHCCPSCNVKVDRDWNSGINILNRGLLAVGLPLNGCGKSVQDIVRVAEAVGQEQQVSFVRLRSPHHNL

SEQ ID NO: 24976 - protein, 240 aa, unknown
  TnpB Polypeptide
MISLLIQKYTNPRITHDGKYWYIAVGLHTEEEKTLLTGESLGIDLGIKQLAVCSNGKVYKNINKTEKVRRKEKKLRRLQRSVSRKYEMNKEGGKVVKTRNSIKLEKKIRLLHRSLRNIRSNHLHQTTSEIVKTKPSTVVMETLNIRGMMRNRHLAKAVAKQGFYELKRQLKYKCALYGIAFVEAGLWYPSSKICSSCGHKKEKLSLSERMYECEVCGSKIDRDFNASINLSRYEKSSLTS

SEQ ID NO: 24977 - protein, 389 aa, unknown
  TnpB Polypeptide
MIKTYKFKLYHAKRNKKLHRQINAAGLTYNHCIALHKRYYRLYGVSLKKVRLQKHLTKLKKLPKFSYLKEFGSQAVQNVTERIEFGYQKFFRKENKRPPKFRKVRKTKSFTLKQTGWKLDEAHHTIVINGQKYRYHKSRQIDGIIKTVTIKRDSLGDIYVFFACQVDQESVIPRLGKSIGFDFGFKNRILVAPTPEDDVDMPRFFKQNQHKLKKMQKKVSKKLLANTDHFVKKGKGLAPVYKRPLQECKNIQKCFKEQARLHKKIANQREAYHWKLAHLLCEKYALICLESLNMQWMQKGYGQKVNEYGFASFGNILAYVASRYGTTLIKVDKWFPSSQLCSYCGFQNKAVKDVRIRAWECPNCHTYHDRDRNAARNILKEGLRIFEAS

SEQ ID NO: 24978 - protein, 322 aa, unknown
  TnpB Polypeptide
MACPIYKSFRKLRRKGRVKSDKPTFKKDVIMLDDHLFRLDLENWVVRISTPNGRVEFKVLHGEYHEKFRGWKIGQTWLVKREDETYLNVVFSKNVEMRDHEDVIGVDVNENNATIATNQSFITFVTRERVIRTAYFLKRRKIQSKIRCRRVKAKVLAKYRNRERNRVLNVYHEVANKIVEVALKANSAIALENLEEIRKRMDYSKELNGRLHRWGFRKFQQVLEYKARLNGIEVVYVNPHKTSSLCPICGRELSPNGWRQLECECGLVADRDVIGSWNIRLRGLKSLKIDVGSPAPPESPPMKSEEGKVVRYESTTYNKSSG

SEQ ID NO: 24979 - protein, 546 aa, unknown
  TnpB Polypeptide
MEETQKIRLLSRLASFERDGDANLEDCIYMASTPKGRVPILKVMQTTMCDKNCLYCAFRRGRDETPRIYIPPDQLARSFMELYRRGRVKGLFLSSGIFGHPEFTIYPQEGSTFYKVEMNCVQYIPMTKAEKIKQTIKETKERRKNLSPVVYQLKIQNLSKAKEEKLNRVFLEAKWLYNWFVASIDRVNIPTKEIKEVEIKVGDKLEKREIKYLGSQLKQAVQERVKDNLRGLKALKEKGYKVGKLKFKKSVSSINLKQYTVSFEIDFAKNKVRIQGLGWFRVLGLHQIPQDCEIANAQLVKKPSGYYVYLTCYVKKEHFERNKVRDAVGIDFGVANKLTLSNGLSVDFEVEESKRLKKLQKELARKKKGSKNREKVQKKLQREYERLTNRRRDIHNKLLALFRHYGVVVFQDDNVKAWHEGWFGSQVQYSGIGRLKARLRNNLATIPVERFETTTQECCVCGWKQKLSLSDRIYHCPVCGNTINRDLNSAINILKKGLDLSQNQVVGVGRPELTPVEMALVAKILGSTPYIKATVIVEAGSPHFYK

SEQ ID NO: 24980 - protein, 246 aa, unknown
  TnpB Polypeptide
MILAKKVRLYPTKEQEQKLWQSIGTARFIYNYTIAKQEELTDVSLGIDLGLKDLAICSDGQVFKNINKTKKVKKLEKRLKQKQKQISRKYEMNKIKKEGGVSCQFIKTKNIEKLESTTRLIHRKLSNIRNNYLHQVTTNIVKTKPYRIVIEDLNVSGMMKNKHLSDSVRRQCFYKFREYITYKSELYEIKLVIADRFYPSSKTCSHCGSIKKDLKLKDRVYSCSHCRTVIDRDYNASLNLSMYKLA

SEQ ID NO: 24981 - protein, 523 aa, unknown
  TnpB Polypeptide
MFVSLQFKLELKREDREKLIKLMRKQSSAIRVAYNILKDLEKEKTKNLHAQIYQRLRQLFPELPTRYIDSAIYKAKQYPTDKPVVFGGKRLFEKLCKNHLTGKAREKLKKQWRELRQGTLIAIGSKHKTARGNLLLRFVELDGKLHLRITTGNREFIYAKVLREPSNNKDKWLTFIAMLLESWQTKNHFVYTVELKLRNGEVYGSVSFEIPTPEVRYTKENGVIATDTNASPIRLAIVEVSRIGELLSYQTISLHHILGLSQNSKDHQEWILAHQIVDLAIQKGKAIAIENLKKLKKGTRGDGKATLRKILHNWNAKKFLQKLKRVAMIKGVEVIEVNPAYTSIIGMLKYAPQLNIDKDVAGAYVIGRRALRFKEDTPENYEKLLKDRTYLEFALKRYEEREKELTELIEKESNEYRKSALKSELRSVEDAKKLLTNLIQSLQSESSSCEGACGRNPEQGRGSKASSSAWQVLRVVLLFPILGKVLPRDLSPLKPVLVEGVWDRVRSRLVPLEAGGTVPIRDF

SEQ ID NO: 24982 - protein, 348 aa, Rhodococcus sp.
VARRLSGAGPARGRGARSCGTRRSGGRCRCRGQGRRLLVVAAPDGREIGRVPAPKSLTGAQARLRALQRRAARQHGPYDPSTKTKRRPSKRWGKTQRRIGRTHAHAAAVRRDVLHKATTELAQRHQVITVETLNASGMRSAGGAYKRGLNLALADAALAQIRRMLSYKTTWYGSVLVEAGRYFPSSKMCSGCGRRKPNLTLADRTYVCDHCGLTIDRDLNAAINLARLGETHRTVQRGPVPGVARPPPIRVETDVEPRGSPRLRKWSTPQAMKRQPGTSSRWVRPGLSHRKVRLPDGEASKACSRLLTRRQRGNIEHCAVTQGFSGRYRPRGGGSDLDRGSACPRRGH

SEQ ID NO: 24983 - protein, 254 aa, Rhodococcus sp.
MARFEIPHGWTAQAYRFALDPTPAQLRAFRSHAGGARKAHNTMLAAVKVVMDQRQAERSYGIADDELTPSLNWSLPALRKVWNARKDEVAPWWAENSKEAYNTGLDALARGLDAWSKSRKGKRAGKTIGFPRFKTARSRGSVRFTTGVLRVETDRHHVTLPSLGRIKSCESTRKLARRVEAGTARILSATVSEDSAGRWHVAFQVLVQRAVAVPAHVGLGDPVVGVDVGVKADASWSLRHRTAARSAGSRHRSP

SEQ ID NO: 24984 - protein, 389 aa, Photorhabdus sp.
MLRATKVRIYPTPEQAEFLNAQFGAVRFVYNKALHIKKQAYRRHGISLSPRKDLKPLLAVAKKSRQYSWLKEYDSIALQQAIINLDVAFSNFFNPKLKARFPTFKRKHGKQSSYHCVGVKVLDGAIKIPKASAIEARLHRDITGTLKSITLSRSATGKYYASLLCDDGVEVPAKSALITNITGLDVGLSHYAIKSDGTKVSNPRHLINASRNLRRKQKALSRKQKGSANRRKARIQLAGVHERVANARADFQHKLSRAIVDENQAVIVETLKSVNMMKNHNLARAIGDAGWHGFITKLEYKAAERGVHLVKLDQWFASSKICHCCGNKMPEMPLHKRIWQCRVCGVEHDRDINAAINIRHKGILELKAAGLVVTAHGDQCKSVISTVAV

SEQ ID NO: 24985 - protein, 433 aa, Streptomyces sp.
MLVGRRYRLQFTPEQREAAEEYGSICRAVWNIGLEQRREYWRRGAWIDYVQQAREMAEAKVEHPWLRAAPSHILQQTLRDLDRACRTHGTFGVRWRAKQRWQPSFRFPDPRHLSVEWLGRKRGRARLPKLGWVIFRWSRPLGGRLKSATVSRDGKHWYVSFLVETGTAGPAVSLERGRVGIDRGVAVLAATSDGRFLDRSFITPGEAQRYRRLQQQHARTQKGSNRRKACRARMRVMMRRVRDRRRDFHAQTARHVVDGNGLVVLEDLNTAGMTATARATSAEPGTHVGQKAGLNRAILDKGWHSFELAVRSRARHTGTAVRTVNPAFSSTTCPACGYVHPDNRESQAKFVCTSCGHREHADTVGAKNVLARGHTGHRAWRPRRQPVCEAPTSAKPQGISAPTAEVGILSASADGRIAKSVMWDVTRVSLHET

SEQ ID NO: 24986 - protein, 273 aa, Firmicutes sp.
LRLEGFCEEVVRKHQVVRRLQRKLNRQRRANNPDNYLPDGRVKPGPKRWVKSNRQRRTEAELADLLRREAAHRETLHGELAHRILAMGRVVKTEKLSYRAFQRQYGRSVGVCAPGKFVSILRRKAESAGGRVIEFSTRQTKLSQVCHGCGRVQKKPLSQRVHRCACGIEMQRDLYSAFLARCVGEDGLLHADLADTAWSGAERLLRAAWSEATEPANGRRKPSSFGAAPRSRSGSPAEEGTAKAEALDVVAHAQACGESRGETAVVPLRTPRL

SEQ ID NO: 24987 - protein, 457 aa, Firmicutes sp.
MRLEVDEHTAAVLDGQSRIANWLYNRLLEEANELRRRFRETQDPEAAKVLYTERGLRNRIPALKQEHPFLRTVHSSVLKNAALRLSSAIRKYQKGRRGERAKRVGWPTFRSWKRKWFSLHYDEPWKGFRLDGRTLRLSLGKVLDEKTGKEKQAQVTAHLAEPLPDWFKPGMVRQLRIVKEGRVFYAVFTVERPVPARRLAGRVIAIDPNHKNLGYGVGTDGVATEILNPWFLKMLDRRIDEVRWLRDRCKRRSVRVVREDGSEAWLPSRRWRKLNARLEDLWRVRREQTKVYLRTVANRLYREYDGVFVGDYTPRGGGISRGMRRAMNNQSLLGRCKETLAWVATRSGKVYGEWNEAGSTRTCHACHYAVPGGIPPEVREWACPECGTHHIRDENAAINGLARVLKNVEVPGSGRLGDKIVVTTRRAWRFDGLGIQEIPGIVGGRVGDHAAGCQEIK

SEQ ID NO: 24988 - protein, 375 aa, Firmicutes sp.
LEPTPQLDALAQAAGELYTRTVISFWRTVRKHGQWLKPSAMMRWHTSDQLHAHSADAVVQGFYAALKSWRKRRKTDPHAKPPYRRRRYSRVQWKSSAIRVRYGSLVLSNGRGNAPLVVPWSWGVPVLVELGWTGTGYELRCAYRDMDPVPELVGDETAGVDLGEIHLAVAHDGQRTTIFNGRELRAKRQYQNKIKAALAAKQSRLKKGSRRWRKLQRSKRKQLQKLDHQVRDILHKQTTALVSTLHASGVQTVVIGDVRDLRGRVDYGPAANQRIHQMVTGQVRWMVTYKAGRFGMRVVLQDEAYTSQECPRCGHRHKPRGRVYACPACGFRFHRDGVGAINIRRKYLGSGPVVGAMASPTGVRWQPHQHARVAR

SEQ ID NO: 24989 - protein, 527 aa, Firmicutes sp.
MALVQAVRTMILPLWGPNGVKHAALEQTQALFERLVAFYLAVLIREPGLWDKVPKRDQQTRRVLFDPETGEIRMRAPTAKEVLTRVEAVTVKTRAHPDPSHDLQAVPGAAKAPVVFRRAAIQRAIGLVRAYRSNLARWERRGRKGRMPGPPVVGRFPITVYRGQGLIVRSPLRSFLKVKLWNGAQWAWVQIPVRIPERVAILLARSEETRARIEAGLSAARALEREGRAEEAKTAREQLKPLPWEIAQASVTLYRHPDGWAAHVPFVRTVPVKPAEDQRAAHPGLPVTTVDLGENNLAVAVAWRGRKVIGTLFVRGRAHEGRRLRRLSAIRWRQMASGKPARGVRSNRRRWARLAQAEEDAARQIARRIVRFAKTHGSRVIVLEALNRMPQAQRMGWTRRQNLRRSWWMRGRILSFTRAMALWEGILVVRRDPAFTSKACPHCGAYGERFSRRTGGRGPRHTFRCPACGWEGNADLVGAINLKKKWDRTFPPLGPLMAVAKATKNDTKTAPARVEDKGAVEGAANAG

SEQ ID NO: 24990 - protein, 215 aa, Firmicutes sp.
VDYTITSGIIPSDGGLSPALKRGACAAKFSVNIATDSDGETYSGGHLNGLRKRHAKLRQRLQQKGTKSAKRLLKKRRRKEHRFATDVNHRIAKRLVAKAKDTGRGIALEDLTGIRDRITVKKAQRRRQHSWAFYQLRTFVSYKAKLAGVPVALVDPRNTSRTCPLCGLIDKRNRPDQAHFRCIGCGFAGPADTIAAGNIARRAAVNQPHAAGGSA

SEQ ID NO: 24991 - protein, 426 aa, Firmicutes sp.
MRTHQAFRFALDPSPRVERALASHVGARRFAFNGGLALVKARLDAHARGEAVAVPWTLPALRREWNRAKEALAPWWREHSKEAYASGLAGLADALRNWRDSRHGRRKGRRMGFPRFRKKGRGRESVGFTTGAIRVDDQSPVVLPRIGRVRTHEPTTKLLARLRSGTARILRATVSREGGRWFVSFACEVEREPGTPRRPETVVGVDAGVRHLAVLSTGETVPNPRPLQRALKRIARLNRELARRQPGSRNRAKTRRRLARLHAHLAHIQQDAWHRLTTRLARTYGTVVVERLHVAGMLRNRRLSRALADTVLAELRRQLTYRTVWYGSHLVEADPFYPSSKTCSRCRTVKETLPLWERTFRCDACGLVRDRDENAARNLAALAVAVAGSGPETENARGRDVRPTARRAVPEETGSPQGEAPAARTP

SEQ ID NO: 24992 - protein, 421 aa, Firmicutes sp.
VKTLQAFRFALDPSPRVERALASHVGARRFAFNGGLALVKARLDAHARGEAVAVPWTLPALRREWNRAKEALAPWWREHSKEAYASGLAGLADALRNWSASRQGHRAGRRMGFPRFRKKGRGRESVGFTTGAIRVDDQSPVVLPRIGRVRTHEPTMKLLARLRAGTARILRATVSREGGRWYVSFTCEVEREPGTPRRPEAVVGVDAGVRHLAVLSTGERVPNPRPLRKALRKLARLNRKLARRQRGSRHWRATRRRLARLHARVAHIRRDAMHQLTTRLARTYGTVGVEQLRLAGLLRNRRLSRALADAALAELRRQLAYKTAWYGSRLIEADPCYPSSKRCSGCGAVKDTLPLGERTFRCDACGLVLDRDANAGRNLAALAAAVAGSGPETENARGRDASPAVRRAIPEEAGSRRGACP

SEQ ID NO: 24993 - protein, 234 aa, Firmicutes sp.
MVDREPGAPRRPEAVVGVDAGLRHLAVLSTGEKVPNPRPLKQVLRKLSRLNRELARRKPGSRSREEARQKLARLHAHMAHIRWDAWHKLTTRLTRTYGTIVVERLNVAEMLRNRRLSRAMADSAMAELRRLLAYKTTWYGSRLVEADPFYPSSKRCSDCGAVKDTLPLGERTCRCDACGLVLDRDANAARNLAALAAAVAGSGPETRNARGRNRSPAVRRAIPEGAGSRQGARP

SEQ ID NO: 24994 - protein, 392 aa, unknown
  TnpB Polypeptide
VFGGRKALIERSRGKITESEWKHKRLSPLIIEGHAKSFGHQGGNHLVTLDARHTQLIFHGPERKNYIFALRLSRRSRSYRRRLEQLQLRCETQRDTPFSVSLTDTEVSISWETRISPQESVADPRRTVSLDLNPSRIGWTVGEKSKPGCRCLAWGIFEFPELNRRLRVASTDRRAIAQNDKRAYELSILAKSVALIAHHYAAQTVVTERLQLLAQDHGRGRRFNRLLNQCWFKRGFLQPLQRRLEEGGLRLAQVNPAYSSRIGNLLWADSLQIPDPACAALEIGRRFHDPLPPTPDTRKPPSKPNADRLRKDGRRVTEQSAALGGWKRVWSQLNPLARDTPRQAWRRRRRFLPSGLSRRLSVREQRSQVLHFDPRSGTSDVFGLDFNLLGAD

SEQ ID NO: 24995 - protein, 392 aa, unknown; identical to SEQ ID NO: 24994
  TnpB Polypeptide

SEQ ID NO: 24996 - protein, 378 aa, Candidate divison MSBL1 archaeon
MKYTYKFRLYPTQKQEAKLGETLELCRQTYNHFLSQINESEEIPKRTKLQSQLPKMKTQKPSLDHVHSKVLQMVVYQLYSNLRSLSELKKNGRKVGRLRYKSRGWFKTFTYNQSGFKIIETNNRLDKLHLSKIGDISIRIHRKIKGEIKQITVKHSHSGKWFACICVERQPQREKPIESAVGIDVGITHFATDSDGRQIENPHNLERSLKRLRREQQKLSRKRKGSENYKKQRRKVAKLHEKIKDRRNDFLHKLSRHYVDNYDLIVVENLNVKGMIRNKNLSRYIYEASWGKFVRYLSYKAESAGKVVVKIDPKGTSQEYKHGKLDRDYNASLNILERGMKEVGMGWAESTLVETEPLLHATSQDVITGQVQSLKQEA

SEQ ID NO: 24997 - protein, 421 aa, Candidate divison MSBL1 archaeon
MVEEVRTVKLNLLNLTERKSKLLSELLNVCKSAGDHLFKTAVYLEVFNKPESRFALQEVEYDHIKERFALHSQIIVGLCKDVFTAYRNGGLNFFKYTIPYNVPRSSKLAETENGNPVISVATLDGRIGLPISQDGAWERFNEFLEDGYEFTSFRLKKEQDDWHILVPLRRESEVKGEFDSVLGVDVGSRTLASVTVLSKERVEEQLYFGRDVWEKQRDISIRRSELQSHADRGSSKARRKLRDLKNYESNFVKTRCYQVAHKIVKLAKQYNSVVAIEDLTGLKNARGHRKSDRRTKRMPYCTFRVALESVCKREGVPLIAVDPYHTSQSCPNCGSLGKRKQKGVIFECECGYRANADRVASLNIALRASETIHNSKRIFAQSPKGNVPVNGHDWRDWGSEIMSSHGYSPPERKPTTSIVGS

SEQ ID NO: 24998 - protein, 503 aa, Eubacterium sp.
MHTVRLLLATTRYDETVIEKRFHAISHIHNVIVKHAQKRLKRLSYDAEYQSLKAEYKKLLKKDTLSIEEKTRRKLISRQMAEIIRTHSLSEYAFQSYIKVCGKQFRKCLSSQQIQKEATRVWKGVEAVLYGNGKELHFKKYRDFHTICGKTNTNGAKFQKESCSIQWLGLNIKCKLPKDQDYLLEALDSEISYCEMARKMFPNGWHYYVVVYLKGDAPHKIKAVGRDDVAGIDIGTSTVACVSSRSVTLQELAPKCREYNQKIERLLRRMDRSKRILNPNKYRADGTIEPANHEKWKFSKAYRKNQNRLKSLYRQKAAYVKQSHEETINRLLHESVCFIVEDMSFTGLQRKKKTTERRDQVSEIRQKDGSAKKIHKYKRRKRFGKSITDRAPASFVTILEQKAKLYGGNVSKVSTKEYKASQYDHAKDQYIKTDLSVREKIIAGHKVQRDLYSAFLLRNSNQKLNKPDQKKCIYEFDRFVKLQDQLIEKMKENNISMKQCFGF

SEQ ID NO: 24999 - protein, 376 aa, unknown
  TnpB Polypeptide
LYPFSLSARYTIASTSFTCSSGSFSTLKYCVLLMFCIFVTPLYSSLLYGKKAIQIFAEKAYCINTYRPCYATLVPKLIRRKYRVYLHLTIEGKAKPKYDRFGNPRHKFGKGIIGADIGTQTVAYTSDTEVGLKNLSERGNSIQKSERLERIYYRAMDRSRRATNPQNYNKDGTIKKGRKIWKYSNHYKRLKAKHAELCRINERNRQLAINEDANYLRSLGDVLITEPKNASKLMKRAKETTKNNKGKFNKKKRFGKSIKNRCPGGFQTTIEKKFEVSGGRYIEVASNYRASQYDHTADAYVKKKLSDRMYHLVDGTLVQRDWYSSFLLYCYDDKIEEINKTKCRTEFEKHYKREKALIEWIQANQIKILNSGIKTA

SEQ ID NO: 25000 - protein, 378 aa, unknown
  TnpB Polypeptide
MQKIMGCKGRLYPTPEQAQQINQTIGNCRFIYNYMLARQQKIYRRRGEHMSYISMQNLLPGMKKYIPWLASSDSQALKYACRQLNDAYQRYFKGLGDKPRFKSKKRSDGQSYTTTKGSAIHVLDGAVKLPLLGIVRCKGLRKLDGKVSKATIRRTPSGKYFVSILYTIEVDDPAPVDGMVGLDVGIKEFAVDSNNVHYENPKYLSKSLKKLRREQRRLSRKEKGSKSRDKQRVKVARVHERIANQRSDHHHKLSRKLVDENQIIGVEDLNIKGMVCNHKLARCISDAAWGNFLRMLEYKAAWSGRTLVKIPTFYPSSQTCSCCGYQNRAVKDLSVREWVCPVCGANHQRDENASQNILRETLYILLVKELRRLSHPAA

SEQ ID NO: 25001 - protein, 660 aa, Escherichia sp.
  misc_feature (199)..(199): Xaa can be any naturally occurring amino acid
  misc_feature (221)..(221): Xaa can be any naturally occurring amino acid
  misc_feature (226)..(226): Xaa can be any naturally occurring amino acid
  misc_feature (372)..(372): Xaa can be any naturally occurring amino acid
VKRLQAFKFQLRPGGQQEREMRRFAGACRFVFNRALARQNENHEAGNKYIPYGKMASWLVEWKNATETQWLKDSPSQPLQQSLKDLERAYKNFFRKRAAFPRFKKRGQNDAFRYPQGVKLDQENSRIFLPKLGWMRYRNSRQVTGVVKNVTVSQSCGKWYISIQTESEVSTPVHPSASMIGLDAGVAKLATLSDGTVFXPVNSFQKNQKTLARLQRQLSRXVKFSXNWQKQKRKIQRLHSRIANIRRDYLHKVTTTVSKNHAMIVIEDLKVSNMSKSAAGTVSQPGRNVRAKSGLNRSILDGTVSQPGRNVRAKSGLNRSILDQGWYEMRRQLEYKQLWRGGQVLAVPPAYTSQRCACCGHTAKENRLSQSXFRCQVCGYTANADVNGARNILAAGHAVLACGEMVQSGRSLKQEPTEMIQATESEVSTPVHPSASMVGLDAGVAKLATLSDGTVFEPVNSFQKNQKTLARLQRQLSRKVKFSNNWQKQKRKIQRLHSCIANIRRDYLHKVTTAVSKNHAMIVIEDLKVSNMSKSAAGTVSQPGRNVRAKSGLNRSILDQGWYEMRRQLEYKQLWRGGQVLAVPPAYTSQRCACCGHTAKENRLSQSKFRCQVCGYTANADVNGARNILAAGHAVLACGEMVQSGRSLKQEPTEMIQATA

SEQ ID NO: 25002 - protein, 403 aa, unknown
  TnpB Polypeptide
MKIKLLPSTDQKKTLTRWFNTARWTYNQTVQAIRDGTPRTKGAIREKCVHNSLFEETNKWVRETPYEIRDSAMNDVLLAYKTSIAAKRQKFTVNFKSRKASSDSIVIGSRQWRKGGIPFPSFFGKTPLKTAEPIPDQLDYDCRLQRTSSGNYYLCIPKPLDIRSENQAPKDKLIALDPGVRTFQTGYTDDSEIMEFGKQDIGKILSLCRHLDKLQSKWSQPDVTHRKRYRLRRAAKRMRTRIQDLVRDCHHKVAKYLCENFTTVLLPLFETRHMVSRIKRRIGSKMARAMLTWSHYQFRQRLLDKAREYPWCRVVIVDEAYTSKTCTHCGALHPSLGKSKTFDCPKCHVVLDRDANGARNILLKFLTENKMAEAIRHWVLAPGGDAKAHPLAGLHKNVQFGQE

SEQ ID NO: 25003 - protein, 520 aa, unknown
  TnpB Polypeptide
MIATFEAKVFDQALSPLFSSIADLYAQAEHALYVDHYVRGRPETECKREYLGRFRLTARQFNAVAVNLRGKVEAAKEAQKLHIEQLKGAIAAAEKAVKKAERGLSQLGKRAVKKSSVAKGGAHDAEISEGKRRLRFKIHHKKRRLTALRLRLAAAETDRKAGRVRLCFGGKRRFRAQFHLQKNGYASLAEWRQELQRARSSQFLCLGSKDETSGNQTCTRMPDGNLRLRVPPALEGQYGSHVEILGIVFPYGQGEIDAALLRQEAVTYRFLRRRRHNGQKEQWYIQATVDRLDVETTTLRHLGALGVDFNPAHVNVAEIDRFGNVVGSRSFQVDLSKHSEAQMTAALSEVVADMVDWAQKAGKPIAVEHLDFGKKKSALREKSPRYARMLSGFAYGKFHSLLRARAGREGVEIIGVNPAFTSVIGAVKFAPGYGLSSHCAAAVAIARRGLRFGERLRSRSAFPLPARNRGKHVWSDWRRLSQRLRADSARGRRPSEGDRRRGTPLSSATPSQAPAGQGPP

SEQ ID NO: 25004 - protein, 387 aa, unknown
  TnpB Polypeptide
MERRMSYVYRLYPSRIQEREMDRILTTCRYFYNDLLAERKDAWEQRQETVGKTAQLRHVRKRKASNPHAAPVHSHILQVVVADLDRAFQAFFRRVKAGEEPGYPRFRGANRWRSFGLKELGNGFSIDGRRLKVHGVGRMAVRWHRPIEGAIKTVRLSKKAGHWYAAFSCVVDAPAPLAQTGKSVGVDVGLSHLVTLSDGERIVNPRWYRASQSKLRVIQRRIARRTKGGANRRKAIAQVQRQHERVARQRKDCLDKVAWGLISRYDLIALEKLRVANMVKNHSLSKSILDAGWTYFAQHLTSKAASAGREVRFVDPAYTSKTCSGCGVLFNHDITLSTRWITCSSCGLSLDRDHNAALNILKRAGTPPLGANVAGLPACVAQEAAGF

SEQ ID NO: 25005 - protein, 355 aa, Halobacteriales sp.
VEYRRTAVIKLDTPESAGAHLRETVEQFKYCANTASRWCWHGDDGYHVTSKAKAEQALYDQLREDTGLTANLVQKGIRQAVESIKSGVERLKNDQRTSRPTFTADTAVYDKRSATFHRDHVSLSTVGGRIECEYILPDDAEKPPTKYVTDEEFEFRRATLHRRDGDWYLHASMLKEDDDTDTTTGHRTVLGVDFGVNQLAVASTGRFWSADEFNHWKREYEKRRGDLQQCGTRAAHDAIAGVKRKEDGRFEIFLHRVANEIVAEAVEHDCSRIVFEDLIDIRENVPQASWHHLWAFRRLYEYVAYKAKEQSKNIGLQYLRRRQNADDGGAPVDVRLNRGTLNVSGEYDLPASPEA

SEQ ID NO: 25006 - protein, 405 aa, Cyanobacteria sp.
MQLVDRQVIRNTSPFWAEIDDLAFRSKNLFNQANYQIRQRFIFQRKYLNYNYMAAVLKDSPDYKALPTKVSQQILMRLDESWRSFFTAIKEWNVHPEKFLGRPKLPKYKDKKKGRNVLTYTIQAISQKWLKQGWINLPMTNVFIKVLYDNVRQVRIVPKCDHYVIEVVYEKEAKDLGLNPASIASLDLGVSNLAALTSNQPGFQPVLINGRPLKSTNQYFNKVKARLQSLLPGHRKTSHKIRKLTSKRNYRGDHYLHNASRWIIDYLIQNDIGTLVIGKNDLWKNGINIGKQNNQQFVQIPHGRFVQQLTYKAQLVGIQVIAQEESYTSKASFMDGDAIPVYQKGSEAKHRFSGRRIARGLYRTANGFLINADVNGSYNILRKAFPVNGIEAVVVQPVRVTPGKG

SEQ ID NO: 25007 - protein, 392 aa, unknown
  TnpB Polypeptide
MRKTFKYRLYPKKETEQKLFWTLTRCRELSNAALSERKDAYRYAGKSISYYDQQNDLPEIKAEIREEYQDIAAHVLQDVLRRLDKAFQNFFRRCKNGENPGYPRFQGRNRYDSFTYPDGAGWKFDGQYLHLTKIGKAKVKLHRSLEGKIKTVTIKREVDEWYVTFSCEVEGLEKLPVSYEDVGIDVGVTHLATLSNGEMIEHPRYYRKAQKMLEKKQQSLSRKKRGSHRRNKARTLVAKVHRKIARQRKDFQHKTSKQLVARYQVIVFEDIKTCHLTRKPKPKQNENGTYLPNGAASKGGLNKSILDAGWGTFVQLCSIKAAWAGRTLIKVDPRFTSQVCSGCGQVRKKDLSERWHSCDCGTELDRDVNAAITILARGRRQQGAISVEAPCL

SEQ ID NO: 25008 - protein, 309 aa, Bacilli sp.
MVLITSLQKEVDTLSLKVNYPKFKSKFSRQSYRTSCIRSTYKGKEYSNIEVDLLTRNIKLPKLGRVKIRGFRKKNKIEGKILNATISRESTGKYYVSVVVVEDILIEKATPTSIVGIDLGVKDLVVTSDGIKYGNKKILMKFEKRLKRLQRELSRREKGSNNYLKTKEKIARLHAKIKNYRKHYLNDIANEIVEEHDIIVTESLLVKDMFKDKRKAFNKSLSDACVSTLRSLLEWKCKIKGKIYYKINTYYPSSQICSYCGYKNSKLKDLSIREYDCPKCGSHNDRDINASLNILLEGLKLHYNLVSLV

SEQ ID NO: 25009 - protein, 426 aa, unknown
  TnpB Polypeptide
LRKQRWPAIDEAWQEDDMLLSKKIKIEVSEQDAQALEWMQGKCRGLYNWWVMRLSSGERWNFSNAKQSLRESKQYDPELRAVYGKLLAEVYYRLDGAMQGFFRRVAAGEKPGFPRFKPRHQFFTLCYPAMYLEVQGNTLILPTGGGGNWGPKRSPNIVARLTEDPPEHFHEVAVSRDARGNYYCSFVYDDAEQQVSERRQAHQKRKKRKPRPFRDEGIVAFDLGIKTLATGYTDQGRFYHIGGFKGYRYYNKQLDKIRSKRDKCKKKSRRYIHLSKVYKRVAEKKRCKQRDYLHKASHLIAGTLAERAVVIGDLSQRQMVIKQREDETPKDRRKRQIRNRMVYNDWGLYSFVQMLTYKCLRFGKELHIINERDTTKTCHVCKRKKDMPLWARTYRCENCGLVMDRDENSAVNIYERFLARPGPHTL

SEQ ID NO: 25010 - protein, 219 aa, Microcystis sp.
MTVGKTCLGIDAGIESFVATSRGDLIKAPRFLLKVQSQLKLLQRRLKHQVKGSNNWLKLQEKIARLHEKVSNTRRDWHFKLAHYLCDFADNIFVEDINFVSWSRGIVRKQSLDSGIGSFINEILPFVVWKRGKYYLKVDKNGTSQECPNCGAITGKKELSERVHRCDSCGHIEPRDTASAKVIENRGKNAVGLTVLENACGGGRLGVVQLNLFDLVKSR

SEQ ID NO: 25011 - protein, 407 aa, unknown
  TnpB Polypeptide
MLITKKIKLLVSPQDAEALEFMQGKCRGLYNWWVMRLRNGERWPGWEEAKKTLQESKRYDPELQQVYGKLLHEVYFRLHNAMKAFFRRVQNGEKPGFPRVRPRHCFFTLCYPAMYLRVEGRILTLPTGGRGRKNKQYPNIQALLTEEPPTNFHEVAISRDARGNYYASFGYYKQEEPQQAGTVVAFDLGMKTLATGVNEQGRFYHIGGFKGSRWYNRQLDIIRSKRDRCKKKSRRYIHLSKVYKRVSEQKRNKQQDCLHKASHLIAHRLVERTVVIGDLSQRQMVMKEHRERNKHLNRAVYNDWGLYGFVQMLLYKCVLYGKELVILDERDTSKICSGCGHKQGMPLWNRTYRCTNCGLIIDRDDNSALNILMRFLARLGPHTGDPVRCADVFTAIDDDVLGMFQHI

SEQ ID NO: 25012 - protein, 408 aa, Feldmannia sp.
MKDKGVVLRCRKVRILPSEEQREILKSCFGIHRHIYNECVKAEKDGDIDGAGVRECYKWRKAFTTREDYYGQGKNWKDDCPSHTKQQAVEEFFKNKKTGLKLVSEGKIRRFDIGFKSRFKCRQETIPFEKFLIKKKDSTNPLSKSLVSTTYKGKSMDLRIMGKVPKVFKDRDDQGFTRTEMKITRTKTGKYYAIVSFEVPQTSRFPEIHGDMISFDPGCKTFQTYHSPDGTWGEIGTFEKQELLLRKADRLKSRLELEGKDKDSRWRRRTRRRMLNLFEKVRNRTADLHNKVCSWVVNTYRLVLVPEFKTSQMVSSKKLYSKTCRKMMTWSHYRFRSKLIAMAQKFTDVKVRLCNEAYTTKQCGSCGVINRSMTLNDRSFNCVSCGLSSSRDGHAARNVGLRSLRFLV

SEQ ID NO: 25013 - protein, 436 aa, Pyrococcus sp.
MKRTVTVKLQPSKEQERILLELAQASAVIWNKLNYERLKQFKEFGVIDFATTEKEAYHAFKDWVGGSIVQQLARKNAEAWRSFFSLNRKKKSGELPEWFKLNPPKFIKGENGGKLFIIPLRNDQYRIEGNVLELRRLGKFGRLRIQFKGRVHFKGKQGRLEIQYDEVKRKWYAHVSFTVEEKLEGEEWIKLPRKPKGNLTAGIDLGINNLMAVYVENGESFLVNGRPLKAIAFYWRKRVADYQSKLNKSGTKTSRKLRKMHEKAKLQAKHYINTVVRQTVKRLYELGVSKIVIGYPKGISRNSERGEKQNFLLSHVWRFNYVIKRLKEVAEEYGIQVVLVDEAFTSQTCPLCGQRHSNGRIFRGLFKCHGEGVVMNADLVGAFNILKKVVRTITPSLPGLTAGRGNWPETRPEGLKARFELSFNEAPQTSPPIARG

SEQ ID NO: 25014 - protein, 411 aa, Pyrococcus sp.
MQNNSSKNETIIRAYSIPIQADEVILEFIEEYHKLARKALQEILNAEKFTKVERKQLRDKLLENWSYATHYVDSAINQMLGLVKSYKKKLKKGKKVRKPRLRKKFVYVKSTLFTLKGSVLRITITPRKHYLEVNLANYPHILPFLKEVLEGKLRLGGLFLFPDRLVLNFVKSVEYFEPRDWMSIDINLTNVTVLAGLTVYRFDTRELYHIHRVYELKRRRAQKISAWNRRLSEELLEKYSRRERNRVKDFLHKLANKIVEIAREKRMGIILEDLRGIKEKLNGSKELNRKLSKWNARELERLIEYKAKWFGVPVVYVNPRNSSRVCPVCGGRLIPREGRLVECPNCGLVEDRDFVAVLNLRMWGVWGSPEWVGGFEGSPDEGLMKTNPYGVMAVEKQRIGLKLHKITPKPP

SEQ ID NO: 25015 - protein, 393 aa, Pyrococcus sp.
MPSETIKLTAKFKLKNPPRELDDLFSTYHKIVNYLITYAFENNVTSFYRLKKETYKNLRKEYSSLPSHYLYTACQMATSIYKSYRKRKRKGKARGKPVFKKEVIMLDDHLFKLDLEKRVIKLSTPSGRIILEFYPAKYHEKFKGWRIGQAWLIKTPKGVFVNVVFSKEVEVGEPKAFVGVDLNENNVTLSLPNGEFVQIITHEREIRTAYYLKRRRVQRKIRAGRRREELLEKYGERERNRVNDLHHKLANKIVELAEKYGGIALEDLTEIRESIRYSAEMNGRLHRWSFRKLQSMIEYKAKLRGVKVVFVNPAYTSSLCPVCGGKLSPNGHRVLKCSNCGFEADRDVVGSWNIRLKALKMWGVTVPPESHPMKMGGWKPTRYEINAPHTTNG

SEQ ID NO: 25016 - protein, 398 aa, unknown
  TnpB Polypeptide
MVLRTFNIEIVMAEEVSRHWLNLLVQSRDAYNFCADTAIKEEVSLSLKAFHNALYQRMREEFRELPAQAVIKVYKDVLAALRSIRGNKQRNAETPHREALSLQLDRHLYSRMSGDGIILSSGIERKRVLCPFKLYDKVRELFSTCPTKDPRIFYLDGRFFLSVPFECPTLPIQGENAIGVDLGMKRLFVTSEGKFFYDKEYLAQRRKLRYLKRCLQSKGTKSAKRHLSKVRCKERNLSKDMVERATNALLSSTDASILVLEDLSKIKSKTSKTSEGYKRARHNNAQSQVPYYIFKERLTQKAPLVGKQVETVSPMWTSQMDSRTSKRDGQRKGCRYYCSDGVVFDADHNAAVNIANRSKHPTSSVLPIDGKLLPLVGKAQSTALTSTTNNGCGQAHSL

SEQ ID NO: 25017 - protein, 422 aa, unknown
  TnpB Polypeptide
MPAVVKDKMLVRGIAFYLDSDLPSDAKFLLEDFRLAVNNAIRAGLQARVTSRNTLCMIAYRDFREQHPRMYAQHLVSAFEVAGSVLKNHRKRVRKLVTWRIPYVKRLMMKAENQAYKLDRKSGVIDLPIRAGCHVELKLIVSQYHRKYLDDMTLSLGSLTVLPDRVVVAFRKDAPRPYAPDSVLSLDTNERSLDGVFVTDDAGMAVKAEFPDIAIIQQRHHDRRKRLQKKKAHDRRKSRELCRKEGTREHYRINNRLHQVANSVLKFAEERRSAIVLEDLKGFKSKRSKALNRRLSMWPRRKLHQIIEYKAQWRGIPVVKVDPRNSSRTCPVCGRIQDSRMGTEFKCECGWHMDRHINASMNLLQTAISKRMAGGLRFDPGAFQHDVMMILYEPAMAARSEPNGTSGIVGGPRCHHPIMQQN

SEQ ID NO: 25018 - protein, 412 aa, unknown
  TnpB Polypeptide
MQAIVKDEMLVKGVVFYLDSDLPLEARCLLEDFRLAVNNAIRAGLQARVTSRNALCKIAYKEFREQHPRMYAKHLVSAFEVAGGILKNYRKRVRKGVTGEIPFARRLMMKAENQAYKLDRKSGVIDLPIRAGCHVELKLVVSQYHRKYLDDTSLSFGSLTILPDRVIVAFRKEAPKPYEHDSVISLDTNERSLDGVFVEGSVAKAVKAEFPEVVVIQQRHHDRRKRLQKKKAHDRRTMRRLCRREGTREHHRIDFRLHQVANSVLKFAEERRSAIVLEDLKGFKSKRSKALNRRLSSWPRRRLHQIIEYKAQWRGIPVVKVDPRNSSRTCPICGSVQYSRMGAEFKCECGWHLDRHINASINLLQTAISKGMAGGLRFNPGAFQHDVMMILYEPAMAARSEPNGTSGIAGMT

SEQ ID NO: 25019 - protein, 158 aa, Okeania sp.
LLHYAVTSDGDLIEVPKFFRFSEHRLSKLQVTLAKKQKHSPPWKILKRKIAKLHQLIAKQRLEWQFNLAYHLFSDVSVIFLEDLLVANLVRRCKAKLGDNGQFLPNGQSAKSGLNKSLQDAATYQFLEVLEYVAWKLGKRIITRRPKRYISTLLGMLE

SEQ ID NO: 25020 - protein, 539 aa, unknown
  TnpB Polypeptide
MIIDNKYAKIFVSNDLTRQKYDELYDFAVLIRNHKNEISKLICSNLLKYLEYNKFQFITEMREIYRGVVSSSFDKQIYQQVLDCYQNKFDAIQKKLKFEKITYQGIELYKQDTKKNKKGDFKKVNTKHEITPLSTCLTYLARYGRENTLDYIKEHFDSVDDKQKKLYQCVLECCNKFSFDRLYRLALSKRERTINHYAEYPIEFKLLTFSGRCRKTKIIDYNKKFGSIINAFVSLSGFSKKSFDIPVKFSKDYHGNIHDYLKKTNDYEYTVTFNERKHQVSICICKDGERYIPEATDNVIGIDVNCKHNLFSLSNETTYDYDRKLVNDYCKFALSIDKLKENKAYTVGKRKQHKLDILKSKMIKSEQQLISRMCKDLSEQGYHHIVMEDLDNSFGKCYVKDSDNEDINYNRKVKFLGLSSLKQEVEHIARKYDIAVSTVQSSYTSKMCPVCGCIEDENRPNQETFKCVECCYEDNADFNAAKNIRNRATEAVLRDSLLKQLGNGAYEPKSMKREKVKEVLLSYRTSLLEDRELMVHNFS

SEQ ID NO: 25021 - protein, 449 aa, Streptococcus sp.
VLKQKYTTVTQLHEVNNKEIIGYFEKASVYFCKLQRKAFQRLKNENRTGNRTEYKKLRKDFMKEHSISSRTANSILKDVQGRMKALEELKKYEVSQKEQKIKKLREDIGKLDNRILKFQERMEDKIKVDHIRYWSLKKSRAFKKMKLNKFQMALEQLKWQIETGNYKLCFGTKDLLKNDKTKFMLQRDSQMYFIGCKDETSRNQMFQLNYNNQNNQFEIKIRKDFELDGDGKYVFGKCYFNHHKNKLIKALSNKKSTPLTYSIIRKNGRYYLYCTFEYKIEGEGDFLTRKTHGTIGIDFNKGFLAVSEIDNNGNLVGTDILKYRFREGNKTQSDLENCISKVLKRALETGKDICFEDLDFKDKKSKVLKGKTDKGKKYNSMLHNLAYSLYIKLITNIAFRNKVGTIKVNPAWTSWIAKNKFCDRMKLNIHVGTSFVIARRGLGIKDTVK

SEQ ID NO: 25022 - protein, 435 aa, unknown
  TnpB Polypeptide
MIRATKHTLKFANTGKRSSIGMLLSEWRRVMQIICDDMWLNGYRWHEDDGWHEFNPAQFKYELPKYLDYNRFNVDTWLSARMLSSLVTQLSGKIRAICAKNAARLYAFDKEAGKGNYLERLWETIETRNPSKPDLSDAGIEISSKCAEFSDTPNGEFYGFLKIKSTGLPIFSVPVCRQKHLDKYTDGTWTRCNGYLIDEYGVQLRWQKDVEPKTYGVKVGADQGLLTCISLSDGQTTPDMIVKAPRKHEPSRALTVNLDTITDKLARKTKGSKAFERAQIERRNYINYAIKRLDFSNIKEIGLEKITNINYGRNASRKMKHWSNPEIVTRLAQVAEEFGVRINLQSNAYRSQRCSGCGHVLKTARKGKLYVCPLCGLTMDADINAAKNHEIELHAIPHSTEFSKLANTEGFYWLPSGLFRMDGSELRVPNSLKSQ

SEQ ID NO: 25023 - protein, 427 aa, unknown
  TnpB Polypeptide
LRGSSFPFTLAYETGQLSFGCPVFVFKNLNTAEVKRMVKTIRVMLIPNNRQRSKLFQYANTARFAYNWALTKEQTNYKSGGKFLSDVDLRQEFTKMKQTQEYEWLNDVSNNVTKQAIKDACDAYKKFFKGLAKFPKFKSRKKSTPSFYQDNVKIQFSETHVKVEGFAASKKKNKQKLNWIRLAEHNRIPTNCKYSNPRIKFDGLNWWITVGVEYPDPVVAPQSEGVGIDLGIKDLAICSDGNKYTNLNKHHAIKQLEKKKRRLQRSVSRSYEQNKKEGKYCKTNNVIKKEKLLLKTTHRLTNIRQNYLHQTTSEIVKREPSFICIEDLNVSGMMKNRYLSKAVQEQCFYEFRRQIGYKSAWNNISVVVADRFFPSSKLCSCCGTIKKDLKLSDRIYKCECGNVIDRDYQAALNLKRYGENILHQSVA

SEQ ID NO: 25024 - protein, 346 aa, unknown
  TnpB Polypeptide
MLLESWQTQNYFAYTVGLKLRDGEVYGSVSFEIPTPEVKYTKENGVIAIDTNASPIHLAIAEVSKTGELLSYQTISLHHFLELSQNSKDHQEWILAHKIVDLAIEKGKAIAVENLKKLKKGTLGDGKAELRKRLHQWNAKKFLQKLKRVAMIKGVEIVEINPAYTSIIGMLKYAPQLSIDKDIAGAYVIGRRALGFREDMPENYEKLLKDKAYLEFALKRYEEREKELRELLEEETNQYKRNAIKSELRSVENSKKLLSNLIQSLQSESSSCKGANGRNPEQGETKKVSQSAWQVLKVALLFPILGKVLPRDLSPLKPVLVEGAWDRVRKGLVPLEAGGKDPMRDF

SEQ ID NO: 25025 - protein, 379 aa, Acinetobacter sp.
MKTLKLRIKDKHSAVLNQMASEVNFVWNYVNDLCFKHLKKKGEFLSAFDVAKYTKGTSKECHLHSQTVQAITEELVIRRQQFKKSKLKWRVSNRKSARRSLGWIPFKKVAIKHADGYVQYGKHQFKLWDSYGLSKYKIKTGSFVEDARGRWYVCLIVDSPKLEKTKATKAIGIDLGLKDIATCSDGTVISNPKFYRQYEQKLGIAQRAKNKKRVRALHAKIANCRKDHLHKASTMLVKDNALIIVGDLSAKKLVKTKMAKSVLDTGFSALKTMLKYKCENAGVLFEEVNEAYTTQMCSCCRKISSSSPKGRADLGIRGWRCVECGTFHENRDINSALNILALGHERLAVGIPVFQAGEDVNERQMKIAIKTLKGQIGIM

SEQ ID NO: 25026 - protein, 369 aa, unknown
  TnpB Polypeptide
MRKAFKYRIYLTNGQRRILEQQLEQCRWVYNETLALRKNAWEQEQRRVDWYETKRALPLLKDSRPSLKLVHSQVLQNVTERVELAFNAFFRRVKAGESAVGYPRFKGRGRYDSVTYPQYGNGVRLDGERLILSKVGAVPVVLHRPLEGTPKTVTLTRSRTGKWYAGFSCEVEPRPLSPTDMVVGVDVGLASFATLSTGDEIDNPRCYRRDEADLKRVQKLKDVAKNAQRWDENRRRKKALAHIHERIANRRADFAHKESRKLVHAYQVIVFEDLAPMEMGRSRGMRKSILDVAWSQFISMTIAKAEEAGRQTVLVNPRNTSKRCSSCGELVQKRLSDRTHICPHCGLVMGRDHNAALNILHRGLQTLRL

SEQ ID NO: 25027 - protein, 435 aa, unknown
  TnpB Polypeptide
MSRRRSLHLSHACRLLRTVELGRDAAHISSVILHRSFRYKLAPTTEVEAMFRQFAGVCRLIYNVALDQRTNWWRQYRANTGSHISYVSQARELTMMRREFDWIAAVPQVCQQQALRDLDKAFSAFFAGRARYPSPRRRSENDSFRYLGREVCVRKLSAKWSEVRVPKIGWVKFRDTRPIRGTIKNVTVAFAASGWHISFASEIEIAAPEGRPEAVGLDRGVANTISLSTGERFSLPASLRALERKRRAAQRILSRRKRGSNRRARALKRCSQLSARAANVRRDWHHKAALALAQRFGLVGIEKLNVRSMTAASRGPRNRAKSGLNRAILDQGWSAFETILSYKLEEFGGDLSKVDAAYTSQTCSSCGAVDRESRESQARFVCRHCGFLAHADHNAAINILRRNTASMRVEDERWLTDEARTRRAYRPENRPAKAA

SEQ ID NO: 25028 - protein, 381 aa, unknown
  TnpB Polypeptide
MPNGEQIRRINQFCGCSRFVFNHALAWQDAQYTQDNSIKFSYTKIANLLPQWKNTFPWLKDCSAQVLQQSLKDLEKAFSSFFQKRADFPKFKKKGAKDSFRFPQDCKLEQHNSRLYLPKIGWVRYRNSRNVVGEIKNVTVSKKCGRFYVSIQTECEVEIPKHQGREIGIDMGIARFATLSNGEYFEPLNAFKTYKGKLAKLQRQLKNKIKFSKNWQKLQAKIAKLHHKIANCRKDFLHKISSTISKNHAMIYVEDLQVSNMSKSAKGTVEAPGQNVKQKSGLNRAILDQSWTEFRRQLDYKSQWQGGALVAVPPYNTSRTCPCCGYTDKENRPTQAKFECVECGYTENADVVGALNVLARGRAIVQAKNLSGRDTAVALVK

SEQ ID NO: 25029 - protein, 340 aa, unknown
  TnpB Polypeptide
MFRAQPRSELSKFINAYKSASSRLLKKEYPQIKEKLWKEADSLALANVQRNLEGAFWKFFREPKVGFPNYKSKKHSRKSYTTNMVNGNICLQEKSLKLPKMTPIKIKLHRSIPEGWKLKSVTVSREPTGKYFASLLFDCENQTAEKRQAEKFLGIDFAMHGLCVFSTGERAGYPMFYRSAEKKLAREQRKLSRCEKGSRNYQKQRKRVALCHERIKNQRKDFHHKLSHDLAEKYDAVCVEDLNLKGIAGGLHFGKGIQDNGYGQFLSMLGYKLEERGKYLIKVDRYFASSKICSVCGNRKKELALSERTYICECGNWMDRDVNAAVNILKEGKKIYKKCA

SEQ ID NO: 25030 - protein, 368 aa, unknown
  TnpB Polypeptide
MKLNKGYKYRIYLNDMQKELIDKTIGSCRFVYNYILGKAINYYNANKKNMKLSIETEMKKEFEWLKAIDSIAIQQSRRDLETSYKNFFKKQNKFPKFKSKRKSKNSYRTINQKGTIRIDNNLLKIPKVGYIKINFHRELPQDYNICSATISEKNGKYYASILVGYEKEIYPINAIKFLGLDYSQPDFYVDSEKRKPNFQKPKRDSQKRLTKEQRKLSRMVKYSNNYYKQKLKIAKLEEHISNQRKDFLHKLSFNLSNEYDAICVEDINLKVMSQCLSLGRNISDNGFGMFRIMLEYKLKEKGKYFVKINKWFPSSKTCRHCGAINSELKLGEMEWTCPSCNTIINRDINAAKNIKEEGFRIYTDGIAV

SEQ ID NO: 25031 - protein, 389 aa, unknown
  TnpB Polypeptide
MIKSIKVMLIPNNKQKTKLFQYAGTSRFAFNWALGKQKENYSSGGKFIQDNELRKEFTQLKKQEEFQWLNNISNNVTKQAIKDACGSYKNFFKGISKFPKFKSKKKTRPSFYQDNIKIKFTETHVKLESLAISKKKNKQKLNWIKLAEHDRIPVNGKYSNPRVTFDGINFWISVGVEYEESQEIPIEKGIGIDLGIKDLAICSDNHTYKNINKTARIKKLEKKKRRLQRCVSRKYLNNKKGECYCKTSNIVKSEKQLLKLNHKLTNIRQDYQHHVTSEIVNRKPMFITIEDLDVKGMMKNRHLSKAIAQQSLYEFTRQLQYKCRWNNVELRQVGRFFPSSKLCCKCGNINRELKLSDRIYHCKCCDNVIDRDYQAGINLRDATEYKIIA

SEQ ID NO: 25032 - protein, 446 aa, unknown
  TnpB Polypeptide
MKVTRILKSKNLNRGKYKQLEEQAKRLGIIRSEIWHCYGSIKGTSIKNDRRIRDQWLKEKRPFQVSANAWKETLRDSFGDIKANRESAKEKVRKVIYKQIHDENKRTKLYKKLKSDEWISDNYLRRLMRQYWKHGRNHTNNQIVVRSDNYTTFQLGKQVWIKIPSLKRGKRIAIPLNTTKEPTGTLRLILIDGEVEVHYTIDIIDPKTCGKATLGIDKGYTEVFVDSEGKHYGEGLGQILTHQSDKLKIKYQNRSKLRAVANKKSHKKQNIIENNLDRKKVNRQKKKVDSQIKDKIYQATHKLVDKAEIIAAEDLTSPIASKKFGKKVTRRLSSWTKGVIANALDTVSRRRGSSVILVNSAYTSQMDNRYGVLLGKRNGDSFYCFDKVVLQADENAARNILARLYDQEIDRWTPFQKVKSILLERTERLRLGLLNQDSSCNSSETK

SEQ ID NO: 25033 - protein, 436 aa, Okeania sp.
MSNILSEVIQVFGCQQELIKCDKETRAIIEYLCYESNSLYNCAVYYARQMWFKTRKIVTGFDLTAEMKTNKHFKAGYASSMQQTCLNVGEAFKSFKKLLSKSKKGELDQKPKTPSYRKPGGLFTVTYPKRWLKLKDGQIRFPLGNQVKSWFAISEFFLPMPTNLNWADIKEIRLLPRNRYFYAEFVYQQSIEVIELDKCKVLGIDHGINNWLTCVSNVGTSFIVDGLHLKSLNQWYNKSIAKLKEGKPQGFWSNRLAALTEKRNRQMRDAVNKAARIVINHCIENNIGSIVLGWNTGQKDGADMGKKNNQKFVQIPTAKLKNRIEQLCEQYRIDFIETEESYTSKTSFLDNDVLPKIGAKPEGWKSSGIRTNRGLFKTGTGIKINADCNGAANIIRKVAIMAKFDLAGISRGVLSAPKKVLLWTLQKSPRLQTGEA

SEQ ID NO: 25034 - protein, 402 aa, Microcoleus sp.
MLVFEAKLEGKNEQYERLDEAIRTARFIRNSCIRYWMDTKKDVGRYDLSAYCVVLAKEFPWAAKLNSMARQASAERAWSAIARFFDNCKKARPGKKGFPRFKKHETHGSVEYKTCGWKLSEDRRNITFTDGFKAGSFKLWGTRDLHFYQLNQIKRVRVVRRADGYYVQFCIDAERNEKREPTGRTIGLDVGLTHFYTDSDGNTVENPRYLRKSERSLKKLNRRLSKTQKGSKNRVKARNRLSRKHLKVSRRRKDFAVKLARCVIQSNDLVAYEDLSVRNMVKNRKLSKSISDAAWTAFRNWVEYFGKVLGVATVAVPPHYTSQNCSNCGKVAKKSLSQRTHICPHCRFVLNRDWNAARNILELGLRTVGHTGTSNASGDIDLCLGEETPSNKSGRRKRKPKQ

SEQ ID NO: 25035 - protein, 358 aa, Deinococcus sp.
MQTTTTRYNVRVADADASQLNSLVHSGGLLRQHQPISGMTGGEVYVPEAAALAGQHVIHDGLLQLGNTTLAAELHRLPVQEHALLVAGSPGYMEYPQQQGLAHGLLRPMNPAAQKTWVNRLVASTVQGRAPGVPGLVAPPPGTWRPEETRLVCQGGLWFLSLAFELDAVSRPQRLGLMGVDVGLAPLAVAAGHGGQMLSTRPLHLLDQAGRHALNSQLDNLPPSQRAEVQTRYAALVYGAAQAELATLTTQLIGCADTVAVEALRFGTFRSNFVERARELAVADWVQGVLPQRIYAAGGRLYRVRPAHTSSRCHRCQQTGQRAGAVFTCARCGVLNAHHNAALNIRRRAWRVIRRGRR

SEQ ID NO: 25036 - protein, 348 aa, Deinococcus sp.
MLITRHNIRIANRQAWQLDELTRTGWLIAEDRPISGMTGGQVYRPARVTQRALDDNQLLIGEVSLQTELHRLPQAEYWALVCGSPGYTIYPGTEERTDALLSPLTPREQQAWLGDLVESVRAGRVPAAGRTVTVVWQPEGTRLVRLGTLWFASLQFAAPQPRKPARINRVHLGIDIGLRPLAVAVSARDTFCPGYVQRLDDLDKDLADLPLPLLEDVRAELGRVQYAVARQSLHGFTGQIMEFACSVTVERLNLTTFESDFVAQGRREAIIDWHQSWLPQALRVAGLAPLLRVEPYGTSQYCSLCRRKGQRDRHRFACPRCGVLDAHVNAGRNILNRGWAVRRSKARN

SEQ ID NO: 25037 - protein, 341 aa, unknown
  TnpB Polypeptide
MKPLLRLAFDVAVFTVKNKIKSPNTTFVKDIRGDLPSAIACQVMKKYGHQKTIKEVHNVNLIVPGQGIKYFEETKSIWIPCLKLHLENCIPHEFIKINQAEIDNEYVYVSVTVKDIPVMTPQHFIGVDRNTTGHIAVAANPETGKIAKLGKKAIHTHKKYSSIRRNLAHDGEFGKLKDCKNRESRIVRDLNHKVSRELVSMAKEQNAALVFEDLSGIRKTKKQYRSFKYALHSWSFYQLQTFVEYKAKLLGVPVLYVDPVYTSQDCSRCGARGQRNGKGFKCPVCGHVDHADVNAAFNIALRQYDLVNRCQKEMMARGTLISPSALLAESQATVEPTAFRR

SEQ ID NO: 25038 - protein, 396 aa, unknown
  TnpB Polypeptide
MLTATKIRIYPNAVQADKLAKAFGCARWYWNNSLAETQKVYQETGKGLGQYQLNARLPQLKSEIEWLGETHSQVLQSVSLHLSRAFVNFFERRAQYPQFKSKHRKQSIQYPQGVKVVDACKVYLPKIGHVKAIVHRELAGSIKTVTVSKDPSGKYFASILCENLVAMPDISLNGKILGIDVGLTDLAVTSDGSKFANPKHVLKAQKNLAKKQQHLSRKAKGSNTRNKARLLVAKAHERVANARQDYLHKLSTRLVNENQVIAVEDLHVKGMMKNHNLARAIGDAGWGAFTSMLKYKTARAGKGYIEVNRFFASSKTCSCCMHAQAKMPLEIRMWICDKCGTRHDRDINAAINIRDEAQRMIAAGAVATANGGTVSQAKGRKSSVLARAVEVRSPQL

SEQ ID NO: 25039 - protein, 411 aa, unknown
  TnpB Polypeptide
MYNALLESWKGTYAWWREHTPGVDAKFPRDRDMSRYDLMRMFTQVRGEDDRWAGLDYRVGRGVICRFDRTRQAFYDQCNTGRKAGFPRFKSRRRWRSIEIPDAAPSMVRAPGEGGRWWRLRIKGVPSVRFADRGGRLRTALDEGRLVELRIVRTSLRVELHAVFRVPPVPEPTGEPANPVGIDKGLTNRLALCDGRYVKATEPDLAVIKRRQRALSRAKKGSRTRAKKRKALAKAWRRETERARNADYRLAHRLVTDHDGIAVEDLNVAGMLRGRRFSKRMSEQRWSTLDAILEHKAAKAGIHYVRVNAAYTSQDCSACGHRQPMPLNKRVYDCGRCGMVLCRDVNAATNICARAFPRLGDRAGREETPPGVARTTNFCQGDRPPPRGCDAGRRYRTVSPEHQLRYISPIK

SEQ ID NO: 25040 - protein, 323 aa, Bacillus sp.
  misc_feature (76)..(76): Xaa can be any naturally occurring amino acid
MINKAYKFRIYPNKTQATLINKTIGCSRFVFNHFLSLWDNAYKETGKDLTYGTCSARLPAMKKEFVWLKEVDSIAXIKLPKLGLIRFAKSREITGRILNATVRRNPSGRYFVSLLVETEVQELPKTQSYIGMDMGLKDFAILSDGTIYKNPKFFRSLEEKLAKAQRVLSRRTQGSSRWNKQRVKVARIHEYMTNARKDYLDKVSTEIIKNHDVIGIEDLQVSNMLKNHKLAKAISEVSWSQFRTMLEYKAKWYGKQVIVVSKTFASSQLCSCCGYQNKDVKNLNLRKWDCPSCRTHHDRDINASINLKNEAIRLLTARTAGLA

SEQ ID NO: 25041 - protein, 395 aa, unknown
  TnpB Polypeptide
MIRTYKCRAKLTRSGHEALSRVFGMCTTLYNACLEERIDCYRKTGEFRSYYNQCKALTEVRADDPEYANISVQVFRGVVGRIDKAYKSFFRRVKTKEKAGFPRFKSSRRWRTIEINDQCWKVLKREGQKLVLKIKGLPHIEVKTERELPPNTLLKAIRITRKPSRTEVALSYELPTSELKPVGNPVGIDMGISKRLTLSNGETVEKREMDRRRLIRLQRSVSRKKKGSNNRKKTVSLLAKEWQRLTDKERNYLHRLTSEIVRMYDFIAVEKLETKKMLGNRQLAKSISEQTWGKFAALLNEKAESAGVTVVEVDPKGTSQECSSCGATVEKSLSVRTHRCSCGYEADRDVNAAINILHRGISIAGGKLKQSRMAGRMREKQDSGLARPRTVEVTV

SEQ ID NO: 25042 - protein, 378 aa, unknown
  TnpB Polypeptide
MAKLTVTAKIRIAVSKEQEPNLIDTMNKYRDACNFVSDYVFRTRCLKQFALNEELYDSLRNKFNMKSQMAQSVLRTVIAKYKTIIENKQKWTLVVFKKPQLDLVWNRDYSLKKLFFSVNTLQGRIKVGYYNKGLEKYFDKKTYKFGTAKLVFKHGKWYLHIPATSEVKECTSNDFSNVVGIDRGVNFIVATYDSKRKSTFVNGRAVKQKRAHYKKVRQQLQKAQTPSSRRRLKAIGHRENRWMHDVNHCVSKALVEQNPKNTLFVLEDLTGIRGATEKVRVKDRYVMVSWAFYDLEQKLTYKAAANNCAVIKVPPQYTSQRCPMCGHIERANRDKKLHIFKCKSCGYTSNDDRIGAMNLHRMGINYLVSKQKVPDAVV

SEQ ID NO: 25043 - protein, 518 aa, unknown
  TnpB Polypeptide
MKEKEEIKQTVKQYCLEPDEESYNEVTLIAYGYSKVKNYIYGRYGSIKGLSYLKNHRKKIRDKWVKSGFARAWGLPDRHWKSALDSAVGIIKSQWSNCKNKIKKAVYGNINLEKDERFYIYYILKADSLLNSLLRGKDFKKPKKIKDLEIRETYVHNLIKRYVRKHKGKNPVSRKARSFEIDSSMYGYEMEEGQNVLSIQGLKRGKRIKLKVTDERQFKGNLRIVIKSKERIEIHNCVKAKINKISEEEKTIGIDKGYSCLIATSEGTFYGKKLNSFLSEETERLNEINRKRNKLRSLVKKNLEKGHIRKARRIIKYNLGNRKYWRKKETCRARLESYINNEAGKFIKKEKPSDVVLENLNFINWREKLPKKIKRQLSRWVKGYIQERLEYKFSLNDIRSAVVNPAYTSQICSFCGYFGLRRGDRFYCPHCDRVVHADYNAGKNVLARKDDKEITLYTPYKKVKEILLARCSTVVGSLDMMTGSTRTPDTVISQSESELQKNPSVDLHSLSVDLNRFF

SEQ ID NO: 25044 - protein, 441 aa, unknown
  TnpB Polypeptide
MDRYVHNRLLEIFRDEYRRCGTADTSLHRINTWYTDLRNETGPEWMRQSVSDMTRQILYDLGRHYGQYIETEHTKAAGMGPRVRWGEPHFKRRGDRISIPLKITHDNTHGDARFTGERTVRIAKMGEIRLSRPFPVPNYRPKSARLYQTSDGKWRIAISCEEPDPEPYAGEPVLVGVDRNIGNVATPDHIIVPPYKMVRRMRNAERTAGRAQRIASRRQKPDRTRRKPGSKRWARAQRRAARNRRRAADIRHTTSHKISRVIADTATHVAVENINTQNMTKSAKGTKEKPGRRVAQKSGLNRSITEQCWGLLVTLLAYKLAGGVIRVPAAYTSQRCPACGFTDALNRDCREFLCLLCWNHSHADRNAARNIEDTGARMLGRPCRRGSIPSPLHECPAIPAGGAHVKGRLDVEGSGMVSPQKRQASTGGVRPSGTVMLYHDV

SEQ ID NO: 25045 - protein, 406 aa, unknown
  TnpB Polypeptide
MLKAYEFRIFPTKEQKQFLLKTNGLCRLYWNTTLARKKEAWKNDEKWDIGTAKKVFEECKPEAVKWCKEIDSSALAAEWNDITSAFNNFFKSCKGQRKLRVGEPRFKSRKHSQVAITWTSMAKPKILKNGYLFLTRKLGPVKGTFHRWAEGTFKHVTIKQTPTGKWFVKICVEKKDEPKNQNGKSVGIDWNCRDEDFIVMSNGTKVKCPRLLQRSQKQLCHQQKIMSKRFVKGLETQSSNYYRQKQKVALLHEKVANQRKDWLHKLSRQICNEYETIVVEDINLQTMAKMNHGKVVGDQGFGMLRQMIAYKGNLVKVNPKNTSKTCHCCGYVNPKVKIGVNQWKCPNCSTEHDRDINAALNILHKWNIASQGIVGRERAESTNACGAPSSAVKHEVSQPLQAIRLV

SEQ ID NO: 25046 - protein, 659 aa, unknown
  TnpB Polypeptide
MEKAKEKPSEFFKSVKTSLKSVLKHPEINTKLLNDAVVKSNKIVIHTLQFLKLYLLDYYENHSQTLPVISKELINNSMKVVCGDKTEKRGKPPKKETVEMKDKLTIFYNHHYLPLTQNDPIDYAGLNTTLDYLKEDVITMYENNIQLHYVEYVERFVNVVWKKKMIVDKIRKLGKTQKERETRVRNLCTELRKIKKDLLNVDGKPYQSNPHYHKWITINKQHILPCRTKFEKNSVMYDLKCKTMEYLPCMIFMMKQVENDGESVNNVFPLRSEIAPKYIRLDTTTLVNLLLRKEHGTKGFFKTKGELKKNEDKIWKFFFRTERKMFHKTDFSFHHMVSTDGIGLSILFLRDDLVGKKLPMMKKGISKELYINELDDYSALRDKTIVGIDPGKDDLVYCVDDASSDANVFRYSQDQRRKETKMQKYNNIILGMKTNKIEGKTIIEYETELSHFNRKSLQITKYKEYLQEKNRINHILFMFYRKELFRKLKFGKYINIKRNEQKMICNFRKMYGNPEDVVICIGDWEQRKQMKYKEPTLGKGIRTLFRKNNYKVFLVDEFRTSCKCSKCDGGVCEKFMVRKHPNKKKNKDELRLMHGLLRCKSGCGSWNRDRNGSSNIYKIAKNAINNIERPSYLCRETSNQSTSTSAYNQTLCRYEKTQR

SEQ ID NO: 25047 - protein, 486 aa, Brevibacillus sp.
MQGKISHQTYQIWIKPGHSLFPYFQGMCQQAKGLYNITNFYIRQVYTAVTQEKGLQPLQKEVMDVLNRHIDTINNNQLLAYQKKQEKEWLKPLEQRKEVHANLFSLPTKANAMITYPFLDALFKAIGQENYRSLPAQSSQNIMKVVFQNWKSFFALRKKWRDHPASLTGEPRIPKYCRTSQKEVIFTNQDCKIKNQRFLKLPYTKKRLNIGKVGYTNGKLMQVRVLPSYGRYVVELIFTREEQPQVHPTDRVMAMDLGIDNLATIVTNTGRTPTLVKGKVVKSINQYYNKQKTHYHGILRQGKKAHEGQMTSQRLERLHRKRFLKIKDYFHKASYAIMEIALQERIGTIVIGHNKQWKSEAKMGRRNNQSFCHIPHHLLIQMILYKAKRLGISTVVREESYTSKASFLDCDDIPVYGESDTKKLFSGRRIHRCMYRSGTGMCINADVNGAYNILQKEVPTAFANGIEGLDSLMAVAVSTPLVLSVR

SEQ ID NO: 25048 - protein, 516 aa, Caldilineaceae sp.
VSVRSTARPPDRQVEIGNPDCCPQVQDNRSPHRAVPHPLRPPRPSRPVRPDRGRVPAGLEPPAGRLRAAVPVGTRVRQVDGLPARASTGPVHIVLHAGPTLHGPQEPTRCRLGALLPALTLGPTLRRPGSVLAAGPAVCPRSLHVEVPGRHLHAFPCSLGCGGRTRQDLGRAQVGRQAQGVPKVQAEVRQGRRLHHSRQRAHGRRPSAHPEGGLGASGRGGLYRGCKPKQVRIRKEGTEDHPKWYAYVFHEVPADRLKPPAWTGAVGVDRNVGQATDSDGEVYEVPDDPKLEVNIKRKQRQAAKARARSKANGQPMSKRGRRVCGQLKKKQRKRKRRRENAAHRHSRKLADTAHTVVLEDLNTKGMTRSAKGTVEEPGRNVKQKAGLNREILKSNWGRTERLLDYKAGQVVRVPPAYTSQTCAACGHVGKENRRTQAHFHCTACGHTANADRNAAINILARGLALLPKARGTGASARREAFGHCPLPVATDKSTSPTREQGMPSRPRGAPPWYTGI

SEQ ID NO: 25049 - protein, 402 aa, Anabaena sp.
MLVFEAKLEGTNEQYQSLDEAIRTARFVRNACLKYWMDNRNIGRYDLSAYCAVLAADDNFPCVAKLNSMARQASAERTWSAIAQFFDNCKKSKPGKKGYPRFKKEQTHGCVEYKTSGWKLSADRRYITFSDGFEAGTFKLWGTRDLHFYQLKQLKRVRVVRRADGYYTQFCIDQDRVEKREPTGKTIGLDVGLNHFYTDSEGNQVENPRHLRKSEKSLQRLQRRLSKTNKGSKNRIKARNRLSRKHLKVSRQRKDFAVKLARCVVRSNDLVAYEDLKVRNMVNNRHLAKSISDAAWTQFRQWVEYFGKVFGVVTVAVPPHHTSQNCSNCGEMVKKSLSTRTHVCPHCGHTQDRDWNAARNILELGLRTVGHTGSQVSGDIDLCMSGEIPPNKPSRGKRKPKE

SEQ ID NO: 25050 - protein, 384 aa, Salimicrobium sp.
MVHKAYKFRIYPNKTQEIQIAKTIGCSRFVFNHFLEAWTTTYRETGIGMSYRACSKQLPALKQERPWLKDVDSIAVQTSVRHLADSFQRFFRKQTQAPRFKSKKNPVQSYTTKHTNGNIAILDNKIKLPKLGLVRFAKSREVEGRILSATIRRNAVGKHFVSILTETEVEAWPKTGTTVGIDVGLKTFAVLSDGTIHEIPHVFRSLEMKLEKAQKKLSRRYEQAKKDGKPLHEAKNYQKQRRKVARIHEKIKNIRTDVLHKFSTDIVKNHDVIGIEDLQVSSMVKDKNLARAISDVSWSTFRDMLAYKAKWYGKHLIVVGRTFPSSQLCSCCGYQNKAVKDLGLRTWACPSCGTHHDRDLNASRNIEAEAIRLQTLTGGTPGFA

SEQ ID NO: 25051 - protein, 383 aa, unknown
  TnpB Polypeptide
METKTVIKGYKYRIYPTKEQEIQISKTFGCCRFVYNQLLAKKIELYKTEQKSLSKIDCNNYCNQFLKKQEEYKWLKEVDKFALTNSIYNLDFAYQNFFRRVKQNSDKVGFPKFKSKKDNKQSYKTNFSNNNIKVDFENNKIQLPKLKWIKCKLHREFEGKILSANISKTPSGKYFISFNIEVEHVISSKNEYAVGIDLGIKDLLITSDGEVINNEKITYKYEKILAKLQRKLAKKKKGSKNRNKQRIKVARLHEKITNIRKNNLHQISQQITNENKVVICEDLDIKGMVKNKNLSKSIHDCGWGELTRQLKYKMDWNNKIYHEVNRYFPSSQLCNKCGYRNTDTKDLGVRFWICPECNTEHDRDKNAAINILNQGLKELGLVS

SEQ ID NO: 25052 - protein, 413 aa, Halarchaeum sp.
MEHSHRYRAYPTQEVAERLEHHLDVHRQLYNHVRWDYENSPADDNPSEYDQNNKLPEWKRKWPVFSELHSKAAQATVARFHRNLSNLHKKTEKGYNVGRLKRQVPTDYRSVTYNQSGFDLDEKRGRDRVAYVRFSKIGWVKIRYHRPIPDHATIKEVTFKKETTGEWFVSFGLDTEDADLPEKPALESLNASNSVGIDLGILTYSHTSDGKTVDWLDLEDEYERLRREQRKLSRKEKGSNNYGRQRQKVATVKRHIRRKVLDYQHKLTTWLVKEYDAVFVEDLNVQSMLQGDETARNKQDVAWRQFITLLDYKADLYGCHVKQVEARGTTKECASCGVETAKPIWVREHSCPSCGFETDRDANAAMNVLKSGFSELGLGWPEDTPVETVTATDTADFQRVSASHVIETGSLGA

SEQ ID NO: 25053 - protein, 428 aa, unknown
  TnpB Polypeptide
MNQITRKDGVYCVIKSIKLRIYPNKTQLKIINNTLGACNFVKNKFLEYNKNNHAKGKKFTNGYNFSKIINKLKKDDDNKYTWLQGISSTAIQHAIMDKDKAYEDFFIHDKGFPKFKSRKRMNKESYYFINQNHTYYITKNSVKLPKLKKVRITNADQLPDEYSIISGRIIRHYDKYYVMFIYDEYNDNKDIIKRDIKLGIDLGIKDYAIIYDGKEYRHFKHFKELATYTKLNKRIINLQRVISKKVEYNYGRKLNLYLDKYHKEPSETEKRIMKGEAYNFSNIRRLFIKINKIRVKLTNIRDNFIKQLVNKLTARIKPSKINIEDLDISSMLENDKSHNLHRRTQDSSFYKFKIHLINKCTEYGIKIRLVNTYYPSTKLCSKCGKKNKDIKLEDRTFVCKKCGMTMDRDENAAINIYNCKREYYKVIA

SEQ ID NO: 25054 - protein, 368 aa, unknown
  TnpB Polypeptide
MNKAIKYRLYPTNKQEELFVKTFGCCRKIWNLMLADKIEHYKATKEMLITTPAQYKKLDEYKYLKEVDSLALANIQLHLQTAYKNFFRDKKTGFPKFKSAKHNRKTYTTNNQNGTVSLLDNSIRLPKVGFVKAKIHRKPKSDWNIKSATISQDNDGKFYASVLFEFDRIINKVPISDIAIGLDYKSDGLYTDSLGNTCGSPKYYRKLQKKLARLQKQLSRKAKDSNNRNKARIKVARLQKHIANQRLDFLHKKSAEIANQCDVVCVESLDMKSISNKGFGNGKATLDNGYGMFLTMLDYKLADRGKHFVKVDKWYPSSQICYACGKQHKWMKDLSVRKFVCDCGYSNDRDINAALNIKREGLRLLTAA

SEQ ID NO: 25055 - protein, 349 aa, Nocardia sp.
LAVRQAAFEQGKQRISDAELSKRLTLAKKDPERAWLGEVSSVVLQQALADLNTAYRNFFQSVAGKRRGAPVAPPRFRSRKDSRQSIRFTRNARFAVTAGRKLRLPKVGELKVAWSRELPSDPSSVTVTRDSAGRFFASFVIITDDQALPPTEAEVGIDLGLATFAVLSDGTTITSARFLRQAERRLANAARNLSRKQKGSSNRAKARVKVARAHARVADARRDWAHKHSTRIICDNQAVYVEDLCIKGLARTRLAKSVHDAGWGMFVRMLEQKAARYGRAFGRVNRWFPSTRLCSACGVVGEAKPLHVREWTCACGVTHDRDLNAARNILAAGRAERLNACGGTVSPAA

SEQ ID NO: 25056 - protein, 412 aa, unknown
  TnpB Polypeptide
MRSQKIRLKLTKEQENLAWWYSKVSRNFWNLLVDIDRRNNKGEFDEILNKNGNNTYYSKFYDREIYSLNISDYRNLAKIIVAKNSEEESEKWSWYYHPKQSFIYDFISRELFRIRRQNKGKLNFRIVDEIKPNFNVNCSASSNKKRPSRIYIKKNGKLQIPTIGDVSFGSVRKGFDLSCKKQVANVSFDGKYWYLSYTENIETSVTNLPDYTDGIGIDLGIKTLATVSDGTTIPNIKTFRRVRILNKRLKRLQRKVSRKYLINKCNKHNKTKNIIKLERQIKLIHRSLRNIRINHIRKFVSELVKKQPQYIAIEDLNVKGMIKNKYLSKDISNCSFFTIREHLIRKATERCIAIRLVDRFYPSSKTCSNCGSHKKDLKLSQRVFHCNNCQNKIDRDFNASLNIAKTDKYVLA

SEQ ID NO: 25057 - protein, 337 aa, unknown
  TnpB Polypeptide
VLQDVILRVKKAFAGFFDRVKKGQTPGYPRFQGRNRYDSFCYPDGAGWKREASESPAEKKGIVRVNLTLTKIGTVKLHLHRSMSGTIKTLTIKREGEHFYAIFTCEIGKPELLPTRYEDGGIDPGVTHFAALSNGEFIDHPHYLRKAEKKLTKAQQALSRKKRGSHRRKKAVQQVAKCHRKIRNQRQDFHHKASRKLVNQYQVIVLEDLQVKNLTKAPSPKQDEDGKYVPNGAAAKAGLNKSILDAGWSTFTPMVSVKAAWAGRTVLFVDPSKTSQICPNCGNVRKKTLDERWHCCECGCELDRDTASAKVILDLGHKQLFGRDAANAGDCVEAPVF

SEQ ID NO: 25058 - protein, 634 aa, unknown
  TnpB Polypeptide
LLTVAKKPELSCAFFNDVSFRQKVTGTCPVVLFLVSCSGQLFGKESMMRKSQTHQPLTYDVRVPDEAQADALRLLDASRSVVNQALTLLWPYLDVFGERTTGPAWKQVGEYLGSPDFHGDRQWRCESEVVGRLLRAQAERKKAFELIQPILSDGFIRPPTAIRPAGKNRTAIKEAITTLQKSLHDDETSFVTLQNVIEQACNFFFQQDRFPTSYEELQPVPLLKVGMLTYAGDDGREKGQAYRLALDLNAGVARFRFRYPDESGVWRWRKVDTLMLLPACVRERLRDGELMAPTLREEKRANGERFAVLDFIIEVEKEAVPEWESVGRVLGVDWGVHALLTATAVDEAGSQSGRPFFLEAGGFDGRQARTRRHIDELKKKIARSEQERDALPQEHPKRAWYNQRLALYRREVDRCWHKYEQRNRGLAHLASNVLLLLCRLHDCQVLSMESLKTLKTTGRGRGVRGRWRNYRNNTTIRGEMWRLLRYKCHLVGLRFHTCPPRGTSHTCPHCGRSARTYRAPDQRAEDVKWGRWMWCEACGFNGDRDYCASLNIARLGVAYLIQMKHLGKARPCSITDPRVKPVSYTGAGAVLLLPPPSSHARPPRAGKRYYSPGWYGSAFLQSSQPKAVFLRLYG

SEQ ID NO: 25059 - protein, 422 aa, unknown
  TnpB Polypeptide
VSKSKKDYRTYILATAKPTEHLDGLNRLGGCIYSKTLSLAFKTHEKKGFWLSDGGLKAYLKFKKYPCHAHSVQAIIDDYCGARRSFFSNLKSNPNAKPPHKTRKFHTFTWRATGISYKRGKLRLSMGEGSDPLWIKVDKKFHKVVPAEVSLVYNKTTKQYEFHATYDTVPKKTKTKHGSAIAVDMGEIHPIAAFDGINAEIYNGRLIRSVMQYRNKFLGSINKALSRCTRYSKHWKKLKRTKNRTLKKIDVQVRDMRHKITSRFVSSCRERKIETIVIGDIKQIRQSIQYGKKANQKLHQWAFSKIQNMITYKAKAVGISVATEDEAYTFQTCPSCRHKKKPSGRTYRCSKCNWNGHRDIVGASNILTKYQGWLFNPVVGAVVSPTGVRFTPHLRRLDKWSPFSGLKSSKPPTRKQRSTRKP

SEQ ID NO: 25060 - protein, 369 aa, Bacillus sp.
MSNNKKQGGENVEQTITVKIKLLPTKEQALILQTMSRAYIETINTLIAEMVTSQASTKKTSKDVEVPLPSAVKNQAIKDAKSVFKKVKKSKYERIPVLKKPACIWNNQNYTVDQKHLSFPLMVDGKATKTAIRCAFSDKKDRIGHLLSHKLGTLRITQKAGKWMAQIAVTIPVEKRTGSKEMGVDLGLKVPAVAVTDGGKTRFFGNGRENKYKKRAFRSVRKKLGEKKKIKAIRNLDDKEQRWMKNQDHKISREIIDFAIEHDISVIRLEKLANIRQTARTSRKNEKNLHTWSFYRLSQFIEYKANLAGVQVEYVDPRYTSQICPNCTKKNKAKDRLYKCSCGFETHRDRVGAMNIRYAPVVDGNSQSA

SEQ ID NO: 25061 - protein, 296 aa, Microcoleaceae sp.
  misc_feature (19)..(60): Xaa can be any naturally occurring amino acid
  misc_feature (294)..(295): Xaa can be any naturally occurring amino acid
VAELPSSFAKCYQKFGRSXXXXXXXXXXXXXXXXXXXXXXXXXXXXXXXXXXXXXXXXXXKGKAQQYRMIDEMIRTAQFVRNKTLRHWIDNQGVKLVDLYKQCAIMAKEFEWAGKLNSMARQASAERAIFAVQRFCSNCKAKKPGKKGYPQFKKQTRSVEYKTSGWSLSTDKRCLTFTDGFAAGTFRLLGSRDLHFYAPDEIKRIRVVRRADGYYAQFCINVERTEEVIPTGKAIGLDVGLNHFYTDSTGETVSNPRHLRKSEKVLKRLQKRVSRKKKGSSNRKKAINKLGRKXXT

SEQ ID NO: 25062 - protein, 298 aa, Nostoc sp.
LKIAKFRSIRDSSQTLQFKIASDLNKGRLLPQYWGELPAFECVDNGVRFCPISNPYTPEVTYKHSRFYISLPEDVEVVDNNKDAFIAFDPGVRTFLTGFDGQKMIEFGNGDIHRIVRLCQWLDKLRSFRDLSKGFKNRHLRYRLSQKMKRVTRRIRNLVDEMHRQVASWVAKNYRVIALPTYETSQMVCRAVRKIKSKTARSMLSFAPYRFSQVLEHQCTRNGSVLIRHTEEFTSKTCSRCGHIHYSLGGQKIFKCSNCGNHLPRDWNGALGNFLKALWDTTLLNSASFDCVQMTVFV

SEQ ID NO: 25063 - protein, 385 aa, Streptomyces sp.
VKLVVQVKLLPSPEQAAALAATLRACNRAADHVSQTAFQTGIKDRNGLQKLVYTDIKATFGLSAQPAVRVVKKVVDAYGALTASLQAGRLGNPGAKRYRKAVGSPVTFHPEAAQPFDDRGLSWQTDARTVSIWTVDGRMRGIRYVGSPDQLKTLAEYRKGESDLVQRGGKWFLIATCDLPDPEAYEPSDWIGVDRGIVNLATTSDDTNYQGRRLGRYRRWQARKRAELQAKGTRSATRRLACRAKEEQHHATHVNHRISKEIVSVAQRTGRGIAVEELDGIRERVRLRRDQRGTLSSWPFHQLGQHLAYKARRAGVPFLHVDAAYTSQRCPRCGHTERANRPDRDHFRCRRCGLAGPADHVAGVNVRNRARSAWVFVTAPVLAPA

SEQ ID NO: 25064 - protein, 489 aa, Streptomyces sp.
VIVKGFKKVGKPTKAPADSGRKYRLYPTQLQAERLIQWGHTCRTVWNLALEQRIYVYKQRRENLRADEQCRYLTRARRDLDWIADLPSQAPQQVLKHLDRAFDNFWSHDHPAGFPRFKKRSSRLAIPLPGQAVRVTKLNRKWACVRIPKLGEVRFRLTRPIGGQIKAASIQRDGAGNWSVSFGVHTGRSAAPPNGQPPVGVDFGVKQAAYLSDEVAPRLMQQTLTKGERRRLAGLERRRERQIREAKRHRGGKYSNRLRRTLRAIADLKARQARRRADFTHKLTTDLAKSHGLVAIEDLRVKQMTRSAKGTPDEPGVHVSQKAGLNRAVLDNLPGERRRQLAYKCPAYGSKLVLVHPARTSQTCGACTLWDPASRISRDAFACTGCGHTDDADHNASVVILSRALRDQAGTPIAAGHCGEQHAPTGQIRPAMLRTRTERTREPLNPSFVTAQPLRDTEGCQESPQVTAGRMSKNKRVSGHRRDTPKLTP

SEQ ID NO: 25065 - protein, 355 aa, unknown
  TnpB Polypeptide
MYRTLKIKLDRSNELVQTAKIWNAACQDVIDYGFAAHDYNKTRLNRATYKDLRVKYPTLPSALLQTARDQASDMLKRFKFKTKPFKKPLGTVRFDVRTMKVFLESGYCKLTTAFGRMRYEFQLPEYYKKYATWKVKNAKLKIAKHACYLNVQVEQPDPELTTGDKRLGVDLGINNIAVCSDNTFWKSGSVKAVKGRYQYLRSKLQSKGTRSAKRKLQKLSDRERRFQMDINHQIANWIVSKPYDVIALEDLTNIKNDNNQGQRFNRKLGNWSFAKLICFVEYKAAAIGKKVIVIDPKYTSQTCSRCGFKHKKNRSGRIFKCKNCNFQIDADLNASRNIATFSRSDRSRLQSTSQS

SEQ ID NO: 25066 - protein, 581 aa, unknown
  TnpB Polypeptide
MHLTEQCHIPDEYADACDRLTTLVERHAGRLLAEEYWSETHLEGVARHTGQSYTYIRDDEYDAFAGVEEYLYSRFKRCVSQRVTSVLEAHADEYQAFQFVIETVEDRKIKTIGWETLRERLFSEDSRYIQWGILESVVEQLNNHYDTHGSFPDCYTHLVDTPEPNGTLPYAPDAGDYHIHNITVEDGHLAFTLNAPDTLAADSYHEWSDHEIRLPIHSRFTKMLAHGAIGAPTLHQSEHGYTVDVPIEVTEQESETTENRVLSVDLGVKKQATAVVVDGDDGQISPPEISDHPSKHKLFRLTTEAENINDRLAALRNGGKAHTDRFKQLHSEYQHLRQKETRLRAQIQHDVANQLVWLAIRHECETIVFESLGQIESPDVSGALAHSLSTWARGDLLDIVEYKAELVGLEITSVNPWGTSRFCPRCGERGETVKAPDDHTECRHGGHFHCPECGYECDRDVVGALNVGRKYLSDSKMEEANPVAYTEAGNHASFPSPAVTGETGARSTGVQSTADLQDTASGRQTRLTQYCSTDSGESNMGGLQQNHGSNTDRQLSSGSVTQHVLASATDSPRNLPNTTEN

SEQ ID NO: 25067 - protein, 333 aa, unknown
  TnpB Polypeptide
VVWLRRRPGQPTGYRKRNYYDDNGNRVHEEHPRSTVTWKQNGIRHDTKHDRLRLSKGNNHKDGRDFILCEYQTPPAVELETIQQVRAVSNSAKRRWELHVVCETEITADSPGEKTAGVDLGICNPAAVAFPDDALLYPGNTLREDNHYFQQEEYQTEGPHGPSQKAQWAREKLSQRKDHFLHALSKDIVDRCVAHEIGTLVVGDPSGVDEDDWGRHGNKRLDNWASKRVMNLIDYKARERGIEVEMPDERGTSSSCSVCGHEDGDSRVERGLWRCDRCGVVAHGDVNGADNIRQQTLPVTPPLGQEDSGSCLAQPRVIQFNRTRGFQPRATAE

SEQ ID NO: 25068 - protein, 409 aa, Halorubrum sp.
MQYNYKYRLNPTEALSETLLSHVDTCRQLYNHVLYLLKEEDDIPARYNVQGQLPDLKTWWDDLGNVHSKVLQMVVKRVYDNLSTLKAQKQNGRAVGMLKWKPPREYRSLTYNQSGFKLKNTSGRPVLWLSKIGEIPIHLHRDIPKNATIKQVTIKQEPTGEWYATFGVDMDEATPEKPEMPEEVVGIDVGILTYVHDTDGTAVESLDLSDERERLERAQRDLSRKQHGSANWEEQRQVVAERHADLKRKRRDFLHKLSNYYATEYDLVAVEDLDTKELIELPGNSRNRAGAAWGTFFRMLEYKCEREGTHFVAVNPRGTTKECASCGASTDKPLWVREHSCPSCGFEADRDANAAWNILSRGLEEVGVVHSELTPVETALPTDTVVSAKRVVETGSPTLKERTAQAVSK

SEQ ID NO: 25069 - protein, 416 aa, unknown
  TnpB Polypeptide
MIIQKRTDENRVIKTYSVAHQLSLGPFFTAYKTLLNHFLAEIWRQIQWKEKPIRGKTQKRLLPTIPTYAFKKELRARSLSTWSYAKHWVDSALKTAFAIINSWKKNYFRGNRKRHPPVVKRAFVRVKQTLMKLEGEQLRISIKPREFVYIDLSHRYFKLDGKLGEPILTPTHIHLPLQTSAPDKGSADLIGWDSNKFSLDGFSPNQGWIKVDLKPLHTLHITYDNKRRHLNRLYARNKRQGQALYQKYRKRERHRVQNYLCHLLKPLAAMATTHGFEALDKQKMNRHAKKRWNRELNHTDWRKIVTLMKNKATVREVTPYYTSKICARCGYLHQDLRGEHIFACPKCGLRIDRQLNAAINIYLKMRGVSHKMVWFDRVICGGFPLIGAETSTVDELARRLDELMKPQVYVGVLTSI

SEQ ID NO: 25070 - protein, 398 aa, unknown
  TnpB Polypeptide
MHQLSLGPFFTAYKALLNHLLAESWEQIQWKAISIRGKTQTRLMPIIPTYAFKKELRQRYLSQWTYAKHWVDSALKTAFAILKSWKKNYLRGNRKRHCPMVKRAFVRVKQTLMKLEGEQLRISIKPREFVYIDLSHRYFKLAGKLGEPILTPTHIHLPLQTSAPDKGSVDLIGWDSNKFSLDGFSPNQGWLKVDLTPLHTLHIAYENKRRRINQIFARNKRKGKFLYQKYRKRERHRVQNYLCHLINHLAAMSATHGFEALDKQKMNRPAKKRWNRELNHTDWRTIVRLMKNKAPIREVTPYYTSKICARCGYLHQDLRGEHIFECPKCGLRIDRQLNAAINIYLKMRGVSHKMSWFDWVICGGFPLIGAETSTADELARRLDELMKPQVYRCGPIST

SEQ ID NO: 25071 - protein, 535 aa, Mycobacterium sp.
VRTRLHLTEEEAAALGEVGVFLGSVYRRELAHRITLGRMDRRQHSGWRAERKQAITAVASSRWAGAITRAVEDHYQLGIRALVAEVTDLRAAIGVLESRCALRPGEVAGPANVVGGPRRGSRRPVRGYASAAQRFSKTRRLAALRSRLVDAQSALAAGRPSITAGGNRLWRIRQHLDAAEMSQQQWRDRWDAARMFLVADGETGKVGGNETIRVDQSGHLRVKVPAALVDRFGTHLHIATPVVFDHRGQEWAERVTARRAVRYDIIFNPTRGRWYLDASWTTTPAPAPTLEELRAGAVLGVDLNADHLAGCVLDSSGNPVGEPVTIEVHTAGLRASRRDGRVRAAITDLLNLAEHHQCTAIVVENLDFTDARATARETMGSGQRGKRLRRTVAGIPTRRFRDRLTSMATRRGIAVLGVDSAYTSMWGRQHWRKPLQQQTSDPAAVTVHHGAAAAIGRRGLGTPMRRRPAGPRTQQRMRAGTPPARPDQPPTPTRRCRSSGSPPRPQRRRGAPVHQRTPTVRGQHRSGRTVLTPAQ

SEQ ID NO: 25072 - protein, 417 aa, Microvirga sp.
MLVHKAYKFRLYPTDQQWVLLAKTVGLCRLVYNLALEQRRTFSRRGRPVGYHAAAHDLKALKTEFPFVTEAPSQCLQQALIDLNQAFENFFKGIAKYPKPRKKFENDSCRFPQGFTVSRHRIKLPKLGNVRMAAHRTVKGTPKSLTVSREGDHWYASIACELEVAAPVVRPRREGGVDLNVATGAVTSEGLILPMPRLSPEEMRRRARLHKSLARKQKGSRNRLKARRTLARFEARLARRRRNAAHQISRRLANAHTHIAFEKLNVTNMTASARGTLESPGTNVAQKAGLNRAILDVSPGMIRRFTKYKAVWLGGECIEVPAGYTSQRCSECGKHPKDDASTKHLEHGRVSRDRFACPLCGYTAHADVNAARNILALGRQHWAAQDFADGRSVPACGGLRARRADQAGAKDRGRRHA

SEQ ID NO: 25073 - protein, 415 aa, Bacteroides sp.
MLRAYKYRIYPTDEQKVLFAKTFGCCRFVYNWALNLKIEAYKQEKKSIGNVELTNRMKSELKAEHEWLSEVNSQSLQSALRNLDSAYTNFFRNTKTVGFPRFKSRRDRQSFLCPQHCRVDFEKGTITIPKAKDISAVPHRKFKGMVKTVTISMTPSGKYFASVLVDTTIQELPASAIQGNTTLGIDLGIKSLAVCSDGRTFDNPKNLQRSLDRLKLLQKRLSRKQKGSANRNKARIRVARLQERIANCRKDNLHKITHALTHDSQVRTLCMEDLNVKGMQHNHHLAQAVGDASFGMFLMLLEYKCRWYGVNLIKIDRFAPSSKTCGKCGYVYKGLKLSERSWTCPECGTHHGRDFNAACNIKEFGLKALPTERGKVKPVDCPTVDDRPRVLKSRGRMKQEKRGGIGISEADKSLV

SEQ ID NO: 25074 - protein, 379 aa, unknown
  TnpB Polypeptide
MANRAIKYRVHPTKEQSELFAKTFGCCRKIYNLMLAYQKEQYQATGKFASVTPARFKQEYPYLKEVDSLALANKQMDLQRAFRSCFSKTRKKKNGFPRFKSAKHSRKAYTTNNQKGTVEVSENAIRLPKAGWVKAVIHRKPEPDWRIKSATVSMESDGTYYIAVLFEYAEPESDYQADSSNAVGLDYASDGLYMDSNGNKGSNHKYYRESHKRLLKAQRRLSRMKGSGKQEEKSNRYKKQLCKVSRIHRHIANQRKDHLHKISTEIANQYDVVCVESLDMKALSNKRFGNGKATMDNGYGMFLSMLEYKLKDRNKYLVKVDKWYPSSQICSCCGNKNPAVKALSVRTWECPVCGKHHNRDVNAARNILQEGLRILQEAA

SEQ ID NO: 25075 - protein, 621 aa, Rhodococcus sp.
MTGPGSTAPRQFAFTTRAHVAVDDITGEPIGLDDVDTRVGWLLDLIAAAGTELVARLWQPVTFDVLAAGLDRQDRRLPAQGHVAAARLGWNPHYPNGVYVPSRVSRVVTAQVMATLRTLAYRDTAIAALSARFDPATGTLAPPTEPDDWVPLGFARGVRRQLLAHARRTDGAPSARLRITDVQGPPQTSAMARLSAADRQLAQITVTDRELVLTVKLPTCPAPAGRAQWQRVRLTATIPAHLHGRAITDWHLPTLALDRKGLLWRCAATELVPESDLGSATVAVGVDWSPSTLGAAAITAEDSDGLFSDYRGVTYDDRGLGTKLARLQNEGQLLHRKAARLTRLAATAAPEVRARLETKIAVLNDHRTAVGVKRGRINRELGFHFARQVTDYATSAGAQVIAVEDLTTLETRGHGRVNNNRAAQSARRQAVTALAHTAAEVGITVVSVPARGSSALCPGCDEPLARPGGYHSAWCSRCRVGGNRDHVAGVNLAKRALLGKHKVTRRRGQMPAVRVAEHAPVRKSRDKTSPTPSRPRHRRVRRSLPTVTPRAGVTPNRYVPAPEASVWDTVKPAPPHGDAGSRDTRPSPTHATPVVDSMRSTWTLTNEFPVGKKACAMYVAT

SEQ ID NO: 25076 - protein, 370 aa, Clostridium sp.
MEKGFKIQIFPNKEQQILMFKSFGCARFAYNWALAKEKENYKNGGKFIPDKQLRKEFTQLKKQNEYKWLNEISCNVTKQAIKDCCKAYKNFFKGINKYPKFKSKKKSKFSFYNDTFKIKFTDKKVMLETIGWMNIAERNKIPTNCKYLNPRISFDGIRFWLSIGCVVEDVADMLPKTEPIGIDMGIKTLMVCSNKMEFKRVNTKKERKKLKRLQKKASRLYEKMLKTKISKSSNLLKLEKMILKQHQKISNIRINNIHQATSKLIKLNPSHIVVEDLNIKGMMKNKYLSEKIVDCSFHEIRRQLEYKCKWNNIKLIVANKWYASSKICSNCGNKKDKLSLSERIYTCECCGKIIDRDFNASLNLRNLAYN

SEQ ID NO: 25077 - protein, 236 aa, Planktothrix sp.
MIKQAVINKSMKARYRYRCYPTPSQKLALAKLFGCVRVVWNDALAFCISEYKGGKKKPKNAELQKQFITQAKKLEEREWLSEVSVIPLQQSLNNLEQAYQNFFNSCKGTRKGQRVKPPKFKKRKSQQSARFTKTGFSFKGEKVYLAKIGKIDVIWSRQLPSEPSSVTIVKDSADRYFLSFVVEIQSEILPQSENSVGIDLGITTFATLSNGQKIKAPKPIKQRIKELRKFSKSRCF

SEQ ID NO: 25078 - protein, 306 aa, Salmonella sp.
MPIRDRIERNTQKARFPTFKRKHGKQSSYHCVGIKVLDNAIKIPKLAPIEARLHRELHGKLKSITVTRSATGKYYASILCDDGASAPEKPTYLKEEKITGLDMGLEHYAITSDAVKVPNPRHLINVSRNLRRKQKALSRKQKGSANRKKARIRLAALHERVANARADFQHKLSRAIVDENQAVIVETLKTANMMKNHNLARAIGDAGWHSFITKLEYKAATKGVHLVKLDQWFASSKTCHCCGYKMPEMPLHKRIWRCPECGAEHDRDINAALNIRQKGILELKAAGLVVSAHGGQRKSVAQTVAA

SEQ ID NO: 25079 - protein, 402 aa, Escherichia sp.
VERLQAFKFQLRPGGQQEREMRRFAGACRFVFNRALARQNENHEAGNKYIPYGKMASWLVEWKNATETQWLKDSPSQPLQQSLKDLERAYKNFFQNRAAFPRFKKRGQNDAFRYPQGVKLDQENSRIFLPKLGWMRYRNSRQVTGVVKNVTVSQSCGKWYISIQTESEVSTPVHPSASMVGLDAGVAKLAMLSDGTVFEPVNSFQKNQKTLARLQRQLSRRVKFSNNWQKQKRKIQRLHSRIANIRRDYLHKVTTTVSKNHAMIVIEDLKVSNMSKSAAGTVSQPGRNVRAKSGLNRSILDQGWYEMRRQLEYKQLWRGGQVLAVPPAYTSQRCACCGHTAKENRLSQSKFRCQVCGYTANADVNGARNILAAGHAVLACGEMVQSGRSLKQEPTEMIQATA

SEQ ID NO: 25080 - protein, 410 aa, unknown
  TnpB Polypeptide
MLVPRAYKTELDLNEKQVTACKQHAGAARWAYNWGLKRKQEAYQATKRSPSAIDLHRELNALKKTDLPWLYDVSKCAPQEALRNLDSAFAHFFRRCQLKKAGKLRGKVGYPQFKSKKRGLGSFRLTGSIVVFSQAIQLPRLGRLRLKEKNYLPTKDVKVLSATVSEQAGHWYVSIQVQQEQAVPVNTGPVVGVDLGVKSLATFSDGTVIPNPRHLKRRLTKLKRLHRVVSRRKKGGQNRRKAAKRLARLYRKVANQRQNTLHQVTTRLAKTKRTIVIEDLHVSGMLKNPQLAQAIADVGFYEFKRQLLYKAQWYGSQVILASRWEPSSKTCSGCGWVKDDLTLADRTFHCQPCGLVLDRDLNAALNVAKLADSSPDNANACGGASAGAVRKPRVKLAPGKQEADAVSPSG

SEQ ID NO: 25081 - protein, 373 aa, unknown
  TnpB Polypeptide
MRTYEYCCRPNNKQEAQLMAVLIASRRLYNDALQELVEHYKATGKHMNLFEQDRRHGAKEHPDLPAVVVDTTLKRLHRSFANFFRGRKEGKRVGFPRFKSADAWNTIQFRDAANCLDGNYLKTPKISGGKIRVNVHRPLDGTFRFARLVLRPSGWYVQCVTDYNEERLGPSDKAVGLDMGITYLVADSDGGFVKNPKSFRASAKKLAHAQQKLAKCRKGSHRRRKAKKLVARVHERIANQRKDKLHKVSRAYVNGYGAIAIEDLKPANMVRNHSLALSISDASWGLLRFFLAYKAESAGREFVAVPPHYTSQKCSRCKEFVQKSLSVRTHVCPYCGYVADRDTNAAQNILLAGTPPSLRDAEGLVMPVSQASR

SEQ ID NO: 25082 - protein, 464 aa, Moorea sp.
VKTPNKIIRTDKWRLNPTPDQKELLGKTVKVYRHACQFLVGIIYTHWSKLGELTADQLTPAVEKLMHQTAKRPSIKYPQFNKAFYKFPSYLRRAAFAKRRLRRIAFSAGQVSSFVTRYYDWQSGSRKRKDAKPPRLNANTGCYPSLYKGQCYKLHEFNKVEIKVFNGSDWVWTDVKITGLRERHLVTSNKMMSPSLVINNRGCYLSVPFACKPEKRKPEANVTAVDLGINTTATIAVVTHSGTVIHREFVHPGRDIDRRDKRLKSVSTRASKTMGKGGKLHKGFCSKTYEKCRRINHQIGHIVSKRIVEVAKQFNSVRVAWPTALAIVFENLKDWKPKGGKKRSNLRQKFHGWLKAKIRNFTEMKWSELGGKVVEIVAAYTSKLAYDGSGTVKRNSKKYSLATFASGKCFNADLNGAYNIGARGVFKLVRRNSNEGRSSKRSGRPPRSWACLCDLWTSGSSRLA

SEQ ID NO: 25083 - protein, 528 aa, unknown
  TnpB Polypeptide
MRIKNYLLRVKMIQTTIFRLFPSETQEKQLHEIFTIYNKAKRKGYNLLLKNARKKGKTIVFEGEKVTQQELMNFCHNNPYVNTILIENKTKLRQQDTWLHKTRDYLKYKIKIIKDKIAKIKTKNDRRPKGLYSRLSSLQNKLINLKISLQNDLLNVRLKPIVFGCKKLFRERILHKINKQDFKIRRDASFGCVGKKQGINKNLKILPTKELRIKTFSKKKGGKWLVIPFSVNEKQERYFQEILMAEKYTAIVKRKLIKNELRYYVHFSYDIQGSKTKYSFKNGAIGLDFNYNFVTLANIDNKGKLLSYNQIDFRNLHSYRKNKRNDYISFKLDKIINYCVNKEKGVVIENLSFNQQFSYDKKLNRKLSNFRNTALELLKRKCIKKGVDVRNVHPAYTSLIGKYNYSRLHNLSTHILASYVIARRGLGFKEEIPPIYKWLLSQVGDKIKPRLKKGSPYYEWSKIYDLFKHSGITSFKTSEIMKKVLLMKDVLNSIKGTRPDNLRAGLTRNGKIKDYHKFWNCVNNFQFL

SEQ ID NO: 25084 - protein, 355 aa, Tolypothrix sp.
MINASGVVYNHCIALHKRYYRMWGKHLSCAKLQSHIAKLRKHNPFWQSVGSQAVQDICQRIEKAYQLFFKHNKKGVRPPGFKKVKKYKSFTLKQAGYKFLGGNRVKIGNRTYQYWNSREIQGKVKTLTIKRTRLGELFLVVVVDSADEPEIKFTTGKIAGFDFGLKTFLTCSDGSKIESPQFFKQSLNCIKRANRHHSQKLKGSSNRERARKNLVRAHEDIANRRTDWFWKLAHDLTNRFDVLCFETLNLKGMKRLWGRKVSDLAFRDFLNILEWIAKNKGKQVVYIDQWYPSSKTCSCCGHVLESLDLSVRRWRCPSCQSENDRDENASLNIKKVGSSTLGVGDVRQSQTAISV

SEQ ID NO: 25085 - protein, 182 aa, unknown
  TnpB Polypeptide
MQVATCAGSRKHCPVRKKGAQTGAKPEYNLQPIHERVASARADFQHKLSRAIVDENQAVIVETLKTANMMKNHHLARAIGDAGWSGFITKLEYKAAEKGVHLVKLDQWFASSKTCHCCGHKMSEMPLHKRIWQCPECGVEHDRDINAALNIKRKGILELQAAGLVVSAHGGQRKSVTQTVAA

SEQ ID NO: 25086 - protein, 372 aa, unknown
  TnpB Polypeptide
MLKGYKYRIFPTETQKDQLQRYFGVNRLVFNLGLETKTTAYASNKKSISKYDLIKQLPELKKEFDYIKECPSQILQHSLINLDTAYQNFFKGRGQFPKYKNRYSKQSITFPQGFEISFKDNVIKLPKLKEVAIDYHREFKGIPKRVTLTKTVTGKYFVSILVDNDKEIPKKKIITTSTSVGIDFGIKDLAITSDGVVYENKNFFKSQQIRLRVEQRSLARKVKGSSNREKQKLKVALLQEKIRNQRTDYLHKISTELVDTYETICIEDLAVSNMVKNHCLAKAISDMGWGQLRTMLEYKSEWQGKNLVVIGRFEPSSKLCNVCGNIKKDLKLSDRTYNCDKCGHSEDRDVNAGKNIMNFGIRNNPAIAKVVH

SEQ ID NO: 25087 - protein, 380 aa, unknown
  TnpB Polypeptide
VITYCTELIPTNPDDMSLIMSIMEEFRSVVNEASQIQFSNLKDLSALKALHNTFYHPTRESHPNFPSQMVIRAEMECLASYKAIKSNKHKISRPFEKHNLSMRLDKRLYSHVKGEPTKIKITTKEKKKEFSIVLYPKLEELMSKHQFVDPLIFVRDGKLMIALTFDNAIEPVKSTLCLGVDLGIRRVAALSDGRLIIDKKFNKEKRELRYKKRCLQSKGTKSSRKHLKKLRRKERDKNKNQTHLVANEILKTSANVIALENLKGIKAKKYKTQNKNGVSQVPFFELRRVLTYKAENMGKHVCLVSPAYTSQIDSVSGIREGERRGVRFYAKSGLVYDADINAAVNIARRSKHPISQGSLLDGQGVVNRPIACQPKTTITV

SEQ ID NO: 25088 - protein, 226 aa, Mycobacterium sp.
VALPDSRVGVDVGVRRLATVADAEGTVLEQVPNPRPLDAALRGLRRVSRARSRCTKGSRRYCERTTELSRLHRRVNDVRTHHLHVLTTRLAKTHGRIVVEGLDAAGMLRQKGLPGARARRRALSDAALATPRRHLSYKTGWYGSSLVVADRWFPSSKTCHACRHVQDIGWGEKWQCDGCSITHQRDDNAAINLARYEEPPSVVGPVGAAVKRGADRKTGPGPAGWP

SEQ ID NO: 25089 - protein, 409 aa, Halolamina sp.
MHYNYRYRLDPPEALKEELLHHVDTCRQLYNHVLHLLNEADDIPARYKVQGQLPDLKSWWDDLGDVHSKVLQMVVKRVYDNLSTLKAQRENGHAVGMLKWKSPREYRSITYNQSGFELKKTSGRPTLWLSKIGDIPIHLHRDVPENASIKQVTVKQEPTGEWHATFGIDMDEAAPEKPDNPEEVVGIDLGILKYTHDTDGCAIESPDFSEERERLERAQRDLSRKEHGSANWEKQRQVVAERYADLKRKRRDFLHKLSNYYASEYDLVAVEDLDAKELVELPGNSRNRAGAAWGTFLRMLEYKCQREGTHFVAVNPKDTTKECASCGVKTDNPLWVREHSCPSCGFEADRDANAAWNILSRGFEDVGVVHSESTPVETALPADTVVSAKRVVETGSPTLKKRTAQAVSE

SEQ ID NO: 25090 - protein, 414 aa, Halolamina sp.
MEKRRTVPVKLDVDSTDAALLEDTVDEFLWAANYVTRHAFHGEYVTTSKTTLHDDTYEDVRDETPLHSNHVQAARNKAAEACKSVVEKWKQGTKASKPHFTSPHVVYDHRTATFHDEYVSLATVDGRIEADYVLPDEERDTPHAEYFFSDQYETTGAELHYTNGDWMLHIHCKKDVEADTTEQEATENGTVLGIDLGVNNLAVTSTGTFWTGDEFDHWRREYENRRGDLQEHGTRWAHENIQSVGRKEEGRFKITLHRISNELVTEARAHDCSVITFEDLTDIRERTDASWGHKWAFNRLYEYVEYKAEEYGIDVEQVDPENTSRRCSHCGFTHPDNRDSEEFECLKCGYENHADYNAAKNIGLRYLRRNQTGSGGGALVGVRLNSGTMNANGEYEPPAEDSARAGVHAESPPL

SEQ ID NO: 25091 - protein, 413 aa, Halolamina sp.
MEYSHRYHAYPTGEVAERLDHHLDVHRQLYNHVRWDYEQAPADDKPSEYDQNNKLPEWKQRWPVFSELHSKAAQATVARFHRNLSTLKKKKANGHKVGRLKRQAPTEYRSVTYNQSGFDLDEKRDHGKYAYVRFSKIGWVKIRYSRPIPDHATIKEVTFKKETTGEWFVSFGLETDDADLPTKPDVGSLNASNSVGIDLGIQNYIHTSDGKTVDWLDLEDEYERLCREQRKLSRKNHGSNNWEKQRQEVAKVKRRIQRKVLDYQHKLTTWLVNEHDAVFVEDLDVAGMLQGDGNARNKQDAAWRQLITLLEYKADLYGTHVVQVEPEGTTKECASCGVETAKPIWVREHSCPSCGFETDRDANAAMNVLQRGFAELGLGWPETTPVETVTATDTTQFESVSASHVIETGSLPS

SEQ ID NO: 25092 - protein, 339 aa, unknown
  TnpB Polypeptide
MYNEAMKQVLTVSCKIEVSPEQSIKIDATLQAFASACEYVNQTVPPTLTNELAMQSLVYYDVRDRFGLSAQLAIHAIRRVSGNRKTAKKDGKPVKNFAPTSVTYDPRIFSFREKDWTVSLTTTGGRERFKLAIGNYQVGLLKGQTPKTATLVKRKDGTYYLNIQLESMPPEPIKTDSVLGCDLGRTDIVVTSEGDKFSGKEITKVRNHYAQLRANLQQKATRGTRSNRHRCRELLKRLSGKEKRFQSLVNHTISHRLISRAKLSNQAITLEDLTGIREHTNQQPRSKKERRLSNSWAFYQLRQFLVYKAIKHGVKVLFVDPRYTSLSLPQLQPYPSCSG

SEQ ID NO: 25093 - protein, 331 aa, unknown
  TnpB Polypeptide
MLLSKKTSIKVSREYANLIGHMCYAASKLWNVCNYERQHYKETGMEQYPDWYYQKKAHKEDLWYKQLPSQTAQEVCKLLDKAWKSFYALKRSGGIETPRPPRFKQESIPITYMQMGIVHERDTDRVRLSLPKALKKYMEETYQIHENFLYLENKIFRGMDQIKQLRIYPPEKGNCKIIVVYEVPDQEELPQNGHELSIDLGLHNLMTCYDSENGKTFILGRKYLELERYFHKEIARVQAQWYGQQSGKGVKHPVTSKHIRKLYKRKQDSVTDYLHKITRYLAEYCREQGITLCRYRGYPEHSERKKTWDTGQTRSFTACRITGSTSCWNIS

SEQ ID NO: 25094 - protein, 276 aa, Salmonella sp.
  misc_feature (239)..(242): Xaa can be any naturally occurring amino acid
MKRAYKYRFYPTTEQAELLAQTFGCVRFVYNSILRWRTDAYYERKEKIGYLQANARLTALKKEPEFAWLNDVSCVPLQQSLRHQQTAFANFFAGRAAYPAFKSKRHKQAAEFTASAFKYRDGKLYMAKNKIPLDVRWSRPLPSVPSTVTISKDAAGRYFVSCLCEFEPASLPITSSMVGIDVGLKDLFVTDTGFRSGNPRHTAKYAARLALLQRRLSKKAKGSKNRAKAHLKVARLHAXXXXQPVAIQSNSRRELGRTCAPAPVQRRMGGAVSGSH

SEQ ID NO: 25095 - protein, 551 aa, unknown
  TnpB Polypeptide
MSNVSNNIRIEDSVFAVQFSPLLLSDTKKAELHRIAHIIRNIRNAVAEKIHPEFERYAEMKKYDFERLFEADYRELVSSHFLHKCIEDVYDSLQHRHEAFLTHIKFEQIYHFEITRYKVNTKHQSKGDFKGIDKRTKSTDLSKVLTYLARYYRPGLVDYIETHREANQFYPIILEKINKFGLERLTRLAMQRRDRIYRMYLERGPIRFESLTFRGRSRLKCDIVRANKNQNSRITHFITISWVREDGSTEPLCIPVKYNRQYHRNIRRYCSKTETPYTVVFRGNRIYFVLYRDGKRITPTYEITEENTIGIDVNSKHNMLALSDGRFIPHDAELVKEFTDHLLAIDRKQKEFDRLHNGSVRFTQSRRDIKKSMAIAIRIREYVRRVAADLCKDLQARGIHNIAMEDLDGFIGARLRSDNADGINIGRLCRRISLSSIKDEFIHIAPHYGISVSLVHACYTSQECECGCIDAANRPTQEVFHCIQCEHEENADRHSSNIIKSRLTSTVLRGKLLDATDSGYSMFLPKSLPRWKIKDMLEKCRKEARQGFCGA

SEQ ID NO: 25096 - protein, 371 aa, Flavonifractor sp.
VEKAYKFRLYPNKAQEELIRKTIGCARFVYNQTLAARRGAYAAGNQLSGYDCVKLLHGMKGSYSWLKEVDSTALQTSVLQMDQAYKNFFAGRKGKRKVGFPKFKSKHRSRASYTSKVVGQNIQASDRAIRLPKLGWVKAKVSTPVHGRILHATVSMSRSGKFFVSLCCTEVDIPQYSSTGAVAGIDVGLKNLVITSDGQKFSNLKHLQQAEQRLIKLQRRLSRKPKGSRNREKARLRLAKQHEYIANCRQDYLHKLTTQLVRAYGIICVESLNVKGMMANHKLAKAIADASWGELVRQLKYKTAWQHKQLVEVGTFYPSSQLCNHCGYQNAETKDLALREWTCPKCGHRHDRDVNAAQNILHEGLRLLASA

SEQ ID NO: 25097 - protein, 441 aa, Streptomyces sp.
MSAGVHIPLIGEASPGTIVCVQLRYDYRVYPDASRCRALARAFGCARVVWNDCLRDRKEAHAAGLPYPKSADLSRLRITQAKRTEGRAWLADVSAVVLQQALRDLDIAYKTFFDLIRGKRKGPKVGPPRYKSKKDSRQAIRLNANAFTACDGGTVYVAKVGRIKVKWSRPLPAVPTSLTVIRDSSGRYFMSFVVDTRPDHLPESDTEVGIDLGLTTFAVLSDGTRISSPKFLRRAEKKLKRLHKDLSRKAKGSKNREKARIKIARQHARVADRRRDWHHKASTQIIRDNQAVYVEDLAVSGIARTRLAKSVHDAGWSAFVHMLEYKAAKCGRYFGKIGRFEPTSQVCSTCGVKDGPKPLHVREWTCKACGAVHDRDDNASKNTLAAGRADRLNASLSARKTRRKLPARRDEAGSHQGGRATAVGIPSRQAGERVKGPSTWR

SEQ ID NO: 25098 - protein, 319 aa, Streptomyces sp.
MVFNDALRAREDARTAGLPFPTVGELSKRLTAAKKTPERAWLAEVSSAILQQSLRDLDAAYRNFFDGLKGKRLKVEPPRFKSKRDTRQAIRFTANAGWKITPGGKLRLPKVGDVAVKWSRTLPSTPTTVTVVKDSTGRYFTSFVVETGPEEVLAPTTPEIGIDLGLGHFAVLSDGRKIDSPRFLRRAEKQLKKAQRSLSRKEKGSSNRNKARIKVARAHARVTDARREFHHQLSTKLIRENQAIAVEDLAVEGLARTRLAKSVHDAGWSQFVTMLEYKAARYGHAFTRIGRFEPTSQVCPQCGVKDGPKPLHIREWTCA

SEQ ID NO: 25099 - protein, 372 aa, unknown
  TnpB Polypeptide
MAEKAYKYRIYPNKKQKELIHKTFGCTRFVYNYYLNKRKEMYENDKTTFTYNMCSKDLTQLKKEFEWLKEPDKDSLQKCLKDLDMAYQKFFKEHTGYPKYKSKKNRYQSYRTSFTKTTAGGNIMFLDKHIKLPKLGLVKVRDKQIPQGRILNATISQEPNGHYYCSLCCTDVEFEQSPKTNQNIGLDLGLVDFAILSDGTKIENPRFFEKSEKKLIKLQRELSRKTIGSNRWNKARIKVANLQKHISNQRNDFLQKLTTKIIRMYDVIAIEDLDVKSMKETNSTIRNKRVGDVSWSEFRRILTYKSQWYGKKLSVIDRYYPSSQICHCCGHKDGKKLEDIRFWVCPKCNSELDRDINAAINILNEGLRIINV

SEQ ID NO: 25100 - protein, 414 aa, unknown
  TnpB Polypeptide
MNKQGSKNTDKAAASYLTYKFRAYPTTLQEYKLENWLSILCWFYNYEINEYRRIWDEEHRTPTKFERQRNLTAFKREEPALRLVYSGVLKAIIDKIDWAYKRFFVAIRNKEGHISPPKPKKPDQYLSLTYPQVWMTHKNYPDGYPVIKFEKLNDKFAYIHLPKLGGLKIRLHRPIDWTKAKNVTIKRHPSGRWYVYVTVEVPNNNDATIVIDTNNKQRIIGIDLGLTNLIVSSDGNIVSNPRFITKLEKRIKRVQKQLSRKQRGSANYMKQRRKLARLHERLANMRRGFLHHISHQLATNYDIIIFEDIKIRDLVSKRRRLHLSKYIYDAGWNTLINLTSYKARLHGSQVIKVNPAYTTQTCSSCGHKVPKSLHDRIHKCPFCGATLDRDYNASINILKRGLHNIKEIQNEHTR

SEQ ID NO: 25101 - protein, 394 aa, unknown
  TnpB Polypeptide
MNWHLQQCRELYNKLLRLEIVNYQLCEKFILYNELSRISKTETGINSQVKQTIAKRLDLSLRKFFRDKKITKCAGFPHFKGKNQYTSWVYPQSTRGFKVQENRIRLSGLGTSKFKMHRPIPEGGKIKTCTIKKELGKWFVIFTTDIPDKVSIARQELEVGLDVGCKDIITTSYGEKIENPKFMKKMSVRISLLQRKKDTTHNIKTKNSFSRKMRKLYKKVHRQREDFLHKLSYKIVHRYSRVYVEDLKVRRVANKTKEKSLRKSILNSGWYSFVQKLSYKSIDRGVSLIKVNPRNTTKMCSNCGKVVPKTLNERVHKCGCGLMLDRDHNAALNILRLGRESLVEKPKRPALLQSSLHNCSKMLLNFGIQKVFYTEDYPDPDNHEMLNYLDFEKI

SEQ ID NO: 25102 - protein, 430 aa, Thaumarchaeota sp.
MPAEVPSVKTNVVRLLVNGFQDRKLHRLANISARLWNELNYERRQQFFKEKRVDFKETYKKQYEKYRSTLKVNAQAVVQKNNEAWSSFFSLLKQGEKASPPGYWKIDEKRREILVIRQDRYEARENKIVLKDFNMELEFVGSLRWGGKQGRLEIIHDDVKNAWYAHMPVEVGVYAARTGMPSKYTVKGKRDRVVITKPKGNKKASIDLGINMLASVVVDDGTWLLYRGAKAKGDYFYLQKKVAEAQSLADRIRNLGEPEDYEELNKEKKRLFKKLYSRLLHLYRTLASHLAKTLYELGVSEVYIGYPYEISQDKGNKLTVNMWSYNKLSSVLSEKLLEYGMNVYTVVEYNTSRYCAYHSVEVVRRPRGVINCSFGHKLHSDLNGALNIMEKAVKEIPQEIKKPLSFYVFHSGVAPVKGSNALDPGRTLAP

SEQ ID NO: 25103 - protein, 374 aa, unknown
  TnpB Polypeptide
MKTLKFKLYNHKRNRHLKRAINAAGVVYNHCIALHKRYYRMWGKHLNCAKLQAHIAKLRKRNTFWQLVGSQAVQDICQRIEKAYQLFFKDHKKGVRPPSFKKVKKYKSFTLKQSGYKFLGGNRVKIGIRVYQYWNSRPLEGAVKTLTIKRSPLGELFMLVVVDNVADDQIKFETGKTAGFDFGLKTFLSCSEGFNIESPLFFKQSINSIKKASRLHSKKQKGSNNREQARKHLVRKHEDIVNRRTDWFWKLAHNLTNQFDVLCFETLNLKGMQRMWGRKVSDLAFREFLQILECVAVKKDKQVIFIDRWYPSSKTCSCCGHVLDSLDLSVREWRCPSCQNINDRDENAAINIKTVGNSTVGVGDVRQALPAVSA

SEQ ID NO: 25104 - protein, 372 aa, unknown
  TnpB Polypeptide
MRKTFKYRIYPSSSQETKLEQTLNGCRWLYNHLLEQRKNSWESEKKSLSRFDQCNTFKELKKEKIFLNDIHSQVLQSVATRIDLAFRAFFRRVKSGGKPGYPRFRGKFRYDSFTYPQSGFKLLKSVVQLSKIGGVKIKLHRPVEGIIKTCTVRQSPTGKWFVIFACNIDRIPLEQPIEPTIGIDMGLLSFATLSNSEKINNPRFFRKEEKSLAKVQRKLSAQEKATKAREKARKVVARVHERINWKRHNFAHQESRKLVDKYNTICVEDLSINDMQKDNFRSINKSIGDAAWRQFLDLLVYKAAYAGKRVVKVNPAYTSQTCSRCHNRHKLKLSDRVYHCPSCNLSLDRDVNAAINILALGMQSLTRLLAVS

SEQ ID NO: 25105 - protein, 365 aa, Ruminococcus sp.
MNRAVKIRIYPNKEQRVQIEQTIGCSRFIYNQMLADKISYYQKEKKMLRNTPAGYKKEYPWLKEVDSLALANAQLHLESAFRKFFREPACGFPRYKSKKHVRNSYTTNALNGNILLQDTHLKLPKMSVIRIKLHRQIPSDWKLKSVTVSREPSGKYFASLLFCCEDQTVEKRPAERFLGIDFAMQGMCVFSTGERAGYPMFYRKAEKKLAREQRKLSHCEKESRNYQKQKKRAALCHEKIKNQRKDFQHKLSRELAERYDAVCVEDLNLKGMSGGLHLGKGVQDNGYGQFLFMLGYKLEECGKYLIKVDRYFASSKICSVCGHKKKELALSDRMYVCECGNRMDRDVNAAVNIREEGKRIYKECA

SEQ ID NO: 25106 - protein, 447 aa, Deinococcus sp.
MAIGKRGRAARTYYVRKLTLPSILKPRLDELSAASGALYSQVLTTFWRTLRRSAGKRKDHRRQAVFLSSGTLQKLFPKDPAGLLHSHSCDAVVDAFIASMDSARTRKKTDPKARFPRRRKRFFKVTFKSSAIRVRDGQLLLSTGDRTNPLAIQWAFGPPVNVEIGWRACGGYELRAMYVDTRPVQTPLGDGVAGIDIGEVRIAAVYDGQGVHLHSGRLIRARNHYANKHQAKLDARIARKKNGRPQGQRSSKRLRRLQRARRTLRDRIKRQNRDQLRKQARQVVSTLHESRVQTIAVGDLGDIRNRIDYGPRANQKLHAWMFGQFLTELKAQGRKFGLKVVVIDEAFTSQTCPWTGQRRKPRGRHFVSPCGQHRMDRDGVGAVNIRAKYLEIQAGRGTAYGRTPSLPWTPVLVGMAPITWGQRFRPWVSHAQSRRGAVYKTARIPGL

SEQ ID NO: 25107 - protein, 459 aa, unknown
  TnpB Polypeptide
MLKVRPRASAAAPGTSASSPSVATVPPGHRLTSPLTADDLRRLQIDAHPCGFGSRRFDIGHRYGAHVKLVVQVKLLPSPEQTAALEATLRACNDAANWVSAVAFGMTSRRNYDVRKRTYADLRAAGIGSQAAQHVIKKVCDAYATLKANIRAENLGEPGSRRRMKAESNPVRFRPDAAQPYDRRNLSFALDARTVSLWTIIGRLKDVPFTGSPTQLEQLATHQRGESDLICRDGMWFLAVTIDVPDPDLREPDGWLGVDLGIAAIATTSDGERMAGRALNRYRRRQLALRRKLQTKATRSAKRLLRRQRRREARFAADTNHRIAKIIVVAAERTGRGIALEDLTGIRARVRLRKDQRSSLHSWAFAQLGQFIAYKARRAGVPVVYVDPAYTSQQCSECSYTDRNNRTGQATFACRACGVTLHADVNGSRNIAFRADAAWQAGRQSSVPGPAPGPVLDAA

SEQ ID NO: 25108 - protein, 403 aa, unknown
  TnpB Polypeptide
MPMQLPNTLMTRDSRRSSVGRKTNRGIKYRIYPTSEQRELISRTFGCSRFVYNQMLSLSRDAYVQGEKLCSRNKFNYRLTELKKEYPWLSEVDATALTSANDALAAAFSNFFAKRSGFPKFHKKKNFASYTSKRIQGSKNIDLGPNFVRLPKVGCVKARLHRLPADGWIIKSATVSQESDGKYYVSVLFEFEQPENSYVADPTNAVGLDYASDGLFVDSNGNVGSNHKYYRESQKKLAKAQRKLSRKAGSREGKAKSNNYLKQLAKVGKIHRHIANQRLDNLHKKSTEIANRYDVVCVETLNMRGMSNKGFGNGKATLDNGYGMFLEMLDYKLHDRNKHLVRVDKWYPSSQLCSCCGYKNPLLKNTAIRKWACPECSTMHNRDINAAINIKREGLRMLKAQLG

SEQ ID NO: 25109 - protein, 216 aa, Nostocales sp.
VSFFDFGLKTFLTCSDGTKIESPQFFKQSLNAIKKASRQHSKKLKGSSNREQARKNLVRKHEDISNRRRDWFWKLAHELTDKFDILCFETLNLMGMQRLWGRKISDLAFGEFLQILEWVAKKKNKLVVFIDQWYPSSKTCSSCGHVLESLDLSMREWRCPSCQSVHGRDENASRNICAVGASTVGLGQQCGGRVPRHKATADPEGDVRLALPAIAV

SEQ ID NO: 25110 - protein, 419 aa, Nostocales sp.
MLVLEAKLEGANEQYGKLDEAIRTARFVRNSCLRYWMDNKSIDKYDLSAYCAVLAKEFEFAKNLNSMARQASAERAWSAIARFYDNCKKNKPGKKGYPRFKKEQTHGSVEYKTTGWKLSEDRRYITFTDGFGAGTFKMWGTRDLHFYQLKQIKRVRVVRRADGYYVQFCVDQERLEKREPTLKTVGIDVGLNHFYTDSDGQTVANPRHLRKSEKSLKRLQRRLSKTKKSSKNRAKFRNKLARKHLKVSRQRKDFAIKTARCVVMSNDLVAYEDLKVRNMVSQRVGRVPRLEATGEPVRVRNRRLAKSISDAAWTQFREWVEYYGKVFGVVTVAVPPHYTSQNCSNCGKTVKKSLSTRTDNCPHCGHTQDRDHNAARNILEKALRTAGHVGTNASGENDLCLDGETPPTKSARGKRNPKK

SEQ ID NO: 25111 - protein, 419 aa, Nostocales sp.
MMLTYQYKLNPTPQQVVTLEIWGELLRRHYNYALGQRLDWLNRTRSQIDHCSLVSEPIGEIPNKVDYYTQASDLKQTKELFPEYKNIYADCQQQNLMRLDKAWKRWLIPDKNGKRGGRPRFKKRGDICSFTFPRVNSAKAGAHLTGNILKLSKIGEIEVILHRPIPDGFEIKQATILRKADGWYVSFSLEDKTVPAALPIDEIKTATGIDVGLEKFLTTADGQSIEVPQYYRKAQATLARQQRNLARKTKSSKNYQKQANKVAKLHLHVARQRREFHYQVAHWLVKSYDLIVFENLNIKGLARTRLAKSILDVAWGAFLQIMQAVAVKCGKHTRGVDPRGTSINCSGCGERVEKTLAVRVHSCSCGLVIDRDWNSALNLLKHGSVGLPIPGCGGLEVTQPMKQQVSYVNLRCSRYTACS

SEQ ID NO: 25112 - protein, 418 aa, Nostocales sp.
MLSLTYSYRIYPDAVQEARMLAWMESCRKVYNYALRERKDWIASRKCAVNACSIRSEYIIPADTPYPDYYKQQNALTPVKKENPELQDVQSQVLQDALKRLDRAFKFMIGRGFGFPRFKKFGQYRSFVFPQFKSNPVTGFQIKLPKIGAMPINLHRPVPDGFVVKQVRVVSKASGWYAQLILESGVSVPDVMPNGNSIGIDVGLEKFLAVCDGRLVERPQFFNSLQRELKWLQRKLKNKTKGSANYRKVQHKIRRLHERISDTRKQFHYLTAHSLCNGVGMVFAEDLNLKATSRGMLAKHCLDTAWGSFLEILSWVCWKRGVYFAKVNPNGTSQTCPQCGTHTGKKKLCERVHVCHECGYTTDRDVAAAMVVEQRGLAAVGHTVKLPVEVSSSGDASLGTTREAGKPNCKIGKPALYS

SEQ ID NO: 25113 - protein, 382 aa, Nostocales sp.
MQVSYQYKLRPKPSQSKVMDSWLDMQRSLFNWFLADRIDGYYQTFIMGEYCDIRTKTERYPLTCSLNKNSNLHNPWKNPDKNGVIKKRSCSLMQDAYLAEMKQARPWYKAIHSNVLQMLVKRLDTAMEGFFRHGRGFPSFKNRSNFRSFQYKPGDVKLDGNKIYLPSIGWMRFYNSRPIPQGFQIRTVTLRKKADGWYASILIKDDSVPDFPAPGEVNTVVGLDMGLTKLVHCSDGSDFDNPRPSTSKKGKRTLKIRQRRLSRKNIGSANRKKQAQKLARLHKKHADKRSAYQWFVANKIVSKADAISVEDLNIKGMKAKCKPKPDDVKHGRFLKNGQSAKRGLNRSISDASWGTLIEKIQYAAAKSGKSFFKVDPKNTSRT

SEQ ID NO: 25114 - protein, 404 aa, Nostocales sp.
VFNLTYEFKIKPTQSQIALFEDWLEQCRRVYNYALAERKDWFKSRSCQINACSLKHEYIIPADTPRPTYASQCRGLTQARAKYPELNAVQVHVLQQTLKRLEVAFVAMWERNHGFPRFKKSGQMRSFVFPQLGVSPLGQGQIKLPKIGWVKFRQSRSIPDGGIVKQARVVKRVSGWYVMLTVQWNVSVPQSQPHGEAVGIDVGLTSFVATSNGLLVKRPRFFVDALRKLKLLQQRVTRKRIGSNNWKKAQKKVASLYEYVANCRKDWHRKLSHQICNDAGMVFVEDLNLVGLSRGMLGKHCLDAGFGQFFNILEQTCFKRDVYFQKVDSRKTSQICPSCGTETGRKELSERTHICSNCGYTTDRDVAAAQVVAIRGLAAVGHTVKMLAEGKFVGIPVKQESPGF

SEQ ID NO: 25115 - protein, 158 aa, Nostocales sp.
VDFGRRDIAVTSNGDSWNGKQLTETRDKYSRVRASLQRKASTRTRSSRRRCRQVLVRLSGRERRFQAWVNHNISKTIIQQAKSKQALVAIEDLTGIRERTNQKPRNKTERRRSNSWAFYSVADVFGVQRTTGRCRSCSRSSCLHESNLQSLPTHWLAL

SEQ ID NO: 25116 - protein, 437 aa, Nostocales sp.
VFNLTYEFKLKPTQNQIVMFEEWLETHRRVSNHALAERKDWYKSRSCQVNACSLHSCYIIPADAPRPTFASQCKFLTAARKENEYLKRVNAQSLQQTLRRLEKAFVSMWEQNHGFPRFKKPGRMRCFSFPQLGVNPLSDGFVKLPVIGAVKMRQSRSIPDGGVIKQARVVKRVSGWYVMLTVQWDVSTPQPMPSGFALAYGGKPSPKFPQRGEPPHGTSLCSAVSPRGEAVGIDVGLTSFVATSNGLLVKRPRFFVDAERKLKFLQQRVSRKRIGSNNWKKAQKKVASLHEYVANCRKDWHRKLSHQICNNAGMVFVEDLNLVGLSRGMLGKHCLDAGFGQFFNILEQTCFKRDVYFQKVDSRKTSQICPSCGVQTGKKELSERTHVCSNCGYTTDRDVAAAQVVAIRGLAAVGHTVKMLAEGKFVGIPVTQESSSL

SEQ ID NO: 25117 - protein, 422 aa, Nostocales sp.
MFSLTYEFRLQPTKHQIEIFQDWLEINRKVYNYALAERKDWYKSRSCQINACSLQSEYIIPADAPRPTYASQCKLLTTAKQLYPELKRVQSQVLQQTLKRLEIAFVSMWERNFGFPRFKKVGQLRSFVFPQLGKEPLKPGFVKLPVIGWVKFRQSRDIPSDAVVKQARIVKRPTGWYVMLTLQWDVSVPQRHFAQVGEPAHASGLPMPHGEALGVDVGLMSFLAASNGLVVKRPKFFVDLQRKLKLLQQRVSRKKLGSNNWRKAQVKVARLHERIANTRKDFHWKVAHQLCDQAKTIFVEDLNLVGLSKGMLGKHCLDAGWGQFFQILEQCCFKRDIYFQQVDSKKTSQICPSCGTETGKKDLSERVHVCSNCGYTTDRDVAAAQVVLNRGCAAVGQTVKMLAEGKFIGVPVKQESHGFKLN

SEQ ID NO: 25118 - protein, 432 aa, Nostocales sp.
MVVTQWLHIYANICVTGGEKQMKTAYQYRLRPTKQQSIEIDRWLAMLCSQYNYLLADRFNWYEQNRCQINACPLVCHLPELRDNPDYYSQKKTLPNLKKTHPHYGEIHSQVLQDVVKRVKLTFDRFLSGDSNGKKSGRPRFKSRDRYRTFTYPQMKDDCIQGNLTALATSRETRPTQCLINLPKLGQIKLVLHRSIPDGFKVKTASVTKKADGYYVTLSLEDPTVPSVKPDINPESITGIDLGLKEFLTTSEGEPVAIPQHYRKSQKRLRVIQKRISRRKKGSNRRRKSVKQLGKQHKKVADKRKDFHFKTAKQLLSKHDVVVHEDLNVKGLSKSRLAKSVHDAGWSSFLSILTNKAENAGLLVIAVNASGTSQDCSSCGVKVPKKLHERWHSCQCGCSLDRDHNAAINIRNRAVGHSVLKAQRLLSNSRIG

SEQ ID NO: 25119 - protein, 410 aa, Nostocales sp.
MRRQAVKVRLYPTDEQTQILEQHFGCARWWWNYGLNKCIETYRATGFGLSQSGLNSLLPALKKDKETEWLGECYSQVLQSVSLNLSRAYQNFFEGRAKYPKFKSKHQRQSIQYPQKVKQVNECLKFPGLLGVVKAKIHRPLDGTIKTVVVSKCPSGKYYASVLMEYEGNYSASNTDGRVIGIDLGIKDFAITYDGEKVSKYPNPKHLTKYEKKLAKKQRIAARKKKGSNRRGKTMKIVARVYEQVSNVRQDYLHKLSRKIVDNNQVVVVENLNVKGMVRNHKLAKAISDTGWGTFVNFLSYKLERNGGKLVEINRWFPSSKLCSNCHYQINELPLDVRTWICPSCGTHHDRDGNAAMNIRAEGIRMLSSSGTGEANANGEKVRPIRGRKPKMRHSSVKLEVPPSSSARVG

SEQ ID NO: 25120 - protein, 211 aa, Nostocales sp.
LRAEFEFVKDLNSHACQASIENVERAIKRFFDNCKNNKPGRKGYPRFKKHSRSVEYKVSGWKLHPSKRRITFSDNKGIGELKLLGKWDIHTYPVELIKRVRIVRRADGYYVQFCVNVDDQQDPPQTTSEVGIDVGLEYFYSDSNGNHEENPRYLRKAEKDIKRVQRKIYKKKKGSSGRKKARGFYARKHLRVVRFVLEQVKVNKQDVIQVR

SEQ ID NO: 25121 - protein, 321 aa, Nostocales sp.
MWGKHLSCTKLQSHIAKLRKHNPFWQSVGSQAVQDICQRIEKAYQLFFKYNKKGVRPPGFKKVKKYKSFTLKQAGYKFLGGNRVRIENRVYQFWKSREIEGIVKTLTIKRTPLGELFMVVVVDNCPESEAQFTTGRIAGFDFGLKTFLTCSNGSLIESPQLFKQSLNAIKKASKQHSKKLKGSFNRERARKNLVRKYEDISNARRDWFWKLAHDLTNSFDVLCFETLNLKAMQRLWGRKISDLAFGEFLQILEWVAKKKGKQLIFVSQWYPSSKTCSNCGHVLEKLDLSIREWRCPSCQSVNGRDENAAKNICTVGASTVG

SEQ ID NO: 25122 - protein, 442 aa, Nostocales sp.
VLVLEYKAVVKPIQAKAIDEAIRTSQFVRNKVLRYWMDNHGVGKKELYQYNTQLRAEYEFVRNLSSHACQASVENVERAINRFFANCKAKKPGIALGQKNEPSLNNNSTNAHIDRSTNKGLAHFSRYSPVKKGYPRFKKNSRSVEYKQQSWKLHPTKRRITFTDKKGIGELKLLGKWDIHTYPVELIKRVRIVRRADGYYVQFCVKADNQQNAPITISEIGIDVGLEYFYSDSNGNHEENPRYLRKSEKDIKRVQRKIYKKKKGSSGRRKARGVYARKHLKVTRQRNEHAKRIARNLCLANAKVVLEDLNISGLVRNHKLAKSISDASWYNFRQWLEYFGQKFGREIIAIPAHFTSQECSSCGARVQKSLSTRTHSCPHCGHIEQRDVNAAKVILSRANEQFGGGFPSVRNCGARGGHPRSNASRDVPSTSIGRKSSKSKER

SEQ ID NO: 25123 - protein, 193 aa, Nostocales sp.
DKFAATSDGELIGRPRFLKHLHRKLKLLQRRLKNKQKGSNNRHKLNRKIARLHQRISDTRKDWHFKLAHQLCDDVGMVFVEDIDFRTWAKGMLGKHTLDAGFGQFVSILQWVCWKRGVYFDKVDKDYTSQACPQCDTHTGKKELKDRIHSCQSCGYTTHRDVAAAQVIRNRGVNALGRSVEQNACGDGLTGTG

SEQ ID NO: 25124 - protein, 396 aa, Nostocales sp.
MLNLTYEYKLIPTDAQRETFDQWLNICRKVYNFALRERKDWVNSRKCEINSCSINQEYIIPASAPRPTFARQCKTLAQAKKSIAELKLPHTHVLQQVLRQLEAAFVAMWERGHGFPRFKKRMRSFVFPQLNQQSVRRFDGADEINLPKIGWVKMHLSRPIPDGFEVRQIRVVKRASGYYAMLTLQCDVEVPQISASGHGLGIDLGLENFLATSDGGLIGRPRFFVDGQRKLKLLQRQLKRKKKGSRRFRQLQHRITKHHEYIWNSRKDFHFKTAHHLCDQGLTIFAEDLNLKAMSRGMLCKHTLDAGFSQFLNILGHVCFQRGAYFGKVDANGTSQTCPRCQAHTGKKELSERVHKCCECGYETNRDVAAAQVVLQRGYTAVGHIAVNFGEGKLHG

SEQ ID NO: 25125 - protein, 398 aa, Nostocales sp.
MIVYEFKAKGRVEQYQKIDEAIRTFQFVRNKSIRFWMDNRGVKLSELSKLSAVLAKEFEFANKLNSQARQAATERASFSIQRFYDNCKSGKPGKKGFPQFQKNNRSVEYKQTGWKLSDDRKYINFIDKCGIGKLKLIGTYDLHYYQIDQIKRVRIVRRSDGYYVQFCIQADRNVDIQPTGKTIGLDVGLSAFYTDSNGSKVENPRHLRKSEKALKRLQKRLSRKQKGSNNRKRAVKKLGRKHLKVSRQRKDHAVKQALCVVKSNDFVAFEKLQVRNMVKNRRLAKSISDAGWSQFTQWLEYFGKVYGRVVSGVPPQYTSQNCSDCGEIVKKSLSVRTHICKCGCVLDRDHNAAINILDKALKQAAYQLSTVGHTETHNAWGETNLYLIGETQLDKLIH

SEQ ID NO: 25126 - protein, 379 aa, Nostocales sp.
MLLGFKTKLKLNNKQRSELVKHCGVARHAWNWGLGLTRQILEYNKLNPESKIKFPSAIDLHKWLVALVKPENPWYFESSKCAPQYALRNLRTAWDRCFKKVSGVPKFKKKGRNDSFELDGKIHIRGSRKIQLPRLGVLRTYENLPQVQPKSVVISRTADRWYISFKIDVEPTSTHKISDVVGVDLGVKSLATLSTGEVFEGAKSYRRLENKLSRMQWLNRHKQLGSANWKKFQVKVARLHKQVADIRKDTLHKLTTYLAKNHSVIVIEDLNVSGMMANHKLAKVVQDMGFYEFRRQLEYKTKLYESELVVVDRWFPSSKTCSKCGTKKDVLALSERVFKCDRCNLEIDRDLNAAINLKNAASHVVSACGLDSADVTRVK

SEQ ID NO: 25127 - protein, 374 aa, Nostocales sp.
MKTLKFKLYNHKRNKHLKRMINASGVIYNHCIALHRRYYQMWGKHLSCAKLQAHIAKLRKRNPFWQSVGSQAVQNICQRIEKAYQLFFKHNNKGVRPPGFKKVKKYKSFTLKQAGYKFLGGNRVKIGNRVYQFWKSREIQGTVKTLTIKRTPLGELFMVVVVDNVVEPENKFKTGKIAGFDFGLRTFLTCSDGTTIESPQFLKQSLNTIKKASKQHSKKLKGSSNQERARKNLVRKYEDISNARRDWFWKLAHDLTNKFDVLCFETLSLKGMQRLWGRKISDLAFGEFLQIVEWVALKLGKQVLYVDQWYPSSKTCSCCGHFLEKLDLSAREWRCPSCHSLNGRDENAAKNICAVGASTAGLDDVRRATPAIVV

SEQ ID NO: 25128 - protein, 383 aa, Nostocales sp.
MGNKAFKFRIYPNKEQSAFLAKCFGCSRFVYNHFLRLTTDAYAQSKKSLRYKEWAKLLVHLKSEFEWLTEVNSQSLQQTLKDLESAFTRFFKKLGGFPNLKKRSHRQSFRVPQHFSIDENGFLKLPKMTPLRMVIHREILGTPKSVTISKTPSGKYYACIVTELDIAHAPLNGNKIGLDLGLKEFAIASNGEKFENPRYFHKSLRRLKIRQRRLSRKHKGSSNRKKSRLSVARIHEKVANQRQDYQHKISLKLTCENQAISVESLNIKGMVKNRKLVKQISDVAWGNFLTMLEYKGDIYGCEICYVDRFFPSSKRCSHCGYIKEDLTLSIREWECPECKKVWDRDINAALNLMFFSESKIPLEEGKFTPEQPVERLGITRSSG

SEQ ID NO: 25129 - protein, 384 aa, Nostocales sp.
MKARYQYKFYPTDQQRLSLAQLFGCVRVVWNDALALSKVSKFPGYNSLAKSLTLSKKTEERKWLSDVSSVPLQQSLKQLEVAYKNYFDSLKGKRKGKKVGQPRFKKKTNSQSATFTKAAFSVQRGAVYLAKIGTIKPIWSRELPSEPSSVTVIKDCANRYFLSFVVEVQPNLAVTNNQSIGIDLGIKTFAVMSNGEKALSPNYSKHDRKIRRLQRKLARQQKDSKRRNGTRIRIAKLHNQISDTRKDFLQKLSTKIVKDNQVIVLEDLNVSGMVKNRRLSRVINLQGWREFRNLCEAKSEKFNRDFRVIDRWQPTSQICSCCGFRWGKIDLSVRSILCLNCSTEQQRDENASKNIEMVGMGHRHDLKCTQRDCKTTSVAEPNEA

SEQ ID NO: 25130 - protein, 393 aa, Nostocales sp.
MYAIKVELKLNNKERTMMRKHSGYARFVYNYGLALIQELYFAGIKGSITKQINEIKKVFTNYTKKQPGNQWMNELSSRVYQYAFMSLGQAYQRWFKGLSSKPVFKSKKDGDSFTVDSSNGKVVLFFGKKIKIPTLGTFRLKEALPCCYVTQTFTISRQAHKWYVSFAVDADRIPPIHHPEESVGIDLGVKCFATLSDGSQVDAPKHYKQAKTKLALAQWRNRNKQSGNRRQGVKQSNRAKKFYGSLAKKHARIAHQRQDFLHKVTTDISRKFYRIRIEDLNVSGMLANSKLSAAISDLGFYEFRRQLVYKSQVYGTKVEIVDRWYPSSKLCCMCGSKHDNLKLSDRVYQCQNKSCLAHAITLDRDLNAAYNLLNAPSDFVRLAQPEVTLVDKK

SEQ ID NO: 25131 - protein, 443 aa, Nostocales sp.
VLHKVVQVRLYPTEEQQAQLAQAFGCSRWWWNYALNKSIEAYKETGKGLGRSALNALLPALKKAEDTCWLADCYSQVLQATTLNLTTAYKNFFEGRAGFPQFKSKHGKQSIQYPQNVKVFDGESSPAGGFPDLGNWRSRSVSVGVASLIGEGFTRKGVVKLPGSIGEIQAKIHRPIEGKIKTVTVSKTPSGKYLASILTEVEGEKPTTVEGKIYGIDLGLKHFAVVTDGEKVSKYDNPKHLAKHEKNLKRKQKKLARKQKGSNSRNRYRRVVAKVYERVSNSRQDFLHKLSYRLVSDSQAVIVENLHVKGMVRNHNLAKAISDTGWGTFTNFLAYKLERKGAKLVEIDRWFPSSKLCSHCFYQIGEMPLDLRKWNCPHCGTHHDRDGNAAINIRAEGIRLLKAEGSAVSAVGGEVRPKMGRKSHLRHSPMITEARALPEASIG

SEQ ID NO: 25132 - protein, 408 aa, Nostocales sp.
MKQVKLTIKLKFVNLNKVKAEMFAQMEKENTRLANELLSIPYMERRKLTTAKVNSILASALSNQTIRHTISASGRHSKHYTKLPIEINRQNWNLHKVGDTYSLSFPTIQGVKRVPVEIASQHWQSVLEKVLSNQCIKGSIKILCKRKVWYANMNVTLEVPEVQSQNKIGVDRGQNNLAVAASSKGFAIFFSGLCVKHRRKYYQKRRKSLLQAKKFRALKKQTKKEHRWLEAVTHTISRRIVRFVQFLDADVVLEDLEGCFKTTKLSPKTKTDVDETWNRNSFYSLEQKLIYKIEMVGRKVIKVPAAYTSKTCSTCGMLGERKKHDFHCTNGHYHNADHNAAVNLARWIGFTCDLNLKETLSAMESVDSGYAVLGTPQSKCTVSGTPTLRESEMSSGDLVNTYPARDVG

SEQ ID NO: 25133 - protein, 507 aa, Nostocales sp.
MTFRLYPNKQIEQSLRYHRKLHQDLYNAAVNNRFTQYQKFNQSVSYFEQQNCLPAFKEVWTEYKEINSQALQATLKRVDYAFERWFKGLGKRPRFKSIRHYSGWTYPAKSGYSVESNGENGYLNLSKIGRIQMRGKAKYWGTPTTCTIVFRNNKWYASITVEVLDQVLKPEVLPIGAIGIDLGCNSALSITDGENHQQIEAPKFLRNAEQLIKKASKNKRRKQAPNRKKKIKASRRWKKAQAKVSKLTRKVASQRQNWVHQVASEIVSGNSFVATEKLEVKNMTRSYTKKSGSLIKTNTRLRQQINKTKARGVLHEENEAGLLLRVRDYEDRSTKTKPASFSRGQCDARFLGDKCVTSKAKKGKRKKQKAGLNKSILDVGFGMLRSTIKYKIEQIGGVFVEVPTKKVKPSQTCPRCGHQHKKTLDIRVHDCQSCGYRQDRDIAAAEVMLYWAKGNLTELGTSFVDAESPSSTANTRKNAGSLRQLGAKKRQKSKSTGLVSETQTSTK

SEQ ID NO: 25134 - protein, 207 aa, Nostocales sp.
HIQVKDDTPEPKDTSKVLGIDLGRRDIAVTSLGEKWDGTGIQQVTDKFSRVRASLQKKAPKGTRATRRRCREVLKRLSGRERRYQQWLNHNISKSVVKRAVELSASIAIEDLMGIRERTNEQPRNKTERRRSNSWAFYQLRMFIEYKALGAGVRVIPISPAYTSQMCHNCLHIHPVKGKSYRSGKTFKCGHCGWHGDADFNGANNIA

SEQ ID NO: 25135 - protein, 251 aa, Nostocales sp.
LCCLDKFAATSDGELIGRPRFLKHLHRKLKLLQRRLKNKQKGSNNRHKLNRKIARLHQRISDTRKDWHFKLAHQLCDDVGMVFVEDIDFRTWAKGMLGKHTLDAGFGQFVSILQWVCWKRGVYFDKVDKDYTSQACPQCDTHTGKKELKDRIHSCQSCGYTTHRDVAAAQVIRNRGVNALGRSVEQNACGDGLTGTGNSLVKSRRSSEVGWRGTASVCLVTSFENHPGFSPVSTSRNILINPSNWRMSSRQ

SEQ ID NO: 25136 - protein, 419 aa, Nostocales sp.
MLVFEAKLQGQDEQYRALDEAIRTARFVRNSCLRYWMDNRGIGRYDLSAYCKVLRDTFEWCKKLSAQACQASAERTWSAIARFYDSCKKNKPGKKGHPQFKKEQTHGSVEYKVDGWKLSDDRRYITFRDGFKAGRFKMWGTRDLHFYQTSQIKRVRVVRRADGYYVQFCIDQERLEKREPTLKTVGIDVGLNHFYTDSDGNTVPNPRHLRKSEKALKRLQRRLSRKQKGSSNRAKARKKVARKHLKVSRQRKDFAVKTARCVVMSNDLVAYEDLKVRNMVSQRVGRVPRLEATGEPVRVRNRRLSKSISDAAWTQFREWVEYFGKVFGVATVAVPPHYTSHNCSNCGKTVKKSLSTRTHNCSHCGHIQDRDHNAARNILEQGLRTVGHTGSSASGENDLCLGEEIPQDKSARGKRKPKK

SEQ ID NO: 25137 - protein, 427 aa, Nostocales sp.
VLHKAIQVRVYPTQEQQTQLAQAFGCSRWWWNYALNKSIEVYKKTGKGLGRSALNALLPELKKAENTCWLADCYSQILQATTLNLTTAYKNFFEGRARFPKFKSKHGKQSIQYPQNVKIVDGNVKLPGSIGIIKAKIHRPIEGKIKTVTVSKTPSGKYFASILTEVEGDNPTISEGKIYGIDLGLKHFAVVTDGEKVSKYDNPKHIAKHEKNLKRKQQKLTRKQKGSNSRNKYRKVVAKVYERVSNSRQDFLHKLSYKLVSDSQAVIVENLHVNGMVCNRNLAKAISDCGWGTFTNFLAYKLERKGAKLVEIDRWFPSSKLCSHCFYQIGEMPLDVRKWNCPHCGTHHDRDGNAAINIRAEGIRMLKVNQCVAGVSPVEATGEPVRAEGSAVSAVGGEVRPKMGRKSHLRHSLMSTEARALPEGSVG

SEQ ID NO: 25138 - protein, 305 aa, Nostocales sp.
MLNLTYSYRIYPGLDQEAQMLDWLEQCRRVYNYALAERKDWINSRKCPVNACSIMQEYIIPADAPYPDYYKQQNALTKAKEDIPELKAVHSQVLQDALKRLDKSFKFMQERGFGFPRFKKFGQYRSFVFPQFKSNPVNGFEIKLPKVGAMPINLHRPIPDGFEVKQVRVVFKSSGWYAQLILQADISVPDVMPHGEPIGIDLGLEKFLAVSTGELVERPRFFVDLQSKLRWLQRKLRNKKKGSANYRKIQAKIRKLHEHIYNVRREFHFLTAHKLCDIAGMIFAEDLNLKMTSRGMLAKHCLDAA

SEQ ID NO: 25139 - protein, 372 aa, Clostridioides sp.
VVVVEKAYKFRMYPNKKQQELINKTFGCCRFVYNKYLAKRIDVYKSDKETFTYKQCSSDLTNLKKELKWLKEPDKFSLQNALKDLDNAYEKFFKEKAGFPKFKSKKTNRFSYKTNFTNGNIMYCGQHIKLPKLGMVKIRDKQVPKGRILNATISKEPSGRYYVSLCCTDVDIELFENTNNQIGLDLGIKEFCISSCGEFIENPKYLKKSLNKLAKLQRELSRKTIGSLNRNKARLKVARLQEHIANQRNDFLKKLSTKLIKENDIICIEDLQVKNMIKNRRLSRLISDVSWSEFVRQLEYKANWHGRKIVKVGKFFASSQICNKCGYKNEEVKDLNIREWICPSCNETHNRDINASINILKEGLRLITIQNK

SEQ ID NO: 25140 - protein, 411 aa, unknown
  TnpB Polypeptide
MLVFEYKAYGKQQQFDAVDEAMRTVQFIRNKCLRLWMDGEAKTQYDLNKYCAILARDYSFADELNSMARQASAERAWSAIAKFYAAVASSRGTRPTQCLDNCKKQTPGLKGYPQFQHDCRSVEYKTSGWKLASSRKSITFIDKKGIGKLKLKGTRDLHFYQPEQIKRVRLVKRADGYYVQFCIQVDRVEIVEPSGIAIGLDVGLNDFYTDSNGKTVDNPRFLRKGEQRLKKAQKRVSKRVKKSSNRRKARLILSKRHLKISRQRKDHAVKLARCVIRSNDLVAYEDLRMKNMVKNHNLAKSINDASWYMFRVWMEYFGKVFGKVTVAVTPNGTSQECSSCGQVVKKTLSTRTHVCACGCVLDRDENAARNILSRGLSTVGHTGTFALDASNAWGEVTATEVGVILPQQVAS

SEQ ID NO: 25141 - protein, 428 aa, unknown
  TnpB Polypeptide
MRIAYQYRLKPTTSQSAQMENWLEMLCSQYNYRLAQRFNWYDETRCRIDACPLLCSIVPVEEIFKDIPVELVGKQGYVDWKALQKGDLPQTKVERPWYKDIYSQVLQDCVLRVDKTFERFIFGDKNGKRSGRPRFKSRNRYQSFTYPQVKQNCVEGNRISLSKIGDVKIVLHRPLPNGFKIKTPTVIYKADGWYVTLSLQDDTVPVLSLNIDFTKVVGIDVGLKDFLVTSDEEVVSIPQFARKSEKRRRLLNKSLTRKKRKGTKRRQKAGIRLSKHYLHVARQRKDFHYNLSKKLLDRYDIIAHEDLNIKGLAKTHLSKSILDAGWGNFIEIVSRKAESAGKTTVSVNPKGTTQNCSNCGTKVPKTLKDRVHHCSCGLEMCRDFLTKFHSRETRSVDFALNAAINIKNLAAGHSVSKAQRLLSDSRIG

SEQ ID NO: 25142 - protein, 310 aa, unknown
  TnpB Polypeptide
MKEFKVNPSKFKAMPKPPRYKEKYSVAYFTYQEAKIKNNKLKFPKKTNLKPIRVRKCISSIKQVRIIPNNTCFIVEIVYKVPAVELKPYNNKFLAIDLGLDNLITTIDNVKGSFIINGKILKSINQLYNKNKTKLSSMAKLGHKLYSTKQIRNITTKRNNKVKDSLHKISRYIVDYCENNDITKIIIGHNKDQKQKINLGKQTNQNFVNLPMNKLIDMISYKAYLRGISVVITEESYTSKCDHLANENMEYQDKYLGKRKFRGLFISSTKQAINADVNGAIGIARKVISESVKQIIDSGVVLTPIKKLVV

SEQ ID NO: 25143 - protein, 279 aa, unknown
  TnpB Polypeptide
MTRVKIQGINKPLRVLGGNQIPEDSEIAKAELVRKPSGIYLFVTCYIDRDKYTGAWERRKNRKGVVKPRVWQTFDVAAGIDFKPAGMVLSNRLKLEWQIKETKRLKKLQKQLARQQKGSKRWYKTKEKIAREYERLTNIKYDVINKTCSFLYRYKTVCFQKDNIKGWKDGYFSKSVHYSAVGAIKRRLSNSLRVPAAVVKSNVPTTKTCSSCGNRQKISLSERIFRCPVCGLEIYRDLNAAINMLKVVGLDRSEVKPVEWETAARIFRGNPYILVSHTT

SEQ ID NO: 25144 - protein, 398 aa, unknown
  TnpB Polypeptide
MVILAHKIRLYPNDKQKTLLAKSCGTSRFAYNWALAEWKRQYEAGEKPNATKLRRDLNAVKKEQFPWMYEVSKCAPQQAIIDLGTAFKRFFKGLAKYPNFKKKFVNDSFYLDNLNFRLRKNGKVHLAQIGEVRLGEKMRFEGKLMAATISREANQWYISIQVEMPDKATLSKVDKAIGIDVGVRQYADSDGKFYEVPRSYRNNERKLRRAQQALTRKVKGSKNRHKQRIKVARCHLRTKNIRQDWLHKLTTDIVRNNDVIGIEDLNVKGMVRNKHLAKSITDACFGEFRRQIEYKSLLYGRKIVIVPRFYPSSKLCNRCGTKTKSMPLSIREWKCEKCGVQHNRDTNAAINLKVYAASSAVSACGEFSASVDATSSSKDKQPQRSRKKTTDSTVRRNV

SEQ ID NO: 25145 - protein, 409 aa, Streptomyces sp.
MQLRYAFRLYPEPGQRAALARAFGCARVVFNDALRAREDARTAGLPFPSAAELSKRLITQARHTVERCWLGEVSSVVLQQALRDVEAAYRNFFASLKGERRGKRVGAPRFKSRKDTRQSIRFTANARWKITRTGRLALPKIGEVKVKWSRVLPAVPSSVTVIQDAAGRYFASFVIDTDPATDLARWDEPEPGSALGIDLGLTHFAVLSDGTKIDSPRFLCRAEKKLKKAQRELSRKQKGSKNRAKARLKVARAHAGVADARKEFHHQLSTQLIRENQAVAVEDLAVSGLARTRLAKSVHDAGWAQFVAMLQYKAQRYGRTFVKIGRFEPTSQTCSTCGHRDGPKPLHVREWTCPACNTLHDRDHNAAINVKQAAGLAASACRAPVRPEPVLAQREETGSHGILTRTCAS

SEQ ID NO: 25146 - protein, 210 aa, unknown
  TnpB Polypeptide
MNAGQVATSDGRLFHAPDMRRLEARAKRLSRQLARQRRGSGRRERTRIRLAKTRRGIAGIRRDWRHRVSRRIADSAYLVAVEDLRVEAMTRSAWGTVEEPGSRVRQKAGLNRVVSDTGWAQLRALLDYKAGRLMAVPAHDTSRTCAACGHIDAASRRSQAVLHCAACNHITHVDANAARNIRRRGLTLLHGEAAASSGPANRENTSKAAA

SEQ ID NO: 25147 - protein, 239 aa, Streptomyces sp.
VRCRRSFSSRPYGISRPRTATSSLRGGAPVKARGWVHRASRGSPAARQSGSRRPPASPSPTTAGFGSRRSATWKSAGPGHFRPIRRRSRSSGMLPGGSSPRSSSRPRTSRCPSWTGMRRTPGSTWACPPKAVYLEDLNVKGMARAFGKSVHDQSMGMFARTLEAKCHRYGRGFVKVDRYFPSTRLCSRCGSLSGPKGTQGLSKRTWTCACGAVHDRDQNAEHNLRAEGRRIVAEGRPDT

SEQ ID NO: 25148 - protein, 466 aa, unknown
  TnpB Polypeptide
MNLVEEHFIKKTSKTSSLWKSVDDYWYKSKNLYNATQYFIRQCSQIKYNLEKDKSLDEFQQKLFEDTNKAIEEYNQKPNHKMSLLSSEKNPVINYNFLAWYMKYTDEFKIVGTVVGQQCLKQICSNWNSYFEALKLFQEEPQLFEGKPRTPRYLDKEKGRNWISFVGDSFHQNEDVVTLAKFKDIKLRVKHKITSVSLKVCSEGVMIRCNYQKDTLPKFKDNGRYYSIDLGINNLATVTSNTELSPFIINGRPLKSINQYYNKRISDLASLAKTFNKRDTTNRILRTTFKRNNLTHNYLHQASRFLVNKAKENSICTIIIGKNVGWKQECNLGSKNNQNFVEIPFNRLVHMISYKAELLGISVVEVEESYTSGTSYLDQELPIKENYNKKRRKYRGLFLSNQGISINADVNGSYQIMKKFNSELDIPIKYRENIEVIQPKKLGYNFKKSNRVEAKGSSYYSKEYEV

SEQ ID NO: 25149 - protein, 467 aa, unknown
  TnpB Polypeptide
MNLTEEHFIKHSKRTSSFYELVDGACCKSKNVYNSTNYLIRQVLHIQTKLYEGEFLDKYQSKLIFETNKLVDSYNHSLNHTLKYINSESGFTIINYNFLAWLQKSTPEFKDLGSPKSQQCIKNLCANWKAYFKALKAYKEHPELFTGYPQKPSYYEKNERHWIVLTKQFFKQEGSVITISQFPDLVIYSNRDVSSIALKTVDNGIRIRLSYKQEAKSPKPDNQRVYSIDLGVNNLATITSNTEQNPFIINGRIVKSINQYYNKRLSELKSLAKITNKRDTTKRIRRLSTKRDNLIKNYMHQASRYLINQALKNEINTIIIGNNTGWKQECNMGSVNNQNFVQIPFNKFKSMISYKAELEGIKVIVTEESYTSGTSYLDNEAPIKEKYNKKRRVHRGLFKSASGELINADVNGSYQIMKKVLDSVPIKHKEQILVINPLKNLPYKEVEIIGSSHDRNRSKVLNTSIVI

SEQ ID NO: 25150 - protein, 453 aa, unknown
  TnpB Polypeptide
VFSLLLRRQTFRLYPNKVQTTALFGARRLHAYLYNACIENRKTEYERFGKSVLYFDQQNCLPAFFERWPEYKKLHSQSLQATVKRVDLAYNSFFQGLRKPPRFKSIRDYSGWTYSAKSGWKANTEGIHGTVTLNDLGITLRMRGKAKEWGIPTTLTIVYKPHINQWFASITIEIPAPQVKFGSQSSLEYESIAAIDLGTESALTLYNGKEFEEVTNPRFVRQAEKMVKQASIKLKRKRAPNRKKKVKASNRWKKARRQVSRLQRRVATQRKDWQHKVTTDIARRHDIVVTEKLETKKMTRKGKKRKKQKAGLNKSILDVAFGTLNKMITYKVEGKGGLVFFLPTRTLKPSQRCPECGTVHSHWAELSNRYHICECGFEMPRDKTSTVVMYKALLDKQPGFGMSLDNRGCSSSTDSTKKHKHTGSMKQLGQKKRQKPQSVDGGDLETPSVYTAG

SEQ ID NO: 25151 - protein, 139 aa, unknown
  TnpB Polypeptide
VNRYARAKQKVQKLHFLIARQRVAMLHQPFDYVTKTFDRIMIEGLNVKSMVKNRKLSQAISDVDFGILRQFIEYKAKLRNYVVVVADRFCPSSKTCSNCGTKKQNLTLADRIFRCDYGLVIDRDLNAALMLNRYGHDTL

SEQ ID NO: 25152 - protein, 416 aa, Cylindrospermopsis sp.
MQLVKTHPIYKNDEYWQGCDLICFRAKNLYNLCTYYLRQSFFKTGKILSSGKLYSLVFSSRAYQEMAVTHRGLSVIRQVLQRWRNYIRSWQDWQANPSKYVDAPKIPNYKHKIKGRFPIVVYNIYQGCPTMDQPFLVQGMCQLFEGLFEGDVNDSIGKARKLVEAMIIPRNNGSYLLKFIYEVQEPTTRSTQVIAGIDLGVNNLVALTTNSSTIRPLLVNGKPLKSLNRLFNRKRDLIGSYQSESQPSRRLGGITSKYHNRVDNYLHQTSSIVINYLKSNGIKTLVVGKNDEWEKETRMGISERHNFMPIPYSRLIGMLEHKCRLAQIELITVNEAYTSKCSAWDFEPIAKHQKYLGERVHRGLFRSANGQVINADLNSSLNIIRMYSSEALTAERIGSCGVQPLKVNPLARVKQI

SEQ ID NO: 25153 - protein, 158 aa, unknown
  TnpB Polypeptide
LHKLSRAVSRKQKGSNNRHKARLKLAKWHETISKMRNDFLHKLSSKLVNNYDIIVVEDLNMKNMSQALNFGKSVTDNGWGKFRNYVSYKLIDKGKQLIRLDKWFPSSKTCSSCGTIKDDLQLSDRMYHCPNTNCNLILDRDINASLNIKTAGMAGIAW

SEQ ID NO: 25154 - protein, 337 aa, unknown
  TnpB Polypeptide
MSSNKFRVWLNNEYLPQHPEYSWIKEAYSKAVTQAVNNGQTAFTRFFNHESAFPNFKKKGRSDVKMYFVKNNPKDCRCERHRVNIPSLGWVRIKEKGYIPTTKEGYTIKSGHVSMKAGRYYVSALIEIPDNKTADPSNEGIGIDLGLKDFAIVSNGKTYKNINKSARLKKLEKRLVREQRCLSRKYENLKKGESTQRANIQKQKLKVQKLHHKIDNIRTDYINKTIAEIVKTKPSYITIEDLNVSGMMKNKHLSRAVASQKFYEFRIKLKAKSKENGIELRVADRWYPSSKICHCCGTIKKDLKLSDRTFRCHCGYVEDRDFNAALNLRDVKTYKIA

SEQ ID NO: 25155 - protein, 328 aa, Methylobacterium sp.
VNTVWNYANEISARSAVRGTLWATKKQLRDLTKGSGQLLGLPSQVVQEVVDEFLIKRKAARRPKLRWRASRGPKRALGWVPFTNQDIALDGATALLRDMPFKLWLHRAAEGRIKSGSFSQDARDRWYCNLVCEVERSQSTGRAEVGVDLGLKTVATCSDGPELEQARFYRDLELNLAEAQRRKRNRQVRTLHAKIANRRKDSLHKFSRALVDRACKITVGNVSASAIAKTRMAKSVLDAGWSMLRDYLRYKCDHAGVAYAEVDEAYTTQTCSACGCISGPKGRAGLAIRRWTCGECGAEHDRDQNAARNIARLGCETPCPSGHGSPGF

SEQ ID NO: 25156 - protein, 424 aa, Cyanothece sp.
MLTLTYEFKLIPNKQQIEVIEHTLNVCRSVWNYALRDRKDWLSSRKSPVNSCSLIQEYIISPDVPYPNYHNQAKALTKAKKTNDILKSVNAQVLQQVLRTLDRAFADMQSKKLGFPRFKNRDRMRSYVYPQMLKDCIKGNEIKLPHLGWVKFRKSREIPDGFELKQARIVRRANGYFMMLSLQLDVNIPDVSFHGHPLGIDLGLDKFLATSDGELVDRPRFLNRLHRKLKLLQRRLRNKKKGSNNRHKLNKKIARLHQRISDTRKDWHFKLAHRLCDQSQSIFIEDIDFRSWAKGMLSKHCLDAGFRQFITILKWVAWKRDVFVNEVDKNFTSQICPNCGFHTGKKTLDVREHNCPECGYKTHRDVAAAQVIRNRGVEEYALGHSVSENACGDDGTGALPSYQSVKQEILSASLRIPRYSDVGA

SEQ ID NO: 25157 - protein, 417 aa, Petroclostridium sp.
VKKVKLAFKFKPKLNEEQLKIIEELSFHTTKLYNIVNYDLRENGFKPYVEIEKIYKNNWHCDYLHSHTRQHCFKVVEQNWESYFASIKDYKENKSKYNGVPKPPKFKNTDKRKNEIIFTNLAIRFKENRLMLSLSKTVQKKFEVESLNFEVSDKLQSLINWDEIQQVRIKWDNSLKQWYLIIIYNKQELEKAKETNVMAIDLGLDNLATLTFKEGNQSYLFCGKKLKSINAFVNKKISYYQSIEMKKIGSDKFKNTKMINSLRRYRENYINDYLHKVSKNIIDKAIEHNVYKIVIGKIEGLKLNMNYNKSFVQIPIQKLAELIKYKAKLQGIEVKFKEESYTSGCSAFDLEPINKKYYNKTRRVVRGLFKSNFGLVNADVNGSLNILRKEEKCIPEIVKTMRDKGRVSSPLRVRVAC

SEQ ID NO: 25158 - protein, 356 aa, Petroclostridium sp.
VLKAYKYRISPTKEQQEYFAKVFGCVRFIYNKMLSDKIDYYKQTGKMIKTTPAKYKKEYPFLREVDSLALANAQLNLEKAYNNFFRDKSIGFPKFKKKKGYQSYTTNNQNGTVSIDNGYLKIPKLKTKIKIKQHRQFEGIKKSVTISKTPTGKYYVSVLAEAEIQTLPKVDNRVGIDLGLKEFAIFSDGTRVENPKWLRKTEKKIKQVQKALSRRQKGSRNYEKTRIRLAKSHEKISNQRKDFLHKLSSKIINENQVIVLEDLKVKNMQQNHNLSKAIGEVSWYEFRRMLEYKAKWYGREIIIAPKNYASSQICSICGYKNKDVKKLNIREWECSNCHTKHDRDINAAKNLLKLAM

SEQ ID NO: 25159 - protein, 534 aa, Petroclostridium sp.
MPIKTITLKLHNPSKRKRQIIDQAMLNYSRAYQYLLDKAHAQIEEIRRDYKDNKGNYRAINIAKWVDKELSKELNQFHVQPFKDALKIDFGMTLASYLSLNEIRQDANYPIAYLSDRDLEKSYNDAINGLENGSKTLDECEREIKKIVKKNNVLKPLFFCRYAANRDYCLLYDAKNNRYYAKLYLMNVKDEKRKEINSNNEIELRYIHKDSNILESSGRKERFILVPLSFGQWQEQYLKKALDTPEILKTARLIKKKGDYYLSISVDTGEAEKIKTDTFLGIGRALKSPVHYTIVDNRSNIISDGAIVTKAVSESRNNPVTIQELHKIANAIVDIAYQERSQVVMKSLIDKGDKLQWIDENKEQYMPILNCHSYNQLARILEYKLRGKGLPPPIKVSPIGIYYTCPECGLHTRRNRFSKDMFICVACGTTLDIESLGSLNLARKLNRHSKGTLKIKVEKTSKGIKFTNKILGLEFHPSDPHNCMDEFSTEIKRIIQDFYGNISSNARNKEFMKKYSLIKKLEEAEDLNELIQII

SEQ ID NO: 25160 - protein, 403 aa, unknown
  TnpB Polypeptide
MFQSRKVRLKPNKAQAEFFRQNFGAARFVYNWGLEQLTKHWEENKDKEKKDREKWPTAFDLNKKLIHLKSTEEKYVWLSTVDSQLFKYVFANLDNAFKRFFTGQAKYPKFKSKRDSRQSYSTKNGKVPRLKDSNHILLPKIGSVKFYNRNYLPEVEYKRATISTDGDYIYCSVLFDASPKELPAPIHESVGIDLGVKTAVTTSYGTSFHLKRNRRLERRLKRAHRVVSRRKKDSQRRLKARKRMRNLYRKISNQRKDFIHKTTSTLVSENQVIRMEDLNTKGMMKNHCLAASIAHASFGEIKRQLTYKCEWYERSLQLVSRFYPSSQLCSHCGARNKEMKNLNRRTFVCHTCGFSLDRDLNAAINIDNFCTHGEWETSSKPADDRGDSSSTKRRYSLSSVANR

SEQ ID NO: 25161 - protein, 385 aa, Methanosarcina sp.
MLLTYKIKHNQNFSEELRKARKVAEFCIKHQTQNRSLNSPPIQKSISSLPSSPSPSLSTFSEFSQDFSIISSARSLGSLSAPNSLPVSGHLSSRNVKHIGLKSVISGQIIKKYSRNQNFRSAKNVKLIIPSRAVRIDREEQTITIPCLKLLLNYHFSNNFSKISQIEIDNIYAYVAVVFPDDELKNSEHYIGVDRNTKGHIAVVADPESGKIWKLGKMRYHTHKKYENIKKRLYNMGRSKELKAVEIREKNIVKDLNHKISRKIVDVALYNGCGIKLENLKGIRKLNSKIGDAGKDEKNKSKNRKREKNRDKNISKEISKNSLKSKSTSEKQSWSSEYSLNSWSFQQLQQFIEYKARLRGVEVVYIDPHATSKKMQPLRTYRQPT

SEQ ID NO: 25162 - protein, 378 aa, Microvirga sp.
MDPTAPAPAYKTFSFRVKDATSGTRLVALGNAVNFVWNFINEVSAKSAQRDPRWISKKDLRALTKGASRELGLPSQVIQEVIDEYLDKRKAARRPKLRWRVSRGARRSLGWVPFTNQDIEINGSIVSLRGQKFRLWQHRELQGKIKSGNFAQDARGRWYCNIVCEIERTTTNRTAVTGIDLGHKTAAKCSDGPELEQATFDRDLEPKLAEAQRQGRRRQVQTIHAKIANRRKDALHKFSRAVVDRAGAIFVGNISSTWQIASGNAKATLDVSWSTLRNFLEYKGDHAGVVFAEVNEAFTTQTCSGCHALSGPKGREGLAVRQWVCSECGTEHDRDHNAALNIARLGCETLGLKGLRSLGLGITHALASSMSRSGDLKR

SEQ ID NO: 25163 - protein, 416 aa, unknown
  TnpB Polypeptide
MSVVVRRTNTFAIRPLSEEDEHLLRELLDASASLWNELNYERRQQFFDGESVWDTADYRKQYVGVLGSATAQQVIRKNSEAWRSFFATREDGEDTAPPGYWGNEDEGRELRTYIRNDQYTLETGERSRLEIPVGQDLKDEYGFGMYERLRLPVRGDPKWCGDAGRLEISYDSVEETYRVHQSVTIDGVEESRSDGSEAAALDLGANVLVACTTTTGRQYLYSGHQPFEQFQETTNAIANAQAKLPDGQHSSQRIKRLYRKRSRRRDHAVNALLRDLVERLDAADVSTLYHGDLTGVLGEYWSVEANLKTQSFWAHRQCIDRLESVCEEYGIDVEALSEAWTSQTCPDCGERDQTRRHRETLTCPCGFDGHADLVASRTLLERATNIPVRPTARPVRFQWDDHQWHPVEGIMVTPNE

SEQ ID NO: 25164 - protein, 423 aa, Halobacteriales sp.
VSSQVVTRTLKASLCNHSQVRDDLDSHGFGASKLWNVGRWTISRVWDAVGHIPDADELCSYLKTHDCYADLHSQSSQRVLQELGEAFVSWYEQDDPDANPPGYRKHGDDHPRSTVTWKNHGFKLDTQYNRVRLSKGTNMKASRYAAEYILCEYRLQTDDDQTLADVDSVQTVRAVWTGQQWELHFVCKMRVETPDTPGENTAGVDLGICNTAAVSVGDETLLYPGNALKEDAHYFRQVEYDTDGENGPSTRAEWARQKKSRRQEHFLHAVSKDIVAQCADRAVGTIAVGHPKQIRDDEDWGRHGNKRLHDWAFETLLSHIEYKAQERGIDVDRVDEARLKTSKTCCECGTEADANRVERGLYVCENCELVANSDLNAAENMRATVTPNPAEDRSNGCLAQPAVRLFDTSTGRVRPQEQVRREP

SEQ ID NO: 25165 - protein, 384 aa, unknown
  TnpB Polypeptide
MIAHKIELRPSKSQVAYFKQACGTARFVYNWALSEWNRQYEAGEKPTAYKLRKQFNAIKYQQFPWLELIHRDAHALPFLNLGRAFTAFFKGVSKHPIFHKKGIHDSFQIANEKFHIEGKKVRLPVIGWIRLREPLRFQGKIMSGTVSRTANKWFLSVCVDAKPILKPKTGDKQLGVDLGIKNTMTISDGRQFQGPKSLAKNLKRLQSKSRQLSKKVKGSKNREKAKLRLSKLHYRISCQRNDFLHKATTMLVRESQAICIEDLAVENMVKNHKLARHLMDASFGEARRQFEYKSVWYGTELHTADRFYPSSKTCSGCGNIKQDLKLFDRVYHCENCGLTIDRDINAAINLRKQLPMASREVKPVDSTVSLDEAGTKSVPMFAFA

SEQ ID NO: 25166 - protein, 419 aa, Spirochaetes sp.
MKRRLSQRAHLNGEQRAHAAKLFGCARVVYNDFIAGCENTRKTGVNPDWDVIAKQVTTDAKKTIERQWLSEVSSVALQQSVRNAQRAYRNFFASLNGSRRGPKMGRPKFKKRKAKQSVTFTKAARFTVWVDGCSRWGFVRIPGLGEVKFRVTRELYWSTVSTVTLSGNPDGTYTVSFVYEDSRTFTPSPENTVCGVDLGLKSLAAVVANDGSRYLVDNPKPLRAAQRKLARLQKAHARSQEGSKNREKARIKVARLHTKVANTRKDHLDKFSRKLARENQTVGMETLSVSGMGKTRLAKSVYDTGMGMLNSMVEYKAAEHGGVVVRVGRWEPTTQVCSQCKHRGGRLPLSVRQWTCSQCGAHLDRDFNAAVNIMNAVGHTESLNDCGGDVRLRLAEAVTCESGTHRNRRFPAVVGISTL

SEQ ID NO: 25167 - protein, 256 aa, Planktothrix sp.
VLKATKVRLYPTPEQELAIDVKQSGNKIIGIDLGLKDFAIAHDGKTVTKYANPKHLNCQQKNLARKQKKLSRKTKCSKSREKFRKLIAKVHDKIANSRQDFLHKLSRKLVNESHVIVVENLNVKGMVKNRKLSKAISDVGWGKCVNFIDYKLKQKGGELIEIDWFFPSSKTCSSCGHILSELSLDVREWDCPNCHTHHDRDENAALNIRTEGIRILTEGGGNPVFADGGCVRPDNHKVKGHRSVNSEAYTDPIRAV

SEQ ID NO: 25168 - protein, 276 aa, Ruminococcus sp.
VGFPHYKSKKHSRKSYTTNIVNGNICLQDRFLKLPKMQPVKIKLHRMIPEGWKLKSVTVSREPSGKYFASLLFDCENQTAEKRQAEKFLGMDFAMHGMCVFSTGERAGYPMFYRNAEKKLAREQRKLSRCEKGSRNYQKQKKKVALYHEKIKNQRKDFQHKLSHSLAEDYDAVCVEDLNLKGIAGGLHFGKGIQDNGYGQFLSMLGYKLEERGKYLIKVDRYFASSKICSVCGHKKKELALSERTYLCECGNRIDRDVNAAVNILEEGKRIYKKCA

SEQ ID NO: 25169 - protein, 368 aa, Ruminococcus sp.
VRKINRAVKIRIYPNKEQITQIEKTIGCSRFLYNRMLADKIRHYQEEKKMLKNTPAGYKKEYPWLKEVDSLALANVQLNLEGAFRKFFREPGVGFPHYKSKKHSRKSYTTNMVNGNICLQDRFLKLPKMQPVKIKLHRMIPEGWKLKSVTVSREPSGKYFASLLFDCENQTAEKRQAEKFLGMDFAMHGMCVFSTGERAGYPMFYRNAEKKLAREQRKLSRCEKGSRNYQKQKKKVALYHEKIKNQRKDFQHKLSHSLAEAYDAVCVEDLNLKGIAGGLHFGKGIQDNGYGQFLSMLGYKLEERGKYLIKVDRYFASSKICSVCGHKKKELALSERIYLCECGNRMDRDVNAAVNILKEGKRIYKKCA

SEQ ID NO: 25170 - protein, 418 aa, Ruminococcus sp.
MLLSKKTSIKVSWEYANLIGHMCYAASKLWNVCNYERQHYKETGMEQYPDWYYQKKAHKEELWYKQLPSQTAQEVCRLLDKAWKSFYALKRSGGIEAPRPPRFKQESIPITYMQMGIVHERDTDRVRLSLPKTLKKYMEETYQIHENFLYLENKIFRGMDQIKQLRIYPPEKGSCKMIVVYEVPDQEELPQNGHELSIDLGLHNLMTCYDSGNGKTFILGRKYLALERYFHKEIARVQAQWYGQQSGKGVKHPVTSKHIRKLYKRKQDSVTDYLHKVTRYLAEYCREQGITCVVTGDIRNIRREKDLGHRTNQKFHSLPYNRIYIMLEYKLKRYGIRFIKQEESYTSQCSPLSPEVGKRYAEPSNRKERGSYRDGNRVYNADAVGAYNILRKYHSVSGIKRELSITGLKTPEIIKVAV

SEQ ID NO: 25171 - protein, 578 aa, unknown
  TnpB Polypeptide
MAFGSKNSTPSFVLTLPFDISLNEQDYLYKEFKKCGVIYNQLVSATTKMWHQLRKTRKYRELMAAIAKATPDSDEQKTLFKQREKMLKEYRFSEDAFHKLVVPYAKHYAINSHIAQAVASDVWKAWSTFFFSKGKEVHYKRLDDLAAISGKNNFTGIVLRPANLTTSNIESAKRKAHKAVEKRYDDMYGRPDPKDDKKVVLPDEVKPQMEAEIAAAIAKIKPTIGEGSLRIVYGKHEFPVVLRNPKTQTGKYQQEALKCGVKYCRITRKWVKTKWKYYAQFILEGYPPTKCDGNGVMKHPVNQGRVGLDIGTQTLAISSNDICDLRVLAPSARAQAKSLVNEITCTMRAMNRSRRATNPKYYNPDGTIKRLKRKHGQKQKRDWKYSKHYYRLRAKLRDMNRRLADIRKMEHNTLANELLQLGNEFIVEDMDYKALQKRSKKTKINAKTGRAHTKKRFGKSLSRCAPAKFITILTNKAVRNGGNVIKVDTFETKASQFDHTDESYTKKKLSERMAHLSSGEVVQRDLYSAFLLEYIDTESLEYNTKVLNSAFPAFLVMHENTIKRLQKDKSYLPASVGF

SEQ ID NO: 25172 - protein, 486 aa, Acidimicrobiaceae sp.
MADPVVTDPATVTVKKKRSPREKFEIPDGWIARGFEFEVAWPDDPELASRVRSQFGGRRFAYNWALAQVKSDMDARKLDPSHASVQWNLYALRKRFNAEKPTIAPWWEANSKEVYSTGIADLCVALKNWSDSKAGKRKGKKVGFPKFRSTRKDQARVRFTTGVMRVEPDRRTITLPVVGTLRSKENTRRLERLVRTGKARILSATLKERWGRLFVSFSCIVEAHRYPAPTKGGRAGVDLGMRVLATIADSDGVVIEVPNPAPLRATLTERRRVGRQLPRRIPGSRGHDAAKAKLASLDRRCVHLRKQASHQLTTMLADTYSEVVIEDLDLAAMKKSMGRRAFRRSVSDAALGQIRPQLTYKMAWRGTTLTVANRWFASSKIHHGCGCRLIEPRKLAKQLVCTVTGELVDRDVNAAHNLRDWPDIASYSSVGAVAPKPSSPTGSGGGLGSDIGPSDAGGGSVRPLQSRKAAPSEARTRKGTPRRGAA

SEQ ID NO: 25173 - protein, 358 aa, Bacillus sp.
MSQTITVKIKLLPTKEQASVLQNMSQSYISTINTLVTEMVAEKKSTKKSSKDISALLPSAVKNQAIKDAKSVFKKVKKNKYKVIPVLKKPVCIWNNQNYSFDFTHISMPIMINGKATKTPIRALLVDKDNRNFDLLKHKLGTLRITRKANKWIAQISVTIPTTQGTGLKVRGVDLGLKVPAVAVKDDDRLCFFGNGRQNKYIKRKYRSERKALGKKKKLNAIRSSKEKEQRWMKDQDHKISRAIVNFAKDKKISVIRLEQLAYIRQTTRSSRKNEKNLHNWSFYRLSQFIEYKANLVGIKVEYVNPAYTSQTCPKCSEKNKALDGKYKCKCGFEKHRDLVGAMNIRYAPVVDGNSQPA

SEQ ID NO: 25174 - protein, 375 aa, unknown
  TnpB Polypeptide
MRKAFRYRLYPTKAQEAELFNQLRLCRNLYNAGLEERIGAYRKAKASRNYYDQANLLGEIKEALPEYKGVYSQVLQDVLKRLEKAYQAFFRRVKAGQKAGFPRFQGRDRYDSFTYPQSGFSVAEDGRTAYFSKIGNVRLRLSRPLEGKVKTATVIHDCGEWYVSYVCEVEAQLLPRTGQSVGIDVGTTHFLTTSDGEFVDNPRHFQNAMKKLRVAQRSVSRKKNKSSSSRRKAVRVVAKIHRKVSRQRLDFRHKQARRLVNENDLIAHEDLNVGGLGRGNLARSIHDVGWSQFFQVLAFKAECAGKRVQAVDPRYTSQRCNVCGHTEKANRVNQSKFVCRSCGHTANADHNAALNILGRADPLSANVAIPSARVA

SEQ ID NO: 25175 - protein, 371 aa, Paenibacillus sp.
MLIKKAYKFRIYPTPKQVSVINKTIGCSRFVYNRFLARWRDAFQKTGKGLTYNSSSAELTGLKQELAWLGEVDSTALQSALKHLADAYKRYFEKQNDAPCFKSKKNPVQSYTTQIQRKSQSPEVSIAGSRIKLPKLGWVKFAKSREVIGRIMHATIRRNPSGKYFVSVLAETEVQALPPVHSEVGIDVGLKDFAVLSSGEVFGNPKFFRTLENKLAKAQRKLSRRMKGGSNWNKQRIKVARIYEDISNARKDYLDKVSTHIVKNHDRIAIEDLPVRNLLTNKKLSNAISEASWSLFRKMLEYKCAWYGRVLVTVGRTFASSQLCSCCGYWNQEVKNLNVRKWTCPSCGTGHDRDLNASLNILAEGRRLLEV

SEQ ID NO: 25176 - protein, 363 aa, Methanosphaera sp.
MRYHPLTYKCRIYPNERQIKQFQITLDSCHFLYNSLLKQYKLDYANGNKPSNLKEYFNNLTESLKSQYTSISSLDDSTINDVSKNILRAIYRKKDPNKLKPKDENRRVQSFLINYNQDFELSENKLNLGKYGKLKLHYGKIIEFNRIISFRILYQNRKWYILVVIRSNDILPFEKTGKKVGIDLGIKHLIILSNGKKFDPPDLSPVNEKIDKYNSKLSTKVRNSSNYELLIDKLNSAHTHRKNTVLDYYHKVSTQLVKEYDVIAMENLNIHQMIQNHKFSRNIYHANWYKLVEMIKYKCHLYGKTFIPVSEHFPSTQLCNNCGYQYKDITINERMWECPSCGKIHDRDVNAAKNILDEAKKVL

SEQ ID NO: 25177 - protein, 398 aa, unknown
  TnpB Polypeptide
MLIRRAFKFELKPNGRQARQISQFCGCARYVYNRTLSLEKSLYAKDNKHSFRYTEAANRLPEWKTKHPFLKECHSQVLQQSLKDLDRAYTNFFEKRANFPKYKKKFRHDSIRFPQGVELDEIKQKIRLPKVGWVGYRKSQNIIGTIKNVTVIRRGEKWDVSIQTEYDNIPPETTPSEVGIDMGVKRFATLSNGEFLEPISPFKREQEKLAKLQRKLARQKKGSRNSRKTKRKIARLYRHIADSRRDFLHKTSTQIAQNHSTVFVEDLKVSNMSASAAGTKENPGKKVKQKRGLNRSILDQGWYGFFQMLSYKLERKGGKLIKVDSRNTSRTCPQCGYVSAENRKTQASFACVHCGYHANADLVGAINVLRAGRARLACGKSGAVRPLSAGTQRDLLQH

SEQ ID NO: 25178 - protein, 152 aa, Calidithermus sp.
MPAWHKLTTRLAHSYGIVVVETLNVVGMMRNHRLARAVVDAAPAELRRQLAYKCVWYGSRLVEADRFWPSSKTCSSCGAVKEKLPLWGRMFRCEACGLVLDRDENAARNLAALVAAVAGSGLETLNARGQGVRPAIRQAVLEETGSRARASA

SEQ ID NO: 25179 - protein, 393 aa, unknown
  TnpB Polypeptide
MYKAYKYRIKPTELQKELIAKHIGSARWIYNLALETKNLAYLGTKHNLSHFDLNRQIPELKKDYPWLKEINSQTLQQSIQNMDAAFKQFWKGGGFPKFKSKHRGAKSFHVPQNVMLDIEKSELIIPKFKKKGIPIVLHREIKGIIRSATISITSTGKYFVSILVDTQTEAPEKAPITTSTTVGVDLGIKDFVVTSNQDVFANPKYLSQMKSRLAYTQNRYSKHKGKKRRHRLAILHEKVVNQRKDFLHKTSNQLISDNQTIALETLAVKNMMKNHCLAKAIADVSWSTFVLMLEYKAEWRGKNILRIGRFAPSSKTCSDCGHIHKGMTLADREWTCGSCGVTHDRDVNAAVNIKSFALKDILSGTDRKNHVELPTLVGVMTHEAHSSGSAVRG

SEQ ID NO: 25180 - protein, 206 aa, unknown
  TnpB Polypeptide
LPATGVDVGIDVGLISLITTSAGEHVEHPAWYRKAQKRLRVAQRRVSRRKKGGANRRKAVIALQREHERIANQRRDFLYKLSHRLLTAYDHVAVEDLRIRNMVQNHHLSTSILDAGWGLFAAHLTSKAANAGREVVFVNPAYTSRTCYACGQLVLHLPLSQRVFRCACGYVADHDENAARNILRLGQSRWASTSTLVGGAQEAAAL

SEQ ID NO: 25181 - protein, 120 aa, Moorea sp.
MRKAARRMVIKIRNLINELHHKTARFLVDNFDIILLPTFETSQMSKKGNIKIRSKTVRNMLTFAHYRFKELLKHKAQETGKTVVDVCEAYTSKTVSWTGELVNIGGSRIIKSLVDGRRMD

SEQ ID NO: 25182 - protein, 407 aa, unknown
  TnpB Polypeptide
LTYEQLSRSISLSIPLSPTSASFRELPAIRTLRFKLMRSKKNRKLHREIEQFCRVYNHFIAVIERYYRLFKKHPSANRLKMLLPKLKRTRRFHWLKTLPSQALQDVVERIDRAYKRFFEERKKRRRCARPHFKQSENYKSFALKQAGWELVGEHSLRIGDFVFKFHKSREIPAEKVKTVTIKRDKLGDIYVFFVVKSTEFVPKRCATGKSVGIDFGFDQFLTLSDGTSVDAPMFFEQDLRHIRQLSRSMSRKVHGSKSWNSTRLELNRAYQTIQNKRDDWHWRLAHELCQKYDLICFETLNFRFFQRKHGKKVQDFGFVNFVKKLKYLAKRYGTQIVFVDRFFPSSQLCNACGYQNPELKDLKIRAWICPKCGASHERDFNASKNIHDEGGRALAGLTEFKNFEIIS

SEQ ID NO: 25183 - protein, 529 aa, unknown
  TnpB Polypeptide
MKRSTTPTFLLELPLRADAGQASRFCAHLEVARCFYNALLGEARKRLQQMRADPAWQEARSLARSQKQARQATFAHLRHQYGFSEYGLHAYAKAARQSWLSDHLDSTMAQTLATRAYQAVNRVCLGKARKVRFKSRGRGLDSVEGKRNDTGMRFLLQKPEAGIGGGWLLWGEDRIPALIDWTDPLVRHGLSQPIKYVRLIRRRASSSHAKGADGEGNRFYVQLVLKGTPYQKPKNQAGSDTIGLDIGPSSLAVFSRQGMVQLKAFCEELQPDQRKKRRLERKMERQRRATNPENYDEQGRVHKHGRHRLTWKHSQGYLAIRRRHAMAERKLAAHRKSLHGKLVNDLVRVGTHIQIEKTSFQSWQKLYGKSVALRAPGMFVAHLKRTVAKTGGTLREVATPSTRLSQYCHGCQAYVKKPLSQRLHLCGCGIGPVQRDLYSAFLLAYLTATETIPSIAQEDWEGAEPRLLAAMECVQQRAREGQWVPRSFGITGARARRPKSLVPNRQEPIFLYRQGRLEALELGQELPRL

SEQ ID NO: 25184 - protein, 153 aa, unknown
  TnpB Polypeptide
VLEKYTSYLVGYCIKNGIGTIVLGDLKGIRNGARHGKVPNQKIHQWMFRRVARRIEEKAEFVGIEVKFIKENGTSQSCPVCGSKNKPENRNYECKSCGFRYHRDGVGAINIYRKYTGSLSLVVGLLACPTGVRYTPHLCCPIEWNIHPVGKTA

SEQ ID NO: 25185 - protein, 428 aa, unknown
  TnpB Polypeptide
MKFKWIEFVEKYMEVRRTLPVKLVVADSDRDALLETIDQYKHCATETSDHCWNENDYKRTAKYAVKDELYHDLKAEHDLTANLVQQAIFQAVEAVKSGVERLEKNEATSQPEFTADTARYDKRAATFHDDRVSLSTVAGRIEADYVLPEDETDTPFEKYLDGDEWEFRTSTLHYDAFDEEFWLHIGFKRIEQNADTHSTQADAAVPEHSTVLGIDLGVANLAVASTGRFWTGDELDHWHREFQHRRGDLQQTGTQEAHRTLQRVSKKERAYYKQYLHIVATEIVEEAVENDCSVIAFEDLTDIRKRAQGATWHHRWRFTRLYEYVEYKAKTYGIDVEELERSPQAKTVPAYYTSQRCSSCGFTHADNRPTQEHFECQKCDYQNHADYNAAKNVAVRCCRRLLRRNQTGGDGGAPVDVALNGGTMTVNV

SEQ ID NO: 25186 - protein, 283 aa, unknown
  TnpB Polypeptide
LTATLVINKDWSFTKGKISLLTMGKRELCGYDHRIVEKFLQEGYVLGSGKLVCHRKGKKLLWFLHIAVTKEIPDFDRKNPSAVVGIDQGLRFLITTYDGKKTTFVSGKPIAKKRAHYAKLRARLQAKGTKSAKRLLKKLAGRETRWMTDVNHRLSKALVTEYGANAVFVLEDLTGVSFDEKNLKRTKDGKRELRSWTFYQFEQFLQYKAEAVGAKFLKVSAKYTSQRCPYCGKIDKTQRDHDLHEYHCTCGCRMNDDRVAAINLQELGRRYISGEDDPKILKE

SEQ ID NO: 25187 - protein, 372 aa, Oxalobacteraceae sp.
MKLVFRYRVKSLTGLLNTQARMVNFVWNYCNDRQKDALRFNRHWHTGFDLIKLTTGCSKELGLHSGTVNDVCQQYAKSRSQSHRRYLRYRGRKSLGWVPIKGRELKREGNAFRFAGHTFRVFYSRPLPDGKILDGTNFSRDRRGNWFLNVVLELASAPARAPKRGVGIDLGLKDFVTLSNGEKIAAQHIYREAEATLAAAPRARKTRRVKAIHATIANRRSDFLHKLSTRIVRDFGYIVVGNVNAAALAKTRMAKSVLDAGWSPLRIQLTYKAVKHGVWFEVVDERFTTQVCSNCGAMPDSRPKGIADLGVREWRCSDCGAELDRDLNAALNILRRGRATLVAGISGFLAGGGVNLCETGLESEFCRSNQQA

SEQ ID NO: 25188 - protein, 348 aa, Oxalobacteraceae sp.
MKLVYRYRVKSLAGLLNQQARTVNFVWNYCNDRQKDALRFGRRWHTGFDLIKLTTGCSKELGLHSGTINDICQRYASSRAISHRPYLRYRGRKALGWVPLKGRELKREGNAFRFAGRTFRVVYSRPLPEGKILDGSNFSRDRRGNWFLNIVVEVEPAPVRSPVRGVGIDLGLKMLATLSDGSTIEAPRFYREAEAALACAQRARKKRRIKAIHAKIANRRLNFLHTRTSAIIAAFDYIVVGNVNARGLAQTSMAKSVYDVGWSSFRIQLAYKAVKHGAWFEEVDERFTTQVCSHCGALPDTRPKGIADLGIREWCCSDCGAVHDRDLNAAVNILRRGRATLAVGISAL

SEQ ID NO: 25189 - protein, 416 aa, unknown
  TnpB Polypeptide
MSYKNFKNLNAHQLQTLIEFSKTNNRFKPIGPKHYFPKYEQIDYMFKVNKNPDYFNNLPMQTNQKIIKKVVESFYGWLELSKKYNIDHSKFKGRPRIPGYVKTDKVSFGITNQDAKVYKVKVDKDNILYELKLPKTKKRLTLLKKNISDSHTFVDDALYQVEVIPFYDVYKINVTFKTKKEPINLDKSHILALDPGINNFLTSSNNVGLEPFIINGKTMKSVNVYANKKIAEIRSILDKQFNRKTSPKVQRLWMKRNNYFRDMGNKIAYFIMDYCIKNNIGTVVIGKNSNWKNESNIGKISNQKFCFIPHSTIFQKIKEKCESVGITYIEREESYTSKASFLDKDNIPIYEEGSFTKYNFSGKRVERGLYKTKKGILINADVNGASNILRKEFKDAFKDIKYFSYLYKTVRRITIT

SEQ ID NO: 25190 - protein, 437 aa, Thermococcus sp.
VKLTRTVVLESLPLTKRKFEAIKEVYDEYSEILEFLTDYAVENKVKSHLKLRKLFYENLKEEYTLPTHYYYTVCQDVVTRAKKFLELKRKGKAKTEKPIIRKVSLWLDDVLWDYKRFPQFNALKDGKKLLIIGLTTKRGRIKLPLKPHKLFFKYLNDGWEVKAGVKLRLIEEERKVLAYFVFEKEFDEPSPSGNFLSVDYNADNVSFGIQEFLIQVRTDLGRLTRFYSDVRKRIQETHLIGWKRKLPSRKGRKLLKKFGQRKRNRRIDLQRKLAKRLVELAKELNATIVLEEVPKNFNQKIMGRRKKNEKRLRDTLHNIGMNGFQKFVTEKAVEYGVPLVFVNPSYSSQVCPRCGAFRVKPDDDALRQRVFECPVCGFNLDRDFVAVLNLLGLFPFSLKADEPPVEDSVSPVMLVVEANLLHHKNSLIVISQGLQQK

SEQ ID NO: 25191 - protein, 402 aa, Planktothrix sp.
MLTALKVRLYPNKEQQIALAKNFGCCRFVWNYYLNKTNTQYQETGKGLSYYDMAKDLTQLKKHENFLWLKEASSSALQQSLKNLEAALKNFFEHRAGFPKFKSKHRKQSLRYPAGCSIKNNGIQLPKLGVVKAVISKKLGSEIKSVTVSKDSTDKYFAAILWEVEDTLTIEDGKISGIDLGLNSLVTVFDGETTYKVDPIKPTRKYAKRLRRRQQSLSRKKLGSNNRKKQVKKVAKVHQKIANTRLDFLHKLSRKLVDENQVIVVEDICVKGVARTKLAKSVLDAGFGMLVNFLASKLKRVGGTLVEVDKFFPSTKLCNYCKFKNDSLTLKDREWTCPKCGTHHDRDSNATKNIREEGIRILSTNTDGQSELQACGEDLRLVSNSTKKRSSVKQESPVIASA

SEQ ID NO: 25192 - protein, 412 aa, Planktothrix sp.
MKLVERHIITKNHPLWSEIDHLAFLSKNLFNLANYHYRQHFFQHQQKLNFNQLYHLVSQTPDYKALPTKVSKQIIRRLDTAWTSYFQAVKTWHIHPEKFGSKPRIPGYKHKTRGRNILPYPNEAISKKALKKGICHLSMSEIKIATSQKQIQEARIVPKTSCYVLEIVYEKNEETTNHQQIAGIDLGVNNLMAVTTNQTGIRPMLIKGRPLKAINTFYNKKRSALQSQLKLKHNQTQSHRLKKLTHKRNCRVENYLHTASRRVIDWCREHQIGIIVIGHNATWKQSINLGQRNNQQFVNIPHERLIEMLTYKAQLKGIQVIITEESYTSQSNALDGDALPKYGEKKPVFQGHRVARGLYKTANGRLLNADVNGSFNITRKVIPDVLDQGIKGLPFNPVVLDPLRMTALSACE

SEQ ID NO: 25193 - protein, 410 aa, unknown
  TnpB Polypeptide
MAGIVYNFGLFAGSWKGGGQLMAGKKRDGTVQYTTIKVRLYPDDVQIELFEKTFGCCRYIWNQMLADQRRFYLETGAHFIPTPAKYKKGAPFLREVDNQALIQEHNKLSQAFRVFFKNPESFGHPSFKRKKNDRDSFTACNHVFESGPTIYITRDGIRMTKAGVVRARFSRRPRNGWKLKRVTVTKTRTGKYYGCILYEYPAKEQSPVIPTPEKTLGIKYSMQHFYVADDGSAADPPRWLKLSQEKLTKLQQRLSRMKPGSRNYEEAVQKYRLLHEHIANQRHDFIHKESRRIANAWDAVCVRGDSIQELSRKMTLGNAMEAGFGMFRECLRYKLARQGKTLITVDRCAPTSRTCSACGLVLDSGVDFKKSLWKCPRCGAVHQREVNAAKNIKAQGLDQYYQKQELRVSA

SEQ ID NO: 25194 - protein, 354 aa, Planktothrix sp.
  misc_feature (71)..(169): Xaa can be any naturally occurring amino acid
MDNSRELKIDRFALNKYSTTLRNQFPFVANLNSMAVQSAAERGWSAISRFYDNCKKNISGKKGYPKFQKNXXXXXXXXXXXXXXXXXXXXXXXXXXXXXXXXXXXXXXXXXXXXXXXXXXXXXXXXXXXXXXXXXXXXXXXXXXXXXXXXXXXXXXXXXXXXXXXXXXXKKVKGSSGRRKARKVYAKKHLKVSRQRNEHAKRIARNVCKSNDLVVYEDLSVRNMVKNHCLAKSISDVSWYLLRKWIEYFAAKFDKLAIPVAPHYTSQKCSNCGVIVKKSLSTRTHVCSCGCELHRDTNAAINILNLGKQARGGHPQSNANGLETSTPLDESLVEQVSRLKLESSVSSDGESVNS

SEQ ID NO: 25195 - protein, 340 aa, Planktothrix sp.
MTKASKTIGVQQILLSPDLETCALLEYLCQQSGKLYNTGIYFARQTLFKTGKLLTGKFDLAFEPSVSKSLLAQSMPSTPMQQTLMSVTEAFKSFKNLRDSHKKGQLHFRPKPPGYLQGSKLFKVAYPNSGGQRPTLINGQLRFALGLTVKRWFGISEFFLPMPSNLDYSKVKEFTILPKNGVFYLEMSYEVEKQNHELDINQALSIDLGTADNLAACVDTLGNSFLIDARAMKAMNQLWNKKVSTRKEGKPQGYWDNWLDCVTRKRNHQMRDGINKAAKLIINHCLKYGIGTLVMGWNEGFKVDANLGSLNNQKFVQMPLGKLKSRVKQLCDLHEIFLGE

SEQ ID NO: 25196 - protein, 412 aa, Lactobacillus sp.
MPISNRIDVVITHPRWHHLNITEVSNIKMLKGIKLRLYPSKLQQAQLLQMFGNNRFVWNQMLAMAKQRYKNNPSSHFVNGYQMDALLKRLKQEYPFLKESDSISLQVANHNLAQSFKMLFKHQGGYPRFKSRHTVKQSYTGKSTISVVAKRYLKLPKLGIIKSSKTTQLTDYKVKRYTVSYDQTGRYYLSLQVETDEPALLPKTGKTVGLDMGIADLAISSDGEKFSTFNAKWLEKQSTIWQSKYSKRKYQATVAVRQWDHNHKDFKMEIDDYQNWQRARRRKARCQQRIANQRKDYLHKLTTDLVKQYDVIVIEDLKTKNLRKNHHLAKSISNASWYQFRTMLTYKCAWYGKQLITVKPNYTSQICSHCGYRSGPKPLNIREWTCPKCGTHHDRDINAAVNILHKGLKAEG

SEQ ID NO: 25197 - protein, 237 aa, unknown
  TnpB Polypeptide
VRFRRYRFSKRYEKLRSELAEMLRLSAATRKREHGEVCNWLLGHAGHIIVEDNSFKAFQKGHFGKSIGRHAPAAFYTQLTSKAESAGLQVTVVSPRKLKPSQHNLLTDTFVKHELWERRVRLGNDDDDRWIDRDAAACLNLLYADLEKQTYAPERIREAVLAGVTAWLDAGVVVIQAREGITEREFGRFRRRGIPSLTVQGLRQQGFRGRSDSKSGATPRRKASTVSKPSHLSGEVV

SEQ ID NO: 25198 - protein, 402 aa, Escherichia sp.
VKRLQAFKFQLRPGGQQECEMRRFAGACRFVFNRALELQNENHEAGNKYIPYGKMASWLVEWKNATETQWLKDSPSQPLQQSLKDLERAYKNFFRKRAAFPRFKKRGQNDAFRYPQGVKLDQENSRIFLPKLGWMRYRNSRQVTGVVKNVTVSQSCGKWYISIQTESEVSTPVHPSASMVGLDAGVAKLATLSDGTVFEPVNSFQKNQKKLARLQRQLSRKVKFSNNWQKQKRKIQRLHSCIANIRRDYLHKVTTAVSKNHAMIVIEDLKVSNMSKSAAGTVSQPGRNVRAKSGLNRSILDQGWYEMRRQLAYKQLWRGGQVLAVPPAYTSQRCAYCGHTAKENRLSQSKFRCQVCGYTANADVNGARNILAAGHAVLACGEMVQSGRPLKQEPTEMIQATA

SEQ ID NO: 25199 - protein, 450 aa, unknown
  TnpB Polypeptide
VSQKIRIDGVKHVGASVFLGVDHCNNPRWTRNPERIMAWLCDGWRARFNQRREQRPHNIPVKDEAGEIVDWVKEPLGGPDVADLLSDKEARLQCSWMAGIPAPILSSTDRIEGTEWSAGLKRKKTAGGRVPGFKSRHRNLGFVCWRNASKTGNAIFHKTGRKSGVVVITGMNPTRWRKPGEKLHWRVVIHVRVSQPIRPYTSVHVDWTHRTLMFVNMPLPLPRTGDGVIGLDRGCVHTLASSDGIFMDIPKPSKAELKRLKYLQRKMSRQDRVNEARGGRIAKFASKRRQKTLNQFNALQGRIVRRRDDWIEKTTTRLAKENSLVAMEDLDVQAMTKRPKPKPDPDRPGQYLHNGARAKAGLNRSILSNNWSRLMKRLQDKMDANGGSLVIVPAAYTSQTCHECGHIAKENRESQAIFKCVKCGYEANADVNAAKNILSRALTKTGGGTA

SEQ ID NO: 25200 - protein, 336 aa, unknown
  TnpB Polypeptide
MLNDKIREYEATKKMLRNTPAMYKKTYPFLKEVDSLALANVQMHLEKAYKNFFRNPKIGFPKFKSKHRSRKSYTTNVVNGNIQVEDHRIKLPKLKWIRMKKHRDIPEKYCLKSVTISMEPSGKYYASLLYEKSDCENQAEEFDYEDAKILGIDYAMHGMAVFSEDIQKENEGYFRKSEERLAREQRKLSHCVKGSNNYYRQKKRVALCHEKIRNQRKDFLHKLSYEMAEAYDVVAVEDIDMKAMSQCMHFGKSVMDNSYGKFRELLEYKLTWRGKKLVRVDRFFPSSKKCCKCGSVKKELKLSDRVYLCTCGNRIDRDLNAAINIREEARRMLLAG

SEQ ID NO: 25201 - protein, 153 aa, unknown
  TnpB Polypeptide
MSKKYNKNKKFWQQSKNYYKVKTKLNKLYKKKRFITKDFLDKYTTWLVINYKVIKIEDLKISNMIKNHKLAKSISRCNFFEFRSMLKYKCELYGSKLIVINTFYPSSKICNSCGHKKHKLSLSERTYICENCGLIIDRDYNAALNISEWEFWK

SEQ ID NO: 25202 - protein, 372 aa, unknown
  TnpB Polypeptide
MANRAYKFRMYPNDEQKILFAKTFGCVRMVYNHWLDRKIRQYEENKTNVTYTICAKEMAAMKKTEEYGFLKEVDSIALQQSLRHLDTAFQNFFKQPKTGFPRFKSKKRNKNSYSTVCINGNITLSDGYLKLPKIGEIRLKQHRSVPSEYRLKSVTVSQTPSGKYYASILFEYEDQVEEKELQKFLGLDFSMHELYRDSNGKEPAYPRYYRNAEKKLAREQRKLSKMQKGSNNRNKQRLKVAKLHEKVSNQRKDFLHKQSRQITNAYDCVCIEDLDMKAMSRSLNLGKSVSDNGWGMFTTFLRYKLKEQGKKLAKVGRFFASSQTCSVCGYKNVKTKNLALREWDCPQCGTHHDRDVNAAINIRNEGMRLVNA

SEQ ID NO: 25203 - protein, 400 aa, unknown
  TnpB Polypeptide
MQTVRIYRLKHLDRRTRARLRAAQQEAARVWSYCLARHQQARSERSRWPDRDDLQRETKGGQYDLHSQSVQLVCQQFLANVETIKHLRLSNPRHRFPYHPKKYRTVSWPAQAVARCGKRLILPMGRGRKSLCFHLPDLPERIGAVSLVWRGGYQLHLVVPTPPAGEGSAPAAPAVQAAVDLGEIHLTAVTTTTGKGLIVTGRGIRSLKRGYNMTLGRLSRLQARCQKGSKRWRRLQYTKARELGKKERRVRDLRHKGTRQVVDFCRAERVQTLYVGDPHGVRNENKGRHHNQRMAQWEYGKDKDYLQQKCERVGIVCFSGSERGTSSHCPRCDWRKKPRGRNWTCRRCGFVGHRDIVGSMNMHPLAFGSRISYPSSLTYRRPGPLRGRLQNKELPPGGTS

SEQ ID NO: 25204 - protein, 412 aa, unknown
  TnpB Polypeptide
VEDVTTRERMWVDVPLGGADVKPAVKDSQARLDCLWLACIPSPILASCERVENTGWFAGLKRKRTNGGRIPGFRSRHRAPQYFVCWRNQSKTGNALYHRTGKRTGVVIITGGVPKRYRREGESEARWRLAIHVRISQPVREYTSVSVNWTDRTLVFTNTPLPVERADTGRTVGLDRGCAHTLATSDGLFLDIPQPSVKETEEYRRLQCKLARQDRTNEKRGGRNAKFASKSRNRTLHAMRRIQRRINNRKDDWMAKTTTMLVRDYDFIAMEQLAVKAMSRSVQPKPDPDNPGHYLHNGRGRKSGLNRSILANRWTGIQHCLEYKTNLAGTRLVRVPAYDTSRICNACGYCDKENRESQAVFHCRKCGHEANADVNAAKNILSRALNTIGMDDAEEWRQQASTLVKTSGKQRR

SEQ ID NO: 25205 - protein, 160 aa, unknown
  TnpB Polypeptide
MRKLVREQRRLSRREKGSHNRDKQRIRVAKVHEKVTNQRNDFLQKQSTMLVCENQTICIEDLHVKGMIRNHKLAKSIASVSWAKFFEMLEYKAIWYGNEIRRVPTMYPSSQTCSFCGCRNPLVKNLRIRIWECPKCHTVHDRDTNASINILKKGLQMQSA

SEQ ID NO: 25206 - protein, 351 aa, unknown
  TnpB Polypeptide
MRLTVQCGVVKLTKLKQNILDREYNNIQDAIQLGSNNLEELSIFENLKLYSANKQQAIRYFKKYKFKEYPISLRHDLINLKKAKSFWFLKIPVYDVRGGIKIPIKPHREFPDKFSLCESKLIKKNNKYIAMITIKFDTPKLRRCSSVLAVDLGERFTATAVLLQDRNVMKVRFFGKEIRGIRRHYSWLRKRLQEKGLTKVVKRIGQKENHCVNNILNRISKEIVSLADSANSYIVVGDLKGIRKSTKGRRFNRIVSNMAYHKLTQMIKYKAEMLGISVIEVDETNTSKICHICGEVGKRKTQGLFVCKTCGKYNADLNGAINIYKRLTSYMLVSGVFCEQALNSVVLHQIT

SEQ ID NO: 25207 - protein, 412 aa, unknown
  TnpB Polypeptide
MNCNHDLFIFEKQLINRIGDMKRAILLQTLATKSKNNRLKDFMGKAIDEYNRLLSERWDCDSFMEFHHKTLSVSKHNTSFNVQVRCSLIRDAWKKKTNKVNGLTVKFNIPRNCKTFNTKSNFFIRLGLYPRNRIAIPIKQNRNYQRFQTLINNGWVCKTFGLTKDLQFVAYFSKEKEIQQRKNILGIDVNAKHFAISVISPEGKVLYQTYLGKQTWVMRKNIMERRAKLQSLNAKKKLKRIRNYERDFINTNLGQIVREIINLAIRYDADISTEKLKRFKPKGRRFNKNVMRIPFYKFKQILEQRCFDYNIKLNIVDSWHTSKWCSHCGALANGHSSNYSLFKCKCGQIVNSDRKASLAIAIKSLLERRHISNPDISIQISKRRGSVNNLIRPDAVVNLCSVNHNYQPMESP

SEQ ID NO: 25208 - protein, 670 aa, Mycobacterium sp.
MAATPTDTTTVTSGDAVVSRPRRRGKSKTANFKYEGPVAVIRLELDATDEPMRRRLESQWEAVFRLRRALQRDAAARCRAYWAAHHERAQDPKALRQRLGLTRKGMEAAAKRHIDASGWMRDHLTKALGLHVADEVWETVDRHLFADASGRRHGPPQVGSWWDFTRIPGRARSHTKAQPTWETHRLVGTLDGHLGVYRHQHLPAAARTAQHAAEQPSGTSILTQPARMPPPARPATGSWWDHNGALAVVFTGLPAGDLVLPVRLPQGAGQWPHLTHFLADPNTWHKIDVVRVADRKAPGGWRYYAHLLVHQAGYASPSTIARRRDIPAGRRAGVDANVSNLSVASFAADQPERLVVGRVECTLDQQRAAARAAKQTRARQKALDRSRRNTNTNQYGLSVRQHKRAQRRAASGLAARQVTNPGGPRHARADGAPLRAYRHDELSGRYRRIRGDHAAAARRTSRAKQARAAQVAAAIVAAHGATVTVEDCRISTWARLWGKRIALFSPGMLVAALQRECHAAGGRFYRAGTHATAMSQHCLCGARVAKILAQRSHDCGQCGLRGDRDIVSAALAACVEFTDPDDPRTARVDYRLAHALRDGLASQQEWEGSVNRHQPPTPPGDGSARTGSHHHPVVASAEQAAPGLPPNRPRQRGRRGTSRKQPAPKLIGAA

SEQ ID NO: 25209 - protein, 374 aa, Scytonema sp.
VYPSKELHTVWKSWLAGYRWYYNETIALLQCFDGVEKISAYTMDKMLQLIENKPDWVNLPGHQRQEACNDACDAFSQAKSEGGFARFKSCKAKSQVIKFKAGNYKNGTWYPKTTKGLVYQASQAVPYQCEYGTQLVYQRGKWFACFPQTVEVIGTGSNRVIALDPGNRTFLTGYDGENVLEIGKGDIGRIQRLCLHLDDLISRSTIVLARQRKKMRIACDRIRERIQNLIKDLHSKAVSLLVNSYKLIYLPTFDSSQMVVKINGKGKKRKINSKSARQMLTLSHYRFEQHLKQAASRKGVVVALVNESYTSKTCPSCGHIHVKLGGNKKFQCPKCKYTAPRDWNGALNIMVRALQATAFTFNGDAIVIDSSRNI

SEQ ID NO: 25210 - protein, 269 aa, unknown
  TnpB Polypeptide
MSSVSDIVTPYDLPYQAKAALCNYVPKLRKTYNAQDLDDEHPIRLTNQAAKFDHSEERDYEFTWWVPRPGRGTNFWMPLRINPEQEDLWHDLVSEDAKAGEIRLQQHRKNWVLHVTVEYPVEEPAADGDATHIGLDIGETALITGCALKDGSPTDPFVCSGSRAKHLRKEMHTTLKRLQERDASEWRTDERFDHYQNALTDIVEKASREAVEYAKQFENPVLVMEDLTYIRERLDYGKYMNRRLHSWAFARLKGASRTRRRKQVFRSST

SEQ ID NO: 25211 - protein, 370 aa, unknown
  TnpB Polypeptide
MRKSSKFKLQNQSNTIKIGNMLDDMWQIHVHIMLLARRYYRLFGKNLSTYRLKAHVAKLKKRTQPHWKDLPSQVLQDVVLRYGKSQDAFLGNIKDRKAGLTTRKVGRPKIKSRQKYSSLTFTQAGYTLEDNRIKINCIDTWFSFHKHREIKGNIKTITIKRDKCGDYWICFSCENVDASEPKAKTGKSAGFDYGNKTFLTSDEGNKIESPQFFKQSLSTLRSLSKALSRKVKGSNNYYRACRALARHYRKVARQREDWQWKLATQLCTEFDILCFETLNLDGMKRLWGRKVSDHAFYQFLQILEQKCAKHGKTLKRVGRWTATTKPCSDCGSHNKDLSLSDRQWTCPECASHHDRDVNAAINIKRAGLAA

SEQ ID NO: 25212 - protein, 384 aa, unknown
  TnpB Polypeptide
MYYKAYKFRIYPNENQRILINKTLGCTRFVYNYFLNMLKENGYKKANENIRHYTHYLKYEYPFLQEIDSIAINKALFNLDDSYKRFFSKQGGYPKFKSKFSKNSYNTTAVYGTYKNYNYCNIELNLENKTIKLPKLKVMKIRGYRNIGSINGRILNATISKEPNGKYYVSVLFEIHDKLDKVIPTSIVGIDLGVKSLLTLSDGTVFENNKYILKYEKRIKRIQKALSRKVKGSENYKKCKQKLAILHSKLANARKYYIHKITKNITDEYDIITCEKLHTKEMIINGKTTTLSKNINDASFNEILKQLEYKSKFKGKQFYQIYDYYPSSQTCSVCENIDKKYKNLNEREYKCTKCHLEIDRDLNASINIMFEGVKMYMKNYCSNY

SEQ ID NO: 25213 - protein, 403 aa, Cyanobacterium sp.
MKLVQRHLIKPNNQFYQDIDKLTFLSKNLYNCGIYLCRQAFFKEEKIPSQNQLYHQLKGGIDYRLLPSKVSQLVLKQVEKTFKSYQSAVKEYKQNPSKFTGKPKLPRYKDKVKGRNIVTYNYQAISVKYLKKGLVNPSKSNILIKTDIKEILEVRLIPKTGVYLVEIVYEKPEKETIIFDNSAYIDLGLNNLAVLTSNKKGFQPKLICGRALKSCNHYYNKRIAQLKSQLNDKQKTSKRIQSLILKRNNKVDYYLHTASRYIINNLLENNISLLVIGQNKNWKQGIKLGKKNNQNFVNIPHDKLIQQLTYKAQLVGIKVITTEESYTSKCSFLDLEPVKKQEKYLGKRLNRGLFSASNGYLYSADVNGSLNIGRKVVGESVFNRDSIVRFVVNPLRVKSYKAS

SEQ ID NO: 25214 - protein, 337 aa, Thermoplasmatales sp.
MILTFKIKHGMDFSTELKKAREVAEFAIEHRKLSSKDVKQFGLKAVISNQILRKYSRNREAKVITSVKLTIPAQGIKFSHAERAITIPSLKLKLGYHFRNDFLKINQIEIDKEFAYVSVSVSEDAMINPKGYLGIDRNTTGHIAVLANPLTGKVTKLGKKADHVHKKYRNMRKNLQKNGKYRKVKETRNRENRIVKDVNHKVSKKIVQEAKQDGMGIKLEYLQGIRNAKSGRNFRYSLNSWSFYQLEQMIEYKARLLGIPVVYVDPYHTSKECSRCGQIGNRSGKSFKCQCGHVDHADANASFNIALRPAFEEGRDRLYVDRDTYKGNTDIPEEATL

SEQ ID NO: 25215 - protein, 387 aa, Escherichia sp.
VKRLQAFKFQLRPGGQQEREMRRFAGACRFVFNRALARQNENHEAGNKYIPYGKMASWLVEWKNATETQWLKDSPSQPLQQSLKDLERAYKNFFRKRAAFPRFKKRGQNDAFRYPQGVKLDQENSRIFLPKLGWMRYRNSRQVTGVVKNVTVSQSCGKWYISIQTESEVSTPAHPSASMVGLDAGVAKLATLSDGTVFEPVNSFQKNQKTLARLQRQLSRKVKFSNNWQKQKRKIQRLHSCIANIRRDYLHKVTTTVSKNHAMIVIEDLKVSNMSKSAAGTVSQPGRNVRAKSGLNRSILDQGWYEMRRQLAYKQLWRGGQVLAVPPAYTSQRCACCGHTAKENRLSQSKFRCQVCGYTANADVNGARNILAAGHAVLACGGCQQTG

SEQ ID NO: 25216 - protein, 411 aa, Planktothrix sp.
MKLVERHIITKNHPLWSEIDHKAFLSKNLFNLANYHYRQHFFQHQQKLNFNQLYHLLSQTPDYKALPTKVSKQIIRRLDSAWTSYFQAVKTWQIHPEKFLGKPKIPGYKHKTKGRNILPYSHESISKKALKKGICHLSMSEIQIPTSPHEILEARIVPKSSCYVIEIVYEKVEETTNERQIAGIDLGVNNLMAVTTNQTGVRPLLIKGRPLKAINTFYNKQRSCLQSQLKIKHYQTQSHRLKKLTHKRNCRVENYLHTASRRAIDWCKQHQIGILVIGHNPTWKQSVNLGRRNNQQFVDIPHYRLIEMLTYKAELKGILVVITEEAYTSRASALDGDDVPKYGENKPVFQGHRIARGLYKTAQGRLLNADVNGSFNVTRKVIPDVLNQGIKGLPFNPVVLDPLRTTRPPSL

SEQ ID NO: 25217 - protein, 421 aa, Planktothrix sp.
MFMLLTQTNRLKLNRSEQNVLKQLCRLSKNLYNVGLYTVRQYFFTERKHLRYEGAYHICKSNENYKLLATDVGQQTLKVVDRAFQSFYGLIQAKQQGRFDAKISLPRYLDKEGYFALIIPIRIRQKFPDGRFMIPTSREFKRTYGSVYVEIPERLRDKRIKEIRILPKFKARFFDVAYIYEQPEEVVNKQQSNQILAVDLGLSNLASCVTTKSQSFIIDGQRLKSLNQWYNKRNSQLQSMKDLQGIKGITYQQARLTDRRNQKVRDYLNKTARILIAHCIEQGINKVVVGYNLGIKQEINLGHRNNQNFVQVPIAVLRLKLQSLCSRYGIEFVEQEESYTSKASFLDNDSIPIYNADNPTEYKFSGKRVRRGLYRTKLCWLVNADINGAANILRKHLSKQNESNFGLSRGCLAQPLRVKIS

SEQ ID NO: 25218 - protein, 236 aa, unknown
  TnpB Polypeptide
VKHREIVGKIKTIAILKNIDQWFVSFSCETPEVEKKPIKTSVGIDLGIKTFGCTSDGEFIEYEHNHNLDRKIKHYQRIVFRKQKDSNQRNKVVTQLAKLCRKQKRKRKEFHAQTVNSITKNYGCVIIESLNVKRIVKNRNLAKSIHRQGWDQFVQILKNKMEQIGGTIVEVGRFFPSSKTCSSCGIINTELNLNDIHWSCNNCNSYHDRDFNAAINIHKEGLRILSPGTGNHTSGD

SEQ ID NO: 25219 - protein, 386 aa, Gloeocapsopsis sp.
MLKVVKIRIYPTQEQEISLGKSFGCARWLWNRFLAQNNEVYKETGKGLSRFDYQKQLPQLKKELEWLSEVYSQCLQVVCLNLSRAFINFFEGRARYPRFKSKHGRQSITYPQNVKVEGNYLKVPKVGNIFGKIHREVVGKLKSVTLSKNPDGKYDASLLLEDGVSAVTRKSDGQAIGLDLGLTDFVVTSDSTKIKQPRWMRKRERNLKRKQQNLARKVKGSKSRDKARRLVAKTHSRIARCREDFLHKLSRKIVNKNQVIVVEDLHVKGMVQNPNLSKAISQVGWGMFCTMLKYKAEAAGKIYLEVSRFFPSSKTCHVCLNVVGSLPLDIRSWTCSSCATSHDRDINAAINIRNEGLRILASGTGATAEGVSVSPKRGRKKSTVEA

SEQ ID NO: 25220 - protein, 493 aa, unknown
  TnpB Polypeptide
MNNIENNTLALNKDIDIHQKLRLVSTTYKYRIYPSNEQIEFFHKSFGCERFLYNHFAGIQLEAFKSKSPLLSNYSLDKLIPKLKKEKPWLKEVNSQSLQKVTKDLKKGVNTFFRKCKKGEGSSLFNFKKKNSFKQSFGFPSNGQVKFIHNYKIKKKNKKKICYISIPKLKTPIKLLKHRNFDQSAVIKNVTITREADGYYMALQCEIENEQNEIKELDFNNIPKNLNIVGGDLGVVKLFTTSDGDVFSPIHPFHTNQVKLKELQQGFNQAHAHYKAKEKEKIKELKEKNEYDKDTFYFPPSKRYLRLKSKVRKLHQKIARIRHNYLHNISKMLVDNYDHIILENLDVKKMTQSNKGTLEEPGENVSQKSKLNKSILGQGWGILKKFIDYKLEWKNGYKSIKIPPYNTSKTCVCCLYQSNLNRESQAIFDCIKCDNIMNADVNASFNIIRLGLIKMGFSKEKSHEYVLKLINFNLVEKPPWAMGDKKGMSFSSS

SEQ ID NO: 25221 - protein, 394 aa, unknown
  TnpB Polypeptide
MKARHTYRLYPTDSQAKQLAQTFGCVRYVYNWALNLRSVGFKNGERIGYTQTSAALTKLKAQSDAAWLNDVSSVPLQQCLRDLQTAYKNFFEKRTGYPSFKRKNGPQSAEYTKSGFKLDVETHTLTLAKIGAIKVKWSRNTVLDASSLRVKRDASGRYFVSFVVEVQPVQLPETGQAVGIDFGLNRLATLSTGERIANPKHGYKHAKRMAFLQRRLARKTKGSNRRKHAARVVAKLHAKIADTRMDAAHKFTTDMVKRFDTICIEDLNLRGMVKNHSLARSVSDAGIGIFTRLLESKAERYGRKVVKIDRWFPSSKMCSACGHINSAVVLGVKDWKCPACGVHHDRDDNAATNIKAVGLTVSAHGGDVKPSKAKALQRSPHRSANLKIVEHESV

SEQ ID NO: 25222 - protein, 360 aa, Halanaerobiaceae sp.
MQITFVLELLEPTNRKQNVFHENIREVVKNRQVIAEKLKAGDNKLSSADFKEHNLPSAVKNQNIREVKALYKEFKKSDSDKENITFKMNQPICYNNQNYEVDGHIISIPLYTNRCERFAFPVKQTERWEKLQKHIANDCKLGKASLFYKNGNWFFAVTVNLENKENNKSNIMGIDIGLKQLAVASIQNPDGKEINRQFHNGSQAGFMRKKYRSLRRKLGQAKKVNAVEKINDKEQRWMTDLNHKISRQLINLAVQEQVGTIVMENLENIRQTAQSLNRADRDLHSWTFYQLQNFIEYKAKLAGIKVEYVDPKHTSQCCSKCGQIKKSNREGNLYSCDCGNHIQADLNASRNIAYLEQQSA

SEQ ID NO: 25223 - protein, 415 aa, unknown
  TnpB Polypeptide
MIVNKAYKVELKPNNKQRSAMARSAGCARFAYNWGLAQRINIYEKEKKSTTAINQHKDLCAIKEEQFPWMYESSKCAPQEALRDLDKAFKNFFRGVKSGKKTGFPKFKSKHRSKSSFRISTGAIYVNKSTIKLPMIPGKLRLKEKGYVPTEGVKYNSFIVSEEAGRWFLSVQCVVGLPEPGPRPVRVVGVDLGIKTLAVTSDGVTYSNPKSYKKLERTLSRAQRERCRRVKGSSNRRKSIQRLQDINYRIRNVRKDNLHKMTSDLVRTKPSLIVLEDLSVNNMLKNRKLAGALSDASFGEIRRQVEYKAAWYGSEVAFAGKFFPSSKLCSACGALKEDLTLSDRVYKCECGNIIDRDLNAALNLKRYGEFHRSLSKQKACGEERSQFPAAIASGDGALPRSRNSTANLPRVGRFV

SEQ ID NO: 25224 - protein, 369 aa, unknown
  TnpB Polypeptide
MKTYKYPLYDQSNTIRIGNLLDDMWQVHLYFHEWQRQRYKDGLPYVGYEGMCEHLTELKRTTHPHWHALPSQAIQEELKRIHLAYVRFFKKLSGRPKIKKRHRFKSFTLKQSGWSLTDNRLTLNFRKWDKGKWRHDKVAYTFHKHREFEGNIRRITIKRDNCGDYWLYIITDFVETKLLPTTGKSVGADFGMKEAYLTLSTGEKIQHPQPLKHSLKKLRSLNKALSRKVKGSNRWWQCVRQIARLYRKISNQRKDFQWQLASKLCKKFDTIVLETLNLDGMKRLWGRKVSDLAFYQFVEILKSKCQKHKREFIQISQWTPTSKPCSDCGYHNAHLTLNDRQWMCPECGSHHDRDINAAINILRAGIAVT

SEQ ID NO: 25225 - protein, 627 aa, unknown
  TnpB Polypeptide
MAKTQTLSFPIRLPDCMQAEALRLLDTSRPAINQIIEDLWPRLDAFVGDRTGIAWKQVEQHLVARSGHGSRQERCEMEQAGRILRAQATRKQVFLTILPLLTDELIKPAEGKRKAHQDYRLIKDKVTALREAMEDAESSLAMTNVIEQAANHFLATETWPRAYEDLQPVPVLKAGQLTFAGDDGMQRGQTYRAKIDFRQVCDLASHQERTTARLFLRLRAPSETGRWMWGQACAMVELPDPVVERLAQGAVPQAPSLREIRGDDGSRVVVLDLILEVPAKYVGDLNQECRVLGWDWGVRSLITVSILEKSDEEGAESYRQISRPLFLESGGLDGRQSRLRREIDRIKSCRDRYAKLVQEAVVARVERKMPLPPHFQKWQDRIDAFEARIKQCWKKYERRNRELAHLASNLLILLALLYDCRLICGENLTTLKTIGRGRGVRGRWRNWRNNSQVRGQLWRTLRYKGYLLGIRCRDVEARGTTHTCPHCHQPAHTYLSPAPLHRKKADDWAPWLCCTNPTCLWNGARDYAASLNIARLGMAFLITYHNTKRYQAYRMSESKDSLKPVSYTGTGATLLLPSQGLTTRPFQGKCVYYAGWMASIALRTSQPKNILALLSTSHIRKRMLLRA

SEQ ID NO: 25226 - protein, 523 aa, Mycolicibacterium sp.
VRSWPLRPTPTQCRDIGTRFFTGVRVYNAVLGEFITRGRAVKADPDWEAARDLPHRNTAERQVRRAAFRAVEAAHGFTADAAQSFASSLRKSWVRDHLPAQETQNLGARAFDAVRQWHVGCKGKPRFKSTKRGLHSLTAKDSYGALRPKTDAAGRLVGLQWGAGFLIPIALPAHSGRRSKEQQAELDEIEALIAAGKVRSTRIVRTAIDGRDTYRMQLVCDGRPTQRHPVGNGRVSFDLGPSRIAVAVVRADGSWAGWVEPLADSIRLDTIRLRRAQRHLDRQHRAGSPACFDRDGVHTTGRCVWHRSLAAQRTVIRVGELHRRLAEHRKTLHGTLANRLLGHGPDIGCEHLDYGSWQKNFPRSVRDRAPGLLVEILRRKAESAGSQLYEYNPRTTALSQTCLCGQKKKKPLSQRTHHCQCGTTDDRDLFSAYLGLHVHLAADGVDRLDLPTARQGWGRRQDIDESPKSSRRSASARKRRGRRHPPARRSVARINARRKAKTMMRQSRSAQTSTTDQPTAIAA

SEQ ID NO: 25227 - protein, 515 aa, unknown
  TnpB Polypeptide
MMAKSNISDNLVETGSMMLSPFLVRESERTGQGLSMPESAQEIKKMTFPDKYGISGKGIRITNSLRTSVADSISKERDFAPYWNELCLEMSKKLLSHTETGCAGSDLNLSTVLREKTTANSWFSITHSSHLKKNLSETLFPLSTFSPAGFTDSGNTLIRSRRIRIYLNSESRELFKRYCGLSRFWFNQTVSYLRQPNTIPNIKCIRSIVQNRNLLPEWAFDSPQRIREHAISDACKAVKNARAKSKKTQKLNEVHYRCKKDVKQRFGFDGCSLSEGFVFRDKKYKIYFRSSERFSADLEGCEICNENGRWFLIVPEEISIKKPENQRLGVVALDPGVRTFMAYYSDSCCGVIGKSDFSRIFRLCYSLDEAISKRTKLEYKGKKRLTKAIQRLRWKIKDSIDEIHHKVALFLVKNFDEVLIPTFETSDMVTTMWSNDSARAMLTWAHYRFKEFLKFKGKEYSCKVTEVNEAYTSRTCSYCGKLHNIGNKKYTKCSCGVNVDRDLNGARGIYLRNLN

SEQ ID NO: 25228 - protein, 263 aa, unknown
  TnpB Polypeptide
VRFRWSRQVAQDAKSFRVTRDRAGRWHVAFAVVPEPVPSPGNGEVVGIDRGVAVSAALSTGEVLHAPGLSARERKRLRRLERTLSRARRGSNRRARVRLAIARLKARESDRRKDWAEKASTDIARRFDVIRVEYLQITNMTRSARGTTEEPGRNVRAKAGLNRGILRSGWGLLVRRLGDKAPGRVEKVHPAYTSQRCSACGHIAAGSRESQALFCCVACGYACNADVNAARNIAAGHAVTARGGFRAAGPANREPQPALLPSA

SEQ ID NO: 25229 - protein, 284 aa, unknown
  TnpB Polypeptide
MSYQGEIKMQIISSYGVELRKQNIPIRQTLEIYRSAVSYLIGIYVQVWEGLAEIPDAKRRFNAAEHLVHTTKKNHACFDFDIRFPKMPSYLRRSAIQHALGTVSSYKTRLDLWEKTDGKSGKPKLVYENHAMPVFYRDVMYREGAEGKDEAYLKLYDGHDWKCSCVRLDHTDMEYLRKCWSGKKASAPTLEKRHQKYFLRFSYKEEVTLTKTPVKEQIICSVDLGINTDAVCTIMRADGTVLGRRFIDHPVKKTGCTAHWDGSADSRGNMALRRHREDGHIRNV

SEQ ID NO: 25230 - protein, 195 aa, unknown
  TnpB Polypeptide
MYRTLGRIRRFQREHGSAQTQGRWAYTKRLNTELGKKIAGAIVRYAEENHADVIVFEYLEMQGKISGKKKQKLHLWRKRDIQKCCEHQAHRKGMRVSRICAWNTSRLAYDGSGVVTRDWENHSLCTFQTGKRYNCDLSASYNIGARYFIRELLKSLPATERSLLEAKVPPVKRRTSCVYADLRKLHSEMERLKAA

SEQ ID NO: 25231 - protein, 484 aa, unknown
  TnpB Polypeptide
MLKAYKYRIYPNEEQKTIFAKTFGCVRLVWNLMLNEKLERYQRISELKNSQSLSGDLRNAYSTLTAYNNKEKIPRTTPAKYKSEHPFLKEADSLALANTQLNLEKAFKNYFKNPKHFRFPKCALAFLCAIEWLCLFPKIEMRRYRSKFKKKKNKQAYTTNNVNNNIKIDFENELLYLPKIKNGIKIKLHRKFEGKIKSVTIVKTTSGSYYASILVETENVKNKVREPKNRQCGIDLGLKDFAIITNGTGIYKIEHPKYLRKAEKRLKRLQIALSRKQKGSKNFEKARKRLAIQYEYVSNARNDFLHKLSKAIIDDNQVIVVEDRALSAHFNSKEHSQALNSSENGLQHTLNVKGMQKTDLAKPVSDSGFGTFVRYLEYKADWYGRQLIKVDRFYPSSKLCSVCGYKHNELKLSDRYWQCPICGTYHDRDINASINLYKVGLERPDFKPVEHALVDDRISKRYLKSHHAMKQEAAPSIRWGSSQL

SEQ ID NO: 25232 - protein, 475 aa, Fusobacterium sp.
MANYVLTLALKTELWHKHILEKRLNIARMIYNACLCEILKRHRKMLNSLEYKEINNLDKKEQSKRYKELDKKYLISKFELNKYMKHMTQKFKKNIGSQMGQELAERAFATYEKLKYGKAKKVYFKSYGDFYSVREKRNITGLRFFKEDCCISWLGLKIPVIINKNDKYSQRCFLDKLLYCRLIKRVVNGKNKYYVQITFEGVPPKKHEVRNHAEVGLDIGTSTIAIVSDKEVKLQILAENIGINEKEKTRLQRKLDRQRRANNPNKYNTDGTIKSNNKEKWKKSKSYLKTQLKLSNMQRKIAEKRKQSHTILANSILEIGTIVKVENMSFKGLQKRSKKNEISEKTGKFKKKKRFGKSLSNRAPALLIEIIDRKLRYIGKNIIKINTFKVKASQLNHETEEYEKKSLSKRWGEIVGNKIQRDLYSAFLIKNVKENLEEVDIEKVKKEFKNFVRLHNEEIERIKKSDVKTLKCMGF

SEQ ID NO: 25233 - protein, 396 aa, unknown
  TnpB Polypeptide
VAGYNRQLLHSYLNLGKISLFFNMSKVNRYRIYPTKSQVTKLNSTLELCRWVYNETLALRKNAWESEQKRISYYDSKKMIPIWKKDKPELKEVHSHALQDVTMRVDLAFQAFFRRVKTGEKAGYPRFKGKGWYDSITYLQSGFSLNNNMLTISKIGDIKIKLHRPLEGNIKRLTIRRTSTGKWFVSILTDYDSYQPLEHSDKSVGIDVGIQSFAALSDGTFIENPKFYVKEQKNLAKAQRKHSKLQKGTPERKKALKVLCRVHERISNKRENFIQKLSKTFVDNYGIICFEDLNIKKMVKDPLYAKGIMDAAWNKLVAYTTYKDGNAGRRVVLVNPYNTSQMCSKCGTLVEKGISERVHNCPFCGLSVDRDLNASINILRLGLQSDRKIGRCPSLQ

SEQ ID NO: 25234 - protein, 630 aa, unknown
  TnpB Polypeptide
MATISYKYGALRPLDWGDDCLTQMKLQTDLWNALVTIHHDTAIAIRSLTPATKDLIEATAFLDDIKKDVAELEEAMKADKVARHFEKRSVITGKAGADKLRLLSLRKNLKEAAQTRVALAKKARAELAADKVKAIYDQQHVLVKEARQTAAAKGLWWGNYNAVMASFDGARSRIAKFGGELKEKYFHGEGRLTAQIQGGATAEEMFSLPGHGGSKAARLLDGPPPGWIDIHAPGSKKTSPTPGAKRELKRRMATLVLTVYTELGEDSKPSRRVLHVPFVYNRPFPPYARVQQVVMTRRRSYRAPASGWRYEVVFTLRVPEPVSCGLVRSAAVHVGWRTVDEGVRVATVADTQGVTYFVLPQMLASRFEAASTMLSTADKAAEAMRARVLDWPMPHPPATVQADLGAVSRARSGAGIARSLRWMARNWKQQAPEFMADIFPILADWAHNDLNYRWMARNIQAKAVRHRQDLVRVWVAGLALQYDNVIIQHYDISRHMRRDLAEASIPSARRNAQMMAPGELRAAVTMTLKSRGVAVRSHVEKVSWICHQCGVEHAPADPLALRVRCPGCGKYWDVDDNAAKNALSALVSAVNLQGETDPTCTEGGRFTKRRAAAVPKQAAALSATALVIPE

SEQ ID NO: 25235 - protein, 381 aa, unknown
  TnpB Polypeptide
MLRAIKIRLYPNKEQATMIDKLLGCCRVVYNQCLNRKIESYKNDGKSENLATLSKFIHHELLKDDNFIWLREQNTKVLKQAMKDMLSAYKNFFERHTGYPKFKSKHDNKQSCRFAYDAISKRNDYTTYHLSLANIKKIKFRCNKKYAQYLQKHHDDIKNATLTKLPCGEYYLSILVDGDLTHKVKETNAVVGIDLGIKDFVITSGGEVFENLHLKKSQSNKIKRLQRQLSKKQKGSNNRNKVRIKLAKLHKKITDRKQYYLHAVSNSLINENQVICMEDLNVKGMVKNHNLAESICEMNFGEFRRMLEYKAQWYNRKIVFIDRFYPSSKTCHNCGYINKALKLSDRQWVCPQCGEIIERDYNAALNILDEGLKIIGNKVSD

SEQ ID NO: 25236 - protein, 415 aa, unknown
  TnpB Polypeptide
MRLVYRFNNHEKNKELLNLCRVSKDLYNQSLHKFIESFESEEHKFLSYYDLNRIMQTEENLEGKINYKLLKAQVAQQTLKVLDKSLKAYFKSIKDWKLHKDKYKGMPRLPKYLPKNGYFNMIYTNQSCTIKDGKLYFSRDLYIHVPQWKKYGTKLSSFQQVRVLPRNGYTIIEIVYEDKGAYNEILNYERFSSIDLGVDNFVTLVTDFSEPLLYNGKQIKSKNQWFNKELSRLKSEAIKCNKRHNTATINKLFMKRGNELDDMLHKVSKHIVRKLTKNGVGNVVCGRNKGWKDSICLGNKTNQTFVQIPYERLIDMLRYKCAMVGIKFIENEESYTSKCDALALEDICKHEVYFGKRVKRGLFQSSVGKAINADVNGALNIMRKVVGDSRLITEIIDSGRLFRPKKLKDLYHLIS

SEQ ID NO: 25237 - protein, 391 aa, unknown
  TnpB Polypeptide
VLKAFKYKILPTDAQVELINKHINSVRFVYNLALETKVAAWAGNRVSLSCFDLFKQLPGLKEECIWLKEVNSQSLQAPIRNLDNAFTRFFKGQCGFPKFKKKSNWGSFNAQQRVALRNGKLVIPKFKNGISIVLHRPIKGEIKQATISKTPTGKYFVSILCETGDNIKYKANIKENTTVGIDLGLKSYIVTSSGKEFDNPKFLRKAQNKLKYIQRKYSKHKGKRTKHRLAILHEKVANQRKDFLHKTSSELIKNHDSIAVEDLSVSNMVKNHCLAQSISDAGWAMFVIMLQYKAEWYGKNILKIGRFEPSSKLHENCGHINKDLALSDREWTCPKCGELVFRDLNAAINIKSFALKNYLSVERRLKNRNELPRLRGVLTSEAHSNGYAVGG

SEQ ID NO: 25238 - protein, 414 aa, unknown
  TnpB Polypeptide
MERFDSIKVYGVQLNTVPVGFVLISSVGKQRKAYRFRLEPTPQQEEGLRRIAGACRAVYNWGLSRRKEHYAQHGKTLSYAALNLELTELKHRPGLEWLKEVDSQALQESLRDLDRAFVNFFEKRARFPRFKRAKDERFAFRIPQRVKLEGKQVYCPKIGWIGLRLSQPVEGITKSASFKRDAAGHWHVCLIQEFDLPAVALPAPQSPVGVDLGLIDFATLSNGESIPAPKFARKAHRRQRRAQRIFSRRKKGSHRRKKAKRQVARVHQKVARQRNDFVHQVTTGLVGRFDLICIEDLSIKGMARTKLARSVLDAAFSECRRQLHYKTLWNYRRVVVVDRFFPSSKRCHVCQAVNDELSLSNRVWACGCGAVHCRDLNAALNLEAEGRRLVAEGHSETQNARGAMVRPASVGASC

SEQ ID NO: 25239 - protein, 405 aa, unknown
  TnpB Polypeptide
MKARYNYRIYPNQGQQTKLAQAFGCGRVVWNDALAIVKATPEGEKWPSMGDIKKQVTTQAKKTPERCWLTEVSSVVLQSSVIDLQTAFKNFFDSRSGKRKGLKMGFPRFKSKHGKQSARFPSNGFSLKNNQLVLAKVGAIKVKWSRSLPDAPSSVTITKNKAGQYHASFVVEVRQIDVEPMRKSIGVDLGIKVFGFPSVGKPTLSPGYDRLTRKIKRTQRKLARQQKGSNRRKATKQKLAKLHLRIANIRKDFLHKQSTKLIRENQAVSLEDLHVIGMVKNRCLARAISQQGWATFRSMLEAKAKQYKDRTVSIISRWEPTSQVCSSCGFKWGKQDLSVRSILCVSCGTRHDRDQNAAKNIEKVGQELARTVKTQTLSSCKTPMGAVNDDASSQPYQGEQLCLSL

SEQ ID NO: 25240 - protein, 416 aa, unknown
  TnpB Polypeptide
LAGKKKHIYVQNVIRHCGLFQRVNNMLISYKFRLYPTREQEQKLQWTLNKCRYVYNFLLNELNQQKIIDKAQLQEMIVDLKRIEPDLKDVHSKVLQYENYRLFSNLRSLSQTKKNGRKVGGLRFKGKNWFKTFSYNQSGFAIMQNQTRYDKLWLSKIGEIPFIMHRTIEGKIKQITIKHCPSGKWYASIIAEIKEEIKPTENTNKVGIDLGIMNYIYDSDGNHFDNPRHLDKSLEKLQKRQRRLSRKKKGSKNRIKQKIGVARIHEKITNQRDDFLHKLSRYYVDNYGFIAVEDLQIKNMVRNNHLAKAISDASWSRFIQMLCYKAERAGCTVVKVEPRRTTQICSGCGKEVHKELWDRTHKCNCGLEIDRDYNSAINILKRALLSERQEYTPVEIEPLLSDEQVRSKKQEAPCES

SEQ ID NO: 25241 - protein, 396 aa, unknown
  TnpB Polypeptide
MKIKRAYKYRLYPTKEQETKMLWTLEMCRFVYNKLLEELNKGKKSKKELQHSILKIKEENPELLNAYAKVLQYENYRLFSSLRTLAKLKNNGKRVGRLRFKSKDRFRTFNYNQYGFEIIKNNTRYDKLWLSRIGEIPFIMHREIDGKIKQVAVKRYPSGKWFASIITEVEGNKQKTNRINSVGIDLGINNYIYDSNGTHFDSPKYLNKFIRKLKKEQTCFSRKTKDSRNREKQKVRVAKIHEKIMNHRTDFLRKLSRHYVNNFGFIAVEDLNIKNLIEVSYNSRNIMDASWSRFVQMLEYKAESAGVQVMKVEPEETTQICSNCRITVPKHLWNRTHKCTCGLEIDRDYNSAINILKRALGQELSESTPVEREPLLAEMQASNLEETGSHILNVKH

SEQ ID NO: 25242 - protein, 416 aa, unknown
  TnpB Polypeptide
VFGCQQVLIKPDAELRAILEFICGESNKLHNCAVYYSRQMYFKAKTYVRPFDLINELKRNPHYGALCAQAAQQTCGAVGESVKSFKGLIKLFWEGGLEFKPKFPNYREKGGLHLVAYPKQALSKKLIDGQISIPLGQKVLAWFGLKNFKIEMPSNLEYADIREIRILPRNGCFYAEFVYKTVAVQALVDSQKALGIDHGIDNWLTCVSNSGTSFIVDGKHLKSVNQWYNKRVATLMEGKHNGFWSHQLASLTEKRNRQMRDAVNKSARLVVNHCINNGIGVVVFGWNKRQKDSANMGSKTNQKFVQIPTARLKKRIEQLCEQYGIQFVETEESYTSKASFVDRDFLPTIGEKPDGWKETGRRVKRGLYRTGLKNWYINADCNGAANILRKVATMLGLDLDGVGRGVLTAPLRITFW

SEQ ID NO: 25243 - protein, 380 aa, unknown
  TnpB Polypeptide
MRKAFFYRLYPSKLQAESLSHLLDIARAFYNAGLQERRDAWKRGISLNYYDQANQLKEIRDINPDYALLNYSATQDVLRRLDKTFKSFFRRVKNGEKAGYPRFKGRDRFNSVTFPTYGDGIKLRDNRLYIQNVGLVKIKLHRPLEGEIDTVGIKRQCDKWYAVFSNSVDIEPLPASDRQVGIDMGLESFAVTSDGEFIENPRYLREAEAALRKAQRKVSRRGKGSHNRRKAGKLLAKHHLKVSNQRKDFAHKFSRHIINTYGFIAVEDLQIKNMVRNHHLARSISDVAWGMALDFTAYKAEWAGRQFARVIPNGTSQDCSTCGAEVPKSLSVRIHRCPNCGTVLPRDLNSSLNILALGRSVWGITCDAGQCVPQKAVCFS

SEQ ID NO: 25244 - protein, 386 aa, Pelotomaculum sp.
MRISGDVRREAARCWNAIVNLHRTIYNRYGIWLTGGQLKEFFKGRFRLHSQSVQALVELYEETCRRTKELKRNGEMSWRYPWRKKYYFTVTWKKAAVSFKGNRICLSNGRGREPLEFKLPARIDHAAICQAQLVWKGTCYWLHLSVEKPLPEQVTGSKAAGADPGEVHSLALTDGEESIVISGRLLRSWWRLQNKELGKYQRKLSRLKRGSRRWRRLTRKKRKFLELMRRRKEHLLHTITAQAAGWCFERGVKTVYVGNPLDVTKKNYGRRHNQRMHQWAFGRMFDLLKYKLAARGIEMVLVGEENTSSTCPTCGARGTFRGRTFHCPDCGFSCHRDVVGSLNIRSVGLYGEIRAGQETVPKTTYLRPAVLAARAVDAFGPGRRAA

SEQ ID NO: 25245 - protein, 256 aa, Lentzea sp.
VSIWTTAGRLKGILFASSADQFATLRAHRRGESDLLFRDGMWFLIATCEVPEPEAFEPTDWIGVDRGIANLATTSDLDNFQGRRLQRYRRWHARKRAELQAKQTKSANRRLKKRAHKEARHATCVNHGIAKDIVAVAQRTGRGIALEELRGIRDRVRLYRHQRATQSSWPFHQLERRITYKARRAGVPVLLVDARYTSQMCPRCKHTARSNRPTRDTFSCRQCGLAGPADVVAAVNIRDRARRAWVLVNVPVPMAA

SEQ ID NO: 25246 - protein, 330 aa, Shigella sp.
VKRLQAFKFQLRPGGQQECEMRRFAGACRFVFNRALARQNENHEAGNKYIPYGKMASWLVEWKNATETQWLKDSPSQPLQQSLKDLERAYKNFFRKRAAFPRFKKRGQNAAFRYPQDVKLDQENSRIFLPKLGWMRYRNSRQVTGVVKNVTVSQSCGTWYISIQTESEVSTPAHPSASMVGLDAGVAKLATLSDGTVFEPVNSFQKNQKTLARLQRQLSRKVKFSNNWQKQKRKIQRLHSCIANIRRDYLHKVTTAVSKNHAMIVIEDLKVSNMSKSAAGTVSQPGRNVRAKSGLNRSSIGIKTPKRLKKHHKTDVSSTPLLLHMNGTDD

SEQ ID NO: 25247 - protein, 221 aa, Escherichia sp.
VKRLQAFKFQLRPGGQQEREMRRFAGACRFVFNRALALQNENHEAGNKYIPYGKMASWLVEWKNATETQWLKDSPSQPLQQSLKGLERAYKNFFQKRAAFPRFKKRGQNDAFRYPQGVKLDQENSRIFLPKLGWMRYRNSRQVTGVVKNVTVSQSCGKWYISIQTESEVSTPVHPSASMVGLDAGVAKLATLSDGTVFEPVNSFQKNQKTPARLQRQFSDS

SEQ ID NO: 25248 - protein, 246 aa, Escherichia sp.
MHQENTMLPRRISVSLFIDQSIIWPVKRLQAFKFQLRPGGQQEREMRRFAGACRFVFNRALALQNENHEAGNKYIPYGKMASWLVEWKNATETQWLKDSPSQPLQQSLKGLERAYKNFFQKRAAFPRFKKRGQNDAFRYPQGVKLDQENSRIFLPKLGWMRYRNSRQVTGVVKNVTVSQSCGKWYISIQTESEVSTPVHPSASMVGLDAGVAKLATLSDGTVFEPVNSFQKNQKTPARLQRQFSDS

SEQ ID NO: 25249 - protein, 289 aa, Geobacillus sp.
VEKKGAFYTVSFPTLEKRIGVPVVTRPYQEAWLDRLIHGTAKQGAAKLYKKRKKWCLAIAVAFEVKPRHETKVMGVDVGLRYIAVASVGTKSWFFKGSQCAFVRRRYAALRRTLGQAKKLHMIRKIGDKESRWMKDMNHKISRQIVRFALANGVGVIRMEDLAGIRKRAASAKEAGRSLHSWAFHQLQTMIAYKAEMAGIRVEWVNPTYTSQTCRCGHREKANRNGIHFRCQKCGYTIHADLNGAINIAKAISGFAAQPSALVTGAPPIGVHLNPMGRGDDTPLNLGVV

SEQ ID NO: 25250 - protein, 532 aa, unknown
  TnpB Polypeptide
MKKRKPPSHIFKLFIVYNNTDFLLSVDKTVHIKNNLISDFNKHLILHHKSFTEPFNVSHFLDIVKDNTNVPFWNDKIRKKSQGLFLPHKHTMEIEDNNFTKKTWFKFEFYKEKMPCFHLEELNHYPKNDITEITKSKNIKLYLTPEQSKILKQFIGAYRYFYNRTINVLNNYNKNIRETHYTIKENETNKDINISVSIDKNVYNFYYLRSILKENIPTWVTDIKFQSHLIDLAINEAVIKVTTNMNKKRKFIMKMKTKKDLKQTINLEKTMITDKGFFSGLKLNGSYIFRDVKMSENISKLNYGGSTITYHRILNTFTMNLTYKTISVKNTSNKICSIDPGIRDFMVLFSDTKVCKIGVESTDKLYKKCREVDKIDSKMNSKEYYVNEKKYIVNSKRKRQLNEAKHRKITEIKNMKKELHDQTINYICKNYSKVIIPPFEIQEIASKLQSKTARCMYTLSFNEFKEKLKNKGKERNCEIIIKPEYYTSKTCTRCGNIKKDLKMTDKIYSCKKCGLEIDRNYAGARNIMLRNN

SEQ ID NO: 25251 - protein, 532 aa, unknown; identical to SEQ ID NO: 25250
  TnpB Polypeptide

SEQ ID NO: 25252 - protein, 376 aa, unknown
  TnpB Polypeptide
LQKSILRAYKYRIYPNKKQIEFLENHFGACRFVYNYFWSKYKDTQLPNRTTLQKELKELKKDENYSWLNQINSQSLQVSIHNLIKAYKRAFNKEIVKERKIALAKADTLKQKAKALKLGFPKFKSKKDSYQSFNIPQNVKVKENKVYIPKLKERIKVKFHRPLPQNSKIKQATISRKNSKYFISILIEEVITIAKKPFKVIGIDMGLEHFVIFSNGEKISNSKWFRKMEERLKVLQRRLSRRVLYSNNWYKLKAKISKLHEKILNQRDDFLHKVSVVIAKQYSLIAIENLSVKNMKKNHYLAKSISDVSWSKFVEFLKYKSKWYGAKLIQIDKFAPISKTCSVCGYVIDKFPLSKEYGTCLLFAIPLTDRRCQCVH

SEQ ID NO: 25253 - protein, 202 aa, unknown
  TnpB Polypeptide
VVSVDLGITRLATLSDGRILENPKPHERSLEGIRVLQRTLSRKRFLSKNWLKVKRKLAKKHEHIKDFRRDLFFKLGALLAQEYDVLVLEHLNVQDLIQNGTKKRRLRLYDSSFSELRAVLEWQFRKRGKLVLPVPSYNTSRECFLCGGINKGLTLEDRVFHCAHCGFTLDRDLNASLVLLKAQGGCHPLCLGSFAQYLPYPP

SEQ ID NO: 25254 - protein, 363 aa, unknown
  TnpB Polypeptide
MKTYKYKLKLTKEQSNRVDSWIGTSRYVYNLALETKIEAYKQRKISLSKFDLMKQLVDLKDIEWIKDVPSQSLQNVIERMDLAYQSFFKGGGFPKWAKRNQYKSILLKSVKQNEKGFTLPKLGFVNIFKDKMPSGALKTATIIKENNSYYLSVTFESISENLYPTNENQVVGIDMGISYFLVDSNGCFVDNPRHTITYQKRLRVKNRSLARKKLGSNSRLKTKMELSKLHLKIKNTRNDFTHKTSIQYVKENSLIVVEDLKVKNMIKFGHLSKHIADVSWSDFFNKLEYKSKIYDKTFVKINPKYTSQKCNSCGHIAKENRLNQSKFECVCCGHKDNADSNASKNILAEGIRLIRQRDTIVCA

SEQ ID NO: 25255 - protein, 382 aa, Streptomyces sp.
VPGWLEHSAGTWTVRKRELTGESSSRWAGSITKATHDQWAPARRCHLAHIQSLEAGVHTLMHRLSRPVGEKGTRKAPGGYRSQHEWFMKSRRLHTLAHRLEQVRADWEAGRVHVVRGGRRLLNTRHHLAAAKLTEAAWRRRWEAERWFLAADGESGKRFGNETIRVTPDGEISIKLPAPLAGHANAPHGRYVLACRVRFAHRGAEWADRVEADRAVAYRIHYEVTRDRWYLTASWQRPAVKTIPIEAALAHGVIGVDTNADHFAAYELDVHGNPVGDPHRFSYDLTGTAGHRDAQIRHALTRLLHWARQRGVNAIAIENLDFAAEKTREKHGRRKRFRQPGPRTRSVRAGRGANAEDQNAQHRSGRSTEHGSWQQDPLPLSL

SEQ ID NO: 25256 - protein, 394 aa, Streptomyces sp.
VTGSHAKRTFKYRFYPTAAQAAELSRTFGCVRKVYNLALQARTEAWTLRSERINYNATSAMLTAWKKSKEFAFLNDVSSVPLQQCLRHLQAAFAGFFARRARYPRFKSKKQSRRSAEYTTSGFRFRHGELTLAKMSEPLDIVWSRPLPEDAAPSTVTVSQDAAGRWFVSLLIEDPSVKPLPQTDAAVGVDVGLDHLLTLSTGEKISNPRHERKDRARLALAQRRLAKKEKGSANRAKAGRRVAKIHARIADRRRDHLHKLSTRLVRENQTLVIEDLAVRNMVKNRRLARAISDAAWSTFRNMLEYKAEWYGRELITVDRFFPSSRLCSNCGSLRQRMPLNVRTWTCDCGTTHDRDVNAAKNLKAAGLAVSVCGAGVRPQRRTPGGQSAVKQKAL

SEQ ID NO: 25257 - protein, 402 aa, Microcoleus sp.
MKARYQYRFYPTDQQKQSLAQLFGCVRVVWNDALALSKNSKYPGYNVLAKILTLSKQTEERIWLKDVSSVPLQQSLRHLESAYKNFFDSCSGKRKGKKVGQPRFKKRMNSQSAEFTKAAFSLNNKTVYLAKIGDIKPIWSRELPANPSSVKVLKDCANRYFLSFVVEVEPVNIEAKNQSIGIDLGIKTFAFMSNGEKAESLSYKELDKRVRKLQKKLARQQKDSNRRRKTRIQIAKVHNQIADTRKDFLHKLSTKVVSENQAIILEDLNVSGMMKNRKLSRVISQQGWAEFRTLCEAKCEKFGRDYVVISRWEPTSQVCSECSFKWGKLDLKVRTIKCLNCGAEHDRDENAAKNINKVGMGNLHDSKRTQRQGKTTSVASVGEVSRIPGPVCRGVFQDCAMR

SEQ ID NO: 25258 - protein, 378 aa, unknown
  TnpB Polypeptide
MLIILIHKLKEHLNYYPINEGLLYSLLVDKLNLKRTKDENKIEKLNKLLEFINSDNSLSELLNSLKKLKRELSNNYAIQSIIRQVCKSFKSYRKAYEEYLKNPNKFNGTPKPPKAKKLKNIDKFTVELNKLSFKVIGNVLHIKLYQNKRVKVKLPTYIKELSSVRITYYLDFAYIDIVYDKHIEELKPLNNYKSGIDLGVENFATIVSNGEVIPSLVIKSGHLKSFNQWYNKLLSNLKSELDLTKNELKKKSNNIELITKSDILIKRLRKENYQLFTPYMVDDSFKIVKYRLPLKKKKFGIYEPNNSNLKVQLDMAIVPIIATDDTFRRVGFGKGMYDRFFAKLPYKPITIFTSLELCKCDTIITSSYDIEADYIITF

SEQ ID NO: 25259 - protein, 437 aa, unknown
  TnpB Polypeptide
MAVTAEQLQDGTFRFHGRAKDITKQKNAALKPFGKQLLNCGLVLRLLPAPEQAQVLNRQIGNARFVRNRYLEERIRLYQEEKKSLSVSDYKKKYLPKLKEENPFLQESDKFALELAIQGVDSAYRNFFSGRAAFPRFASKYKPGGNKYSTQYTNGNLELVQDQDGLPCIKLPKVGKIRIVVPAGKTFHGLCPSGTVIRKATVSHKGDRYEVSLGLETVIDEVRPVEEVSISDILSADMGLKDFAVLGGKDGFLKVRNPRWIKLHERRLRRFQKALSRKKYDRETHTGSKNWQKAKAKVAREQRRTADQRKDFQHKLSRCIADSCRVFICEDLNVKGMMKNRRLSKAVASAGWYGFFQKVKYKLERSGGRFLQISRWFPSSQTCICCGYRNTDVKKLSVREWTCPKCGSYHDRDGNAQQMILKEGIRLLEEQNVTVIM

SEQ ID NO: 25260 - protein, 459 aa, Mycobacterium sp.
MARLKVPEGWCVQAFRFTLNPTQTQAASLARHFGARRKAFNWTVTALKADIKAWRADGTESAKPSLRVLRKRWNTVKDQVCVNAQTGQVWWPECSKEAYADGIAGAVDAYWNWQSCRAGKRAGKTVGVPRFKKKGRDADRVCFTTGAMRVEPDRRHLTLPVIGTIRTYENTRRVERLIAKGRARVLAITVRRNGTRLDASVRVLVQRPQQRRVALPDSRVGVDVGVRRLATVADAEGTVLEQVPNPRPLDAALRGLRRVSRARSRCTKGSRRYCERTTELSRLHRRVNDVRTHHLHVLTTRLAKTHGRIVVEGLDAAGMLRQKGLPGARARRRALSDAALATPRRHLSYKTGWYGSSLGVADRWFPSSKTCHACRHVQDIGWGEKRQCDGCSITQTTTPRSTSHATRNHLASSAQLGPPSSVEPTVRPGLARRVAVKRGRQPATRPANNPETGCKSSDH

SEQ ID NO: 25261 - protein, 392 aa, unknown
  TnpB Polypeptide
MYAIKREVKLNNKEASLMRGIAGFKRYVYNYCIDLLVGSWKFEDIKVSDSKRIDAIKKIFTQVTMQKPENAWMKKYPSTVYQSAFMDVKDAFARWRKGLGDFPKKKSKKKGDSFTVYKTSGVYPEKGKPALPFTNRVVIEAGKSIRLPGLKAIRLKERIRFSCSSQTFTVSRTADRWFVSFVLDAEKIPPVVHPILIVGVDLGVKYLATVSDGTTYEMPVTTKQAKTKLGKLSWRNRNKVLGNRKLGIRASNKARRYRIKLARQHAHLANIRQDTIQKMTTDLSRKAYTIRIEDLNVSGMIANHKLASAVSNNCFYEIRRQFIYKQAHYGTKVELVDRWYPSSKTCSRCGHVQDMKLSERVFSCQKCRHAQDRDVNASINLENAPENKVRLA

SEQ ID NO: 25262 - protein, 397 aa, unknown
  TnpB Polypeptide
VKTIFRTYHFKIIPNQEQKILLDKHFGCVRFVYNHFLNERKEQYQTDKKSNNYYTQAATLTELKKKEGTLWLKEINSQSLQFALRCLDTAYVNFFRGNTRFPKFKSKKKKNTFTVPQFAILDENKLYIPKFKSGIKTIVDRNIKGKIGKCAFSKTPTGKYFVSILSEEQYQPKEKTGAICGIDLGLKDFAITSDGIRFKNNKYTKQYERKLVKAQKHLSRKTKDSSSFERQRRKTALIHEKISNSRMDNLHKVSHQLISDYDIIALEDLNIKEMVKNHKLAKHISDASWGTFVRLLEYKADWNDKQIIKINRWYPSSKTCCECGWINQDLNLSMREWTCKNGHILDRDVNAAKNILKEGQKIISSGTGDYTGGDSNKTSVKKHKSMKPETHTLGMTG

SEQ ID NO: 25263 - protein, 430 aa, Streptomyces sp.
MVALVNQAAPVKNQFGHRARLSLSPAGVRAVDEQAHAARTLWNLLHVWWRMMPREKRTLAKADAAIRQARKDIDFLADLPAQAAQAVLKTYFRAWKNCWEGRADAPDFKGRFRSVMSVDVPQGRDLHITRVHRRWGMVNLPKVGRVRFRWTRDLPVGNRADAQNRITGARLVKDALGWHIAFRVQTLENKPEPHQGPDVGIDMGIAVPLALSNGETFEHGEWLTEKEKARLLYWEQRAAQRKKHRGPGERASRRLQHTYDRIAGLRAKAKRRALDWQHRTTTAIARSYGTVVVEALTVTNMVKSGRGTIEAPGKNVAQKSGLNRAISGEAWGRTVTLLTYKTAQRGGILVKVPAPGTSQRCSVCGLTTPGSRESQAMFVCKNSACGWTGNADHNAARNVLHLYRAGLALVPAAGRAVVRRAKRVKPATAR

SEQ ID NO: 25264 - protein, 344 aa, Lactobacillus sp.
  misc_feature (273)..(342): Xaa can be any naturally occurring amino acid
MVLKAFKLRLYPNKTQRNQIHVNFGCARFVWNQMLNMHIERYKNNKKAKFQGRYSMDVMLKALKIEYPWLKQAESTSLQRVNRDLDDAFQRFFNPDLQNGFPRFKSKKNTNQSYTSKFVNNNIRIVDEHHIKLPKLGLVYFKAGRILNGKIRAVTVRVNSRKQYQASILVESENQTFKKTKKSVGIDLGLKSLAITSDGQKEDILKVDDRLNKQLRIWERKKSRRYENAKKAMAFDEHDKVLFPRTDLKQFPRYQQAVRTVAKLKKHIAERRXXXXXXXXXXXXXXXXXXXXXXXXXXXXXXXXXXXXXXXXXXXXXXXXXXXXXXXXXXXXXXXXXXXXXXGF

SEQ ID NO: 25265 - protein, 421 aa, unknown
  TnpB Polypeptide
MGEYRVLTNEVLREALLTSKSSRGALSRFARDRAFVHHLTGQHAVVAANLALTLAKAHRRRLRRGGSARIPYVRRRFVRTDPKTFHFDPDSGKIRLSLRNGEWCSWSVRVARYHRTVLAAPGVRIKQLHVNEERVVLYLEREAPDPYSPTSLLALDTNESSLDGVFVGAGRARWVRAFFPEVRTIQARHFARRRFLARKKAHDRRVARLLLSNEGRRERHRIRSRLDVLSKRLVESAARRQAAIALEDLSKLPLTKRRASSRFRRRLSSWPRSELHRQIEYKAAERGVPVYWVNPFRTSISCPRCGEITRPRSRVGTMFDCAHCGWSKDRQLNAGANVARTVLRETAELGGLRLDPDALSNDAVRPLFPREKSSGNGRSGRRGRDRLEGGTPSVRLSISPKAPTGNAESRGRGAVAISVRR

SEQ ID NO: 25266 - protein, 389 aa, Methanosarcina sp.
MKRGNRYRIYPNKEQKVLMEKHFGSTRFVYNKLLNIKSTLYRNCRISISEFDLNNYLLVLKEIYPWLKEINAGALQQASRNLNKAFTNFFNFGFGYPQRKSKKDHHFSFQLPQHYDLNVEKSEIKLPKFGWIKVKMHRDIFQGEMKTLTVSRTPTGKYYISILTDDGIELPELEPFSHATLIGVDVGLKTFAALSTGEKIDNPKFLKNSLERLKCLQRRVSGKVIGSENRRKAVHKLAKLHELISTQRHDFQHNVSKKLISDNQAIAVETLNIKGMMKNHSRAQSTGDAGWYSFVLKLQYKAEWLGKTILKIGQWEPSSKTCNVCGYKYQDMTEEIREWQCPDCGTNHDRDINAAINIKKFALLGQEVEPVDSQRLLWRMKQEAPPSKA

SEQ ID NO: 25267 - protein, 418 aa, Natronorubrum sp.
MEYSNRYAAYPTQTVATELERHIDIHRQAYNYTRYEYENVDADNIGSAYKHHYRLPDWKDEFPVFSEVNSKALQRTVTRFYQNLSNLFEQKQNGNKVGWLKWKSPKEFQSMTYSQSGFELKNTSGRHATLELSKIGDIRIRYHREIPDDATIKEVTVKKETTGEWFVSFGLVTDDENLPEKLDVDSLDTSNSIGIDLGILNYIHTSDGLRVDWLDLDEEYERLRREQRKLSRKEEGSNNWEKQRVGVAKVKRRIQRKVLDFQQKLTTWLVREYDAVFVEDLDVKPMLEDSHNARNKQDAAWRQFITLLEYKAKLYGVHVEQVEPRGTRKECASCGAETEKPLWVREHSCPSCGFECDRDANAALNVLQRGFEELGLGWPESTPVETALPTDASEFSEVSAKRVIESGSPTLNEAKALA

SEQ ID NO: 25268 - protein, 375 aa, unknown
  TnpB Polypeptide
MNKAIKYRLYPTAEQTVLFAKTFGCCRKVYNLMLSDKIKSYEETGKFITVTPAKYKTEYPYLKEVDSLALANVQINLLNAFKNCFSKSRKKKNGFPKFKSAKHNKKSYTTNNQKGTVAITHNAIKLPKIGMVKAKIHRQPGANWIVKSATISQERDGSFYVSVLFEFEQTVVNVPISDNVIGLDYASDGLYVDDKGNVGTNHKYYRESHKKLAKEQRKLSRKIGSRKGESKSNNYMKQLHKVNKIYRHISNQRLDNLHKISTEIANQYDIVCVESLNMRAMSNHGFGNGKATLDNGYGMFLNMLEYKLADRGKYFVKVDKWFRSSQLCHCCGMLHPEMKDIRIRTMRCNCGLTMDRDQNAAINIKFEGLRILKSA

SEQ ID NO: 25269 - protein, 367 aa, unknown
  TnpB Polypeptide
MEYSYKFRLCPNAAQRNLIQRTFGCARFVYNHFLSERIAQYRETGKSPTRFQQDKELTVLKQKLEWLQEPDKCALQNAVRNLDTAYKNFFRRVKNGEKPGFPKLKSKRDHRQSYTTNCNIKLFENAVQLPKLGRVKCRVSKEVKCRIISATVSQNPSGKYFVSLCCTYIENEPLPKTGAVIGVDLGLKAFAITSDGTEYPNPRYLAKNQKKLVRLQRQLSRKTKGSNRREKARIQVARLHERIANQRLDMMHKLSTQFIRENDVICIEDLAPKNMVKNHHIAKSVSDASWGEFRRQLEYKAACYGKKVIAIDRFFPSSQLCSCCGYRNTSTKNLAVREWMCPECGTRHDRDINAAKNILIEGLRLLA

SEQ ID NO: 25270 - protein, 695 aa, Beggiatoa sp.
MKPSGSTYPCFVATRIHADLGEIPTKLDTLVDWCEQALTYANCVIVATDDVLFDTVHDLLQPLDSLIHPLLISPWRGVAVPLNAIIAEATLLGGKSLLLQSIEVQTNAINIYRLHAQLHSDTLVVGAKLLDIHGENTGLQPLNGLNSPWNTLALWDLHKLNIVGFLGLSNGFLNAVPAGIEEVATISLLQHMYPDTAQSKLITLSHLHWDQSWDSPERFNYHQQKIVTKLERAEIQLKHLPYPRGRFKMKKAKKVTRIAYSDDLNQAKYDALNEIAKRCGSIRTEVWRNYGSVGGLYARFRPVRQGWHDGKRIKNLPRRLWEPTLNDSLDDIKANREAAKEKVIRHIFKNIDDNEKRKELFKKLKNDSVWVNDDYVRRLMRKYWKHGKNHTFNQIVLDPGCYKCFQHNGKNYIKVISLVKCKRIAIPIGTNYPISGRIRLILRDGGVEIHYTIDNVDDRVCGSQKIGIDKGYTEAFVDTEGEFHGKGLGEILSKESDYLKKKYKRRNKIKAVLGKVEQKNPKKAKRIIKKNLGRKKLNRRKHQHQARVKTIVFTATNRVVDKAKTIVCEDLTKTFRSKSNYGKNTNRRLSGWVKGLMAKAIDIVASRRGSRVVQVNAAYTSQMCSKCGCLGKRTGDKFHCASGCGAVMQADLNAAINVKARLDDKEIHRWLPFHKVKQILLKRCRQSDETGHPVV

SEQ ID NO: 25271 - protein, 451 aa, Thiotrichaceae sp.
MKKAKKVTRIAYSDDLNQAKYEALTEIAGRCGSVRTEVWHNYGSVNSLDAKFRKVRDEWITVGHIKNLPQRIWRATLSDVLGDIKANREAAKINVNSHVFRNVNDKDRRQEFFKKLKNDSVWINNSYGRRLMRKYWKHGTNHTFNQIVLEPGSYKCFHHNGKDYIEIISLTRCQRIAIPIGSNYPITGQIRLILRSSQVEIHYTIDNADERGCGTTEIGIDKGYTEAFVDSEGDFHGEGLGKILSNESDYLKKKYQKRNKIKVILEDLKAKNPKKAKRIIKHNLGRKKLNKRKKRHQTKVKSIVFTAVNEIIDVASTIVCEDLSKTFKSKKLGKNTKRRLSGWVKGLMASAIETVASRRGSRVVLVNAAYTSQTCSKCFCLGKRTFDKFHCTQGCGAVMQADWNAAVNILARLYDKELHRWLPFQKVKPILLERCRRSDETVHPELQLQLV

SEQ ID NO: 25272 - protein, 432 aa, unknown
  TnpB Polypeptide
MTAYEAVKVRLDPTPRQERMLASHAGAARFAYNLMLSRICRQLSLGERPDWTMYAMRRWWNEWKDEIAPWWRENSKEAYNSAFEWLSQALRNWSDSRKGRRSGRRVGWPKYKSKRTSIPRFAYTTGSFGLIDGDPKALRLPRIGRVHCMENTAKLVHGRRIVRMTVSRRAGAWYAALTVEQQPGAHPARKARRRDYPVGVDLGVKTLATLSDGTVLPNPHGYVRARHRLRHAQQTLSRRDKDTNHGRGSNRRYKALDRVRRIHARIAAQRADRIGKLTAWLAATYPDISIEDLNVRGMTRNHRLAKHVLDAGFAEFRRQLEYKTARAGTRLHVIDRWYPSSKTCHRCGTVKAKLSLGERVYHCDGCGLTMDRDLNAAVNIMVAGSAPETLNARGGDVRRPGSSEATQTPVKREPSGHESAVRLGAAPGNRGM

SEQ ID NO: 25273 - protein, 171 aa, unknown
  TnpB Polypeptide
LGERNLATVVALVNGKPTKGTFFKGSKIKEVRHKYFNIRKKLQEKKRLDVVRRLSDKERRIVNHELHIISKKIVEYAKQFPAPVIVMEKLTGIRENFEKGKKLNRRFHSLPFRKLQKMVEYKAKLEGIKVRYINPKDTSKTCHRCGYVTHVEGRELRCPKCGLKYNRDLNQ

SEQ ID NO: 25274 - protein, 444 aa, unknown
  TnpB Polypeptide
VLRSYSLQHECGEELEPLLRAYRDAVNQILEELWDNIEWEKRKVNGKKQWRLLPKYKVDIHSGKYKKKLRDSLLQEWPYAAHWVDSAIKTAYSILKSWRKNYVKGDRRRRRPTAKRLFARAKQTLIKLEGEKLRLTVKPGEYVYLDLSKRYFPLPGEVSSAGLGEPVITLEKVHLPVHYEDTQNEKPSVAWDFNLLSLDGYSPETGWVRIDTKKLASVHISSFEKRRSVQRKASKSKKARKVLSKYSKRERNCARKHQLEIARVIQSLCGPVGLEELKKQGMFTHSRIWNRRISRSDWRSIARILVEKMGEARVKELDPYGSSSYCSRCGWENKDLNGAVFVCGGCPLRINRQLNAAINLYMRMSFGYIVKWVGGRKSIQLRMEGASQREWWDTVVLPSLLGGCVLTGGKRSDPNELVRGLHDAVKPKLYAYDRYNDTYLRIPT

SEQ ID NO: 25275 - protein, 285 aa, Lactobacillus sp.
QTSCQYSKKSKMNVYTGSVRFLDDKHIKVPKLGKLRIKGYKKEIFHDKQNIRIGTVTLCKDPCNRYFISLQLSSDTPFVERKVKTGSNIGIDLNTENFLTTSDNVVIDNPRFYRKMKKRLSKERRILSRRMNRAKKEHRKLRESKNYQKQRLLVSKLNTKIRNQRNNFLNVLSTKLINNHDLIVAEELRSSNMLKNHVLEMSISDVGWRTFLNMLAYKADLYGRKFLTIDPKNTTQTCSDCGHILSGADKLTLTDRHWTCPVCHKHHLRDHNAAINILNKGLTKQ

SEQ ID NO: 25276 - protein, 517 aa, unknown
  TnpB Polypeptide
MRYAYQRLLEGEKRKDLKKHLSKLFSINTRYSDDAILSAQSMITSCKERGQNPKKLIFGSRKLFEQLKKNHLTGKRRKQLKTKWRESRQGNLYSRGDKTKQGNLNLRFEWINDELYLRINTGNKQYIYAKVIRDVKREKDKWIEFMFMLENAYQTNQWFPYSVRLKTKNGNIYAFISIDEKLPPITIKKDNGIIGIDVNAYPFHLALSFTSKDGNLEKYQSISLNELLEVNSEKRQYLEWQVAHKIIEIAKEENKAIAIENLEKLPKGKRGDGFVKLRIRLQKWSYKRLLNKIEILAKRNGIELIKVNPTYTSVIGKLKYSPQYNIDKDIAGAYVIARRGLGFKEKLPKNYKELLNDTDFLSYTIVRIEDNIKKLKQKLKEEKNEYKRNKLKTQINKLRKNLKTLQKHLESGKSKTATQKPVNQWKEQVRGLPAGRHKSWQVLSIALAFCCLEKSYRDFSPLKRVIISKDWTAVANRLAPACLAAGTMTLPKYRLLGSEVSEMAEYKYPNPNCARFA

SEQ ID NO: 25277 - protein, 402 aa, unknown
  TnpB Polypeptide
VQLRYRYRAYPTPSQAQMLARTFGCARVVFNDALRARQDAYAVGEKVSDTEVQRRVVTLAKSTPHREWLGEVASVVLVQACRDARMAYRNWFDSLAGKRKGRKVGHPRFRSRKDNRQAIRLTRNGFGVTATGVRVAKVGTIRLEWSRELPSIPSSVTVIQEADGRYYASFVVQSQDQALPASTTEVGIDLGLTRLATLSTGEVIANPRHLRKTARALARSQRSLARKVKGSNNRRKAVKRVAVLHRKVRETRLDGHHKLALRLIRENQAVHIEDLNITGLGKSNLAKSVHDAGWAILVRLLQEKADRYGRQVVKVGRWFPSSQLCGGCGVKDGPKPLAVRTWTCGSCGAEHDRDVNAARNILVEGRRVAAGLADTKNACGVDVRPGPVLAVSREAGTRRSAA

SEQ ID NO: 25278 - protein, 404 aa, Streptomyces sp.
VRTTHAKRAFKYRFYPTGAQAAELSRTFGCVRKVYNLALAARTEAWTRQERVNYNQTSAMLTAWKKTEELAYLNDVSSVPLQQALRHLQTAFANFFGKRAKYPRFKSRRKSRKSAEYTTSAFRFRDGELTLAKMREPLDIVWSRPLPEGAFPSTVTVSQDAAGRWYVSLLCEDPSVQPLPATDASVGVDVGLDHLLTLSTGEKVSNPRHERRDRVRLARAQRQLARKARGDGANRAKARRKVAKVYACIADRRRDHLHKLTTRLVRENQTIVIEDIAVRNMVKNGSLARAISDAAWSEFRSILEYKAQWYGREVIAVDRFFPSSKLCSVCGALQDKMPLNVRTWTCDCGTTHDRDVNAARNILAAGLAASACGDGVRPQRESSRTGRSSVKQEPQRATAGIPRL

SEQ ID NO: 25279 - protein, 391 aa, Methanosarcinales sp.
MNRAPLSIFRWPITILGNKAYYSIVPKVFRYRLKPTKSQVAILNRQLDLCRWTYNQTLALRKNAWENEDRSISYFESKRMLPIWKESNPELTEVYSQVLQEAVQRVDLAFKSFFRRIKAGEEPGYPRFKGRNWYDSLTYPQSGFTFVKSVLHLSKIGDLKVWLHRKVEGTIKRLTIRRSATRKWYVSFLVEDAPKEAVPDSEKAVGIDVGISNFAVLSNGVFIENQRYLAACEEQLSNAQSKKDKLPHKSPERKKAAKKVSHIYERLGNLRDNFAHQLSHQIVNGYGIICLEDIDIKNLIEKKPYMAKGVLDASWNRFRTCITYKAASAGRKVVLVNPAYTSQMCSGCGSIIKKDLSERVHNCLKCGLIMDRDLNASKNILRLGLQSVANA

SEQ ID NO: 25280 - protein, 268 aa, unknown
  TnpB Polypeptide
MVKAIKVMLIPNNVQKTKMFQYAGASRFAYNWALAREKENYEKGGKFISDSELRKEFTKLRHSDEYAWLLNISNNVTKQAIKDACTAYKNFFKGLQKFPRFKSKKRSMPKFYQDNVKIQFSNTHVKFEGFSSSRKANKQKMNWVRLAEHGRIPTDVKYMNPRISFDGLNWWISVCVEFPDCKETLNDDGVGIDLGIKDLAVCSDAVKYKNINKSQKVKKLEKQKRRLQRSISRSYEKNKKGESYCKTNNVIKKGKTFIKTKSQINKHP

SEQ ID NO: 25281 - protein, 399 aa, unknown
  TnpB Polypeptide
MSRYRLLPTPAQQAVLRDHCGHARYVWNLAVEQHSHWHPGRKSAPGYLEQCRQLTAARAENPWLAAGPQTVQQQALRDFIRAMTAFFDPGNPARRPTWHKAGRHEGFRIVGRRGQQWDVRRLSRNTGQVRVPKAGWVRFRWSRPVPPDAKSYRVTMDRAGRWHVAFAVVPTPVPAPGNGQAVGIDRGVAVSAALSTGEMLHCPSLTAREPIRLRRLQRTLARAKRGSNRRGRVKHTIARLRVRETDRRKDWAEKISTDLARRFEVIRVEDLQILNMTRSAKGTRENPGRNVRAKAGLNRGILGSGWGLLVRRLADKAPGRVEKVSSAFTSQRCSACGQVDRDSRESQAVFRCTACGFACNADVNAARNIAAGLAVTARGGDGAARPVNREPHLLLPLAQ

SEQ ID NO: 25282 - protein, 399 aa, unknown; identical to SEQ ID NO: 25281
  TnpB Polypeptide

SEQ ID NO: 25283 - protein, 229 aa, unknown
  TnpB Polypeptide
LLAHRKGEVDLMLVRGNWYLAVVCDIDAPGLIETTDVLGVDFGIVNIATDSDGRSYTGAAIDAIRTKLSRRRGGLQKRDTKAAKRRLKKLSGKQRRFQTHSNHCISKALVLEAKRSGRAISLEDLKGIRSRVKARACQRGRLHNWGFGQLRTFVAYKARLAGVPILFVDPRDTSRTCPACGCVDKRNRPNQSTFSCVSCGHAGMADHVAALNIRSKARAAVAPPAVLGA

SEQ ID NO: 25284 - protein, 239 aa, unknown
  TnpB Polypeptide
LPSIAVPYLIPKEELKSDDKLKGKAGIDLNVDHYNIYDDKHKLIDLNMRQLKFYYDWIKHYQRLLARKREFDKKNTGSRNYLETRAKLQRDYRRVADIQNDFLQKLVLGLCQKYGQIVIEDLDVKHMKMGVASKGLHRSMFGTFRSILTYKSEQYGNDLVVADRLYPSTQICSKCQYRKTGDEKITLWGNKKHHTKHNEYVCYNCGNNIDRDENASINLYQYLDSKWYKEKSRAEKQMA

SEQ ID NO: 25285 - protein, 400 aa, unknown
  TnpB Polypeptide
VHRAFTYRLDPTVKQAQGLKRLMALQCELYNAALEERTMTHEWLRQRLSTKRVPSMFDQFKTLTGLRELHPEFGPFGITVCRGTLTRVEEAFQGYFRRIKAGQKPGYPRFRSASRWDSLSWCGVSGWKLEESSHRLYLQGIGHVKANLHRPLRGSPKTLTVRRRGRHLEATLFCADVAKAELAPTGKSIGIDLGVGALAATSEGTLHPNPRYRRQFAPGLALAQRKRSLHRRGSHRYRKATAEMARLREKEANRRRDGLYKLSRRLVVENDLIVHEDLKTSNMSRSAKGTVENPGYNVAAKSGLNDAIMDSSWAMLIIMISYKAEEAGRGVAAVNPRYTSQRCSDCGHIAAENRVKEKFACVSCGHSEHADINAARNVLKAGLAQGGNEARLGNAEPVSR

SEQ ID NO: 25286 - protein, 400 aa, unknown; identical to SEQ ID NO: 25285
  TnpB Polypeptide

SEQ ID NO: 25287 - protein, 465 aa, Moorea sp.
VIDIAVDDAQKTRNNQVQSTQVIPVVGMTKSIELELLQVMKKLGIVRAESYNKLGSINHWGMDWKKAIPEIKSFRTPDTLGLPAKLMDWTINDVAKAITAQQAACSDAVIKKIYKRFPGKDNQKTRKELCKQLKSCAFINNPLLHRLVRKDFQRGHSWVDNQIVYQQVGYRCKRLSRNTYELELAGLTRGKRNKVLVRCNRQIRGQIRLIYNQLLQRFEIHFLVNHGKVEITAERRHVGVDKGYTEAFYDSDGQAYGKGLGKAITKKSDRICAKNRNRGKLWALHRKLEKLDPAKSARILENNLSRKTENKRYRQNQSEIKAIIGAASKSLFSGESLLVFAVREAWPTALNLTQPIKNKRQSKAMSRKLNSWMKGVMRDSLQKWANWTGSVVTEVQPSYTSQIDSVTGTLLGKRSGDSFTRFNGVVLCGLFLVGAAYPRQGMTRGFAVKTPNSNYLMDGGESPPH

SEQ ID NO: 25288 - protein, 407 aa, unknown
  TnpB Polypeptide
MFVSLQFKLELKKEDREKLIKLMRKQSSAIHVAYNMLRELEKEKTKNPRAQIYHRLKQLFPELPTKYIDSAIYKAKQYPTDKPVAFVGKKLFEKLCKNHLTGKAREKLKKQWKERRQGTLISIGSRSDKGNRLMRFEDLNGQLHLRITTGNREFIYAKVLREPSNSKDKWLTFMAMLLESWQTQSYFPYTVELKLRDGEVYGSVSFEIPTPEVRYIKENGVIAIDTNASPIHLAIAEVSKTGELLRYRTINLHHLLGLSQDSKDHQEWILAHQIVDIAIQKGKAIAVENLKKLKKGMRGDGKAELRKRLHQWNVKKFLQKLKRVAMLNGVEVVGVNPAYTSVIGMLKYAPQLNIDKDIAGAYVIGRRALGFKEDMPENYEKLLKDKAYLEFALEKYEKREKELTELI

SEQ ID NO: 25289 - protein, 481 aa, Deinococcus sp.
VSKNKSKLAALRRSGEPPGRSAAPTSKKPPEYIQPTVVLTTPIHPSVDQAAQLHEMWRVLLVAQHALITYLHHRAAGGAATLTAIASGQWHEVPPLSRSGLPDLTLKALDAEFRVTRDELGWGQFVASSALSWMVAETAREWRLRRIGAEPGPWTVDCALELHLDNSVQIVDPVTLSVVGLAGGLSADLFLPQAYWRAMIRRQRRRVEAEGTRLDALERRWLDQGDGGAAAELFSRRARVGLRSALPDPGAPSDRDLVSRERVVFRHVPGAEGLPPRWAAQWAFGVADVPFPRWTQDDVIGVDLGYQYPFAVATTHQAALVPRPFRGDFAAPTLNAQQGNHLQPPDLARARAEHRRSLFMRLLPIYEAQLALVLRHRVVALEQMAWGGFSRRGSRFASYAQDVGLMSWLDWVDVLAQHHGVQVLKIQPAYTSRTCSRCGWVGARALSGKRFCCVVCGYTLAADANAAAVIRARGQALLGGL

SEQ ID NO: 25290 - protein, 430 aa, unknown
  TnpB Polypeptide
LLIHQKIKLNLNPIEKEILDNQLKLCIKLSNLILESFYNHEREDFMFGHIVSVTFLKKVQHKILNEHPYFKIIHIDTLDRIIYKLKKSIETSLKRTNSLPKYKQSRKNSFLLYYLGSTLSSNIINKSIEVPLGFVLSNNTPMQLKINCKLSSRIHKRENSIISNYEIVKKYNHYFLLVCINKRNIKSREKTGKAISIDPNHKNFFVGVDSEGKSIEFQNLYQLKYFDKRIDEVRSKRDRCSKKSKSYLTLSGTEHLIPSKRYERMNNILLELYHKRNSQITHALYSIANYLVQNYDQIAIGNYTPTSRNIKYREMRRKMINQTIISRLRDTVKYVCQRDGKKYILVNEMFTTAKCFNCGNLVKKDPEIRIFTCDKCKRVINRDINSAINIGIKANILSRQDYVDLDLSLPTYALSFNLQKQKIDFLKLKG

SEQ ID NO: 25291 - protein, 294 aa, unknown
  TnpB Polypeptide
LDNFFKNRSHFGFPKFKSKRNLKQSYRTPYNRGNASVIDNKHLKLPKLGKVKTKRFDMPETYKTLYITVERTNTNKYYASICIETEVQPLPRTGKQVGFDLGLINLLIGSDGTRYERPKISYAFKDKLANEQRKLSKMRTKLERVNANLDECKNYQKQKHKVAKLHEHISNCAKDFNHKLSRKLVEEYDLIAMENLNVNGLIKNHSLAYSIADVRWSQLVNFIQYKCHWYEKKFVQVDRFYASSKICSCCGTYHKDIVNSLSVREWICPDCGTHHDRDINAAKNILIQALSVGV

SEQ ID NO: 25292 - protein, 452 aa, unknown
  TnpB Polypeptide
MRNVSEEERLAKNAKIREHGKETREKHSTWKLTIIECKLNEKSFSKLQFEQLQMQFVEAKWLWNDWIGRTDKQSQNYNEQFDTTKEKWQYRPLANQKVQVMTKDKTFEERNCSHIGSQIAQDVIDILRSNIRTLSTLKKKGLQVPRNINYTSEVTSLNLRQYGVTYSFPSQKKIKIQGIKKPFRLRGLEQKMYKIPVWDEFKNGNIDFANAKLVHKPTGYYVQITAFIKPDLLKANPKIEKALGIDFGCSTSFTTSEGEYIDIKVEESEHLKMLQKKLARQKKGSNSRYTTIQLIRKEYQKQTSVKNDKAKQTVAKFKQYDTVVIQDEQLKNWHKNGHGKAIQHSILGRVKSELLKLPNVVVLSKTVPTTKMCTKCGCYHDELKVWNRVFKCDCGVEMERDLHAAKNMLWFYENNIGVERTKFKRVEIEALVKAALNGSEPTSPGKLENTHF

SEQ ID NO: 25293 - protein, 547 aa, Kitasatospora sp.
VAGPKGKIRRIDAPFVSLGPSGVTIRDRLKGLTSGDEKVLRLVGAHMGALASGDLKARCADGLEHGNETWAARKRDLTVRSSSRWAGSVTKTTHDQWALSRRGQVAHLDSLDAGIRMLRQRLSLPVGEKGTKRAPGGYRSRHEWFVKSRRLHLLEERRAQVAADRENGIVHVVRGGRKLLNTRHNLAVANLTEAGWRRRWEAARWFLSADGESGKRFGNETIRVAPDGEVSIRLPAPLAEYANARSGRYVLAAKVSFPHRGTEWADRIEGNRAVAYRIHYDVARGRWYLDASWTRPVVQTMPLAIARAQGMVGVDTNADHFAAWHLDVHGNPVGNPRRFPYDLSGSADHRDAQIRHAITRLLHWATHRGVAAIGLENLDFTAETTREKHGRNKRFRQLISGIPTGKLKARLVSMAAETGLAIVAVDPAYTSQWGAQHWQKPLATPRRTTTRHDAASIAIGRRALGHPVRRRTAPPRAHQSDAHGHRTVQAQPGSRGREETRRPVTERAHDARSRTGTTRTRATSAPKPVRDARSAKTWVQDSLLPTD

SEQ ID NO: 25294 - protein, 344 aa, Nitrososphaera sp.
MSEYDMNYALTELKEQHPWLRNYHSKMLQMVGKQVATARKTAKRKLSYRYHDRFNTFTYNQTGFRMENNKLALSKIGSMNIVMHRQPINVKQVTICRKNGRWYAVVACEILRKQYSSIRYSKPVGIDVGIAKFAHDSDNHIVENPQFLTKMLKPLRRAHRRVSRRQQGSSNHRKAKHMLARLYEKINYKRRDFLHKTSTYYCSRYDLIFLERLRVANLTRNHKLARKILDASWSTFNTMCQYKANRMVEVEPAYSSIDCHRCSQPVPKSLAVRTHSCPKCRAVLDRDYNSAMNHLQNGLEMLHLPVERREITPVEIPKESLKQEFHIVTYGLPEKRAQACPGSQ

SEQ ID NO: 25295 - protein, 525 aa, Chlamydiae sp.
MQQVESNQFTYHTRFYVDASSQAVLGAYASLMSCIERKLFADICKGKKHQNLKSTYITEFGITARQFNSIRIGLEGKIDSVKNLRKTRIIELGHQIAALKERIPKIKKAEQANKIHQKKRRLFNLQRKLDQLKQDEASGTVRICFGSKKLFRAQFSLAENGYSSHEEWKKNWEYKRNNAFFLIGSKDESSGNQSCTATVAEDGSITLRLRLPQALVGAYGKYLYITNVRFGYGHDVIVANILKCITKGEKAGVAINYRFQRDEKGWRVFVTTPYTPPECITHTDRGVIGVDINSDHIAITETDRFGNLINSKSIPLVCYGKTTNETKALVGDVAKEIVNQACAAQKPIVMEKLDFQKKKMTLRETRSTKFSRMLSSLAYSTIIAALKSRSLRFGVEVYEVNPAYTSIIGRVNYAARYGLTIHAAAALIIARRAIGLSERLPRHQGKIPDGKGGYVTLSLPVRNRDKHVWSSWRQVLRQFQVVLAAHFQAKKKILKPVQTCLCDGASPLNLVGAIPTHESLVKLLD

SEQ ID NO: 25296 - protein, 361 aa, Moorea sp.
LNSQARQSAADRAWQSINRFYQNCRAKIPGKKGFPRFKKHSRDLEYKQTGYKLSDDRRKIKFTDGFKAGEFDLWCSQRTLVYYSEQQIRRVRVVRRCDGYYCQFLINYERKEQHQPTGQVTGIDLGLKEFYTDDQGNKVKNPRYLRKAEIRLKKAQRRLSKRHRKGKKQSSNYHKQRKKVAKLHLKVSRQRKDKAIKEALALVQSNDLVVYEALKVRNLGKNRKLAKSISDASWYQFTQWLNYYAKIYGIVCVAVSPHFTSQDCSVCGSRVQKSLSTRTHKCPNCKRVLDRDLNAAINILKKGLQYLGKYLNGSVGHTQTDPNALGESDLWVISGNIENLSRLVEQGISNSDVERIPRYNL

SEQ ID NO: 25297 - protein, 427 aa, Moorea sp.
MLVVEAKLKNGTPNQYALLDDAILTGQFVRNKCVRYWMEHQGVTRNDLQKLCAVLAKDKTTPWVNKLNSQARQSSADRAWQSIQRFYLNCRNPSVKKKGYPKFKKHSRSVEYKQTGYKLSDDRRKITFIDGFKAGTFDLWCKQKTLVYYSQRKIKRVRVVKRADGYYCQFLIDYERKEQHQPTGQVTGIDLGLKEFYTDAQGNTVENPRYLRKAERRLKKAQRRLSKRHRKGKKQSSNYHKQRRKVAKLHLKVSRQRKDKAIKDALALVQSNDLVVYEALSVRNLVKNHRLAKSISDASWYQFTQWLNYYAKIYGIVCVSVPPHFTSQDCSVCGTRVQKTLSTRTHQCPNCKIVLDRDLNAAINILKKGLQYLGQYLNGTVGHTETDPNAWVESDLWILNGDIKNLSRLVEAGISNSDVERIPRHNL

SEQ ID NO: 25298 - protein, 297 aa, Thioflexothrix sp.
MLEVTKNAPQKAITQLGEAFKRFFKGEANYPKFKKKGIHDSFGITNDQFVLNDTLNRIRIPRLGWVRLQESLRFNGKILSATISRQANKWFISIAVQIDDYSHLRKAENQGVVGVDLGISSLATLSNGEVITGSKPLKTLISRLKKLSKSLSRKQQDSSNWYKAKAKLATLHARISNVRKDTLHKLTSNLTRRFSIIGIEDLNVKGMLSNGKLARSIADMGFYEFKRQLQYKAQMRGNLIVIADKWYPSSKTCSACGGIKQDLTLKDRVFKCECGHVQNRDLNAAINLANYAVSYTV

SEQ ID NO: 25299 - protein, 423 aa, Burkholderia sp.
LSAHYNIICQRDWPATSSSDSARTPSIRSRRKGASFAFATGFRHIKYRARRVMSVKRAFRFRFYPTAAQEQQLAQHFGCVRFVYNHMLARRQQRRKDGLKSNYVDDAAALTVLKRAPECLWLRDVSIVALQASLRHLDTAYQNFFARRAGFPRFKRKRAAQSYALMRNGFTLRDGKLTLAKMAAPLDVRWSRELPATPSSLTVLRDAAGRYFVSLLCDDEVAPLPATAKVVAADLGLTHLLTFADDQPPLSPPKFLAELLHRVRRLSRALSRKHNGSKNRDKARKRLARLHARIADSRKDFLHKLSTQLIRENQAVFMEDLCIKGMMRSHLARSIGDAAWGELLRQLAYKAAWYGRTYWQADRFFASSKTCHACGFRHTSLPLNIRQWTCPDCGEIHDRDQNAARNILAAGLLATRTAGRAEP

SEQ ID NO: 25300 - protein, 231 aa, Fusobacterium sp.
ELNKENGLGIDLGIDNLCTCVTNNGASFLIDGRKLKSINRYYNKINAKLQSIKDKQKIERTTLRQKRIARKRNNRIEDYLSKVARIIINYCLNNNIGKIVLGYNEDFQRNSNIGSINNQNFVNILYGKLRDKLIYLCKLYGIEFKLQEESYTSKASFFDGDEIPIYDKENPQEYIFSGKRIKRGLYQTSVGKLINADCNGALNILRKSKVVDLSILYNRGELNTPKRIRVV

SEQ ID NO: 25301 - protein, 421 aa, unknown
  TnpB Polypeptide
  misc_feature (321)..(421): Xaa can be any naturally occurring amino acid
MPSSGQLLKHEERGPISPAIPEEGIYEVNYTNKRTNVVRLLPNGFQERKLRRLSNISSKLFNELNYERRQQFFHEKKVNFNKTWDKYYEKYKEELKVNAQAIMQKNNEAWSSFFSLIKKKGKLQNHMKHIKPPGYWIDKDTKKRKLLLVIRQDRYVINEQNHKLVLKDFNLEIDFAGRLRWYGKQGRLEIYYDETRNAWYASIPVEVGVEKTKTGKESKYIVRGERKKIQIESPKGNKLSSIDLGINNLASIVLNDGTWFLYKGVRTKEDYFYLEKKISQVQSLADKTKNIGEYEAYDELLKEKKRLFKKLMRRLLHLYRXXXXXXXXXXXXXXXXXXXXXXXXXXXXXXXXXXXXXXXXXXXXXXXXXXXXXXXXXXXXXXXXXXXXXXXXXXXXXXXXXXXXXXXXXXXXXXXXXXXXX

SEQ ID NO: 25302 - protein, 282 aa, Streptomyces sp.
MRSCTWRRPRGALRFVWSWPDIDVASLHPTTVTLSRERDGMWYVSFAVDTDDPEPFAQTGDVVGIDLGIKDFAVTSDGQRIANPRHLERKRRNLARYERRKARTCRGSANRKKAARKVAVAHGKVRRAREDFLHKTSTELVRRYDTIVVEDLNVSGMVRNRSLARHISGCGWGTFRTYLEYKTARWGKRIVVIDRWHPTSKLCSTCGHLLARLSLRTRHGTCPDCGTLHDRDTNAAKNILAEGLSASACGADVRRTGTSRTRSAVKQEVPRSDPGRASGGRT

SEQ ID NO: 25303 - protein, 444 aa, unknown
  TnpB Polypeptide
VRLRLKPTSAQAAVFLRAAGARRLAFNWALAQIKANHDQWAAEATYDIPKGERTRPFSYFDLVHAWDATKNTVAPWHGEQSVWTFRYGIRAANTAHTDFLNGKSRFPKFKSRRRDRPRFAVAGAIHLQPGRVRLPKNGWVKLAAPCRAQANLRRLLARGRARILNVTVSRDAGGAWYAAVCFERTLTADPATYNRPAGPTVGVDVGVKTAAVVATSDRTLIETLEASRALRDALPHIKHLQRNLCRAQKGSANRARARRRLGRAHVKVAALRNTRLHQFTAKLTKAHGVIVVENIGTANLMRNHCLAQAIGDQGWGELARQLDYKSVRHGGIVLPAPRFFPSSKMCSGCGAVKSKLPLSVRTYHCDACGLVVDRDINAAANLAAWGERELGVSPVAYSRVGDRHPGGPSAQSVEHACGGSNEPVNTTAGVLSEAGTSRPRASAA

SEQ ID NO: 25304 - protein, 384 aa, unknown
  TnpB Polypeptide
MNKTFQYRLYPTKKQQTMLNQWLALCCETYNAALQERRDAYRMAGITIGYSHQCTELPACKEVRPELAEVNSQVLQDVLKRVDRAFDGFFRRVKDGQQPGYPRFRSSLRYNSLTFKQYQNSFDLHAGKKQKGTLILSKLGHIKMVMHRPLTGIPKTATVKRTPTGKWFVSISVESELEADSLPHSDAQVGIDVGLKTFAYLSTGGQIDNPRFFRKEEQALSRAHRKLSKAHKVTPQRKKRRKVVARVHERVRWRRENFIRQEVVALIKQFGFIAVEALVVRNLIKNPQLAKSIADAAWSSFFAHLLSKAEEAGREAVRVNPAYTSQTCSGCGHRQEMPLSVRVYECSRCGLVIDRDHNGSKNILNEALVAVGRHGRVIPEAPGL

SEQ ID NO: 25305 - protein, 305 aa, unknown
  TnpB Polypeptide
LARLVQLRRQYPGTLRQGHHRLAGAVRRNRVAHDDRRDGSRRSDSCRDKRRAILRLFPCPEGASRTKHPCQETLATAAGAANQRFKGLDKAKRRVARYSRYGADVRRDVAHKTSHTLANNPQHKLFVFETLKVKNMTASAKGTVEEPGKNVRQKAGLNRSILASTWGQTKVFLQYKARRQGKLCIDVPPHYSSQECAACGHIHKDNRRSQAEFVCQRCGHSDNADSNASKVIAQRGVTLLLSGQGGRKEKKKCRITKSKTIGAESSESAAVMPPTLGETTVSRLGGNTPALWSLNRETPATSQML

SEQ ID NO: 25306 - protein, 432 aa, unknown
  TnpB Polypeptide
VSNYGCQQILINPDSSLKAILEFVCGESTKLGNCGTYYSRQLYFKTGRIPTKYDLHRELAINPHFKALHSQVAQQCLTTIAESFKSFIGLLKGIKKGTVTQKPKLPNYRHGGLALITFPSQAVKLKAEGLRFPLGSKVKAWFGIDAFYMPMPSNLDYKSIKEYRMLPRNGCFYLELVYKVEPVESNVDIDRVLGIDHGLNNWLTCVTNVGTSFLVDGLHLKSLNQFYNKQVSNIKANKPQAFWSKTLSAITEKRNRQMRDGINKAARIVINHCIKNRIGTIVFGWNKGQKDSANMGKKTNQKFVQVPTARLKDRIAQLCEQYGIRFVETEESYTSKASFLDSDLLPTFGAKPEGWQPSGKRVKRGLYRSSNGMKINADCNGSANIIRKVATTLGINLDGVSSGALKTPMRVRLWTVHESPVLANQSACGLEA

SEQ ID NO: 25307 - protein, 384 aa, Acidimicrobiaceae sp.
  misc_feature (72)..(73): Xaa can be any naturally occurring amino acid
MATDLQRCRTFRYRLHPTARQTEGFGAQLNFQRELYNAALEERIGAWDWERRSVSYFDQCETLTGLDEVRPXXAFAAFYRRVKSGGTPGFPRFKSAQRFDSLLWEDKSGWKIKFDVSRLYVLGIGEVKANFHRPLGGTPKAITVKREGTKWWLSVRCIDVPALPLAPSGREVGIDLGITNVVATSDGELIVGEHFGGDTKNRLKLEQQRLSSKQRGSRRRRGQVEVVARLHRKVANQRKNAAHQLSRRLVNEYDVIVLEDLAITNMVRKPRAKPDPNRAGVFLPNGAAAKARLNRSIHDAGWGNLASLLSYKAESAGRVVVTVDPRHTSQTCAECGHVEAGNRVTQEAFRCCSCGHADHADINAARNILRAGRALQALACVDRN

SEQ ID NO: 25308 - protein, 370 aa, Acidobacteria sp.
MARKTFKFRLYPNRQQRDKLTATLDVCRELYNAGLQERIEAWKNRTPVRCYDQINQLPDIKQVREDVAGVFSQVLQDTLRRLDKTYKTFFGRVKRGQKAGFPRFKGRNRYDSFAYPQSGFELNGKLQLSKIGNIKIKQHRDIEGEIKTLTIRREAGCWYACFSVEYQPTKLPHNSNNIGIDVGLEAFATLSDGVRIENHRYYKAAQAKLRRAQRKMARRQNKKSKRRHKAILLLQKAYQHVANQRKDFQHKLSTQLVQNFGMIAVEDLNIKSLSAGILAKAVHDVGWSTFLNMLAYKAENAGRQLVKVDPKYTSQECPNCHALEKKPLSERVHRCDCGLTIGRDHAAAFVILGRGLRLQAQTMEQSVLVA

SEQ ID NO: 25309 - protein, 484 aa, Actinomadura sp.
VEDRLIQQAFVYELDPTPEQARRFASHAGAARYAYNWGIQQIAEHLEAFKKAKDAGGELPVYPDHFALCKMWTRHKDDPANGLEWVGEHFVGTFQAALRDAHGAWKKFFDSRGGRRKGRPVGRPRFKSRHRSTASFQVHGSTLRIGEHRMALSRNPAQEGRPKKVRVQVHRSVVLPKIGPVRVKEKTTKLLALLRKAPAVCPPCGGAGKVPAKGGDAEMRRCAACKGSGQVPYARLVRGTVSRTASGRWFISLTVERVRPVRITPTRRQRAGGTVGVDWGVRHLATLSTGEVIDNPRYLEKAQAKLRRAERALARTVQGSRGREKARHRVAVLHGRVAALRLDHVEKATSRLVHDHDRIVIEGWDVAGVLAGGREGLPARTRRTRNRAVADAGIGMARRKVIHKANWYGTQVTVVGRHEPTGRTCAACGQVRAKPVPPAEERFVCPSCGHGDDRRVNSARVLVRLAGSDPAPAAGETPTRDETR

SEQ ID NO: 25310 - protein, 394 aa, Nonomuraea sp.
VRRSFKFLLRPTTRQATALAACLEDHRQLFNAALEHRRTAYGRAGVSVRYGEQSAELKHIRADDLDGQGRWSFSSQQATLRRLDKAFRAFFDRVKAGRTPGFPRFKGRGRFDTVEWPKDGDGCRWDSQPGHPTATYVRLQGVGHVRVHRHRAVKGRVKTIAVKREGNRWFVVLSCDDVPAGPLPVTGAVAGIDMGVASLVTTSDGQHLSNPRHLAASSDRLADAQRALARKERGSKRRRKAVARVAALHAKVRRQRLDGAHKAALALVRTYDVIVHEDLRIANMTRSASGTTEAPGRNVAAKSGLNRSILDAGWGVFLTILAHKAESAGRTLIAVNPAGTSRTCARCGHSAKENRVTQTDFVCTACGHTAHADVNAAINIMRAGLALRQAAQAA

SEQ ID NO: 25311 - protein, 532 aa, unknown
  TnpB Polypeptide
MCYAASKLWNVCNYERRRYKELGLEKYPDWYYQKKAHKGDLWYRQLPSQTAQETCKQLDKAWKSFYVLKKTGGIKDPNPPRFKQDNIPITYMQMGIRHEKGSGQLRLSLSKDLKSYMEETYGIHEKFLYLENKIFRNMDHIKQLRIYPPEDGKCDLIVIYEIKEPEPLSLNGHYLSIDLGIHNLMTCYDSGNGRSFILGRKYLSLERYFHKEISRVQSIWYAQQVENGIKYPRSSKHIKRLYRKKQNAVKDYLHKVTRWLAEYCRKEGISCVIIGDIRNIRKGKDIGHKTNQKFHGLPYNKLYIMLEYKLKLYGISLTKQEESYTSQCSPFSPEISKRYAEASNRKERGMYITDGVRYNADAVGAFNILRKYLSVSGKQKELSVTGLKKPDIINAPTARGAQSPLIVAVQNAQDIALMSRLNAAVWGKADFDPFFGAPTVVVVFAEAGNPNGVQDASLVMGNMLNAAHAMGLGSCWINRAREVFEMPEGRALLEKWGVEGDWVGVGNCILGYADGPEPQPIARKEGYYRIIK

SEQ ID NO: 25312 - protein, 377 aa, unknown
  TnpB Polypeptide
MNKAIKYRLYPTTEQVALFIRTFGCCRKVYNLMLEDKIKSYESTKTFGRQTPAMYKKAYPFLKEVDSLALANVQLNLQSAINDCFDKSRKKRNGFPRFKSAKHSRKSYKTNNQNGTVAIIGKSVKLPKAGIVKAKIHRLPEAGWRLKSATVSQERDGKFYVSVLFEYEKPVIPVPKIDNAVGLDYASDGLYVDDKGDIGTNHKYYRESHKKLAWEQRKLSRMVGSKKGEVKSHRYLKQLKKVNKIHRHIANQRLDNLHKLSTEIANQYDVVCVENLNMRSMSNKGFGNGKSTLDNGYGIFLKLLEYKLAERGRYLIKVDKFYPSSQICHCCGERHPEMKDLRIRTIKCDCGLSMSRDQNAAINIKQEGFRILHEKFA

SEQ ID NO: 25313 - protein, 525 aa, unknown
  TnpB Polypeptide
LKESKKEPKTPRFVAEFPLNVSSADDSILCVRFDAARQIYNAALGQALQRLATMRESKNFKAACAMPKGKPRTEAFKALNYKFDFTQSSIQKFVEQCRDSCWIKHHLGSHDTQSTGLRAFKAVQQYAFGKKGRPSFKQFGTMMSVEGKSNAACIRLRDNIVIWYDLEMPMIVDQTSDWQKEALKNRVKFVRVVKKEIGSRTRWYAQLVLEGKPPARDAVELGKGETGLDIGPSTIAHVSEKTATLEQFCPTVLVPKAKLRRIERALDRSRRATNPENYQANGTIKKGKKKWNRSKRYYKLAAKRRNIQRCLKSERKRSHGELQNTIIRSCDTVKTERVSYKAWQKVFGKSVGVRAPGTFHTGLKRKIISLGGTHVDIKTYTTKLSQYDHSTNTYIKKPLSQRMHIFGDGVTAPVQRDLYSAFLARFCDTHFLNASQVLKAWPGAEPLLRQAALSFSQLPSEGGKTKLHVIHVRRIRHLRRQRKSSVGGNQNGTRGWGSRSNVVATPRIVRAPKSVPTMIPESPGF

SEQ ID NO: 25314 - protein, 525 aa, unknown; identical to SEQ ID NO: 25313
  TnpB Polypeptide

SEQ ID NO: 25315 - protein, 360 aa, unknown
  TnpB Polypeptide
MVALHLWFRKRRLSWPTETQFKAHFKGRFVLHSQTIQGVIERFFDNIDTTRTNRANGDKRARYPYKTKSYVVAVWKPLGIDRNKQCLTLSMGRKRKPVILHLPKKFPKGKITLVQLGFNEFYVTLATEIKVPKRRLKGVAAGDLGVIHLMMMTDGKETESVVGRGLRSVIQGHNKAKAEISSLLSKCTKGSKRYKRLRYALFREGYYRQNFQRNFLHHAANHVVDFCKRKKVGTFYVGDITEMVRGKSGKRSRRNNQDVANMPWGDYIKYLTYKLAKRNVGLEKQSEAYTSQTCPQCASRTKVSGRVYKCRVCKFTAPRDQVGSWNFLNKCVNGSIISGAMVPDGKLNLPTAKSRGILGS

SEQ ID NO: 25316 - protein, 360 aa, unknown; identical to SEQ ID NO: 25315
  TnpB Polypeptide

SEQ ID NO: 25317 - protein, 449 aa, Bacillus sp.
  misc_feature (357)..(439): Xaa can be any naturally occurring amino acid
MEVKRMMINKAYKFRIYPNKAQATLINKTIGCSRFVFNHFLSLWDNAYKETGKGLTYGTCSAKLPAMKKEFVWLKEVDSIAIQSSVRNLADAFTRFFKKQNSAPRFKSKKNNVQSYTTKQTNENIAVVGNKMKLPKLGLVRFAKSREVTGRILNATVRRNPSGRYFVSLLVETEVQELPKTNSYIGMDVGLKDFAILSDGTTYKNPKFFRSLEEKLAKAQRVLSRRMKGSSRWNKQRVKVARIHEYMTNARKDYLDKVSTEIIKNHDVIGIEDLQISNMLKNHKLAKAISEVSWSQFRTMLEYKAKWYGKQVIVVSKTFASSQLCSCCGYQNKDVKNLNLRKWDCPSCRTHHDRDIXXXXXXXXXXXXXXXXXXXXXXXXXXXXXXXXXXXXXXXXXXXXXXXXXXXXXXXXXXXXXXXXXXXXXXXXXXXXXXXXXXXVDIKTKTLKI

SEQ ID NO: 25318 - protein, 432 aa, Halobacteroidaceae sp.
MHYTYRFRLNPTPEQRERLDYHRDTCRQLYNHALNEFEQIPDSAGTLNQRVRQVRDQLTDLKEWWDELNDLYSTVAQAAVMRIEDSIKALSELKNNGYNVGSLSWKAPQEFRSFTYIQSGFEFDSKNGQTVLSLSKLADIPITKHREIPDDVTIKEVTIKKEPTSEWYACFVVDGKQTPGKPDNPERCVGIDVGILKYTHDTDGTAVGSLDLSDERERLERAQRDLSRKEHGSNNWGTQRKVVAQRHADLKRKRRDFLNKLSNYYATEYDLVAVEDLDAKGLVELPGNSRNRASAAWGTFKRMLEYKCEREGTHFVAVDPKDTTKECASCGVKTEKPLWVREHSCPSCGFEADRDGNAAINVLSRGLSKLGVGHSEGTSPEIEDFWCANESRSDSSTPVETALPVDTLVSAKRVVETGSPTLKERTALAVSE

SEQ ID NO: 25319 - protein, 396 aa, unknown
  TnpB Polypeptide
LNRTHKIALDPTACQEAYFRRCCGVSRFTYNWALAEWKKQYAAGSKPSGAALKKQFNALRHVDFPWTGEVLRDATAQPFVNVQRAYQNFFDKRGKYPKFKKKGLHDSFYIANDQFGVDGQRVRIPHVGWVRMHEALRFEGKILSAVVSRTAHKWFVAIAVDVPRILTTSENQAVVGVDLGIKALATLSTGEKFAAPKPLKKSLQKLQRLSRQLSRKQKGSHRRWKAKQKLARLHYRVACVRNDALHKLTTGLVERFGTIVIEDLNVRGMVQNRHLSRAIADVGFGEFRRQIEYKMAVRGGRLVVADRWYPSSKTCSDCGFVLDILSLGTREWDCPACGVSHDRDINAAVNLEKLGRATSEVTLVEKQALARRLRRVKPASVKRELIPLENGNFSKN

SEQ ID NO: 25320 - protein, 298 aa, unknown
  TnpB Polypeptide
MKHFCRRLKKKEKPGFPKFKKRGQKDSFRYPQGIKINGNAVFLPKTGWINFTNTRPIEGTIKQATIKRDGSHWLIHIACAVPVEIVYAPVSEDKAIGIDLGLLSFAHMSDGTVIDNPRCLKHELKQLRYLQRSCARKQKDSSNRKKSIVKIAQLHRKIRNKRKDFLYKVSTVVVKNHGVIAVEDLHVKGMIKNRHLSRSIADVGWSSFLQYLEYKCHWQGKHFVRVNRFLPSSKMCSSCSIQKDMPLKLRTYTCSSCSLIIDRDLNASKNIRSAGISALKTCRANSIGLRNEAGITGF

SEQ ID NO: 25321 - protein, 452 aa, Gloeocapsopsis sp.
MRKTPVIYAGDLSECAKFIWFCYVDRNNISWWLIGRAMIIYEFKLKGKQKQYHAIDEAIRTSQFIQNKCLRYWMDNEKVGRYDLNKYCAILADVSPFASELNSMARQSAAERAWSAIVRFYDNCKKKVKGKKGFPKFKKSCRSVEYKSTGWKLSETRKAITFSDKKGIGTLKLKGTYDLNSYNIKQIKRVRLVRRADGYYAQFAIDINVKVESQPTNQAVGINLGLKYFIANNKGNVEPSPQFYRKSEKQLNRANRKKSKKFSTQRKKAKQRQSNNYHRARNRYARKHLRVSRQRKEYCKRVAYSVIQSNDLVAYEDLNVKGLVRNRHLAKSISDAGWSTFRSWLEYFGHKYGKVTVAVPPHNTSQDCSNCGEEVKKSLSTRTHVCPRCGYAEDRDINAAINILRKGLSTVGHTGTYAWGDLPSWAVGASLLSNGESGNQESPSRRVRGVSS

SEQ ID NO: 25322 - protein, 551 aa, unknown
  TnpB Polypeptide
MEMNGNTYSLSLNKKTIEDLNLSLSLSSADLQLVKQIKVTDVNDAFCCLLLANTAKKLYNSALYLFKQQYKENQTTLTHDYLDKVMKNEKIHPDYARIYQDLPAKVSQQVLKLFSQNIKSFFGRKQSEKLTDEEKKKVSLPRYYSKNGLVVLAYTNQAISKRAFHEDGVIHLSGTNLKINRSLFPEIKEFSQINQVRIVPTTKNEKNKPLSDLLEEYYSGKSCQPLFTIEIVYTVPLSDKRRNNKSLEFFYRTSIIHKINRKTNKIATIEKEELVEARYTEDFLSSVVGIDQNLDHLAVGGISQQETLAFTYDLKYLKSVNQHWNKQKAKIQANISQQKQLLWELKYAKLDFYKTFLTEYSVSRLIEDTEIAIKKLHNQLKRITTKRNHKITNYIHQLSRKLINHLSELGVKNIIYGKNVNFKKEINLGKVTNQNFVNIPFNQIIDNLKYKSLLSGINFMTVEESYTSKTSFLDMETLHSYKNNKPKKGYEFLGNRFVRSLFKSKKGYVIHADVNASFNIIRKVTGDNIYNFVDIGFIKGSSPKRVKINLQ

SEQ ID NO: 25323 - protein, 262 aa, unknown
  TnpB Polypeptide
MELTLSKVGNIRILQHREIEGRIKTCTIKKDVDRWYAIFTVDIEKKIEKVPIKTKTGVDVGLESLLILSSGEKIEPQKFYRKSEESLAWEQRQLSRKKLGSKNRGKQKVKVAKVHRKVRNQRKDSNHKTSRGLVKTFDYIVFEDLQIQNMVQNHHLAKSILDAGWGQIIRFTAYKAEYAGKTIELVDPYYTSQTCLCGHHVPKKLSVRIHICPKCGLILNRDHVSAILIERKGKLNVPTDCGELTPMESTLKRLIEVGSPSL

SEQ ID NO: 25324 - protein, 386 aa, Nocardia sp.
MHLRYQFRVYPTLGQQVALAKAFGCARVVFNDALRARQEAFEIGERISDAELSKRLTEAKKTPERAWLAETSSVVLQQALADLNAAYRNFFQSIAGKRKGVKVALPKFRSRKDNRQSIRFTRNSKFVVTASGKLRLPKVGDVPVRWSRELPSEPSSVTVIKDAAGRYFASFVVQADDVPLPPSDSEVGVDLGLATFAVLSDGKTIASPRFLRRAERKLRKVQKALSRKEKGSANRAKARLKVAKVHARLADTRRDWAHKHSTRIIRDNQAVFVEDLNVSALARTRLAKSIRDASWGMFIRMLEEKSRRYGRTFGAVDRFFPSTRMCSACGAIGEKKPLHVRSWTCVCGAVHDRDLNAAKNILAAGRADNPNDCGVEVRPEPVPAHG

SEQ ID NO: 25325 - protein, 228 aa, unknown
  TnpB Polypeptide
MCYAASKLWNVCNYERRRYKELGMEKYPDWYYQKKAHKGDLWYRQLPSQTAQETCKQLDKAWKSFYALKKTGGIKDPNPPRFKQDNIPITYMQMGIRHEKGSDQLRLSLSKDLKSYMEEAYGIHEKFLYLENKIFRNMDHIKQLRIYPPEDGKCDLIVIYEVKEPEPLFLNGHYLSIDLGIHNLMTCYDSGNGRSFILGRNIFRWKDTFTKKSAGFNQYGMHSRWKTA

SEQ ID NO: 25326 - protein, 522 aa, unknown
  TnpB Polypeptide
LAKGQTYRAFVARPTHILNLDGELLDSAPIMSQLASEIRGISSYATYVTRNDTQLEAGLATAGAVQPATAGRRAGVTMPEFLASGRTGKSRKEWLVRYNVVASFRSWQERIKATEGTSSKYVSQGWKRTMNANPPSYGEEYINLGAVDKQYAVIENDDPFGDGEIVFKMVIQGKWYRLIFDFDNKRFTEGKVTLPLVKVENNNPVFIFSVVTDNPIVQFSSDHVIGVDVGINNYTTVAVINSTTGQIVYETTLSQRVHSLWNSVRASEKQVKQLRKKADSLSPYNRQAIMAALDEAQLHRKATSRKKRELAIVAAQEIAYLSHFFGNAVVAIEDLSWIRNTMQNGRWNRGMFVQWLTHYVSQNGGWVVAVNAANTSQVCHMCGAEVKHPEHKVSQCPKHGDMDRDVNAAANIAARAVLKVEKARKTRAKSRKLQEQAPLKTPVARVSLKYPGQDRTKNKPTPKRKKHRISKGVNLPISPARVQASRVDTSVLADCGTYGVAGTSQAAIKQGTMTKYRLCSPI

SEQ ID NO: 25327 - protein, 407 aa, unknown
  TnpB Polypeptide
MYFVRKLKLGLSEQLHRLTLAAGDLYSKTLVAFWRVVRKKGLWLKPSSLMRWFPNSSGNQLHAHSADAVVQSFFASLKSWYKRRKTDPNAKPPKRRRRYFKVIWKSSAIRVRGGKLVLSNGKTNPPVVISWAWETPVQVEIGWDGKQYELRACYDLSKRQAERKEEETPKAGEVAGVDLGEVHLAVAHDGKETFIANGRLLRSQRRYQNKLKGKLSRLMARKKRDSRRWKRLVRSKQRQLARLAKQMADILHKQTTRLVSTLQARGVQTVVIGDIRDIRRSAQYNKVANQKIHQMLSGQVRRMLTYKAEQLGMRVVLQEERYTSQKCPRCNMLHKPSGREYHCRACGFRFHRDGVGAVNLRRKYLGQFDVPVVGVMASPIGLRFRPHARCSSGSRSYPATRERILAL

SEQ ID NO: 25328 - protein, 427 aa, Lactobacillus sp.
MIVKTRIYRLKPDETMTQVLDDWCNYRRYCWNHALALWQDLYMAHNIFDKVVATTFIPKQNKKTKKWHMTYQDHHLNPSPNWRLVRDLMVEQKEEWQYAYSARTLQLAVQDLGKAWQNFFNKAQPDWGKPKFCSKKNSRQGFKTDRAKIKNGLLWLEMPKETPYKDHWTGIKLSEKPLSDKIGVVSIFKVNRKYYASVPYKLEKTLPKAKTGKGTGIDINVGHFNYQDGQCLVLPQSLRKLYAKIKFYQKCLAKKRTINGIIKGTQSNKYLRTKAKLQACYERVSNIQHDLMHKFTTKMVNDYDQIVIESLNVKGMLMSHVASKGMHRSMFGLFKQLLAYKCKWYDKELILANKLYPSTQRCAVCGMVKKGNEKITLRGNHKYGTKHNEYVCHNPNCPNYGQVVDRDENAMKNLTLLISHPELNKAL

SEQ ID NO: 25329 - protein, 416 aa, Mycobacteroides sp.
MLTGRRFRVEFTDDQAVYAEQVGAVCRAVWNTGLEQRRQYRRRGAWMNYAPQARELAEAKSEHVWLKDVPGHCLQQTLMDLDKACRKHGTFRVQWRSGRKWAPSFRFPEGNKMAVEKLNRAHARIKLPKLGWVKFRASYGLAGVTIRSATLTRRGRHWFLSVLVEDGRQRPEIHDRPGSAVGIDRGVAAAIATSAGALIDRAFSSDGERQRAVALQRRLSRCARRSVNRGKVRAQLATVRSRERDRRQDFCAQNAHLVTEANAVVVLEDLKIRNMTRSAKGTLHNPGRNVKAKSGLNRAILTKGWYQFALALSSAARYTGTTVVTVPAAYTSQRCSKCGHVDPKSRESQAVFRCTHCTHTEHADVNAAKNILAAGHAVTACEDQPRPAGPARSSKQEPAGNREELLPQPAHTAPAA

SEQ ID NO: 25330 - protein, 402 aa, unknown
  TnpB Polypeptide
MYLVEKHRIKSTNKHFGKLVELSKLSNNLYNQSLYWLRYSLDNFGEWYSYEDLDKFMKRYVRVITPEYDNYSQLPASVAQQTLRLLSQNVKSYIKATKDWKKNPQKYKGMPEFPRFRKKGGQNSLLFTSQSARLKSGVIHFPVKVGGLTIRLRNSSIETIKQVRIIPKGLYFIAEIVYEVPDTPVKDSGCVAGIDLGLNNLASLVFEDFGQPVLFNGRPLKAINKYFNVKVAEYKSVLDKTQKDQKSSKRLKYLYQKQNNIMDNYLHQISRRIVNLLVEKGITALVVGKNTHQKQGNQLTNFVQVPVFRLLDYLKYKCKRAGIKCIETEESYTTGTSYLDSEQPIKEFYNIARRVSRGVFLTNTGQRINADVNSGYQILKKVGIDVRYEGQKNIFNPVAITL

SEQ ID NO: 25331 - protein, 417 aa, Streptomyces sp.
VTVKLVVQVRLLPTPVQAAALEASLRACNEAATWASVVAFDKDVKKNFALREHAYHKIKSRWGLGAQAAQHVIKKTCDAYATLRANLKAGNLGRPGSRRYRRAAEKPIAFRAESAQPYDDRMLSWQIPERRISIWTTAGRVKDVAFTASVEQLATLARYRRGESDLLVRDGMWFLNATCDVPEQPPNTEPVDFLGVDLGIVNIATTSDGEIMAGRQLNRTRVRERKLRAKLQKKDTPSAERRLKKRRRKEARRAKDINHKIAKHVVAEAERTARGIALEHLTGIRERVRLHKPQRATLHSWAFHQLGQFIAYKARKAGVPVVYVNPAYTSRTCAECGHIDRANRVSQARFACRSCGFVDHADRNGSRNIRARAWELWRRGAASTAPVPAPEHTRRAGAGRKRSVTPSDARCANTSPQ

SEQ ID NO: 25332 - protein, 416 aa, Mycolicibacterium sp.
MLTGRRFRVEFTGEQSEFAERIGAVCRVVWNTGLEQRREYRRRGAWMNYQPQAKELAEAKSEHPWLKDVPGHCLQQTLMDLDRACHEHGTWKVRWRSGRRWSPSFRFPEGNKMAVEKLNRRHGRIKLPKLGWVKLRMSRPLAGETIRSATLRREGRHWFISVLVDDARQTPEAHPVPGAAVGVDRGVVAAIATSDGALIDQAFTTAGERRRVVALQRKLSRASKRSASRDKARAALAAVRARERRRRLDFCAQIAHQLAATNSVVVIEDLRTKQMTKSAKGTLEQPGRNVRAKSGLNRAILVKGWHQFALALASAARYTGTTVVKVPAAYTSQRCSACGQADPKSRESQAVFRCTYCTHHEHADVNAAKNILAAGLAVTACEDQPRPSGRARSPKQEPAGNREELLLQPTTAAPAA

SEQ ID NO: 25333 - protein, 389 aa, unknown
  TnpB Polypeptide
MIRTYKYRLYPHSCQAKKLSYLLDLSRNVYNAALEQRIDAYEETGTGVTYTTQSKHFGNLRRSDPDGLGVLNFTCMQQTLRRLDKAYRAFFRRVKYGDTPGFPRFKSVMRWHSAEFTYGDGCKLRFDDSGRALLYIQNVGEIKIKYHREVPDSAKIKHVVIKRSLGKWYVCLMIELPDADIVEREPAEIGIDVGLHSLLALSDGTLVENPRWLRSSLAELRVAQRRMARRKKGSQRRNKARYQVAKLHGHISNQRRDFWHKETRKLADTYTLIAIEDLNLSFMTHNHHLALSAHDAGLGMFRRMLESKVENTGSQVIAVPPAHTSQRCSGCGEIVKKDLSVRIHHCPHCDLTLDRDVNAAVNILSLARTGPSGHNVGDGAKRVPRSSLF

SEQ ID NO: 25334 - protein, 321 aa, Acidimicrobiaceae sp.
  misc_feature (60)..(61): Xaa can be any naturally occurring amino acid
VVHRERLVDVQLRATAPRPGLPTTLPGAPRCPRSRARVSRSPLLWRADPHASSIRTTCAXXRGKYTLSFTVEMSRVIPAPRAPERVIGIDVGLTTLYTGATPDGAQVLSVANPRSYQRSEARLARAQRVASRRQGPAPGKAPSNRWKSSNARTQKIHADIANARKNFIHETTTMLTENYDRIVIEDLNVVGMLKNHSLAKHISDASWGEFVRQLEYKAPCYGSTVVKVDRFFASTKTCSSCGAVKAKLPLEIRTYHCETCGLTIDRDLNAAVNLVRWTSQATSAGTRSVAGRRGEVRPRRTRAVKARPDEASTETPALVGA

SEQ ID NO: 25335 - protein, 385 aa, unknown
  TnpB Polypeptide
MYTTTYKLFRAKRNRILKRKTWIAHTIWNYFLGWQRTRYALGLPYMSYSEMSHEFTILRNADPEVFAHWRELDSWAARDILKRLDTGYHRFFRGIAKKPPKFRSVRKPYSFMMCPSGYKFDKPVAGDLGFGIYSDSVTIMGKTYRFNLSRPIFGNIKTVTIKEDTLGDFYMSIVTDHVQSHLKPMTGNAAGFDMGVKTMLTRSDGHKHESPQFYTTSIDNVKRSSRQLSTKQRSSNNSERARQHHARQHRKIKRQREDHHWKLALELVRRFDVLFFETLNLDGMKRLWGRKVSDIGFYAFMQKLKWQAKKRGKRVECLDQWTPTTSVCHVCGNRVELQLSDRTWTCDHCKTHHDRDINAAINILKVGTSTFGVEGIRLATASSPC

SEQ ID NO: 25336 - protein, 575 aa, Streptomyces sp.
MGELRKPAAPFVVSGPAGVSVRTRLRVSAADAAVLTEVGSFLGSLAAGDLAGISRQGRDRDAPSWAARKRALTGSSSARWAGSVTKATQDQWALARRGQAAEMAWLRGQIARIEARLSRPLGAKADKRAGLVRGYAGRAEWHAKSRRLSALQDRLAALEGDWAAGRVRVVRGGKKLARLRHHLDEAGLSRQAWQERWQAARMFLAADGESGKRCGNETIRVTDTGQLSIRLPAALTHMANAPHGRYVLDAMTAFTHRSEEWRDRIVADRAVAYRIHHDVPRGRWYLTASWQRAVVPTLPLEAVLARGVVAVDMNDDHLAVWRLDAHGNPVGRPRRFAYDLSGSARHRDAQLRHALTRLLHFTRRHGAAAIAVEDLDFTDGAGREQFGRNKGFRRLVSRFPTARFRARLASMAAEQNVAIVAVDPAHTSQWGARYWQRPLTTATRKITRHDAAAVAIGRRALGHPIRRRMAPPPRDRSDRVGHRTFQARPETWRREGPRPHFPGPRTGSVPPGCGAKAGDQRAQNRWGHAAERMSWLQGIFPLGQPGTVVPTWIRFAAQPPGQCRLSTCSGCVAQW

SEQ ID NO: 25337 - protein, 410 aa, unknown
  TnpB Polypeptide
MPIRNYKYKLYVSKHTRELSSLVTSANFAWNHVVELCRRYYKLYRKSVSPTRLQSHMAKLAKRDRFWSKLHSQTLQNICQKYTEALNQHFKKKGRGFPRFHKPHNKGSILFKGSGGYKLTAGETRGTLVVNKLDKDWEFRFKVTRPWGEVKNVMVKRDTDGCLCLIVCCIVPEERLEREDSGSIGMDFGMKTFLTLSDGSSVAMPDYHKQSLKDIKAADRSYSLKRNAQVYGSSFRRAKKAKAKAHRKAANQRSDCHWKLAHELCRKYSFIAIEDLNLKGMQMHRNWGRKVSSLGYGEFVQKLLVVAEKYGTVVEKISRWEASSQTCSECGHVWKGTKDLSVREWVCPECGCVHDRDVNAARNILRVAMERYTGEGVPQAGSGGKTARGNTAGGGCVEGLPEVPAKNPTT

SEQ ID NO: 25338 - protein, 460 aa, Acrocarpospora sp.
MQVVHAYRYALDPTPCQERMLRSHCGAARLAFNWGLARIKANLAQREAERSYGIPDAQLTPSLSWSMYSLRKAWNGTKQQVAPWWAENSKESYACGIDRLATALTNWNESRKGIRKGPKVGFPRFRSKRKKAISVRFTTGAIRLHGRTHVVLPVLGRIKTHESTRKLARRIEAGTAQIRSATVGLEAGRWLVSFSVQIERAEATPTRPEAVVGVDLGIRTLAVYSDGRPPTANPRHLAAASRKLRRLSRAVSRKQGPDRRSGQQSSGRWRRANAARNRVHHRVAALRRDAIHKLTTGLAAEYGTLVVEDLNIAGMVRNRRLARAIYDAGFGEIRRQLAYKTEWGSGRLVVAGRWFASSKTCSGCGAVKAKLALSERTFACADCGSVLDRDVNAALNLASLVKQTVAGSGPETLNGRGADRKTPPAGAGGCETSTPRRAPPGSDGDLRPVMDGSLRNTETQ

SEQ ID NO: 25339 - protein, 152 aa, Microcoleus sp.
MTLKAFSYRFYPTPEQESLLRRTMGCVRLVYNRALAVRTEAWYQEQKRVGGTETSSMLTSWKKTEELNFLNEVSSVPLQQCLRHLQTAYTNFFDGRAKYPNFKKKRNGGSAEFTKSAFRFKYGQVYLAKCAAPLPIRWSRTLPEGATPSTIT

SEQ ID NO: 25340 - protein, 397 aa, Paenarthrobacter sp.
MIRSYTFRIYPTSKQESLLRAMLTDHRDLYNAALQERREAWKRGKQVWFKDQDAQLTAIRANDPDQARWSYSAQEQTLRRLDKAFQAFFRRIRSGEKKVGYPRFKGPRQFASVEHRNGDGAKWDSVPHPTQTRVKFQGIGHIKVKQHRPVTGRVKRLSAKQEGRKWYVHLVAEQEQPTPLPKTGAMIGLDLATGQNGLAYTSLGERIDNPAFGAVAAAKIAAAQQQVFRCRRGSKRRFKAWDRVSGLYRKARNQRHDYLHKTARRLVDAYDVIVVEDLRTADMTRRAAPRPDGNGGYLPNGGNAKTGLNRSIRDAGWGQFLDLISAKAESAGRDFIRVNPAYTSQTCSACGHREQANRNGKDFLCVSCGHRDDADINAALNILRAGLVLRDAAQAKS

SEQ ID NO: 25341 - protein, 417 aa, unknown
  TnpB Polypeptide
VSYSVRGEEPVVIEAFKVGALPEGSYDHLLEFLRLYRDALQMIVDRVWSINDKLSKKKLHKLFYNNLVSMGFRAHHAKEIYMYAKSLVDSAKSNGGRKPVLRKLSARVDRYDYKLDLDNMTLTLKLHNGCEARLKLVSSKERVEKFKGWGNYELVVKYDGSGFWVSIYFKRIVKVVKPRTAMSIDLNFDNITIAVFNFNGKLLKLKRFKTPHRKILTHRIWVERIQKRYPRSWRFIKSVKKAIDRHGERIRSISWDYAHKVGDLVAELALKHHSVIVLEDLEKLRENGKKGKRFNKRLGLWFYRRTQFCVEYEAKERNLKVVKINPRGTSSKCPRCGKKLAEYEHRVLRCRKCNFIGDRDAIAVINLYKKFISKYPRCGVPGVAPNAPKPNENPSGMQGKRDDAMKNTPTYINLYKS

SEQ ID NO: 25342 - protein, 424 aa, unknown
  TnpB Polypeptide
VPTLALKFRFRPTPEVDDLLGKCETMVREAVAWAWENRKTATHTIVKALYLAFRERFPELHSAWVQKSARTAAAVVHAFQRRRRRGREPKDRPEVRRAWVYVDKMTFRWSWDGTWLEIRIAVRPGDVSPIVLRFRPHGKYRRLVEAWARGECTHGEPTLSRTTLIIPLKFKDMPVYEPGRVFGIDSNERSLDLYGSGVPVLQGLLDTSWVAARNAEHDRRIRRGCRGKQNPRARARVARKHGRRRRDRTRAFWHEVALRLVWLALQLGAALVIENLRGMKGRIARHLPRRMRRRLLNHWSIRTFHAILRHKARVYGVPLLEVDPRGTSSLCPVCGGDLRGQRELRCPSCGLTMDRHLLAAWNIALRGMAKLPLGGTGQPGEGLDLFGRLQSRRWGQGVMGAPGRPLPVRQGPTLRTQGEAQATA

SEQ ID NO: 25343 - protein, 395 aa, unknown
  TnpB Polypeptide
VRFRLYPTKAQEALLLTHCAHARFVWNLGLEQRNMYRSTFGPTPNAATQDKQLTEARSSTWLGEGSSTVQQQALRDLDRAFRNWWSNPGHFGRPTWRTKGIHESFRIVGSQARRYERLSRKRARVNVPKVGWVDWRWTRDPGDVKSYRIKRDAAGRWWIAFAAIPEPKPAPGNGVVVGVDRGVAHAFVLSDGEMIDVPKPPDGEKARLLRLQRKLARQQKGSIRRERTKVQIARIRHREFNRRRDVVEKLTTRLAADYDLIRIEDLRIGNMTRSAKGTAGAPGTNVAAKAGLNREILRSGWGQFARRLGDKAPSRVEKINPANTSRRCNACGHVAPENRESQAVFLCVACGHSANADVNAARNIAAGCAVTARGGEADQGLPVKREPTHDLHQVG

SEQ ID NO: 25344 - protein, 412 aa, unknown
  TnpB Polypeptide
MRSQKIRLKLTKEQERLAWWYSKVSRNFWNLLVDIDKRNNKGEFDEILNKNGNKLYHSNFYDREIYHLTQSDYLNLVKLVVGKNYDKVQEQWSWYYNPNQSFIYNFLSRELVKIKKRNKGKLNFRSINKIQPNFNIRCDISANKKRPSRIYPKENGKLQIPSLGEVRFGSIREGFDLSCKKQVANVSFDGKYWYLSYTEDVEPQAEGLPEFTDGIGIDLGIKMLATVSDGTTVPNIKTFRRVRILNKRLKRLQRKVSRKYCINKCDKHNKTKNIIKLERQIKLIYRSLKNIRINHIRKFVSDLVKKQPQYIAIEDLNVKGMMKNKHLAKDIGNCSFYTIKEHLIRKASERCIAVRLVDKFYPSSKTCSNCGHYNKELKLNQRVYHCSHCQEKIDRDFNASLNIAKTENYVLA

SEQ ID NO: 25345 - protein, 399 aa, Microbispora sp.
MWEVGVRRSFKFLLRPTRKQAAALTQCLHDHRELYNAALEHRRTAYRRAGVRVRYGDQSGELKHIRADDPTGQGRWSFSSQQATLRRLDKAFRAFFARVKAGRTPGFPRFKGRGWFDTVEWPKDGDGCRWDSQPEHPAVTYVRLQGIGHVRVHQHRRVLGTVKTISVKREGARWFVVLSCDEVPAGSLPVTGAVAGIDMGVASLATTSDGDHIENQRHLAASADRLAAAQRDLARKKRGSTRRRTAVARVAALHAKVRRQRLDGAHKAALTLVRAYDVIVHEDLRIAGMTRSAAGTIIQPGRNVAAKSGLNRSILDAGWGVFLRVLAHKAESAGRELITVNPANTSRTCSRCGHCAKDNRLTQAEFAWKACGHTAHADVNAAKNILRAGLALRDAAEAA

SEQ ID NO: 25346 - protein, 373 aa, unknown
  TnpB Polypeptide
MIKKFKPINKAYKFRIYPNQEQQKLIDKTIGCSRFIYNEFLAKAKKDNYKSYSKNSSQLPKLKKEYEWLKEVDSISLQQSLKDLDRAFKNFFSGKYKFPKFKSKRKARLSYRTQKFIRPSGSTNIEIKGNYIKLPKLSWVKFAKSKEVTGKINNVTVSKSKVGKYYISINVSQVLITTINDNQGELGLDLGIKDFLTTSDGEHIENPRHLSKYEDKLAKLQKRLARKEEGSNNWYKLKKKIAKVHTKIKNVRKDFLHKLSTKLTQENQLLVIEDLNVKGMLKNSKLAKHISDCSWNKFTTMLIYKGEWYDCIVHKVNRFFASSQTCSECGIKNPKIKDLSVREWTCECGATHDRDENASLNLLKQGKLDLGIR

SEQ ID NO: 25347 - protein, 376 aa, unknown
  TnpB Polypeptide
MDYITLILPFNISGEEARKLITTARLFRLAVLKVFNEFLSDGKPPLSQFSMYKRYRKVGYGVLPNRRYVDGAIDLVYGIIESVNELNRLHKKLGFDEEIKLEDVKFNNWLLFQCEGESKHMNINIKIREDLSFRILTFDFEGNKSYIIVKPTISKRYKPILQNIWFYMQPYYARVVLKQFGNRKGVLFTHGEIQVVVDYDFYLELMRRYNQPKGKNVAGIDVNLDRINLAIVNKDGELRDYKTFWFREVKARNMPKRRVWSIIGMRVHEMLKYAYYHGVCRIYLEDLSILGKLKLLWLKNGRRFNKNYNYAVQSFRSRVIETIKMKAPLYGMKTSYVNPANTSKISEKLARKLGVDKHTASAYVIALRGLKLLNIA

SEQ ID NO: 25348 - protein, 398 aa, Clostridium sp.
MNYDNYCNKVKAIEKILNGKKKISDKKRNALISKLDKRQRKVNCFKNFIDKNMIPSVIFGTKKMFIKRCKALISKEEWINCRNNRIYSRGDKTKNGNPNLRVIIKDGMSFLEISTLKKTKTNRAIKIQVPIYLPQKLSKKTGKVNGINYRELFINHLVTGEAYQVEVLKRNGKYYCHITFELSKKEVDYTGHNGIIGIDTNPDGFALTMIDNKGNYKWHTYLKQYELLYARTNRRENLCGELVKQVASIAKTYGCRIAIEDLKFKNHKDVHSKFARIKHQFIYSKLLTMLESACIREGIEIVKVKPQITSKIGLYKYCHQYGMVVHNGASMVIARRSYKFKERVPKILKDKLVKDLDKFNKKNEWSKWNEINKDIKRKVGENPDLWLVNRKRILGLVS

SEQ ID NO: 25349 - protein, 273 aa, Halogeometricum sp.
VSTRRDRTWPWRTSSRCEPCGTATTGNSTSSARSKSPSRTHPATTPLGIDLGIKNYLAIAYDVGDAELYPGNVLKQDKHYFTRDEYDTEGENGPSRRALRARQKLSRRKNHFLHALAKHIVEQCIDHEVGRIAISDLSKIREDKNGDSRNWGKRGNKKLHGWEFDRFTQLLEYKAELHGILVDRKSERDTSKTCSCCGRKRDANRVERGLYVCESCGATMNADVNGAVNIRRKITQSPPTEDMSNGRLARPVAYLFNQTSGRFAPSEQVSCEP

SEQ ID NO: 25350 - protein, 397 aa, Halomonas sp.
MHQWRAMLKATKIRIYPTTEQAEFLNRQFGSVRFVYNTGLRIMSQRYQRHGQSLSAKHDIKKLLPVAKTSRKYGWLKEADSIALQQACLNLDHAFQRFFDPKQKAGYPRFKSKRGQQSSYHCVGVKAGDDWVKVPKLGPIKAKVHRKVEGELKSITLTRTVTGEYYASLLYETGHAAPALLKDVEGAKVVGLDMGLSHLAIDSNGRKIANPRFFKQAQRNLKRKQQALSRKQKGSANRAKARLLVAKAHERLANARNDFQHKLSRQIVDDSQAVIVETLKVRNMMKNARLAKHIGDASWHALTTKLAYKAREQGKHLVKIDPWFASSKTCHVCQHKVDAMPLHIRSWECPACHTLHDRDINAALNIKHQGIIQLKAEGLSVSAHGGLRKSGTSTAAA

SEQ ID NO: 25351 - protein, 343 aa, unknown
  TnpB Polypeptide
MLRLRTDAWLKERKHVGYHETSTALTKLKREPEYIWLNEVSSVPVQQALRHLQTSFTNFFAHRARYPTFKSKHGKQAAEYTTGAFRWDGETIKLAKMDASLNVRWSRKIPKAAKLTTCTVSKDKAGRYFISMLCDDAVSAKKKVKGQVGIDLGLTHFAVLSTGEKIAGPKAFRKNEKRLAKAQRRLAKKQKASKNRAKAKLKVARLHAKIANARNDFLHKLSTRLINENQVIAIETLAVSNMQKNHCLAKSIGDSGWSEFVRQLEYKALWYGRTLVGIDRWYPSTKRCHECGHIALKMGLEIREWTCPECGARHDRDVNAAKNVLTAGLAGLACGENVSPVLL

SEQ ID NO: 25352 - protein, 343 aa, unknown; identical to SEQ ID NO: 25351
  TnpB Polypeptide

SEQ ID NO: 25353 - protein, 364 aa, unknown
  TnpB Polypeptide
MKLIANIKLLPTREQEKALRETLERCNQACNWLSDKAWEAVKFQQFALHKITYAECRETFGLAAQVAIRCIAKTADAYKLDRKRQRHFRKHSAQPYDDRIFRFVGGDAVSIWTLEGRIKIPFVCGERQRALLAYRKGEVDLMFVKDKWYLACVCDVPDPEEIGIEGILGVDLGVVNIAFDSDGNSYSGADVERVRSKLAKRKSSLQRKGTKAAKRRLKKLAGKESRFRKHVNHCISKEIVARAERSHFAIAVEDLTHIRKRVKARKAQRNRLHSWSFAQLRQFLAYKAKLSGIPIAAIDPRNTSRTCPVCGVIDKANRRTQATFSCIHCGHTAAADFVAARNIAFFAAGAARNPALKFSDRKAA

SEQ ID NO: 25354 - protein, 456 aa, unknown
  TnpB Polypeptide
VTLQAYRFALDPTPAQARELRSNCGAARVAFNWGLAHVKAVMDQRAAEATYDIGEEDRTPSISWTMYSLRDEWNAAKDEVAPWWPGCSKEAFNTGLAGVAQALENWGKSRSGKRKGASVGFPKFKSRRRSKLSVRFTTGAIRAEAKHAVLPRLGRIKLHEDASGLVAKAAAGTAKISSATARFERGRWFVSFTVDVSRSEVTPAWPDKIVGIDLGIKTLAVLSTGREVPNPRHLSGALRKLARLNRAMSRRVGPYDNATKTRRAPSNRWRLAAAALGKAHGRVADQRKDALHKLTTKLAKEYGVIVLEDLNVAGMMKNRRLARHIGDASFGEIRRQLEYKTAWNGGRVVLADRWFPSSKTCSDCGAVKAKLALSERVYNCMECGLGLNRDVNAARNLAAYAEGWVAGSRSETINGRGGQGVLARSLKRQPGAAQAGDTGTVLLKSRAASNEPATAR

SEQ ID NO: 25355 - protein, 460 aa, unknown
  TnpB Polypeptide
MHSTRARISSDQGVTQVVKLRLNPSRAQVELLAGYCGTARAAYNILLFHVKANLDQRAAEKTYGIPDADLTSSLSWHKYGLEELLRENRGAWLPWHAQVPYLVLDRQAHQLADGLKKWKTGSARFPRFRKKRGDGAGLVPVTFKEKDAAWLTDGGRALALPISNTARRGLGRVRSVQLSSVPVVKDNRGRRAAKLIRDGRGQVQEVAYSFSGGYWWASLQMRVLPVAKTQPTRHRVPPRADAIGVDAGMGRHFATLDKPLPGVTGEVGHIGAPMFLRRALGDLAVAQRALQRTTPGSRRHAKALARVQKLHGRAASKRQTWQQHLAITLAEHAHVVGVETLSLRGMARRKKGYRFGKSVGDNGYGLFVQILTRQAAKRGSAVFRADRFYPSSKTCSDCGAVKAKLPLSEREYHCMECGLILDRDVNAARNLAALARAWLTRPESSGSPPGPTVRDLVLAA

SEQ ID NO: 25356 - protein, 377 aa, unknown
  TnpB Polypeptide
LTTGLCACPGFGHGGRFFAGPPGNLGTLNPSSRQQEPHSSTVQLQTVFPLSQRNHRGGRRLDKAFAAFFRRVKAGEAPGYPRFRAAARFDSVDFRHGNGIKLHTETRRLYVMGVGHVRVRLHRPLPEGAIPKTVTVKREGSGRRTRWFVVIPLEVAPTPLPPSGAITGIDMGVASFATTSEGKFLPNPRFGKSAAATLAAAQRVLSGRKRGSNRRRKAAEKVAALHGTVRRQRLDHAHKTALKLVQDHDVICHEALRIRNMTRRAKPKPDPDNPGQYLPNGQAAKSGLNKAILDAGWGLFLSVLTAKAEKAGRETIPVPAANTSRTCIECGHCEAANRPSQAVFTCQLCGFTGHADVVGAINILRAGTALRQAARAV

SEQ ID NO: 25357 - protein, 511 aa, unknown
  TnpB Polypeptide
VPPSTRDTRLLGPGGGRLLSTHGVGTGRMRPLADDGGRPMDQTGPPHTPTTGGVPGALQAYRFALDPTPAQARELRSNCGAARVAFNWGLAHVKAVMGQRAAEATYGIALADLTPAVSWSLYSLRREWNVAKDNVAPWWPECSKEAFNTGLGGLAQALENWGKSRSGKRKGATVGFPRFKSRRRSKLSVRFTTGAIRCEAKHAVLPRLGRIKLHEDASGLVAKVTAGTAQVGSATAVFERGRWFVSFTVDAARPAATPARPGKIVGIDLGIKTLAVLSTGREVPNPRRLNGALRKLARLNRAVSRRVGPYDPATRQHRPPSNRWRVAAAALGKAHGRVADQRKDALHKITTELAKEFGVIVLEDLNVAGMMKNRRLARHIGDASFGEIRRQLEYKTAWNGGRVVLADRWFPSSKTCSGCGAVKAKLPLSERMYNCTKCGLVLDRDVNAARNLAAYAAGVVPGSRSETLNGRGGQGVLARPVKRQPGAAHAGNTGTVLLKSRAASSELSTAH

SEQ ID NO: 25358 - protein, 444 aa, Lactobacillus sp.
MVKNEMEYMMGLKIRMYPNRRQEKIFWKNINASRFVYNKLLANSWTDSKVFKNKLDKRYPIPEDYWKYSKSGKLFKASTIRPTGLARITKEKYPWLGDKHIDSDMANNALVSYKSAWSLFHKVHNSGTPKFKRKSNPNQGYRTSNHYSSTTVKNNGGVPSLYNGSIKFLDKSHIRLPKVGRIKVKLSEVLPSNRLVRIATVSIKHLPTGEWFVSLLLKSDEPFKKKLPKTNSQVGYDLNTENFLTDSYGNIVDNPRFYRSFKGRLTKEQRKLSRRARRAKSEGRKLWESKNYQKQRKLVAELHARVGNQRKNFLHTISTTLIKNHDLVVGENLKSKNMLKNHALAMSISDVGWKSFIGMLEYKAPLYGRTFIEVDPAYTTQKCNKCGFKMGTNGSIKLTLKDRKWTCPNCTTEHIRDVNASKNILAKGLVELSKPLTEDSPIYK

SEQ ID NO: 25359 - protein, 432 aa, unknown
  TnpB Polypeptide
MKTLRLKYEQTSVIALSRAEDIWTAVSKVLYSDGDRLHFKKRGDLSELRAKQFHKEIIGRVKNGFLEFRYGKVSLPVIRKETDLWLMDELEAVESYLKDPSFHDAYAIDQMKHGEIVSTYRPCYASIVCKTIRGKLRVYLHLTVEGLPFPKRTKDGVIKHLCGDGIVGCDIGTQTIAYTSDHVVGLENLAERGNSIRCVERQQRLVQRAMDRSRRAMNPDNYNADGTIRKGKKTWIKSKRYQKLQLSYRELCRVSAENRKLAIHEQVHKMRSLGDIFVTEAKNAKKLQKRANPENPLDKNGRPKRKKRFGRSIQNRCPGYFQAKVKQLFESTGGTYIEVPSDYRASQYDHTVDDYIKKKLSQRMYNLKDGTKVQRDWYSSFLLYCIDLITKTIDRQKCLATFETQLNKEHAMIEEIIHLKKHIMNSGIRVAV

SEQ ID NO: 25360 - protein, 547 aa, unknown
  TnpB Polypeptide
MSTQILAQSVQIDYNTKIVNLVKDSHRIAQTFLDNHQLTTLLQDYQEWRQATTSKPYVFFVQTNKYNPFEPETQHYYSRFKRCTYSLIARQLDTHYSKHKAFQFLQDNYADYTTFDALEDKLFEYDGFVNYDSFKQAFKEYEKYVSKTGSKPDKYTDLNTISKLPFELSLTADDNHIHEFKVENNQITLSVETPDCDNPDSHYDYSYTVLTTSIHPHLSELLQAGEARKPTIRLAHGNLYVDVPVKVKTVKFETTKDKVLSCDLGVKTQVTSTVVSKSENDEQEHLCQGSTPNFYNHPDKQKLYRVIANRKQVRSNTRQHDNLTSREVNLRDQIQHDTANYLVNKALAHKCEKIVLEDLSDLEAPSGMARTSERISSWARGDLLDKLKYKASLVGLDVETVNPWGTSQFCPKCSCHGERVNASNDLTENDAGGWFCEQCGFSADRDYIGALNVGRMFLSPTDRITRCKPVEYTSSGNSHAWFNSEAVEVDEERSPSVQPATLQSVEPHGSNSEAGDECCKKQSSVTRPALGFANIPTPIRRVLNHTT

SEQ ID NO: 25361 - protein, 402 aa, Escherichia sp.
VKRLQAFKFQLRPGGQQEREMRRFAGACRFVFNRALARQNENHEAGNKYIPYGKMASWLVEWKNATETQWLKDAPSQPLQQSLKDLEWAYKNFFQKRAAFPRFKKRGQNDAFRYPQGVKLDQENSRIFLPKLGWMRYRNSRQVTGVVKNVTVSQSCGKWYISIQTESEVSTPAHPSASMVGLDAGVAKLATLSDGTVFEPVNSFQKNQKTLARLQRQLSRKVKFSNNWQKQKRKIQRLHSCIANIRRDYLHKVTTAVSKNHAMIVIEDLKVSNMSKSAAGTVSQPGRNVRAKSGLNRSILDQGWYEMHRQLEYKQLWRGGQVLAVPPAYTSQRCAYCGHTAKENRLSQSKFRCQVCGYTANADVNGARNILAAGHAVLACGEMVQSGRPLKQEPTEMIQATA

SEQ ID NO: 25362 - protein, 293 aa, unknown
  TnpB Polypeptide
MSFLEVSTLEKTSTNRAIKELIPIYLPQKLSKKTGKVNGIHYREMFLEYLKTGEAYQVELLKRNGKYYAHITFNEAEIRPIYTGHKGMIGIDTNPDGFALTMIDNKGNYKWHTYLKQHELMYSRSNRRINQCGELVAEVIRIAKTYHCGIAIEDLKFKNDKDVTSKFARIKNQFIYSTLLAMLESSSIRNGVEIIKVKPQLTSKIGLYKYCHQYGMVVHNGAGMVIARRSYNLKEKVPKLIKDKLIDEIETFNKKNEWSRWNYINKQILRIRKEVKNPDLWLVNRKQILGNVV

SEQ ID NO: 25363 - protein, 319 aa, unknown
  TnpB Polypeptide
MPVFYRDVMYREGAEGKDEAYLKLYDGHDWKWSCVRLDHTDMEYLRKCWSGKKASAPTLEKRHRKYFLRFSYKEEVTLTKTPVKEQIICSVDLGINTDAVCTIMRADGTVLGRRFIDHPSEKDRMYRTLGRIRRSQREHGSAQTQGRWAYTKRLNTELGKKTAGAIVRYAEENHADVIVFEYLEMQGKISGKKKQKLHLWRKRDIQRRCEHQAHRKEMRISRICAWNTSRLAYDGSGAVTRDWENHSLCTFQTGKRYNCDLSASYNIGARYFIRELLKPLPATERSLLEAKVPAVKRRTSCVYADLRELSSEMGLLMAA

SEQ ID NO: 25364 - protein, 129 aa, unknown
  TnpB Polypeptide
MVQTSKDGQRMDFINKLSTRIIREYDIICIEDLKVENMLKNHNLAQSISDVSWSKFTTQLEYKAEWYGKVIKKVDTFYASSQTCHCCGYKNEETKDLNVRDWTCPKCHSNHDRDINASINILMQGILVN

SEQ ID NO: 25365 - protein, 397 aa, Pseudanabaena sp.
MYKAYKYRIHPTSEQETLLAKSFGCARWFWNYALNLCQETYKTTGKGLTRAYIQGLLPALKKEYEWLTEPYSQCLQVVALNLSTAYKNFFDKRAMLPKFKSKHGRQSISYPQNVKFDGDKINLPKIGLVHCQRHRDFEGTIKTVTVSRNPDGKHFVSVLVDDGKANPKLVSVDKAIGIDVGLTHFAITSDGSKFDNPKLFAKHQRNLKRKQQKLSKKKKDSQNRKKARLAVAKVHAKIARCREDFLHKLSRKIVNENQVIAVENLNIKGLVKNHNLAKAISDVGWGMFCTMLKYKAESEGRQYIEIDRWFPSSKTCHVCLNRVDNLNLDVRAWTCKHCGTHHDRDVNAAINIRNEALRIISLGTSESACGGDVSRSGKTSVLLDAIPVESGSQPCTA

SEQ ID NO: 25366 - protein, 446 aa, Lechevalieria sp.
MVTVIQAYRPLRSHCGGQRYAFNWGLARIKANLEQRAAEKSYNIPDSQLTPSVSWLAYGLRKDWNQAKHAVAPWWAENSKEAYSSGLANLATALTNWRDCRAGTRHGLEVRFPRFKGKRSGLSCRFTTGAFGLSDGDRRHVKLPRVGLVRTHESTRKLARHVERGTARIRSATVSYRGGRWFCSFSVQITRTDPAPAQPGSAVGVDLGVTSLAVLSTGDIVPNPRHLAVVLRELRRLQRQAARRTGPDKRTGQIPSNRWRRTQARITRLHARVANARRDGLHKLTTRLVRSFGTIVLEELNVSGMLRNRRLARHIACVGMGEVRRQVSYKTAWGGARLVVADRWYPSSKTCSDCGAVKAKLPLRVRMYRCDECGLVLDRDLNAARCLAGLVGRTAEGTSTASCAGTVNTPDGNPRQTHTVWATGTATGRPASPGVGQRRRRKATAV

SEQ ID NO: 25367 - protein, 238 aa, Bacillus sp.
LTYGTCSAKLPAMKKELVWLKEVDSIAMQSSVRNLADAYTRFKSKKNNVHSYTTKQTNENIAVIGNKIKLPKLGLVRFAKSREVEGRIVNAIVRRNPSGRYFVSLLVETEVQELPKTSSYIRMDVGLKNFAILSDGTTYKNPEFFRSLEEKLAKAQRVLSRRMKGSSRWNNQRVKVARIHEYISNARKDYLDKISTEIIKNHDVIGIEDLQVSNMLKNHKLAKAISEVSWSQFRSMLE

SEQ ID NO: 25368 - protein, 199 aa, unknown
  TnpB Polypeptide
VRSCVYNVNYHIVLYIASDGAEADFHKPYRDLEYRIAREQRKLSHMVRGSFNYKKQCVCIAKLHAKAKHQRSDTLHKLSCSLTDRYDVISIEDLDMRAMKRSLKFGKSVSDNGWGMFVSILGYKAELKGKAIVKVDKWFPSSKTCCARGYIHKELLLKDRVCICPACGNVMGRDVQAAVNIDREGLRIFLEEEAGTLAS

SEQ ID NO: 25369 - protein, 377 aa, unknown
  TnpB Polypeptide
MKITRSTKCSVKFATSKKRCELKTILAEYGKVVNIFIDYFWDKKMDKAQLLKPIVDLPKDSWLSARLRKVAAREALDMISASKERWKDKPSKLVKPVHKGKRMYVSCTIAELKDSKDAKEFDAWLHIASVGNKITMDIPIRFHKHYNKLCIKGRRLNSYIITDRYVQFVFETETGAKRDGKKCIGIDTGINALASLSTGKQLGLDIKQGIERVKRCKQGSRGKDRARRALKQRIDEVAKEAIKNVDLIVVESLKKMGHNGKLKRRLSKNIRRSIGSWNWKYWLGRLEQQAEQNRVSFRTVSPCYTSQTCPTCSHTDRGNRSGEVFRCLKCGYTDNADINAARNILNRFLSGPYGAAYKPENQAILACPELSSLQGTV

SEQ ID NO: 25370 - protein, 526 aa, unknown
  TnpB Polypeptide
LKEQSFETNEDKKDSENEKDIDQKIVSRYLNYENDFSKMMRVTEEYQALPAQTAQQTLKLHDQAWKNYWLLKKDFNLKRKKYGLNSEECPPRPGIPRYKDSDGEMVAIIPTAGMFYVAKYKGKIYENTYTKHFVNTLRITKYKSHFRATAEIKFPEKTNLSPIRFRIPFFKTEQDVKDFKELDHPEQIKFLRNRIQQFRIVPKSWGYKAEMVYKVPLEELNLEKKKAKLDPNRDAAIDIGVNILAAIANNFGENPILIYGKRVKEINYYANRFYAYLQSAIDFMKNEDNLTWKRIDEIINALPPDLKKIVKFKRKTIRKSSDMVQELKKLQRQVAKKRYNRLENEFHRVANRIRDDFVKHRIGIVAIGRPKGWKKDIKKRVHRKTLDKFNRKFQMIPFDSFINKLWYKLAKEGIKVVTGSEDYTSKCSSLDQEKIGKHKRYLGVRAPYMKGRRKGGIGTKYYKARGLFKSKKYGYIHSDANGAFNIGRKLLPSYFSNIPRSDMKLSPIGRFKFDKSQYVVTPPNSP

SEQ ID NO: 25371 - protein, 236 aa, Klebsiella sp.
VRWSRELPSAPSTVTLSRDAAGRYFVSCICEFEPVSLPVTAKMVGIDVGLKDLFVTDTGFKSGNPRHTAKYAVRLALLQRRLSKKVKGSKNRAKARLKVARLHAKIADCRMDDLHKATRKLINENQVVCVESLKVKNMIRNPSLSRAIADAGWGEFTRQLAYKGEWAGRSVVAIDPFFPSSKRCSCCGFTMQKMPLDVRKWSCPECGADHDRDVNAARNIKAAGLAVLACGVAVNP

SEQ ID NO: 25372 - protein, 382 aa, Okeania sp.
LITLTYQYKLKTSKHQESEINKILDVCKTVYNYALKERKDWLSSRKSSINNCSIISEYIIPAEAPYPNYNVQAKNLTIAKKTNPKLKSVNAQVLQQTLKTLDRAFSEMKSLGKSFPRFKKRMRSFVFPAMLKNCFGNSRVKLPQLGWLKIRHSRPYPEGMVAKQARVVKKATGSYVLISFQSLESVPDNSVGKISLGIDARIESFIATSTGELIKSPKFLLSKLRQMKLLQRRLKHKNKGSKNWLKLQNRIARLHEKISNTRRDWHFKLAHKFCDLSDNIFVEDINFNSWSRGIVRKQSLDSGIGQFINEILPFVCWKRGKYYEKIDKDYTSQECPRCGHIEKKKLSDRMHNCSNCNYKINRDVAAAKIIEKRGLKAVGHTV

SEQ ID NO: 25373 - protein, 359 aa, unknown
  TnpB Polypeptide
MICFKYRIYPSRKTKKTIDRTLWLCRTLYNAALNERNDSYKLEGKSLNYYDQANSLTFLKENNPCFKQVHSQVLQDVLKRLDKAYQAFFRRVKAGETAGFPRFQGKERYNSFTYPQGGYSVVGNKLELSKIGKVRIFLHRPIEGKVKTCTIIRKNGKYYACFSCEVEPYQLPLTGRAVGIDMGIKEFCVTSDGEMIASPKTYRKAERRLKQLQRAVSRKKKGGKNRRKAVKLLAKQHEHVANQRKDIAFKTAKYLLDNYDLIAHEDLNIAGMVKNRHLAKGILDAGWGIFFNILESKAKQTLGKQVIAVDPKYTSQKCSKCGEIVPKKLSVRIHKCPHCGLEIDRDWNAAINILHMAVA

SEQ ID NO: 25374 - protein, 424 aa, unknown
  TnpB Polypeptide
MQLTEQHIIGRDDPRFAVIDAAAFQSKNLYNAALYEIRQAFIHEGVYLNYSKMDKRMQPHEAYKALPAKVSQQVLRQLDDVWTSFFEALEAYKEDSSKFTGRPRLPKYKHKTEGRNVLIYTLQAISGEQTLHKSRGKSALRHGIIKPSMLPIEVKTQQDPKTIDQVRIVPRNGYYVVEVIYSKDPVQAHLDPSFCIAIDLGVTNLAAITANREGFVPRLVNGRTLKARNQWYNKRMKELKLCLPKAERDRVTKQMQRITNKRNRQVDHYLHAASKAIIDLMVKEGAGTLIIGKNPLWKQEVNNGRRNNQNFVNIPHARLIEMLTYKASLVGIQVELQEESYTSKASFLDLDPIPTYRPDDETEHTFSGKRMGRRNRLYRAKDGRKICADVNGSYNILRKRKPDAFKAEGIAAYVVQPLRLAITV

SEQ ID NO: 25375 - protein, 455 aa, unknown
  TnpB Polypeptide
  misc_feature (38)..(39): Xaa can be any naturally occurring amino acid
  misc_feature (45)..(45): Xaa can be any naturally occurring amino acid
LCPEFKSLQLFLQLFIEIAQGNPRLQSWEELCFTSVTXXYSEHIXIISEKTLRKTILLNCLPLTARKKGILDNLFSEFLRVLNLTFEQLPDAKSANELHHLTYSNIRSTSFLTSDIVQEARKDVWAKRKTVKTRFQKCSIRLNKRWFKFFKTERGTPCFRVTYSPRKTFVIPIKADNRFMRFNTFIEAKWTIKAISLLHGKIAASIEKAYPEPTNTRRYVVGVDVGSATLAAVTVFDTETGKTVKQLYLGRDVAVRQRRYLERRKRLQSHADKGSMKAKKYLKRMKRKQRNFVKTRSGQVAKEIMNLANGYNASIAIEDLEIRGRKHQFNKKSNRKINKIPYAQLREFLTSSCEETSTYFDKVDAYHTSKWCPHCGSVNPGHSSVNYALYVCNNCGKVVNSDRKASKVIAIKSALEREHSQGLTNLFTQFSSAGVAVDQLFRPDDEISSDAVHFT

SEQ ID NO: 25376 - protein, 364 aa, Crenothrix sp.
MKPIIKTLSVRVRDKHAKQLRQWAFEVNQVWNAANAESAEFSWVGIPEVGFMNCQTSEFDLNKSLVGIRAERNMTIGAATVQSTIAQHAKSRKQFKKNKLNWRCSGGAKKALGWIPFKAAGIKWVNGCVRFCGQYFKVYDSYGLSQLELGTGCFSEDSRGRWYFNTTVKYQPTPRQAEGGQIGIDLGLKTTATCSNGDSLERQDCYRNLELKLGKAQRARDKKRVKAIHAKIKNTRKDAIHKFTNKIVCENSLIIVGNVSSQKLAKTKMAKSVLDAGWFMLKTQLEYKSIATQGVFLEVNESYTTQTCSCCGVISQSSPKGRAGLRIREWTCAECGTTHDRDINAAKNILALGHKRLAVGIPLL

SEQ ID NO: 25377 - protein, 404 aa, Pannonibacter sp.
MAMRKVTYRLYPNKRQLAELERHTELHRALYNAALQERIEAFRKNGVSISLGDQSASLTQIRNEDPEYNRLPRKALVHTLERLDRAFAKFFERNRAGLKGGFPRFKSKDCFNGFGFRVHRDGARFDPGEDGRHGRLYVRDIPGLIKARGRPRELGKIKDLCITRKADQWFVVVTMEVEANRTSGGDVFAFDWGVETYVTGLSSNDEVVVFDNDRIGKRHRAKLVRLSQQLARQKRGSKRRERTKLQLSREQRRLANARKDRAHKTSAHIVSRSCVVAFEKLTPSNMTRSVRGTADAPGKNVRQKTGLNREVLDTAPGALMTMIKYKAEEAGVWVLEAPTGKLKPSQRCPSCNAVKKKTLDQRVHSCPCGYEEPRDLASARVVLNWAMEGLGREPVMRDGLALAA

SEQ ID NO: 25378 - protein, 392 aa, unknown
  TnpB Polypeptide
MTDLDSIKIQRSYKFRCYPGSVQRQQLAVEFGHARWVWNQCLAWRSNLYQDVGEKVTAIDFSRELTFLKQLGTYDWLKEASACVLQQKLRDQDTAFRNFFAGRAKYPKFKKKLHGQSIRYQLDQRIVANLYRAGEFLKLPKLGELKLKWSRKPLGIPKMVTITKDCTGHYFASFTCEESIQPLPQKPSGIGVDLGLKDVVVTSSGWKSGNPRYLLTYRRQLTKTQRRLSRRVKGSQRWHCQRMRVANAHARVRNTRQDWLHKLSTTLIGQAGFIAMEDLNVKGMMANRRLAKSISDVGMDELKRQLEYKAKWTGCEWVQVDRWAPTSKTCSTCGTVQETIPLSVREWTCQDCQTVHDRDINAAKNILALATLGRRESDVRGGVHKLEADYAC

SEQ ID NO: 25379 - protein, 390 aa, unknown
  TnpB Polypeptide
MTESNSTKIQRSYKFRCYPNSIQRQQLSIEFGHARWVWNSCLAWRTNIYKVYGEKVTAIDFSRELTFLKQLDTYSWLKEASATVLNQKLRDQDIAFRNFFAGRAKYPKFKKKLHAQSIRYQLDQRIITNLYRAGEFIKLPKLGVLKLKWSRKPIDIPKVVTVIKDCTDHYFVSFMCEESIQPLPRKPNGIGIDLGVRDVVVTSEGWKSGNPKHLRLHARTLKKAQRRFSRKIKGSKRWHKQRVIVANVHAKVRNTRQDWIHKLSTTLIYQAGFIAMEDLNVKGMMANRRLSKAIGDVGMHDLNRQLEYKAKWAGTEFVQVNRWAPTSKTCSECSSVQETMPLSVRNWTCPDCNISHDRDVNAAKNILALATVGRIESYARGGVHKLEVVV

SEQ ID NO: 25380 - protein, 323 aa, unknown
  TnpB Polypeptide
MYINVLWTQDEALKRFFSKQSKYPRFKKRHQVKSCCYTLDKRRGAKIFKPNDLPKLGKVKVVWSFQEIPVTPNSATVSCNSSGQWFISLQCDYIDVINPPETDKAIGLDFGLTPFIADSNGNRVKPRKFYFKYLRKLKSAQRDLSRKVKGSSNRAKNRIGVARIHQRIASKRGNFLHDLSTSIVRENQVTAIEDLNVRGIMANGKLARAVGDCDWSELRCQLTYKAQWYGRQLMTIGRFERSIGICPDCGSIGEKLLVNVREWECKECHAHHDRDSAAAKVILQKALTCLSACRQDRSGRQDTVRRTGIKACGLADKPEACLV

SEQ ID NO: 25381 - protein, 378 aa, Proteobacteria sp.
MLKEMKYRLNPTKKQARLLQSQLEECRCLYNHFLEERKRGWDERQESLTYYGQKATLPALKAYRPELSAVHSQVLQDVVMRVDLAFKAYFRRCKARDGKPGYPRFRGYGRYDSMTFPQYGNGCHLVDGVLKLSKVGALRVVQHRPLEGIPKTCTIRRSSTGKWYVTIACEVDAHPLPSTGEAVGIDVGLLSFATLSTGESTSCPKFLRTEEKDLKRTQRQLSAATNGTPERRKRRKVVARVHERITNRRTNFAHQESRRLVNRYDAIAVEDLSVNRMVHNHCLAKSIQDAAWSQFATFLSYKAAWAGRAFVAVNPAYTSQDCSGCGHRQKKTLAERVHSCACCGLILDRDHNAALNIKRLGLQSLGLSLEAPGLSRGE

SEQ ID NO: 25382 - protein, 420 aa, Moorella sp.
MSQLKRNTAAKKSKGQTQGDVLVEKLPLRLKSHEEELARDIQRESAKVWNTVMTIHRLFWFKYGIWIDEATMKEFLKGRFSVHSQDVQAIIENYYECWERTKKLHEEGHTEWRYPWRLKRFFTSTWKVTGITVEDGYLRLSNGWKKPPLKIKLPARLKGLEIKQVQLVWHRNEYWLHIAVDKPALEKVQGEAVAAVDPGEVHALTLTDGREALVISGRHLRSLRRLRNKTLKKFQKAISRTKKGSDRRKKLLAAKYRFLNWIGVQISHTEHAVTKMAVNWSLQRGVKKVYIGDPQGVREQDCGRHHNQRMSQWSFGRLRDLLEYKLKRHGITLEKIEERGTSGTCPICGKYTKQAGRVYRCGDRDCGFGGVHRDVIGATGILDLAVNGRFTFGRKLPETVSYVRPAVLTPMPGHKKKKAA

SEQ ID NO: 25383 - protein, 472 aa, unknown
  TnpB Polypeptide
MAYHAYQAKSPMNQGKVEALRALLPVWRAGLTLAMSCWTRPFVQSGVLPRWIDSKGFPDMLSQRQWDSVDRQARAALDSWIALREDEFRKTVNGSTLSPDLKHALHRINLRHAWWESVADDAHKMARRIIKHLRERVPFPDMRRCRTMSMDGKIARVGTPVNAFHFQYWAVVSTLDKGHPVRIPLTVDPRMNENTLHGDEQAANHLQARINRDGSIDLHLMTVKTKARKRSSGMVIGMDWGLKSLFATSQGQLHGLKLYTWLQQRDKELTALTRALAKSGIRYRQSRRYRNLNKRIRDYTRNEVNRILNLLSRQEIREIVVEELDFRNGGLSKKMNRIISRAGRNAVKAKLKDLEDNKGITVTKVNPAYTSQECPSCGYVNPRNRPTQEHFRCTCCGYRSQADINASHNILARRSREDGWRRIGRRQILAMLLREHDERFHPTGGHAAKSAATPRVVSTTPRVKATSGRKYH

SEQ ID NO: 25384 - protein, 367 aa, unknown
  TnpB Polypeptide
MMVQTYRYRLMPTKTQEKILSRQLDLCRWVYNDALAYRKNAWETEHRQVKHFETQDRLPQLKIEHPELREVHSHVLQNVTMRVELAFKAFFRRVKSGENPGYPRFKGYGRYDSLTYTESGFKLVDNVLHLSKIGDIKIKLHRAIKGNITRLTVRKSATGKWYVSFLTDSNDKNQLPPSNGVVGIDVGISTFAMLSDGSKINNPKFIRSDEKALAKAQRKLSKQPKGTILRKKARKVVSHIHERIANRREDFIHKTSRKLVNTYGTICFEDLNINNMVKNHCLAKSIMDCSWGKLVQYTSYKAADAGRTVVLVDPRNTSKMCSDCGNLVEKDLSGRVHVCPYCGLTLDRDLNAAKNILRLGLQSVEKS

SEQ ID NO: 25385 - protein, 368 aa, Lachnospiraceae sp.
MNIAYRFRIYPTREQEVLLAKTFGCCRFLYNQMLGDKKREYGTTKKMLRNTPAMYKKEYPFLKEVDSLALANVQLHLEKAYKNFFRDPKIGFPKFKSKHRSRKSYTTNVVNGNIQIGEHRIKLPKLKWIRMKIHRDIPTEYCLKSVTVSMEASGKYYASLLYEKSGCENQAEELDYEKAKILGIDYAMHGMAVFSDDIKEKNTGYFRKNSERLAREQRKLSHCVKGSRNYDRQKKRVALCHEKIRNQRNDFLHKLSREIADAYDIVAVEDIDMKAMGQCMHWGKSVMDNAYGKFRELLEYKLVWNGKKMVRVDRFFPSSKKCCKCGRVKKELKLSERVYICVCGNRMDRDRNAAINIREEARRMLMAG

SEQ ID NO: 25386 - protein, 249 aa, Bacillus sp.
MTKHNKAYKFRLYPTEEQAYLMRKTFGCVRFVYNRMLAERKEAYEKYKDDKEQLKKQKPPTPAKYKAEFEWLKEVDSLALANAQINLQTAYKNFFSGQNDFPTFKSKKDRKSYTTNVVNGNIMLLNRHIKLPKLKMVRIKQHREIPQDYRIKSCTISMTPTGKYYVSILTEYEKEIVQKEVETVVGLDFAMDGLYVSSEDKKANYPNFYRNMLDRLAKAQRVLSRRNKGYERWQKQRIRVAKLHEKVAN

SEQ ID NO: 25387 - protein, 596 aa, Nitrospiraceae sp.
MGKQKVHNNIDPISFTAGTLLPDMSFPGSRPFTLHEFCTDMGKFYGRIKRTLFKEAQSTGRPAMSFKNKYLKAFGITARQFNAIRIDLQGNIDSALEIQDGRIEDLSDGIKSVRKWLKAKEAKISKVQADKKLSNSARHDILQPLRFVVHNKKRRLAIMGAKLAALKQDKKKKRVRICFGSKSLFHKQFELTENGYAFHEEWFKDWQATRDAIFFFVGSHEETGGNQTCTLTADSKLRVRVPDALIEKYGRHVIIPAVHYPYGQEIIDTALIIKQALTHRFLCKDGKWYLHTTVALPCKPKVTHHPRNIGCIAIDVNEKEIAVAETDRFGNYVWSRTYPAYVKDLSTDQTEALYGDLCKAIIARCVAKGKPLAHERLDFQKKKSTLREQGVRYSRMLSQFAYATFLNTLDRRAFKSGVIVYTDNPAYTSVIGKVNFMGRYGITSHEAAAIVIARRIQRYSETPIKEAWNLPMRAEIKNKKHIKTESPASTNSTSPVPGRKRGKHVWSFWIRLKVGGACDNLNVLYRVRRPSQSSTSCATSSTLITPAGAVLSDTDCPVDSTASGVTPNIANHGACVESGRASPTSVGDNTVRSPHF

SEQ ID NO: 25388 - protein, 410 aa, Xylella sp.
MLMAHRIALDPNNVQATHLSRVAGVARFAYNWALAEWRHQYEACTLDSALPKPSQHSLRRQLNAIKREQFPWMGEVTKNAPQMAIIQLGQAFQNFFTGRAKYPKFRKKGAHDRFTLTNDQFDLNASRIRIPRLGWVRMRETLRFAGRIMSATVSRVAARWFVSITVDVPDPSHLPQAENQGAVGVDLGVLALATLSTGETICGPRPHRALLGRVRRLSRSVSRKVKDSANRHKAKATLAHLHARIAAIRLDALHKLTSDLTRRFHTIGIENLNVKGMVKNRHLARSIADMGFFEFRRQLEYKAAMRGGQVVVADRFFASSKMCSTCGHTLKELPLSVRQWACLGCGTRHDRDVNAAVNLKNMAVSSTVSACGEEGTGPRRKTAVKPASVKQEVSFESVETDLSRYDRTAT

SEQ ID NO: 25389 - protein, 521 aa, unknown
  TnpB Polypeptide
MPSIPLQTEKLFGPKIIRSEAHALRMNHATRMDVERTIAFYRRVVKMVSTIAMTHWPEFGSLTGNEPAKALERLIHPTSKRPTIRYAVVSRALGKMPSYLRRAALEHAVGCVSSFLSNYSNWIDELNDKSRAMGVKPPRLGFSNVFPSLYGGNMIEVGTTPAAKQEINEARVARSFKKSLTFIGPMRPVKKIDTSKGLATGLVCIKLLMANGQWEFCKPLSLQCKKKRLAADGSMDLSPSLMQRGAKVWLNCPVAVRPPRYIANESFKKEVDGHAQRVCSIDVGINTAATAAIVDSTGTVIERNFFTCGRHNDQRDRLQAMIAKKQSQTVGSSDSKVGKGFCASLARRIAGLNKDAARQLSSGIMAFAREHGAKAIVIEALKGWRPKGPNKAQRKRFHRFQHRMLVECLQHAAAELGIRVIEVYAGGTSRWAYDGSGKLKRSKKSAQLATFASGKRYNADLNGALNIAGRGIAMLLGIKVDTGKRSGSIAGMPLVLSDVWKHHRTSVDQTNQPALLAGVCA

SEQ ID NO: 25390 - protein, 278 aa, unknown
  TnpB Polypeptide
MLGGIILRRGRKPRVRKLSMLLHPGQSYWIRDGYVEIIGGIKLRIIGWDRRYDGYENGEARLVYRDNKMMLWISKKIPKPQPHQPRDVIAVDINERKIVYGDNRINKEMDTKIGEAHRWKKLAENLQKKYSSTKYLAWRRRKAILNRIRSYHRKARNILEDWARKTSLRIVGLAKKLGYAVAREDLTGLINSLRKVRNKDHRTKLIIMGYSRLGRWIDWQAMKHGAPIVIVDPRDTSSECPQCDSKMAENGYRRLKCPSCGFEADREVVGKLNTRRGL

SEQ ID NO: 25391 - protein, 370 aa, Paenibacillus sp.
MILAKKVRIKPTPEQEQQLWRSAGTARWVYNWTLVRQEENYQNGGKFLPDGKLRKELTLLKQQEAYAWLYEVSNNVAKQAVKDACEAFKKMFKGQSKKPKFKSRKRSKPAFYNDTEKLKVKDGQVLLEKIGWVETSEQLHVGVKYSNPRISYDGKYWYISIAFDQKQESLLPTGEIIGIDVGLKELAVCSNGMAFKNINKSATVRKTEKRLRRLQCKASRKYDMNKEGNRFVKTCNVVKVERSIRLLHRKLTNIRTNYIHQATNAIAKTKPSVIVMEDLNVSGMMKNRHLSKAIAGQKLQEFIRQMKYKCEKIGAKFIQADKWFPSSKLCSCCGQMKSHLKLSERIYECKCGLKIDRDLNAAINLSKLAM

SEQ ID NO: 25392 - protein, 264 aa, Streptomyces sp.
VAVDQALSVDASVIYVEDLRSMEARGMGRTLNTRLSQQVRGRIVERMRHLAAEVGIAVVTVPARGTSRHCPRCLAPLRHRKAPDRPTTPGWKWALCPSPGCSWQGDRDTGAWQRIAARGLAHQTKTVTDRTTGAMAIRSVVDELEAIAVVNRATVQTRRKDRTKNGPTRRPPTRPAPRRRRAPSPTGPSGPAGRRPEGHAPTGRRPLPRAAHRHQGVTTISTPTNRHRPRGAARGAGFHLHAHASPPRWAGPVPDTSSCMGSPN

SEQ ID NO: 25393 - protein, 414 aa, Planktothrix sp.
MSQLFGCCRVVFNDALAYCQDQHRAGNKKPSSSELSKRLTELKKTEEKEWLTEVSSVPLQQSLRDLEQAYSNFFKSCKGQRKGKKVKPPRFKKRKSKQSARFTDNGFKLYPDSHYIHLAKIGDINVIWSRELPAIPSSVTLIKDSADRYFVSFVVEFNPKQLLKNGQSVGIDLGITDFATLSNGEKVKSPKPLKKQLKRLKKLQRNLSRKQKGSKRREIARKKLAKLHVKISDTRNDFLHELSTKIIRENQTIVLEDLNVSGMIKNRKLSRAISDLGWRSFRTMLEAKSVMYGRDFQVIERWIPTSQICSCCGFHSGKKELNIREWICLNCGTSHDRDVNAAVNILACTEPHSTPLMAGFDCVQENPGRIVAGGLSETLNGRGGRHKTTAKVAVASEASTHPAFQQLSIFDLLK

SEQ ID NO: 25394 - protein, 387 aa, unknown
  TnpB Polypeptide
MRKLLKSFKTEINPTEEQKAKIRKTIGTCRYIYNFYLAHNKELYDKGEKFMSGKSFSVWLNNEYLPQNPDKLWMKEVSSKSVKRSIENGCIAFTRFFKHQSAFPNFKKKGRSDVKMYFVKNNPKDCRCERHRINIPSLGWVRIKEKGYIPITKDGYAIKSGHVSIKADRYYVSVLIEIPNNKTADNSNEGIGIDLGLKDFAIVSNGKTYKNINKSAGLKKLEKQLVREQRCLSRKYENLKKGESTQKANIQKQRLKVQKLHHRIDNIRTDYINKTIAEIVKTKPSYITIEDLNISGMMKNKHLSKAVASQKFYEFRIKLQAKCKENGIELRVVDRWFPSSKTCHCCGAVRKDLKLSDRIFKCDCGYTEDRDFNAALNLRDAMTYEVA

SEQ ID NO: 25395 - protein, 457 aa, unknown
  TnpB Polypeptide
MPSSGQLLGHEEREPTSPAIPEEGIYEVKYTNRRTNVVRLLPNGFQERKLRKLADACAKLFNEVNYERRQQFFRGEKVDFKLTWDKYYDKYKDILGVNAQAVLQKNNEAWSSFFSLLKLKKQGKLPPHMNHVSPSRYWKESKKRKLILVVRQDRYEVDEKNNKLILKDFGLEIEFAGMLRWYGKQGRLEIYYDDAENAWYASIPVEVGVEHTKTGKKSKWIVRGERKAIQIASPKGNKVASIDLGINVLVSVIIDDGTWLLYKGVRAKEDYFYLQRKIAEVQSLADKARNIAEYEAQEGLNREKRRLFKKLTRRLLHLYRSLASDLLKQLYDQGVSIIYLGYPFNIAQDKGNKFTVNLWLYRKLMNIIELEAQEYGMKVYEVVEYNTSRYCAYHDVEVNRKPRGVVSCPKGHKLHSDLNGALNILKKAIGTVVSTMRKPLSFLVLHNGVAPIKGCNT

SEQ ID NO: 25396 - protein, 411 aa, unknown
  TnpB Polypeptide
MRESIRSENRRIPEGAYCRALKAVIEVVEDNINDLLWDLLLYKHAMQRVVDALWDLDKVPSRSQSHRMFYNVLRSYGFRAHVARNIYEYALALVKAARESNGSKPTLRRLSARLDYQDARVELGKGVVRIILRHKWYALRLRHRKRYIERFRNLKWKEVHVKYENGKLFVSIVFEFRYEPYVPKDIIALDINLKAVTAYNGSKVRRFRTRFVDALSKRRRAEELQKKYPKKWRYNEKILERVRSLHKRARNIVVDWCWKFTKQVVLKALRHGYAIALENLEDLKENANNKSDEVVWKLAMFAYRRLQHSIISKALEYGVPIVVVDPSNTSSTCPRCGSKLVYIHRLATCKKCGFNADRDSVGAMNIWLRAFKAYAGVCGSPLSAPAMKGEARRSRGTSHEGMKKIFTAIHS

SEQ ID NO: 25397 - protein, 417 aa, Microcoleus sp.
MLLTYQYRLQATTEQVATLSHWGELLRRHWNYALGQRLDWLRRTRCQLDRCSLISEPIGDIPDSVNYYSQAADLKETKRLFPEYKDIYADCQQQNLMRLDRAGKRWLVPDKTGKRGGKPRFKKPGDICSFTFPRVNSPKAGAHLIGSILKLSKIGEIPVVLHRPIPDGFEIKQATIIGKADGWYVSFSLEDNTVASPLPVDEIKSACGIDVGLEKFLTTSSGEAVAVPQFYRKSQVALARQQRKLSRKEKGSKNYQKQANKVALWHLYIARQRKDFHYLVAHWLCLNYDLIGFEKLNIKGLARTRLAKSILDVAWGAFLKILQAVAVRRGKHTQEVDARGTSIECFNCGEKVVKNLSVRVHNCPNCGVSLDRDLNASLVILKRTVGQPFAACGGLAVAQPVKQELSFVKLRSPCHTA

SEQ ID NO: 25398 - protein, 470 aa, Oceanobacillus sp.
VDFTKKEEIILDGQSKICNWLYNQLLDACRKDYLENNNTLELLKGRNLRNYGVSLKKEYPFLNSVFSSVLKEPSARLKRAYEGFFKSGRGYPKFRSWKKKWFSLVFDEPNKGWGLQNDGNSLLISLGNIPDMPVKKGRRNPAVIGKLKEPLQLIEGELLKTLTICKQQGVFYAVFSIEKCSVEELEHKQKMSDYRKICNKIKKENKTLDENMQIPLPTKPVLKEKKVEIPEEVKWISLDPNHKNFFVGVDDIGDSIEFDKLQEIKYWDKKIDKLKSFRDRCQKKYRKRETKHGNKYVVHSPRWNRFNRALDKAYHCRREQIKTALFTIAHELYRHYDLVIIGDYTPTNGTARFKNTKRSMLNQEKIGEFRLVLKWVASKLRKYYIKANEHHTTKECCVCGHLKKKEPNIRIFKCVSCGTRLMRDNNSSVNIAKKVNFLLDIQKYKDKLITFTFKGEYRYGQKVSIIKNKL

SEQ ID NO: 25399 - protein, 404 aa, Xylella sp.
MQRLQTFKYELRPDGQQERHMRCFAGSCRFVFNKALALQKEHYEQREKKLGYAGLCKRLTAWRNSTETAWLADAPVHPLQQSLKDLERAYANFFAKRADFPRFKKKGQSSSFRYPDPKQIRCDQDNSRIFLPKLGWIRYRNSRNVLGTVKNVTVSQSCGKWYVSIQTSHEVPEPIHPSSSMVGMDAGVAQLATLSDGTIYLPVNSFKSSQKKLARLQRQSSHKVKFSHNWQKQRRKIQQLHSRIANIRKDYLHKVTTAISKNHAMIVIEDLKVSRMSRSARGTVSQPGRNVLAKSGMNRSILDQGWHEMRRQLEYKQHWRGGHVIAIRPAYTSQRCACCGHTVKENRRSQSEFQCLGCGYTAHADMNAARNILAAGHAVLACGGRVQSGRPLKQEPTEAALAPA

SEQ ID NO: 25400 - protein, 401 aa, unknown
  TnpB Polypeptide
MLARRGFRYRIYPTPEQAARLRQWEGALRVLWNLAHEQRLAYLRRHAKLPSAFDQINKLTGLRAAVPWMADVPRNVSAQLLVDLDSAWQRCVSRLGHRPRWKKKGRDVISITEPHPKGFRLTEAGVVFPKLGEVRAVRHRPCVGVPKRCTIVREVDQWFVSIVCEQDVAEPESRTAPVVAIDRGITNLLADSDGVLVPNPKHLDAALKRLAHAQRVVARRQKGSRRRERAKLRVATLHRTIRRQRQHLLHVLSHRYAKSHGTVVVENLNVKGMVRGSLGRQIHSAGWSSFCSMLRYKLAATGGTLVEVQAHYSSQTCPACGVVDAASRFGEVFCCVACGHRAHADLNAAQVLLSRRNGGDAGRGGYGEVSRPVKRQLRVARRGHSTEHRLGLLKSPGLQSG

SEQ ID NO: 25401 - protein, 367 aa, unknown
  TnpB Polypeptide
MKAHRAVLMPLPPECDVRYIRRLMALTNLAYRGYTVTAPDMLRYVQHQLFSWREFKRSLVFGATPKRWLAGTWIPLKTYRIFPDGRRIGDPNAPVVLDFMRNVIRVRQVCRNQPRYSVELPMSRWVLERMIEGGDIKFAKVGVRRGKLYLALVAERKVQPIQPSGYALVIDVNSWKHGVAWALIKGDRIVKWTRERPDLGYIERMYSELVGLERKYGILKRLGLHETLEGRKLWLKIKHKRRKLHKYLRDFAQRLTSRLAKKAMKRRTRVVIDDMLDESRRELLEERISSGLAKVYFSSVRHFVELFVNQLRWYGVPYEFKRLYSTICPRCGAKMKELPSRIMKCENCNFSVHRDFVPVLWFLQGSR

SEQ ID NO: 25402 - protein, 418 aa, Bacteroidia sp.
MFLTQSNVIRHLSKDEYAMLAEMCRYANNMYNVALYNIRQYYFHEKKFLTYESNYHECKTNENYKLLQAGVAQQILKVADRSFKSFFNLVKKAKAGEYRFQDIKIPHYREKGGMFLLVLSTNAINIKDGFLQVPMSRAFSRLHCGKTIKIPFPERLSGKKIKEVRILPVFKGQYFKIQYVYEHEQKNLGLDESNTLAIDIGLENLATCVTTIGTSFIMDGRKLKSINQYWNKRKAHLQSIADKQGMKSTKLIQRITTKRNNRAKDYIRKTARYIVNYCIEHNIGTIVCGYNGDFKRFINLGKVTNQQFTQISFGSLREQLANLCEQYGMRYIEQEESYTSKSSFLDMDKLPVYNPEQPYTGSFSGKRIRRGLYRFADGRTANADLNGAANILRKSKQNFDFEELCKGLLASPLRIRVA

SEQ ID NO: 25403 - protein, 288 aa, unknown
  TnpB Polypeptide
MVCCAAETYGYGIFKKTLVGQKASAPTLEKKHDKYFLRFTYAEEVALNRTPVKEQTICSVDLGINTDAVCTIMRPDGTILGRKFINFPSDKDRMYRVLGRIRRFQREHGSRQVQGRWAYAKRLNTELGKKIAREIVFYASENRADVIVFEYLEMKGKLSGKKKQKLQMWRKRDIQKRCGQQAHRKGIRISRICAWNTSRLAFDGSGKIDRDIQDHRLCTFQNGKRYNCDLSASYNIGARYFIREILKPLPATERSLLEAKVPAVKRRTSCVYADLRDLISEMELRKAA

SEQ ID NO: 25404 - protein, 473 aa, unknown
  TnpB Polypeptide
MFNIVNIKKFIALRNKEKLMYHHQFITSTLNTASTVKLAHKIELIPTTAQQEYFAKACGVSRFAYNWALANWNSQYKNWKEAEDEAKKNGTVNHLSKPKEYELRKQFNAIKSEQYPFVKEITKCAVQQSIKDVGVAFVRFFKKTSNYPQFHKKGRHDSFYMDNVSFKVVGKKIHIPKLGWVKMRENLRFYGKIMSATVSRIADRWFVSIQVDVPFESLPVAKKLCSENQTTTNKGVAALLSKTGSEKQSKDEKVVGIDLGIKTMATLSYADKIEPSKIDAPKPLKRLLTKLKRLQRKLSRQGIHYTMEDYVDANGETRKIRKYSNNYIKTKIKLARLHARISNIRQDFLHKLTTRLVKEFDVICIEDLNVKGMMANHKLARAIMDLGFYEFKRQLLYKAQMWQRMVIIADRWYHSSKTCSHCGEKLKELELSDRDWECPHCHTTHDRDVNAAMNLRKLYFNNLSVVEPTTQHT

SEQ ID NO: 25405 - protein, 505 aa, unknown
  TnpB Polypeptide
MAKATKTIKQPLRYKAAHASWFVATKTLFNQVAAFYFEVIQAHPSILDLSSKEALTALEKLTHTTKDNPHPVMPLSDVITADLPATFRRAALHAALGSARSFYTHLEQWRKQKEKTQAKGKKFTIRPPVPPRSWNKSVLLYAGQWKERTPKSIMLKLWTGSSWAWIKCHIHGQDIPDGWDRESPTLVQDGHHWNLHTAMQKKFASPAKVEQQITKRPEVRICAVDLNITKHLAVCTIQTVEGTVVATRFIGGGKQLHGLRKRQLGRVARNRSKTGIIAKGEQDNVALWAKIRALDEDRAHQVSHRIIEFAKEHQASILVFEHLGHFTPHKGKYSHRGNEKRSYWLRGKIYHDSTYKAWNEQILTCRVSPRNTSRECARCGSLIARYDAGKPAEGYTPGAPLVYCPHCHMRGNADRNAALIIGKRLLARYQQTTSQEKPQAPLVPERPVKTGGARRSQVARGNGRPSTNLARHGRANAQGTAQDTKGRMVPSVSGIAHPLRVCSES

SEQ ID NO: 25406 - protein, 398 aa, Microcoleus sp.
MIVLEFKLKGKPQQYRVIDEMIRTAQFVRNQALRYWIDNQGVKLIDLYKQCAIMAKEFEWARKLNSMARQASAERAIFAIQRFFSNCKASKPGKKGYPQFKKHTRSVEYKTSGWALSVDKRCLTFTDGFAAGTFRLLGSRDLQFYAPKEIKRVRVIRRADGYYAQFCINVERTEEIVPTGKTIGIDVGLNHFYTDSTGEIVPNPRHLRKSEKALKRLQKRVSRKKKGSGNRKKAINKLGRKHLKVSRQRKDFAIKTALCVVKSNDFVAYEDLQVRNMVKNHKLALGISDAAWSQFAQWLQYFGKVYGKTVVAVAPHYTSQDCSSCGNRVQKSVSVRTHICLCGTVLDRDHNAALNILAKGLKARAGISLNTVGHTGINAWGQTDLYSLVVTSTGKPTG

SEQ ID NO: 25407 - protein, 479 aa, Okeania sp.
MLLKYKYKLKPHKSQAVIIANWLELARKQYNYRLAERFSWFEATRTPVNACPLNVSVVPVERIYQNIPEFRTQTRDGRKKDGNGNPITKKGDKHSNIINGYVAWETVQLADLGKTKKLFPEYKSIHSQVLQDIIHRVQTTMDNFIKPDKNGKTSGRPKFKGKHYYNSFSYPQLSNANILKNANGRYCVNLPKIGLVPLVYNRSIPEGFKVKTGTVIRAADGYYISFTIENRTVPLRHAEIQPTLENSKGIDLGLLYYAVTSDGEFIETPKFFRKSENRLSKLQVRLAKKSKYSQAWKILKDKIAGLHQLIARQRLDWQFKLAYHLFSDTSVIFLEDLQIASLVRRCQAKLGENGQFLPNGQSAKSGLNKSLQDAAFGQFIQVLEYVAWKLGKKIIKVDPKGTSQHCWECLNKVPKSWSERFAPRHERHSCPKCGQELDRDYNSALLIQKIGLLSTQGEDITSVKTAVKASLTEESRAFP

SEQ ID NO: 25408 - protein, 338 aa, Streptomyces sp.
LRAAARSPFTLIVVTFGIRVTLPVTLCEGVGVHAESETPHLGSALDAAYKNFFDAVKGRRHGRKAGPPRYKSRKDTRQSIRLTTNAFSLQDNGTVYVAKVGNLKVKWSRQLPAAPTSLTVTKDRSGRYFLSFVVDIEPGILPRLKTDAGLDLGLSAFAVLSDGSKIDSPRFLRRAEKKLRRVQRELSRKAKGRRTGPRPASRSHASTPRWRTDAGTGTTRHRHRSFATTKRCTWKTSRCPASAAPGSPSPCTTRDGPRSSACWSTRRSSTAARSPKWTGPSRPLSSARPAESGTATSPCTSGNGRAASAPLCTTATTTQHVTSFSKDAESSPPDGWRR

SEQ ID NO: 25409 - protein, 388 aa, unknown
  TnpB Polypeptide
MGHLKSVVTIKLKIPGNKILFNAMEEYSKCISYITNIGFKNNISNRYKLHHLAYYDARKRFNLKSQFIINAIRIASQTLKSIKATNGSCPVFKKYMPVNFDKRTFSFSFNKVRLTTINGRIDIPIEVPECYKKYLGWSCQTAMLTVDKKNKMFLNITFSRNINAVVPDSSNKIVGVDLGINHVAVTSKKQFFSGNKVKNTMLKFKHLRTKLQAKDTRPAKRLLKKISGREQRFKAWVNHNISKAIISSCNAGDAIVMENLRGIRNTRKGKRFNFWLNTWGFNQLQGFIEYKARLNGIKVIKVNPYHTSKDCSRCELLGIRSKGFFHCNHCGFSLNADLNASYNLAKHHSMPDGVSADVNQPYSQSDEAKALQGTEAELMANAQRFSAE

SEQ ID NO: 25410 - protein, 381 aa, unknown
  TnpB Polypeptide
MIKGFKTMIYPTKEQADKIIKFCNASRFAYNWAIALEEENYKNGNKFISGYDLTKMFTQFKKQEGNEWLKEISGRALKVVILNASTSYENFFKKKSKHPKFKSKKNSKMSCATHERSTIIEKKRIRCEKLGWIKTHKHNIPIVENIKYYNHKLSFDGINFWFSVSVEISDKDGNEIKTNPIGIDLGIKTLATCSNGMIFNRVNIKNLEKKLKRLQKQSSRHYCEMIKISKEMKTKFQYLQKSKNLIKLEKEILKLQQHISNIRKNNIHSITSILTKLNPSHIVIEDLNVNGMMKNRHLSKSIADCSFYEIRRQLEYKCKWKNINLIIADRWYPSSKLCSYCGHKKDKLSLSERVYICEECGEAIDRDFNASLNLERLVYLQ

SEQ ID NO: 25411 - protein, 370 aa, unknown
  TnpB Polypeptide
MEYSYKFRLYPNQIQENQILRTFGCCRFVYNHYLALRKQVYTESQATMNYNQCSADMTQLKKSLEWLREVDATALQSSLQMLDTAYQNFFRRLKQGQRSGYPRFKSKKNSRQSYKSKCTGTSIKVLRNAVQLPKLGLVKCRVSKEVKGRILSATVSQSPSGKYFVALYCTDVEIDPLPSTGAVVGLDMGLKAFAIASDGVEYPNHKYLAKSSKKLVRLQRQLSRKSKGSNRREKARVRVARLYEHIANQRNDYSQKLSTDLIRKYDIICLEGLNVQDMLKNHRLAKHISDTGWGNFRQQLIYKANWYGKQVVVVDRFFPSSQICSNCGYQFEAVKDLSVRDWTCPVCGAFHNRDVNAAKNILNEGLRLLA

SEQ ID NO: 25412 - protein, 357 aa, unknown
  TnpB Polypeptide
MFKVTKNPDYYNQLPMQSNQQIIKEVLADFKSYFKGCMAYKKNPESFIGKPKLPGYCKSEQISFDITNQDCVIKTSKEGYPYLKLPKTKLTVNLGKLKPGRLKEVTIKPYYDTYKICIVSEEPDMESIDLDYEKHLSLDLGIDNFAASGNDCGLAPFIIKGNKIKAYNQWFNKKNAYLRSQLPKGQYSSRKIQCIWKKRNHKMMDFYNKAASFVIHYCINHKIGNLVIGKNPKWKQGLEIGRLNNQNICYISHAHFIRKLTEMATKYGIRLIITEESYTSKASFLDNDELPVYGEANHPAFSGKRIHRGLYKSKEGVLINADVNAACNILRKAVKTAFGKVSDFTYLYKTVEVYVNP

SEQ ID NO: 25413 - protein, 560 aa, Lactobacillus sp.
MIGLVRTGYKQIERRKEPNYLAFKKFQNSNEVRRLINRQNLIQKRAVAMINRGTDKGNLYQKLNQRVGIKRQMSQATINVMMDIFRNEHITAIPDNSFVVFARTTLNVHDGEPQELLLQLNKLDSYTLFLAPKQSSEKIFSTPKRGWLMTLRDNGWILMLPGQNPNQGIQLVLPETGENETAPVAKSVASNAARTKASPKSTASSHVAKSSNSAASAVAQHTSQASTSSQPRANAKSSANNHARGSNAPARVSQATTRPSHAATKASQAPTRTSQVAKTSQPTPRTSQAPEKTSQATSAVTSAVSNQTSAPMFSAASHVASSAVAAPLPGPREADELIKNLVESGRRYRVVGLDYGKINMITATDGDNNSLQVPGSIISKHILDYQHEIRHMQRQTQTLDDDVELTRLSYMLKRYVLKSCRKIVSQLIEHYGDDVIYVTELHPSLDVNKTPNIILSPDYFYKALFTILFELVGQNAAIIQVPNNETSIICPNCGFTSAGNRQKELHTFKCLNCGFESNDDQAAATNIRQRGLRYISNLTKNMNFAVATPEITSVVTQEEV

SEQ ID NO: 25414 - protein, 407 aa, unknown
  TnpB Polypeptide
MGVGKTPSNRAGLGFRVYKPKVNRVNREKLKALYNDIVNYLLGVASELKGPKYLTYYAEEWEKMYEEVKRQREGAGKRTLPKTPPVYIPVRFVMPDGRERGDNRAPAVIDLRRGELRIPSYGVVQRLPRSLVRALVEENNLNPRPDFVLQVTRKGLVRLIASRAPPKRDASALQLICMDENAAHGLYTTLIRFDGERVKVTRGPTFKPPNAALLRRIAAQLQSAADTGTTVELCALIERAYEELNEKREVEGGSIRVPPDRARELYRRARARERRLNEEWRSRVVAWLRRTVRENADARAVVLVDEVTAETARLMRRVTKRLRNLCLYEGAEYVPLRASGRYCPRCNAMGVEVARRIFKCPKCGLEWHRDRMATFALALNYAKLTENEALRKALLKWLEEHPRALLS

SEQ ID NO: 25415 - protein, 470 aa, unknown
  TnpB Polypeptide
MTSRTQYQAKKRKRSNSKTTKPYWNEDAAHISQQWGLNTILPTAAKNLSQKITSDSWFSVVKHPQVPVINDSLNLPLSSGVKEEITRARKIRIYPTNSQRETLKKWFGCQRYIYNRALKLHRDGMAMTIKGLRQTLLNRDTNILEPQEQWLNDYSYDLKDEALCDLVKNYSYNMAKYKQTGMPLKLRFKSKKAPIQTLSVLEKHWNKRTKSFWSEVFSLSNFRGTEPLPEELPGDSRVQRTRNNKFYLVVPLAGEEIARKSPAEKFIFIDPRVRTFLTGYDSKQTVVEMGKDAVVRIEKLKRRRRQLQSKLAKLRKHKKRQNHRKALHRLDDKIQHIVRDMHKKTASYLCKNYENIFLPKLNYHQCTRLTRKTRSNMASLAHCSFHDRLTMKAEQFHGASVHEVKEDNSSKTCSSCGNLKDDLGSNKIYSCSSCSSVFDRDFNAAKNIMLKYICEHLMASGGSSICCSLS

SEQ ID NO: 25416 - protein, 418 aa, unknown
  TnpB Polypeptide
MMVLVTRTEVMEVGKHPSLRLLCHQVKNLYNRANHFYKQKKKENIYLSYYELNKLLKPEECYKILPVHTAQHTLKLLIRNWKAFYKASEEWKKQPQKFLGIPRSPNYKSPKGEGVAIISNQQAQIMNSFLILPKKVSFSLKTRLNASHSLREVRIIPRGVGYTVEIVYHKQLPKSKKKNSKRKGALDLGLTNLVTFEDNIGSRPIIVKYEGKGVKSITQYYLKKTSKLQKQYAQQQRKNLKQQNRLKYGLAFYHTREQWRRKMKDAFHKLSRFLVDLWIEHDLHTVVIGYNPKWKHQLRLRKKTTQLFVSVPFHHFINLLTYKAAEQGIKVELIDESHTSKCSFLDNEEIKKQHNYLGKRVSRGLFRSAKGIIINSDVNAAYNILLKSDLQAFPKRNVGGVGGYVMYPLRVSFQAMTL

SEQ ID NO: 25417 - protein, 369 aa, Paenibacillus sp.
MCCNCDKITRRGECSHVASLSFSLSHLPTEEQTTLIHQMFGCARFVFNHFLARWNDTFQETGRGLSFQTCATGLPTLKKEWPWLKDVDSIALQSAVRSLADAFDRFFRKQNDPPRFKSKRNPVQSYTTKFTNGNIAVIDDLLKLPKLGWVRFAKSREIEGRILSATVRRHGTGKYFVSILCEVDIQPLPHVDIAIGIDLGIKSFAVCSSGENVASPKHLRNYEKQLAFWQRRLSRRLKGGANYLKAKQKVARIHERIANARQDFLHQLSAKWIRENQTICLEDLQVLNLMKNHKLAKSIAEASWSTLRTMLEYKATWYGRTISMVAKNYPSSQLCHVCQSRNPEVKNLNLRAWTVQDAGRTMTVTTMPA

SEQ ID NO: 25418 - protein, 273 aa, Paenibacillus sp.
MLHHKAFRFRIYPTEEQTTLIHQMFGCARFVFNHFLMRWNDTFQETGRGLSYQTCATGLPALKKEWPWLKDVDSIALQSAVRSLADAFDRFFRKQNDPPRFKSKRNPVQSYTTKFTNGNIAVIDDLLKLPKLGWVRFAKSREIEGRILSATVRRNGTGKYFVSILCEVDIQPLPRVDTAIGIDLGIKSFAVCSSGENALSPKHLRNYEKQLAFWQRRLSRRLKGGSNYRKAKQKVARMHERIANARQDFLHRSRPSGSVKTKRSVWKSCRFKI

SEQ ID NO: 25419 - protein, 379 aa, Paenibacillus sp.
MESPKEVNARMLHHKAFRFRIYPTEEQTTLIHQMFGCARFVFNHFLARWNDTFQETGRGLSYQTCATGLPALKKEWPWLKDADSIALQSAVRSLADAFDRFFRKQNDPPRFKSKRNPVQSYTTKFTNGNIAVACDLLKLPKLGRVRFAKSREIEGRILSATVRRNGTGKYFVSILCEVDIQPLPHVDTAIGIDLGIKSFAVCSSGENALSPKHLRTYEKQLAFWQRRLSRRLKGGANYLKAKQKVARMHERIANARQDFLHQLSTKWIRENQTICLEDLQVKNLMKNHKLAKSIAEASWSTLRTMLEYKAAWYGRTISMVAKNYPSSQLCHVCQSRNTEVKNLNLRAWACSGCGTNHDRDHNASMNILQEGLRLLAKAN

SEQ ID NO: 25420 - protein, 432 aa, Desulfurococcaceae sp.
LEKLLKTLTRTVAVECYANRYARRALREIETAYKDMLKEIVEYAVEHKASQSTLHRVFYSRFRERYPWLPTRVVKGAYRDAVRRAKSFRELKKRGRAYTDKPEVRRVTVTYSDSQDWRIENGVIKLRTHVGWIELHYGNHKQLHRYLYGGWKLAEELKFKLVGRRVMVYLTFIKHFEVECDPGNAVAVDVNENNVTVALFRNSTLTEAYRVETGLGRLVIAYSERMKRVTKGKSTKTREVRKKLSKLRERKRKLDVLRKTAGFIEKLATENRAVAVIGNIDRKAKEKMERDKSSKLRHRIHQWSVSTLIKLLEEKPVHVVRVSERSSSSTEPFTGAKVKSYTPLMIRIAVKGVKRVRVVKLVLRVTRVSERALERDVVGAINVGLRYLNSDGSPVALGSTGTHEVRVKLVNPHRGPTPLTELQVFTNTTKYR

SEQ ID NO: 25421 - protein, 484 aa, Streptomyces sp.
MKKFKPQAGFNVLAHKLALDPNATANGHLHSHGGAARAAYNWAVAYVTAVWCQRKAEQSYQIPEDELTEWRSWTLPSLRKAFNEDKRTNPRFAGWWEENSKEAYNTGLAGASAAFDNYVKSKSGKRKGRKMGIPRFKAKRKARPTCRFTTGTIRIEPDGRHITLPRIGTVRLHEDASHLRALADAGNMRILSATARLNRGRWFVSLQVEEKHELVKVARPDAAVGVDLGIKTLAVLADSDGVLGAEPNPRHLDRAQKQMRRASRAVSRRRGPDRRTGQQASKRWEKASQARNKIHHRVANLREDTLRQMTTRLACEYGTIVVENLNVAGMGRNRRLSRRVADAAFGEIRRQLTYKTRRRGTRLIVADRWYPSSKTCSRCGAVKTKLPLSMRIFECDNCGLVLDRDADAGHNLVALAARTTGTGVAGDLDLAKAKSKPRGADRKTRVTRPRRKARTGRAGGAIPSPRAGKETGDRQQDTSAQLTL

SEQ ID NO: 25422 - protein, 183 aa, Bacillus sp.
  misc_feature (68)..(68): Xaa can be any naturally occurring amino acid
MGVKRMMINKAYKFRIYPNKAQTTLINKTIGCSRFVFNHFLSLWDHAYKETGKGLTYGTCSAKLPAMXKEFVWLKEVDSIAIQSSVRNLADAYTRLFKKQNNAPRFKSKKNNVQSYTTKQTNENIAVVGNKIKLPKLGLVRFAKSREVKGRILNATVRRNPSGRYFVSLLVETEVQVGVVQNM

SEQ ID NO: 25423 - protein, 386 aa, unknown
  TnpB Polypeptide
MLKGIKIRIYPDKEQEKLLLSYCKDYHNMKNFLVAKFKDNLPNVGNNNIIGYKDRDLLQEYESTYNCKTEMLIRSVRGAITDYVSGVKRFYHKLSSKPPKFHKYDPNKQSFYIVDRVYKISQSKINMPINMSCKNKYKTISRKIPIDRKYATKENLTYLKDVRFKYEKGKWYVSGCYDVPDVSIKEDKEFLGLDWGIKNFMTTSESTLINYPKEVVREYYRIRKLQHYLDKKVKNSNNYKRLKKKFDKAYKRMNGLKRNFIHQETTKLARQYHIVIEDILFQDISKDKKGKKRKFIRRMNMISPKHIFEEQLEWKCKKFGSHFIKVNPKNTSRTCSVCGQIHDMTLKDRTMICSCGNKMDRDINAAINIKNAGMNKILAESICCTR

SEQ ID NO: 25424 - protein, 220 aa, unknown
  TnpB Polypeptide
MRSDGTVLDRKFINFPSEKDRLSHVLGRIRRFQKEHSSKQIGSRWAYAKRLNTELARKTGRSIAEYAHENHADVIVFEYLEMKGKISGKKQQKLHLWKKREIQTMCEHKAHRYGIRVSRVCTWNTSRLAYDGSGPVSRDPKNHSLCVFQSGKQYNCDLSASYNIGARYWIREIIKTLPETERSSLEAKVPAVKRRTSCWNRHFHFLQLQEKPVSRRIFAY

SEQ ID NO: 25425 - protein, 415 aa, unknown
  TnpB Polypeptide
MLRACKYRIYPTDEQKVLFAKTFGCCRFVYNWALNLKITAYKERKETLGNVYLTNLMKSELKVEHEWLSEVNSQSLQSSLRNLDTAYTNFFRNTKAVGFPRFKSRKDKQSFLCPQHCRVDFEKGTITIPKAKDIPAVLHRRFKGTVKTVTISMTPSGRYFASVLVDTSMQEMKPSEPMRDTTVGIDLGIKSLAVCSDGRTFANPKNLQRSLDRLKLLQKRLSRKQKGSANRNKARIRVARLQEHIANSRKDSLHKITHALTHDSQVRTICMEDLNVKGMQRNHHLAQAVEDASFGMFLTLLEYKCSWYGVNLIKIDRFAPSSKTCGKCGHIYKGLNLSERSWTCPECGTHHDRDFNAACNIKDFGLKALPTERGKVKPVDCPLVDERPRVLKSNGRMKQEKRGGIGISEAAKSLV

SEQ ID NO: 25426 - protein, 460 aa, unknown
  TnpB Polypeptide
MDLVHNSDAYKAAKKISRDEKKKRSEAFSEARIAYRYSDYDLQAYATLISNESKWIAEKLDSNTQQKIATRAFKASEKVMFGKAKKVRFKVPTRFKSVEGKTNKQGLRWKDNQVLWGDLKLNAIIEPNNQVIQHGLNSPIKYVRLLWRELNGKRRWYAQLINEGQPYRKPKNYVSDGLVGLDLNISNIAYVGDDHAGLLPFAEGVPTMEREISAIQRKMQRSQRGSNPDNYHPDFDGKRGRKTITKKGKVKQGKRQWKKSANYRKFANKKRELERKKTAYAKSQNRKVVNDILRHGKHIKTENVSVKGWQKRYGKAISAKSPGFVQSELARKAERAGGSFTKFSTQKTALSQTHLDGSRTKKSLSERVHKDVTGITMHRDLFSAYLSRFVNEENTLSLQDAASQYRGMEPSLLEAWERFKQTANQLGASERRQTHSPSERFSNKVKTTQPDKSVGLKVEG

SEQ ID NO: 25427 - protein, 246 aa, unknown
  TnpB Polypeptide
MGYARDQIKRVRIVKRADGYYAQFGVAVERRVAVEATGRNVGIDLGLAHFYTDSEGTTVENPRHLRRSEQALKRLHQRVLSKVKGSKNRAKARGKLARKHLKVGRQRRDFAVKAARALIMSNDVIAYEDLRVSNLVKNRRLAKSISDAGWRAFVTWLEYLAQVYGKVVVAVPPAYTSQDCSGCAERTHVCPRCMAVLDRDHNAARNILALGLRRLDETTAGHAERNAWGQSALYPMQATVSDKAAG

SEQ ID NO: 25428 - protein, 291 aa, Geminocystis sp.
MIFGGKKLWYAQFNLKENGYSSHQEWLKDWQKCRSSQFTLVGSKDEKNGNQNCQLLANGTLKIRVPSCYESIFGKYYLIENVKFSYGQSDVNYALNNQQALTFRFVKKDEKWYVFCSFDLPETPTISCNKNGMLGIDLNPNIIGWSYVDHDGNLKAKGQIKINVRDKNTNQTKAIIGDAVKKLVKLAYQYECPISVENLDFERKKATMKEEGVKYSRMLSNFAYSCFLDMLNSCAFKHGIEVIKVNPAFSSLMGLTKFMRLYGLSSDTAAGLVLARRALRKKRVFQPVTPD

SEQ ID NO: 25429 - protein, 254 aa, unknown
  TnpB Polypeptide
MEEPDITETLSMPHVCAIDFGTDNFAAIVCDDHSSAIYKGGAVLSNTQWFHKQRAKYISIITKGHSQMNATSARLKDLSFHHANFTKDQCHKISRNIIDFCLEHQAGTLILGVNPLWKQRTNMGTASNQKFVAMPISILRIMISYKALNAGIRIIEQEESYTSKADITMNDYLPTYGKDDNNATFSGARITRGLYRCADGTLLNADCNAAANIMRKAIPDIWKDTRDYTFLSSPKVYGFHELNPKSIPVKRIVA

SEQ ID NO: 25430 - protein, 393 aa, unknown
  TnpB Polypeptide
LLPTPVQETALRTHCAHARYVWNLAVEQHSYWHPGRKGAPGYMEQCRQLTQARAEHSWLAAGSQTVQQQSLRDFAWAMAAFFDSANPAGRPSWRKAGRDEGFRIVGRRGRQWDVRRLGRKTGEVWVPKVGWLRFRWSRSMPQDIKSYRITRDRAGRWHVAFAVIPEPISAPGDGQVVGIDRGVVVSAAFSTGELLHLPGLTAPERRRLRHLERKRSKARPGSKRRGQVNLGIARLKMREKDRRRDWVEKVSTDVARRFDVIRIEDLKIGKMTRSAKGTLAKPGRNVRQKAGLNQGILQSGWGLLARRLDEKAPGRVERITPHYTSQRCSACGQVDGKSRESQAAFRCTACGYASNADVNAARNIAAGYAVKARGGIRVAGPANREPQLLLQSA

SEQ ID NO: 25431 - protein, 471 aa, unknown
  TnpB Polypeptide
MAKNHGLQVGIEAKIEYHPALENLGFLHEQWRRTAVNWLQSGLDEDEVEKRLPSGFNLQWAWADSIATEASQCLDQLASAKENQISQLKDCIKAKTKKAKATLKQLSARIKKAFTRTDAGKFQAQLMGLKSKVSKIERLKRDLRQLESSERLHICFGSRKLFNAQHHKDENGYANHAEWLESWRKKRSGRFYCVGKSQLGGGTMMKVFAAEEIGIYTLQVTIPRPLIQKWGTHLSLKFEVSDRDQRMRCGDLNYALKCQKPITTQVFRREHKDDQWYVHFTTYVQHVPRVHTIKRGGLGIDFNAESLSISYIKPDGNIAWCQDFSYQWKDLSSGQRIAMMRDLVVQIVRVAESLRCAIVIESLDFSKKKAKMSEESKLYNLMLSNLATSLFREALESRCQRFGVQLIKVNPAFTSVIGMVKFMARYGLNSGTAAAMVIARRAMRFSERIPQCLSLPEDEAKHDWSAWNRVA

SEQ ID NO: 25432 - protein, 245 aa, unknown
  TnpB Polypeptide
MGPVKQVRVLRETCNRYSIVIVTDSKSNKTYEKSRNGASVGIDFGLKTYMTLSDGKSIQSPLFFNRYQKKIKKCNRNLSRSEKGSNNRKRRLFELHQTNRKIMNLRSDFQWKLAHQLCKQYDYIFIEDLNIEGMKRLWGKKISDLSHSSFINKLTYIASKYGVIVHKIDKWYPSSKTCECGCINKGLLLRDRTWVCPGCGSINDRDLLASKNILRKGISELESTGNSNGCKTGVPYTCIQESQSL

SEQ ID NO: 25433 - protein, 407 aa, unknown
  TnpB Polypeptide
MLRTVQFACTLPKAEADALNAESGRVYTDMLTRHYRLYRKQGVWLAPRNGERVEDALGGPTSLHAHSRDAAQQGFYQACKTAKAGKLAGLDTKYPYHRKRFRTTIWKSTGMSRKGDRLYLARARGLAPVMVPLPENVLHLEAPVFLEARLVWDRAARHYSWHVVVEDGLQPEAAPGTHTAAVDLGEIHPAALTDGKESVIITCRALRANAQYTAKRLSEIQAKQSRKQRGSRRWKRLQRRKTRFRAKQRRRARDMEQKASRAVVTWAKERGVSTLVIGDVRDVADGKRLNVKAQQKIGLWSHGRQRAYITYKAEAAGIALTLCPEAYTSQTCPNCQQCHKPKGRLYRCPACGFTAHRDAVGAANILSQHYTGEPGHVLPPEPTYRHPYWGKRSRVDTPELAQGPTAA

SEQ ID NO: 25434 - protein, 416 aa, unknown
  TnpB Polypeptide
MQLVEQHVIDKADPRFATIDAAAFKAKNLYNAALYLVRQSFIFENRYLGYEDMYHQMKAHEAYRALPRKVAQQVLRLLDKNWQSYFAACVAYREDPSKFKKHPKMPHYKHKTNGRSVLVYTIQALSRPGLKRGLIQPSMLPITVQTKQTHIAQVRIVPRIGFYVVEVVYECQEAAPTGNPALYAAIDIGVDNLAAITSNKRGFVPRLVNGRPLKSTNQYYNKRKAELQEALGYPGTTARMERLTSRRTRRINHYLHTASKAIIALLVQEGIGTLVVGKNPGWKQEAELGRVNNQHFVGLPHARFIALLEYKAKLAGIRFVLQEESYTSRASFLDGDPIPTYDPKREGQYAFSGKRIKRGLYRAGDGRCLNADVNGSYNILRKALPDAFGKGIEACVVAPVWLTFAWSVQPCALAAA

SEQ ID NO: 25435 - protein, 430 aa, unknown
  TnpB Polypeptide
MAWEVTRTVRVRLDVPDNRKSDLHATNNRFQHCANRTSEWAWRYPDEDCVTSKSEAEDALYDDLREETDSLHANLVQKAIKRAVTDIDNCVDDLANGENTSCPTYDTFSIVYDKRAATYHRDKVSLATVNGRVECEYDLPDNPDGTPHGGYLLNEDYSFSTSTVHYDSEADGFSLNAVIKKEIDVDSPEKAEDSNVLGVDCNVDDHIAVTSTGRFIGNADYLNHQRREFEKRRADLHQTGTRSAHLTYQRIGGRFGRWSEDFLHQCSQAIVEKACHHACTHIAFENLERIRARISDGKKFQQWAFNALQTMVEYKAAEYGIVVETVNPQYTSQQCSKCGCTLEENRDDQRFECLDCSYTATADYNAAKNVARKLALSLQQGQTSLVGGAFCQYALKSGMMTVTDSSVSSDTFVSAERESTGKPTASAVGS

SEQ ID NO: 25436 - protein, 410 aa, unknown
  TnpB Polypeptide
MNRSNLFSLAPTREQHRILQGLAVNCVKLWNEVNYLHRQQYENYLKLDWNPQAYKKYVPLVGSATAQQVVRKNNEAWRAFLALKRMEKNGELSSTIVRVNPPGYWKREGRYVLRVLFRCDSYHIRQDRVDLPHHLSIRFKGELKWAGKQGRLEVAWDPLSKKWRVFQSVHVKPIITPLGSKTCYIDLGVRNLATVWLPEWRQPVAYQSGRLLADWWYWANRIAQHQQRLAAVNGRKKSKQLSKLYRLRKNRFRHSVATFARQLVKDLYAKGVSTIVIGELTGIRCDNNKHCTQGNAMVHNYWSHKYVADRLRWTAEEYGMKVRTVSEAYTSQTCPRCRSRHSERILRGFRCLDCGLEAHRDAVGVLNIAARCGEYAVRPMAWPMLLRWDGCGWNRNNGMPTQAKRSRVEA

SEQ ID NO: 25437 - protein, 378 aa, unknown
  TnpB Polypeptide
MRYAYKRLLEGNKRKDLKKDLSKLFNINTRYSDDAIFLAQSTVALCEKRGQNPKKLVFGSRKLFEQLKKNHLTGKRRKQLKTKWKESRQGNLYSRGDKSKQGNLNLRFQWIDNQLYLRINTGDRQYIYAKVIRDVKREKDKWIDFTFMLENAYRYKQWFPYSVRLRVKNSNIYAFISVEEKLPPITITKDNGIIGIDVNAYPFHLALAFTSKDGNLEKYQSVSLNELLEVNSEKRQYLEWHIAHQIVEIAKEENKAIAIENLQKLPKGKRGDGFAKLRIRLQKCSYKRLLDKIEVLARRNGIEIKKINPAYTSVIGKLKYAPQYNIDKDIAGAFVIARRGLGYKEKLPKNYKELLNDTDFLSYTIAKIEDNITKLNKS

SEQ ID NO: 25438 - protein, 176 aa, unknown
  TnpB Polypeptide
LREFLKNEINRLINIIIKIYKPKRIVIEKLDFRSPELSKRMNRMIQNFGKRYIKEKLERLQQLYGIEIIEINPAYTSQECNSCGYVDKNNRKDTQEFECKACGNKTNAQINGAKNILKRSSLGNLTKKQVLKILIERYLERLKGCESAPLDVIKGNPYFKDYLDSILNPRQSLTPS

SEQ ID NO: 25439 - protein, 409 aa, unknown
  TnpB Polypeptide
MLKAYEYRIYPTLEQEALFNQTLGLCRLYWNIIVFNKNQNHSMLIQGYKPIFEKYKPEALKWAKEASCSIPLAQMWSDVRAAYTNFFKSCKGQRKGKFSQLPEFKSKKNPKDSFRYSCSNCTPKIGKQGLYLTKKLGWISGKFGCRFAEGKFRNITFRKTATGKWFVKICVEKKDELKNKNGKIVGIDWNCRDDFVVRSDGMKIKCPRYLQKSFKQLRHWQKIMSKRYVKGAPTQSSNYEKAKRKVALLHEYVAWQRKDFLHKESRKLCNEFQTVVCEDINLQNMAENLYHGKVVGDQGFGMFRQMISYKGDLQKVSPKNTSKTCHVCGYINPQIKVGMNFWKCPICSSEHDRDINAALNILSKHVSTRSIVGQEATEITNACGEPRSSMKRESEQTSSAFWGKLFGIC

SEQ ID NO: 25440 - protein, 411 aa, unknown
  TnpB Polypeptide
LAVSPTDEIRLRETIEAWKQGCQIAVDKSWRRCHSKSDVQQLAYDEVRDNTALGSQHAILACHQASENIRSCINRRKDGKKASKPTYTSATVRYDKRTMTVFPESEQVSLTTQGDHSRVRAELVLPENEGGYQHRYLDSEEWEPTESTLHYRDGEWYLHLGFRKLKESTAETTENGAVLGVDIGVNEIAVTSTARFFSADELNHKRREFERIRGSLQSHGTRNAHRTLEAVSGREDEYVKQVLHSVANGVVNEALRYNCDGIIFERLDDIRDRLPDAAWHSEWAFNRLYTYIEYKAEAEGLFVDTIDPKNTSKRCAECGFVHESNRPRRDLFECQKCGNQNHADYNAAKNVADVYLRREQQSSRRRGVSQYALKSGTVTPNRGYIPYPDGFEVESTDKPITRQSERVSASE

SEQ ID NO: 25441 - protein, 360 aa, unknown
  TnpB Polypeptide
LKGGDKIKLIPTTEQYKSLCDTMKRFNEACNYISKIAFKSKTFSKIKLQKVCYYDVRDKFKLSAQMVVRALGKVSESYKVNKKTMHTFKDTGAMVYDERILSFDGMEFASILTLEGRTKIPIVLGDYHKGLMCGNRVRGQADLILQNGVFYLLLVVDVPEGTPNSNGDFIGVDLGIVNIAVDSTGEVFSGSTVNSIRKRNRKLRQKLQSKGTKSAKRLLKKRSKKEKLFARDVNHCISKKLVNKAKTLDTGIALEDLTGIRQRTEKTVRKPQRSKYFSWGFYQLRKFIEYKSAIAGVPIILVDPRNTSRTCPCCGHVAKENRLSRNNFRCVACDFSAHADNVAAENIRRVAVNQPNVATA

SEQ ID NO: 25442 - protein, 351 aa, Lactobacillus sp.
  misc_feature (8)..(8): Xaa can be any naturally occurring amino acid
  misc_feature (97)..(97): Xaa can be any naturally occurring amino acid
  misc_feature (101)..(101): Xaa can be any naturally occurring amino acid
  misc_feature (207)..(207): Xaa can be any naturally occurring amino acid
  misc_feature (231)..(231): Xaa can be any naturally occurring amino acid
  misc_feature (259)..(259): Xaa can be any naturally occurring amino acid
  misc_feature (265)..(265): Xaa can be any naturally occurring amino acid
  misc_feature (313)..(313): Xaa can be any naturally occurring amino acid
MKRMSSLXYHFGVKLRFYPSSKQKKIIKLNYDAQRFVYNSYVGRNRTSYHAKRYLANRQNRAMPFAFSALNSYEVQLAETVVINNELLAKPKNIRDXYSFXRVKEIDSLAIANAIQNYQKAWNNYRKIGHGIPTFHKKRSDWSYQTNCQYPKQSKAYLDNGTARFIDAKHIKLPKLGIVRIAGFRKLIKERLLKQIPTRIGTVTIKXTADDQFYLSMQLGSDTAFVKELPXTQSQIGIDLNLDNFLTASNGAMVANPRXYRKTKXKLAHAQRVLSRRQRRAKKEGRNLRTAKNYQKQRLSVARLHDKIRRQRXRLLTSSLNCINQKPRFSSCRGIKKQKPVKESCLVAINF

SEQ ID NO: 25443 - protein, 544 aa, Streptomyces sp.
MGGLRVPAAPFVVSGPAAVSIRTRLRLSPADAAVLTEVGRILGSLASRDLAVMSRQGRDREAASWAARKRALTAPSSARWAGSVTKATQDQWALARRGQAAEAAWLRGQIARIEDRLSRPVGAKSDKRAGLARGCATRAEWHAKSRRLHALRDRLAAVQEAWTEGRVRVVRGGRKLARLRHHLTEAGLSRHVWRERWQAARMFLAADGESGKRCGNETIRVTDAGQLSIRLPAALAHAANAPHGRYVLDTTVVFPYRAEEWRDRIVADRAVAYRIHHDVLRDRWYVTASWRRAAVPALPVEAALARGVVAVDMNDDHLAVRRLDAHGNPVGRPRSFAYDLSGSAQHRDAQLRHALTRLLHFTRRSGAVAIAVEDLDFTDGAGREQFGRNKRFRRLVSRFPTARLRVRLASMAAEQDVAIVAVDPAYTSQWGAQHWQQPLTTATRKTTRHDAAAVAIGRRALGHPIRRRTAPPPPDRSDRVGHRTGQARPETRGREGTRPRFPGPRTGSVPPASGAKAGDQRAPNRWGHAAERVSWQQGIFPLGR

SEQ ID NO: 25444 - protein, 362 aa, unknown
  TnpB Polypeptide
VNKGFKVRIYPNQEQIRVIEKTFGCVRYVYNRMLKFKQKAYNIFELKLNYVKTSSILTKLKQHKSWLCEVDAVALQQCLRDLDVAYTKFFNGSGYPNFKSKRGKNSYRTNMNIHLDQENKMIRIPKIGWIKFKDKNKFSELTKIYNITISKSSSGKYFASISAEVDITALAKTKKSCGIDLGLKDFCILNDGTKFDNFKFLVRNEKRLRLLQKSLSRKVYGSKNYEKARMKLAKFHEYISNCRKDYLHKISLFLVKNYDVICAETLRVKNMLKNHKLAKAISDVSWSEFCRQLEYKCLWYDKQFVKIDTYFASSQLCSNCGFKNSNVKDLDIREWTCPECGKHHDRDINAAINILNQGLQLI

SEQ ID NO: 25445 - protein, 393 aa, unknown
  TnpB Polypeptide
MLYAIRVRLYPNAAQREFFARTFGCCRWVYNEALAHCQALHETGAPRPSGYDLQKRLPALKIEHSWLAEADSQALKQACQDLDGAYKNFFRRVKNGEASGFPRFKSKHRGDATYTATAAASIALQPRQLKLPKAGWVNCRGVREWEGRIKRATVRQTPTGKYYATVLIDDGHDLPVQPEAGLTPLGIDVGCKTEGFTHQFAALSTGDIIYAPAEYKRQMKRLRRAQRKLARKQKGSANRIKQKRRVAQLHERISAVRRDFLHKLTHRLTCENQALAVEDLNVRGMMAKPAPKPDPEKPGAYLHNGASRKRGLSRSLASASLGEFFRQLEYKCAWRGVALLKVDRWEPSSKRCSSCGEVNTELTLADRRWQCQACGTEHHRDINAALNIAARAA

SEQ ID NO: 25446 - protein, 388 aa, unknown
  TnpB Polypeptide
MIGRTYKYRLYPTKTQQEILEKQLSLCQWLYNHFLEERKTFYKKNKTKISCYDQIKKIPKLKKDKPELNKVYSQTLQDVVRRLDKAFQNFFRRVKENKYGKNQKPGYPRFKGYWRYDSLIYPQKGFKLKDRKLSLSKIGFLKIRLHREIKGDIKTLTIRRTLTNKWHACFSIQIQQELSKKKEVKNIIGIDMGLNNFLITNKGEKIDNPRYLRKSEEKLSQIQRWHSRKKLKSKNRSKLRQKIARLHEKTTNQRLDFLHKLSSKLINNFQLIAFEKLNIKGMVKNKYLAKSISDASWARFLQQLRYKAEEAGIWAVEVNSKNTSQICSGCGNTVSKTLAVRIHKCPKCGLTIDRDVNAAKNILQLALNTVGTTGINAYGVERILSTMK

SEQ ID NO: 25447 - protein, 401 aa, Actinobacillus sp.
MLIRKAFKFEIRPNGEQQRKIAQFCGCSRFVFNKALDWQKQAYEQDPKIKFSYTKLANFLPQWKKEFEWLKACHSQVLQQSLKDLESAYRNFFSKRSDFPKFKKKGVKDSFRYPQGCKIEQTNDRLYLPKIGWVRYRNSREIVGEVKNVTVSKKCGKFFVSIQTEFEQEIPQHQGSEIGIDMGVARFATLSNGKFFEPLNSFKKHQESLRKAQQSLSRKVKFSQNWLKQKAKVSKIHHKIRNARQDYLHKISTEISKNHAMIFIEDLQVVNMSKSAKGTAEQQGKNVAPKSGLNRSILDQGWFEFRRQLEYKSAWQGGYLVAVNPKNTSRTCPSCGHIAKENRQTQAKFECVECGWRENADVVGAMNVLRAGHVQLACEVNGISHQQQEPTESSPRQSRGS

SEQ ID NO: 25448 - protein, 219 aa, Limnoraphis sp.
  misc_feature (29)..(29): Xaa can be any naturally occurring amino acid
MRNTGKVLIINLTDIEFLFPVLIFSDYKXNFYNKKKAELQSHLKGNRKTSNRIQCLSTKRGFKIDDYLHKSSRLIINRLVESNISTLVIGKNENWKQELNIGKVNNQNFTSVPHARFIEMLTYKAQLVGIKVVITEESYTSLASFLDGDSLPVYRSAEAKNAKFSGRRLKRGLYKSKIGVKFNADINGSYNIIRKVVPDAFCNGIEGVVVHPVKITLTN

SEQ ID NO: 25449 - protein, 398 aa, Limnoraphis sp.
MNYTYRIYPSAAQQKLMLSWLETCRRLYNRCLRDLKDWMNSRKCLIDRCSINREYIISLDIPFPGYMEQKRQLTQWKKTEPELKEVHSQVTQDVVKRLHNSWESFRQRGRGFPRFKKYGRYQSFLFPQFATNPIKGGQLKLPKIGLVDINLHREIPDGFKIKGVRVVSRCRGTKWFVVITIQADVIVPDPPSFGRAIGVDVGLIDFLATSDRLTISRPKFFVDLQRQLKLLQRRASRKQKRSKNWEKAQIKVARLHHKIANTRKDFHLKIAHQLCDQADSIFVEDIDYRVMAKGFLGKHSLDASFGQFRELLKWVCWKRGKFFAVVDHRGTSKQCPNCGNEWDNKLSIRWHTCDECGYSNNRDIASAEVICNRGIKKYPGTIGERKLPADCVLPGETR

SEQ ID NO: 25450 - protein, 427 aa, Escherichia sp.
MHQENTMLPRRISVSLFIDQSIIWPVKRLQAFKFQLRPGGQQEREMRRFAGACRFVFNRALALQNENHEAGNKYIPYGKMASWLVEWKNATETQWLKDSPSQPLQQSLKGLERAYKNFFQKRAAFPRFKKRGQNDAFRYPQGVKLDQENSRIFLPKLGWMRYRNSRQVTGVVKNVTVSQSCGKWYISIQTESEVSTPVHPSASMVGLDAGVAKLATLSDGTVFEPVNSFQKNQKTPARLQRQLSRKVKFSNNWQKQKRKIQRLHSCIANIRRDYLHKVTTTVSKNHAMIVIEDLKVSNMSKSAAGTVSQPGRNVRAKSGLNRSILDQGWYEMHRQLEYKQLWSGGQVLAVPPAYTSQRCACCGHTAKENRLSQSKFRCQVCGYTANADVNGARNILAAGHAVLACGGMVQSGRPLKQEPTEMIQATA

SEQ ID NO: 25451 - protein, 202 aa, unknown
  TnpB Polypeptide
MVKRREFQRAYRFRFYPTPEQENLLRRTLGCARLVYNKALEARSEAWTSERRNVSYSDTSSMLTGWKKTDELSFLNDVSCVPLQQALRHLQRAFSGFFKQENAYPVFKKKTHGGSAEFTRSAFNWNGRELRLAKMKEPLPIVWSRTLPKGAEPSTVTVSLDPAQRWHVSILVKERITTFAGKATPSRSTSEWIRSPSPTRAP

SEQ ID NO: 25452 - protein, 359 aa, unknown
  TnpB Polypeptide
MDQREAQRVLFGYEQHAHRLEEDRRTVVPQRRVLRPPATGPAPSATGVLRLLQTGKRLPRVQEEDARRFRRVHAKRVQLERPRAASRQNEGTVAHRLVADPAQRRGTLHGDREPRPRAALACKHPRQGTHHDLRGKSNAIALDLGVDSFAVTDQGAVIENPRHLKKSLESLARAQRSLSRKRKGSNNHRKAQLKVARINARIADQRRDFLHKLSTNIIRDNQTVIIEDLAVRNMTRRCKPKTNPEHPGQYLPNGQSAKSGLNRSILDAGWAEFRRMLEYKSEWYGRQLIVIDQYYPSTQLCSMCGAKTGPKTLDVREWTCPACGCHHDRDGNAAKNILAAGLAVSVCKDGRIKDGLSQE

SEQ ID NO: 25453 - protein, 377 aa, unknown
  TnpB Polypeptide
MSTKTVKRAYRFRFYPTTEQENMLRRTLGCCRKVYNMALDARSTAWTLHREKVGYADTSRMLTAWKKTEEHSYLKEVSSVPLQQSLRHLQAAFKRFFDKTGSYPRFKAKHEGGSATYTVSAFTWDWERRALTLAKMHDPLPVRWSRTLPRKSRPSSVTVSLDAAGRWHVSILVEDEIRQHTKNGNMVGIDMGLEHFAILSNGEKIDNPRYLRKHLRKLGLAQRKLARKKKGSSNYRKARLKAAKAYAKVKDSRIDFLHKLSTRIIRENQTVVIEDLAVKNMSRRCKPKTDPDNPGQYLHNGQKAKSGLNKSIRDASWRQLRTMLEYKAECTGANSRSSTNGIPAAKSATRAAKTPAGRHWTSEHGNAHTAIPCKTAT

SEQ ID NO: 25454 - protein, 416 aa, unknown
  TnpB Polypeptide
VGGRSLGWSDRRGTFQGQRGSNPVFLARMHSRRYSRQSHARGEFGMVRRVEAQENQWRSCPGVQIPQTRPPVFRMLAQPEQDRQRRLPSGVTQARRGRNHRNREKGIPQAGRNGMPLDALHTRARQPTRQGLHERGGELDGTHSGVHQRTSPIRRNATGKQTGIDRGCVHTLTLSDGTMLDMPQPSDRERREYLRLQRKLARQDMTNSRRGGKTAKFQSKRRKLTLKRMSSIRRRINNRKDDWVAKTTTRLVEDYDLIALEALDTRQMTRKPKPKQDPNHKERYLRNGSAAKAGLNRSILNNRWTDIQNKLEYKTRLAGTRLILVNPAYTSQTCNRCGHVAQENRESQSVFQCVNCGNKDNADTNAAKNILDRAIHTTGMDDAEGVEEHASYGTYVPQESSVETPTPATRTGRPLQ

SEQ ID NO: 25455 - protein, 331 aa, unknown
  TnpB Polypeptide
MAELTLTMCVRLSPTRRQADALAALCSTFADCCNDVADYVDSTHTLSQKKINKAIYHQLRETHGLLAQMTQSAIRRVIANYKAIHTRIANLREESKGKKNGKRRKRRKIPAYYSIKPQYAPDGADLLWNRDYSYSTKTGLFSLPVMDGRIKVKAEWASIPDQYRHGRFGTARLIRKRDKWHLLIPVTIPTPDATEHPKTIVGIDLGIRFLATSYDGERTVFYDGKEVKHRRGKYKELRKQLQHRGTRSARKRLKAIGSRENRWMTDINHQVSKALVNQYGKDTLFTLEDLTGIRNTAETVKVQQRYVQVSWRSANSARSSNTRPPATGRPR

SEQ ID NO: 25456 - protein, 527 aa, unknown
  TnpB Polypeptide
MNLGVPMAKAPKLYLGVHARLVFLTKEDEQAVLDLMRRFSSATRFAYNRLLEGRDWKELKRENGPLCTLFGLNTRYANGAIEKAESLIASAKELGQDPRKVVFGGRKTFEQLKRRHLSGKALLALKREWKEKRQGLLYSRGEAATKGNANLRLEPRDGALWLRVNLGNGAYVRALVQTSHPQLKTLLQRVYASQSYNVTLQLKDGKVYANFSWSEELPSPVHTRESGVLGIDINSDPYHLALAVVSPDGNLRRYLTLSLEEVDRASNKGAKEIILWKIAHQVVALAEEHGVAIATEKLKYLRKSRRGDGSGRAFRRKQHRFAYRSLLEKIHSLARKRGVEVIEVNPQDTSTIGMLKYAPQIHLSKDMAAAYVIGRRALGFEEKLPKGYKSLLRDEIFLREVQGFYEARMDQMEVRRKEEKNPYIKRRWYRELKKVQSALGYFSSPWGSPWNQKRVTNGRNLPGVNPWRVLRVSLFLPLLGREVPRDLSPLKPILHFTSLTQGSWEGWKVGSGPPLGGGPECANVHYC

SEQ ID NO: 25457 - protein, 450 aa, unknown
  TnpB Polypeptide
LLIRRQTFRLYPNQTQTTALFGARRLHAYLYNACIAHRQTEYKHFGRSVSYFDQQNCLPAFKDCWPEYKELHSQALQATVKRVDLAYNSFFQGLRKPPKFKSIRDYSGWTYSSTSGWKTNTEGTHGTVTLNDLGMTLRMHGKAKEWGMPKTLTIVYKPHLGQWFASFTLEIPSLEPRFGSQSSLEYESIAAIDLGTETALTLYNGQEFEEVTNPRFIRQAEKRVKQASKKLKRKRAPNRKKQVKASKRWKKARKQVSRLQHQVAAQRKDWQHKVTTDIARRHDIVVTEKLETKKMTRKGKKRKKQKAGLNKSILDVGFGTLNQMITYKVEGKGGLVFFLPTRKLKPSQRCPNCGVVHKEWAELSNRYHICECGFEMPRDKTSTVVMYQALLDRQPGFGMSLDNRGCLSSTSKTGKRKHTGSMKQLGQKKRQKPQSVDGGDLETPFVYMAG

SEQ ID NO: 25458 - protein, 382 aa, Campylobacterales sp.
MLKAYKYRIYPTKEQITLIEKHFGSTRFLYNYFLEYRQKEYAHGNKKVGYMVTQAELTKLKKLKEYEWLNECGSQSLQMALRDLDAAYSRFFKKQGEYPKFKSKKHTSQSFTAPQNIKVANNRVYLPKFTKDGIKVKLHRELPQNSVLKQTTISRQNNQYFVSILIDDNNAIPKPTKAKNAVGLDMGLTDLIITSDGVKYPNNKYFVKSRQKLKKIQRRLSKKQKGSNNRNKAKLKVQKLHTKISNQKKDTLHKISNEITNQYDIICLETLNVKGMQKNRRLSKSIADVAWNEFMRQLEYKSEWKGKTVLKIDQWFPSSQICSNCGASSGEKELNIRKWECPQCHMKLDRDINASINIRNYGLGQIDQRNTIVKNTVGTIGN

SEQ ID NO: 25459 - protein, 392 aa, Dictyobacter sp.
VVKRAYKYRFYPTNEQARNLAQTFGCCRFVYNSALATRKRAYFDHQRKIKTSELSASVTALKQEKGMAWLRDVSSVPLQQALRHLDSAYKNFFEGRAKYPTFKKKHKGQSATYTDNAFTWRDGRLILAKQKDPLDIVWSRPLPENARISSVTVSKDPAGRSFISLLVDEWIEPLPMTEKVVGVDLGLTSLLITSDGETIANPKHFHRYEKKLARVQRRHAKKKKGSKNRDKAWRKVARLHARIADTRRDYQHKVTTRLIRENQVICLEDLYVAGMLKNHCLAKAISDVGWGEIRRQLEYKAAWYGRSVVIIDRWEASSKTCSACEYTLDSLTLDVREWVCPACGVCHDRDINAAHNILAAGLAVVAACGENVRPATSKGAEAVLNEAGRLSS

SEQ ID NO: 25460 - protein, 253 aa, unknown
  TnpB Polypeptide
MMISYKYPIFPNKITQWKLAENLDACRWLYNRLLKDLNDAKEKGIKLKTYNTQNMIPYLKLENPKLNLVYSKVLQMVNYTLWSNFKGLAASKMNGRKIGHVRFKGYGWYNTMNYNQSSFDIICVEDLDVIGLKEKGHNNGMHRSIHDASWSKFIFMLSYKARSAGRKLIKIDPKNTTQRCSACGSIVKKDLSVRVHECPYCGFSCDRDYNASRNILITGMEQPVAPIELKPLHHITVMQVLAMKWEAAPFRTR

SEQ ID NO: 25461 - protein, 373 aa, unknown
  TnpB Polypeptide
VKCNKKDFEYIKTLNKISANVWNYCVEIDKENGQKLTLSQLEFMTKNKFPLHAKGIHHIVFKYLNARKSMWEVIKKNKDNGNKITLPYRLKEYMPTGWDSQAIHPEYDNNKIRLTCILGRGQIVCKVKSIPNNIAEIELVYKDEYYLSIKYKEENDTNLIQSDNIASIDLGEIHAITSIDKFGNCVIVTNRKIRSLIRLKDKRQGELQSLRSKCVKGSKQSKKYTKAIYDIKYEFDNKILDALHKQTNLYVKWCRSHKISKVYYGDLDTTTRNSKGKKSQKINHKLSMWRFGILIKQLQYKLFQYGIVMEEISEAYTSQTCPNCGNRKKTGSRNYSCKCGYIQHRDIVGAINILNFNTDTDLKMYKNKVYLQI

SEQ ID NO: 25462 - protein, 383 aa, unknown
  TnpB Polypeptide
MWKIIDRKSFLAKNLYNEATYAVRQEFFATGSWIRDHELDKLLQSSENYKQLGSQASQKTIQLVDKNFKSYFKGIKDWSKKSGKGYFGKPSLPNYKKKDGRSIVIIKNIQCRIQNGEIYFSWKPLREFTGIKTSILGGLQQIRFVPMGSTYVMEIVYQIKVPKVKNFTNRIMGIDLGVNNLATISNNIGIQPIIVKGGVIKSMNRYYNKERKNISIETGMIWNKRMRLLTDKHMRKMDSYMHLVSRRIVEYCQKYDVGTLVIGLTKEWKDGINIGHVNNQNFVSIPHEKLIQQLQYKCENVGINCVVTEEKFTSGTSFLDNELPTEDNYNIKRRVKRGVFKSNDGIKLNSDVNAAFQIIKKVFPDAFKQWDRGCGLQPVALEI

SEQ ID NO: 25463 - protein, 430 aa, unknown
  TnpB Polypeptide
LNKFKQRSEIAPINYIIHGKNKKKGGQLIVNRIEKHCIKRNTPLWKVIDQKCWEAKSLYNCANYIITQEFKSTGKWIRYYSLDNMMQSTLQYKRLGSQAAQNTLVLLDRDWRSFFKGIKQWSKKKGEGFFGKPEMPFYKKKNGRSVLMIKNIQCRIEGNKLIFSWLPLRKFSGIPTKATGKLMQVRFVPKGSCYYMEIVYQINIPDQKKFNNRIAGIDLGVNNFATIVNNIGLRPIFVKGNIIKSMNQYYNKERAEISRSTGMVWNNRMRRLTDKHLKKLDTYTHTVSKRIIEYCLENNIDTLIVGLTKEWKDGINLGHVNNQNFVCIPYDKFILQLQYKCENIGIRFIMNEENFTSGTSFLDNELPIEENYNIKRRIKRGLFKSNNGAVINSDVNGAYQIVKKVYPNAFTEMFSRGIRGCDLHPIKLVI

SEQ ID NO: 25464 - protein, 268 aa, Oscillatoriales sp.
MIVLEFKAKGKTTQYTAIDEAIRTAQFVRNKCIRYWMDNRGVGQKELDRYNTALRVEFSLVKTLNSHACQASVERAYSSIARFYDNCQRQVPGQKGYPQFKKNCRSVEYKTSGWSLSETRKQIVFTDKKAIGKLRLKGTWDLNFYQIDQIKRVRLVKRADGYYVQFVIRIEHQVETNSTGRTIGLDVGLKEFYTDSNGHNEPNPRFYSTSEKRLKSRQRRVSRKRKGSTNRKKAINRLGRVHLKISRQRQEHAKGIARCVIQSNDLVA

SEQ ID NO: 25465 - protein, 401 aa, unknown
  TnpB Polypeptide
MKVYKGFKFRLYPTPEQESMLSQQSGNTRFLWNKFLEFNLKTYKETQKFQFSYEMITSLPKLKDKFEFLKLSFSQSLQQVGRQLDSALKERFKKSKGFPKFKKKHNKDSFTVPQKFSIHPKSVKLPKIGKVKWTKHRKIQGNPKFLTVSRDGNQWFCSVTCEVNLPDKQYSDKNIVGIDVGLKEFATLSDNTVVKRERHLDKYTKRLVKEQRKLSRTSKGSNNRKKQIEKVQTVHRKIRNTRKDFLHKTSSDMIAKYSGVVLEDLNVSGMMKNSKLAKSISDVGWYEFNRILEYKSLWNAKHFIKIDRWFSSSKICNECGSKKVDLKLSDRIYVCKNCGNVVDRDFNASKNILAEGLNVFYSTVGHTGSNACGDDKVHFSSVKKKKVVVKETGKVLTSLIG

SEQ ID NO: 25466 - protein, 182 aa, Stenomitos sp.
VSDNSLVVTEKLKIKGMTSKAKKGKRKRQKTGLNRSILDVGWGMMRGMLAYKAVEANGVCLEAPTQQLKPSRRCPECWQVKPKALAERLHACPCGCAEDRDVASARVCLLWARGLGTSLLKDADQFSSTKSPKHTGGFRQLAETKRQKLRNVENSGLETPSSYDLSLTHKYVEVLQGLDWRH

SEQ ID NO: 25467 - protein, 369 aa, unknown
  TnpB Polypeptide
MYYGYKYRLKPSDAQREELDRHRNICRQLYNHTRYRLNEYRENHGELPSMTTLRSELPDLKKWWDDLTDVYSKVLQTVVERLFNNLSSLSALKQNGYGVGQLKWKPPREFRSFTYNQSGFKLDKKGGQIVLSLSKLADIPIRLHREIPHDSALKQVTLKKEPTGEWFATFGVEVEREPPQKPDQPKSVVGIDVGILKYAHDTDGHAIESVDLSDERDRLEREQRKLSRKKHGSANYEKQQRVVAKRHADLKRKRRDFLHKLSNYYAQEYDFVAVEDLDSKRLVELDGNSRNRAGAAWGAFLRMLEYKCEREGTHFVAVDPAGTTKECAACGVSTDKRYGSVNTRVPHAVSRRIEIGMQHGIFFFVVSSK

SEQ ID NO: 25468 - protein, 421 aa, Halothece sp.
MLTLTYEYKLQPKRQQIEMIEHTLDVCRSVWNFALRERKDWHNSRKSPVNACSIQREYIISADESYPNYHKQAKALTEAKKTDERLKSVNAQVLQQVLRTLDRAFADMKEKGLGFPRFKNRYRLRSYVYPQLGKEVIKGSCIKLPQLGWIRFRKSRDIPEGFKIKQARVVRKASGYFVMLSLQLDVDVPQPFPHGHPRGLDLGFDKFVATSDGLEVKRPRFLKSLQRKLRSLQRRLKNKQKGSNNRHKLNRKIARVHQRISDTRKDWHFKLAHHLCDGAGMIFVEDINFRTWQRGMLSKHAADAGFGQFVNILQWVCWKRDVYFAKVDKDGTSQECSQCGTETGKKTLEIRVHNCPECGYIGARDVVSGEVIRNRGLSDLGQWLDVKQNACGDDLAGALPSQESGKQESLVARLGISRHSA

SEQ ID NO: 25469 - protein, 418 aa, Halothece sp.
MLVREAKLKDGRPEQYQALDEAIRTGQFIRNKCLRLWMDSEKVGKSKMQSFCKDLAQEFPFAKKLNSMARQAHADRAWAAVKRFYENCRHGIKPVGYPKFKKHSRSVEYKTSGWKLSNDGFCLTFSDGFKAGTFSLYCNGKAREDILRSKINRVRVIRRADGYYAQFCLDVERVEEGTYTGEVVGIDLGIKYFIKDQDDNEVIYPQFLRRSEHRLKKLQRRLSRRHQKGKKQSANYHKARQQLGKQHLKVQRQRRDWAIKQAQALVASKDVVVYEDLRVANLVKNHNLAKSISDAAWSQFTGFLDYYGKVWGKAVVAVNPAYTSQDCHNCGHRSKKSLSTRTHKCPSCGIEICRDTNAALNILKKGMEAIGIEWSNNSTQGHWGTASEEGKTGETSTSADEGKPELVSGVAEPVTTFG

SEQ ID NO: 25470 - protein, 402 aa, Halothece sp.
MVLTKEQRHLLKKWVRLNRKAYNLAIEYLNQHQGFDRTGIGGTGKQAFKTFFKAQIRPDWLKEKLPAAILDQAVMEAYSAWSKTKKNPKYVGKGKQKQPHPQAGLKIARFRSIRDKSQTLQFKVASDLNQGRLLPKYWGNLGAFECSDNGRRFCVLNPDYTPEVTYKNGNFYLSLPQDTKVEDNGKESFIAFDPGVRTFLTGFDGNQFIELGEGDINRIVRLCRSLDKMQSQRDLLKGHKNRHLRYQLNQKMKRKRRKIRNLVDEMHRKTASWLAKNYRVIALPTYESSQMVCKAKRKIRSKTARSMLSWAMYRFSQVLERQCAKYGSILTRHTEEYTSKTCPHCGHIHQKLGGRKQFTCPNCGFSLKRDFVGALGNFLKALWDSTVLSEVRSDCFTFTVNV

SEQ ID NO: 25471 - protein, 336 aa, Halothece sp.
MKQLSVQQAREQLYELINEVTQQNQLIYISSDDNKVAISRKRDRHLLDHAEIKSPALIVNEKGCKLSVPFNINPPNKEGNCVCAVDVGINTLATVSIVYPDGTVTARKFIHPSVDIDRRDKRLCRIRKKARLTKNLSKGFCSTSYRKARQYNRNIAQQSSKQIVDFATEHGASVIVFEQLKGWRPKGGRKGSTLKQRFHGWLHRALVNLTQEKFAEAGGKTEFVYPRGTSSFAFDGSGKVKRSNKNYSLATFSSAKQYNCDLSASYNIGARYWAKELKLTNGHPQAPEFSSGVRMTRRNDGQLDGGKSSPSKRRTPVTLSVLWKDKEAPTTATQGA

SEQ ID NO: 25472 - protein, 417 aa, Halothece sp.
MFVIEYKVKASKTQYSAIDEAIRTVQFVRNKCVRHWMDNNGVGKYDLSKLCKQLADEFDFAKKLNSQARQAGSERAWSAINRFYKNCKAGIKGKKGYPKFQKNNRSVEYKTTGWKLDPNTKKHITFTDKNNIGRLKLVGSRDIYFYSPDQIKRVRLVRRADGYYCQFCINVDVKEEHEPTEQIIGLDVGLRDFFTDSKGHKEPNPRFFRKGEQELKRHQRLVSRKQKGSNNRGKARQKLAKKHLKISRQRREHARRTARCVVQSNDLVAYEDLQVRNLVKNHNLAKSISDVGWYQFRVWLEYFAKKFGKITVAVPPQYTSQECSNCGRIVKKSLSTRTHTCKCGCQLDRDENAAINILKKGLSTVGHTGTWGLDSLNASGDETATQVGQVLFEQVTSQNEESQGKARSVAVGVSTQD

SEQ ID NO: 25473 - protein, 226 aa, Halothece sp.
MYGCQQNRIKPSSEVIPILEHICYTANNLTNCGIYYARQTFFNEGRIIGKYEPEEVLKQQVNFKALYSQCAQQVLRSVAESFKSYKSLKKAFFKGEISHHPKLPNYRNKGGMAVAPYPKQNLTLKNGQVRIPLGKTIKAWFGRSEFFVSFPSNLEWKNIKELRILPRNREFYVEWVYERPEVKTTVNSTEALGVDPGLDNWLTCVSTIGESFIIDGRKLKSRMAEL

SEQ ID NO: 25474 - protein, 304 aa, Halothece sp.
MSKMIKEHWLKEKEEFSIPSVNYIGETNVAEIRILPQHGKLWAELLYKVEEKEAVGLDYSQALGCDPGVNNLLTCVSTLGKSFIVDGHKIKGVNAKYNKTVAKYKQGKSDFYWDEYLGELTHKRSCFMGDAVNKTARFIVNYCLNHRIGNIVFGWGQGIKTNCNLGSKNNQNFVQIPTARLKNRIKELAESVGINFTETEESYTSRSSYLDNDYLPVFGGEKPANWKASGKRVKRGLYQTRNGKLINADCNGAANILRKVSTQLGLGLTEVRRECLSVPKRYNVFSSLKKSYRKRGETYLQCVS

SEQ ID NO: 25475 - protein, 532 aa, Halothece sp.
MPIKGKSNQSETKQGKGYSTATPTSKGQLELPLFATVASPPTNKKTTYCDKKPTSSPSTPKQKLLKTSGLESTSSEKDCAPYWTDCCAEISSSLLLPVETDFSDSDLNSSNIWFSPTVGKSWFSNNLFTVQNQNLAPIFSPSFTSSVVECTDSESTLRRSNKIRIFLNSEQKQIVRHWFGVSRFVFNRTVEYLKQPETKANWKAIKGEILNSLPDWCSCVPYQIKSIAVKDACQAVSNAKKKCINGEGFNRVRFRSRKKPVQSCYIPKSAVKEKGIYHTKLGCLSYKEPLPETYGDCRLILAYNEYFLVIPQPVEVKATENQGRVVALDPGIRTFLTFFSESSYGWLGERANEKIQKLCFKLDRLVSKISKAKSKQKRRMKRAASRIRGKIKNLIAELHHKTARFLVDHFDVILLPTFETSQMSKKGKRRIRSKSVRQMLTLSHYRFKEFLKSKAYEYKKVILDVNEAYTSKTVSWTGEIIHNLGGAKTIRSKVDNRKMDRDLNGARGIFLRALVDTPWLSEHLNLCVAGDC

SEQ ID NO: 25476 - protein, 461 aa, Halothece sp.
MNHSIIRTDTWHLSPTPEQQQYLRLTVQEYRAFCHALVGVVNAHWTTIANAKSRCSEVERLIHQTSKNPNPKYQYFGKRFYKFPSYLRRSAIEFAIGQVSSFFTRYQRWQSGIRSRKDAKPPKLNGNTGCYPSLYKGQCIKFSECLTVTEIKVWNGSDWIWTKVAISRKRDRHLLNHAEIKSPALIVNKKGCQLSVPFKINPAKKEGSCVCAVDIGINTLATVSIVYPNGTVTARKFIHPSADIDRRDKRLARIRKKARLTKNLHKGFCSTWYRKARQYNRNIAQHSSKQIVDFATEHGASVIVFEQLKGWRPKGGRKGSTLKQRFHGWLHRALVNLTQEKFAEGGGKTEFVYPRGTSSFAFDGSGKVKRSKKNYSLATFSSGKQYNCDLSASYNIGARYWAKKLKLTRRNDGQLDDGKSSSFKRRTPVTLSVLWKDKEAEGLSSEVSSDVYTPRPTTASA

SEQ ID NO: 25477 - protein, 517 aa, Halothece sp.
MQESLLIPKEMTLNDKLTFCVKHTQEQNWSKKLDQDSILGGESSSPYWSEFTKVMSDALSALTPTDSLDLASPSLSGSVVKQNVNSWFSMKEISLQNKNSLKISCPSSTVSLLGYTDSESTENKSNLPYKKKPRHRTSKSTPNAVKKIRVYPSKDLHRVWKRWLAAYRWIYNWTIEKLKKEGYISAYTLQPLARKADRPDWVKELPGHQLQEAVSDAVDAFAQAKANGGQAKFKSVKAPSQVIKFKAGNYKQGCWYPKKTKGLTFYSPESFPNECLYATQLVYQKGKWYGIFPECREESCTETDSVIALDPGVRTFLTGYDGNRVLEVGERDLGRVNRLCTHLDDLLSRIAKCNSKRKRFKMRKAATQIRHRIQNLVKDLHNKVAKFLVSCYKVIFLPTFNTSEMVLKDKRKINSKTARSMMTLSHHKFAEHLLHKAKRKGVLVVRCNESYTSKTCPECGHIHDRLGGSKKFKCPSCGYTVHRDWNGARNIMLRALAATPFTLTSNAIPSLSLLNYE

SEQ ID NO: 25478 - protein, 386 aa, Halothece sp.
MLKAFKYRIYPNQEQRVLLAKSFGSCRFFYNYALNLTSQTYKETGKGLSRNDIINLLPNLKKEYEWLSEPPSQALQQVALNLSSAFLNFFEGRGRYPQFKKKQNRQSIRLPQGCKLEDDCLKLPKFGKVYCKVSRQPTGKLKSVTVSQTPSGQYYASCLFDDGTEKPEPSGEGKAVGVDLGISDFAITSDGFKYGSPKYYRKYEQKLANKQKELSRKQKGSNNRRKARIKVAKVHEKITRCREDFLHKLSRNLVDENQVIVVENLAVKNMVKNSKLAKSISDAGWGQFLTMLKYKSEWEGKTYIEVDRFFPSSKTCNPCLHQVDSLPLDIRNWECPSCETQHDRDINAAKNIRDEGLRILAVGRIATASGQRVRPSKGTAFSGLAE

SEQ ID NO: 25479 - protein, 408 aa, Halothece sp.
MEQTLTLVVKLNVEPEQADQLEETAQAFANACSWINENVNHRLTNRNSIQAVCYSDVKKRFGLKANHIVRACARVGANRSTAKAKGRKVKGFKPTSFDCDGRTFSFREKDWTVSVTTLGKRLRLPLRASNYHRGKLTGQKPTSAQICKHKDDQWYVHIQLKNIPPTPQKTSNVIGVDFGRREIAKTSTNQGWDGKNIQQKRDRFSRVRASLQKKASQGKSASPGVSPGVYAGGTRSSRRRCREVLKRLSGREKRYQKWLNHNISKQIIEEAKQTNSTVAIEDLTGIRERTNQKPRNKTERRRSNNWAFYQLRTFLEYKGIKEGIKVVAVPPAYTSQTCHCCNHIGIRTNKNFKCSNQFCGWIGDADLNGALMIKKWGCSINQPGGSEVLSCRISRATENPNRARSGLG

SEQ ID NO: 25480 - protein, 418 aa, Halothece sp.
MLRAIKVRLYPTPSQQSQLNQVMGCARYWWNYALALCKQHYKDTGKGLGRTALNAYLPPLKRQEETAFLKECPAQVLQATTLNLTKAYKNFFEGRARYPRFKSFDQRQSCQFPQHVKIVDNKALRLPKMEGLVKAKIHRLFEDGKLKTVTISRTPTGKYYASLLFETQQEKPTPVTEGKVAGIDLGIKEFAIVHDGEKCSKFPNPKNLSKHEKNLKRKQKKLARKQKGSQSRNKARKLVAKVHERVSNTRQDYLHKVSRKIVDNNQVIVVEDLNIKGMVRNHKLAKAISDVSWGMFVNFLDYKLKEKGGVLVEIDRWFPSSKLCSNCHYELESLDLEVREWTCPKCGTHHDRDENASKNIRAEGIRMLSVSGTGTAAVGGDRSPKLGRKVKFGHSPTSIEAPTSMNAGWGSSPGAFFQ

SEQ ID NO: 25481 - protein, 461 aa, Halothece sp.
MSYQTTKLNITKNISDQTRDVLVFLCHEANNLWNTAVYQIRQNHFATCGVREFFDKNDCFRRQFRDKKVKVSYPQLGKDFKENQHYQWLGAQQGQQVLKSVEEAFKSYNELLEMWFNGEIDQKPKLPNYRTKGGLCDFTFPRQSLRFNHENGSWFLPMSKMIKEHWVKEKEEFSIPSVNYIGDTNVAEIRILPQHGKLWAELVYKVEEKVATDLDYSQALGCDPGVNNLLTCVSTLGKSFIVDGHKIKGVNAKYNKTVAKYKQGKSDFYCDEYLGELTHKRSCFMRDAVNKTARFIINYCLNHRIGNIVFGWGQGVKTNCNLGSKNNQNFVQIPTARLKNQIKELAELVGIKFTETEESYTSCSSFLDNDYLPVFGGEKPANWKESGKRVKRGLYQTRKGKLINADCNGAANILRKVSTQLGLGLTEVCRAVLSLPKRYDVFSLLKKSYRKRGEVRFNLAS

SEQ ID NO: 25482 - protein, 402 aa, Halothece sp.
MRQVQKHLIKKTHRQFAEIDRTAFASKNLFNSAVYICRQAFFNGTPIPSFNQLYHLLKTGKDYQALPTKVAQLVIKQVVRCFKSYFEAIKAYEKNSDNFFSRPKLPSYKDKTKGRNVLTYNSQAFSKKWLRQGFISPSGLSLKVPTNLKQIEEVRIIPKNNCYVLEAIYTVQEAQLLPQEKVAGVDIGLNNLATVGSSDPDFKPFIVDGKALKSCNQFYNKKKAKLQSQLPSNQFTSKKLEGLTLKRNNKVDYYLHTASRLIINQLLERGVGHLVIGKNENWKQNIEIGKRNNQNFTQIPHARFIDQLTYKAELVGIKVTLTEESYTSRCSFPDLEPIKKHTNYKGRRVKRGLFNSSSGQKINADLNGCLNILRKVVGDSIFDGKPIERLVVSPVRFQPYKA

SEQ ID NO: 25483 - protein, 449 aa, Halothece sp.
MLTKKPTKIIRTDKWTLNPTDEQRVLFSETVQVYRRLCQYLVGIVFTHWAELGRLSSNELVPAVERLIHATAKNPTPRYALVDRVFHKFPSYYRRVAIMFAAGQVSSYLTRYQEWQSGNRKRKDAKPPMLNANAGCYPALYRGQCYKLHGYEFVEIKVFTGTDWVWTTVQITGLRERHEVDSNKMLSPYLIFNESTCHLSVPFECHPPKRQGDGVVVAVDLGINTTATVAVVDNSGTVIHREFVHPGRDIDRRDKRLKSVSMRASKTMGKGGKLHKGFCSNTYRKCRNINQQIGHIVSKRIVQIAQTFNADAVVFENLKGWKARGGRKRSNLRQRFHGWLKAMIRDFTEMKWREVGGKVVDVIAAYTSKLAYDGSGEVKRDSKNYALAKFNSGKRYSADLNGAQNIGARGILKLTRRNDREERSSKRSGRSPRSWACLCDLWDTAVSTG

SEQ ID NO: 25484 - protein, 490 aa, Halothece sp.
MNHSIIRTDSWHLSPTPEQQKYLTLTVQEYRAFCRALVGVVNTHWTAIASAKSRCSVVEKLIHKTRKNPNPKYQYFGKRFYKFPSYLRRAAIEFAIGQVSSFFTRYQRWQSGIRSRKDSKPPKLNGNTGCYPSLYKGQCIRFSECLTVAEIKVWNGSDWVWTKVAISRKRDRHLLDHAEIKSPALIVNEKGCKLSVPFKINPPLSYISPNRREQEGGNCVCAVDIGINTLATASIVYPDGTVTTRKFIHPSVDIDLRPCPNSIRAGKRRRIPRRRDKRLTRIRKKARLTKNLTKGFCSTWYRKARNYNQNIAQQSSKQIVDFAQEHGASVIVFENLKGWRPKGGRKRSTLKQRFHGWLHRALVNLTQEKFVEVGGKVEFVYPRGTSGFAFDGSGKVKRSKKNYSDATFASGKQYNCDLSASYNIGARYWARKLKLTRRNDGKSDDGKSSSSERRTPVTLSVLWKDKEAEGLSSEVSSDVYTPRPTTSRRD

SEQ ID NO: 25485 - protein, 403 aa, Halothece sp.
MRQVQKHLIKKTHRKFKEIDEASFASKNLFNSAVYICRQAFFSNQPVPSYNQLDHKLKAGKDYKALPSKVAQLVIKQVIRCFDSYFEAIKAYNIDPSKFFSKPKLPKYKKKIDGRNVLTYNCQAFSRKWLQKGYLKPSGLSLKVPTNLRKVEEVRIIPKGNCYAVEAIYTVDILPEQQCQGKIASIDIGLDNLATVASNDFDFKPFIVDGKAIKSCNQYYNKRRAKLQSLLTENQFTSNQIEGLTQKRNNKMDYYLHTASRFIIDKLLERGVTHLIIGKNENWKQSIGIGKRNNQNFTQVPHARLIDQLTYKAKLVGIKVTITEESYTSKCSFLDLEPIKKHSSYKGRRVKRGLFKSSLGKKINADLNGALNIMRKVVGDSVFDGKPIERLVVSPVRFKPYKA

SEQ ID NO: 25486 - protein, 243 aa, Halothece sp.
MFVIEYKVKASKTQYNAIDEAIRTVQFVRNKCVRYWMDNNGVGKYDLSKLCKQLAEEFDFAKKLNSQARQASSERAWAAINRFYKNCKAGIKGKKGYPKFQKNNRSVEYKTTGWKLDPNTKKHITFTDKNNIGRLKLIGSRDIYFYSPDQIKRVRLVRRADGYYCQFCINVNVTEDVKPTKQILGLDVGLHDFYTDSEGHKEPNPRFFRKGEEELKRCQRRLSRKQKGSNNRGKARQKLAKNT

SEQ ID NO: 25487 - protein, 306 aa, Halothece sp.
MTQESSVFREKDWTVSIKLINSRPRLELLIGNYQRHLLKGSKPTSATLVKRKDGTYYVHIQIDRDTPDPTETDQVLGVDLGRTDIATTSQGESWSGKQITDKRNHYHQMRAVLQRKAVKGTRSSRRRCRQLQKRLSGREKRFQKWVNHNISRLLVDNAVTNNLVIALEDLTGIRKRTNKNPRSKKDKRLGNNWAFYQLRQFISYKCALKGVKLVFVNPAYTSKTCSQCLHIGERKGKRFSCEHCKNKMDADLNGAKNIEALGAVVNQPRGTGLSCRLSLNREYVQLSLFDNSGLQKASRERVSGET

SEQ ID NO: 25488 - protein, 420 aa, Halothece sp.
MFIQEFKLKGNKTQYQAIDEAIRTSQFVRNKIIRHWMDNYDVGQKDLYRYNTQLREEFPFVKALNSHACQTAVERAWSAIARFYDNCKKQIKGKKGYPKFKKNCRSVTYKTSGWKLSEDRKRIKFTDKKGIGSLKMKGGWDLHRIQQEQIKRVHLVRRADGYYVQFVIKEDLSNIVPTELEPTQHNVGLDVGLIYFYVDSDGNQVQIPQYYRKSEKQLNRLNRRKSRKFRKGQKQTNNYLKARNRYARKHLRVSRQRRGFVERTALRVIQSTDVVAYEDLNVAGLVRNGKLAKSINDAAWSSFRGWLEYFGNKYGKITVAVPPHYTSQECSNCGRVVKKTLSQRTHECECGSVLCRDQNAAINILKRGLATVGHTEGLESDSINAWGDPPSTLADGSGCLSKQGGSSAEQGSVNQESPSF

SEQ ID NO: 25489 - protein, 380 aa, Halothece sp.
MAKQTLTLKLPFYQLNQVKASEFERLTALNTQVANDLLRFSKKERRELTSASFSHLELGSMWINQTIRNTNAKTKAKRFKRMWLEVNNQGYKITKSGELYTVSFNLYRGRKKRIPLEVHSSSQAKVLDKAILGQVKLGSLKICKSKKGVWYVLISVSMDVPEPNQVKGWIGVDRGQNNLAVAALPKSFGKFWKAGRVKKLRRKFQKTRKQLQEAKKLKKVKQLEQRERKIMTHINHIVSKQLVQLAQDYGMGLRFEDLSGIRQTSKQRKKTKSDASKNRDHWAFYQLEQFTRYKASLAGVPVESVPAPYTSKSDHRNGVIGKRNRHWFTGFDGYKCNADWNAAQNIGKWVGFSCPLNLQKTVSVMDAVDSKDGVDDSPPN

SEQ ID NO: 25490 - protein, 413 aa, Halothece sp.
MVTTRRITFRLYPNKSAVSKLHYARKAHCDLYNAALSNRKVQYQRFGNSVSYFDQQNSLPAFKEELPEYKEFGSHSLQATLKRVDFAFQRFFKGLAKYPKFKAKRKYRGWTYPCRSGWKAHTEGKHGYLELKDLGLKIRMRGQARTWGKPTTCTIVWDGQNWYASITVKCEPVRETGTGAIGLDFGCKSAIAGSNGDFIEAPKFQTRAKTKENRLNKKLRRKRRPEKRKVKASRRWKKYQKQISKVKRKVANQRHDWSHQVASQIVSSNSLVATEQLNLKGMTRKAKAKGKRQKTGLNRSMLDVAIGMTKDNLKYKVEEAGGIYSEAPTRTLKPTQRCAKCWEITKKTLSDRVHHCQHCDHQEDRDINAAQVMLEWARGQELSSSDVELPTSVDCGSMGKVGAKKRQKPQAQT

SEQ ID NO: 25491 - protein, 434 aa, Halothece sp.
MLRAIKVRLYPTPSQQSQLNQVMGCARYWWNYALALCKQHYKDTGKGLGRTALNAYLPLLKRQEETAFLKECPAQVLQATTLNLTKAYKNFFEGRARYPRFKSFDQRQSCQFPQHVKIVDNKALRLPKMEGLVKAKIHRLFEDGKLKTVTISRTPTGKYYASLLFETQQEKPTPVTEGKVAGIDLGIKEFALVHDGEKCSKFPNPKHLSKHEKNLKRKQKKLARKQKGSQSRNKARKLVAKVHERVSNTRQDYLHKVSRKIVDNNQVVVVENPSVHLNSIQVLADGRIPRLNIKGMVRNHKLAKAISDVSWGMFVNFLDYKLKEKGGFLVEIDRWFPSSKLCSNCHYELESLDLEVREWTCPKCGTHHDRDENASKNIRAEGIRMLSVSGTGTAAVGGDRSPKLGRKVKFGHSPTNIEAPTCVHRGWGSSQFPH

SEQ ID NO: 25492 - protein, 399 aa, Halothece sp.
MIVIEYKVKAKKTQYIAIDEAIRTTQFIRNKALRYWEDNHGATKYDLNKQCKLLAEEFEWAKRLNSQARQSAAERAWSAISRFFDNCKKKVTGKKGYPKYQKNNRSVEYKTTGWKLDPNTKKHITFTDGNGIGRVKLIGSRDIYFYSKQQIRRVRLVRRADGYYCQFCINVNVTEDVEPTQQAIGLDMGLTDFYTDSKGHKQPNPRFFRKGEEELKRSQRRLSRKQKGSSNRKKARQKLAKKHLRISRQRREHARRIARCVVLSNDFIAYEDLQVKNLVKNHNLAKSISDVGWYQFRVGLEYFAQKFGKVTVAVPPHYTSQECSSCGRVVKKSLSTRTHTCKCGCQLDRDENAAINILKKGLRTSGHEGTYAWGDEASTLVGLVLSKQASSQNQESNAL

SEQ ID NO: 25493 - protein, 424 aa, Halothece sp.
VLTLNYRYRIYPNKQQEETLTEILEICRSAYNYALREIKDWCGSRKCSIDRCSLVSEYIIPADEKFPSELKQLNALPKAKKQFPKLKKVPSQVLQQTIKQLHRAWDYFRSRGYGFPRFKKYGQFKSILFPQFEKYPISGNKLRLPKIGEIRIRMHREIPTGFSLKQVRVVRKADRWYAIVCIQCNVDVPPLSFSPTGGDVRGGGYAIGVDIGLKEFLATSDGFFVKPPRFFQTMQRKLGLLQRRLSRKKRGSKNYHKQRLKVARLHHKIDNARKNFHHQTAHQLCNQADLIFVEDLDFRMTAKGMFGKDMLDAGFGQFRQILKEVCWKRGKYFSEVDAKGSTQTCPRCSTHVGKDLSVRIHECPQCNLVADRDVAAACVLRNRGIEKINSTVGQAGSKTPRQSGCRETGIPVLDQWCNPIHGNN

SEQ ID NO: 25494 - protein, 502 aa, Halothece sp.
MLASYQFKLKPKLSQVAVMEQWINMLRAHYNFCLRDRIESYEQVRSPKLGNYSDLTTQGECCPLTCSVSKNSNLGYPYKANGKKRNAYEQQSSELSILKKARPWYAEIHSTILQQNLKRLEVAFKNFFEGRGYPKFKTKQKFKSFNYPPNQVQVKGNKIYLPKIGWMRFFQSRPFPEGFSLRSVTVRKKADGWYVSIGLENKDVPEGALSDAEPSSARVAPQSSPKTIDEINSVVGGDLGSNKLLALSNGEQIANPQFEKRLERTKTIRQRRASRKKRGSKNQKKAYQKLARLDQKIVNQRTDYQWKVAHQLVRLADVIVLEDLNIKGMIKRCQPKKDENGKYLKNGQSAKRALNRLIRDCAWGELKIKIQSVAEKFGCLVVEVNPKHTSQQCSACGKIDKQNRKGEKFACIECGHVQDADNQAAINIAKRGIKQLNLSLSKLLGVTQKVTANSEATGDTRNGGETSVSLETEPSNPKQLSLFEWIGDQVTGFPESPTKRVA

SEQ ID NO: 25495 - protein, 325 aa, Halothece sp.
MFVIEYKVKASKTQYNAIDEAIRTVQFIRNKCLRYWMDNNGVGKYDLSKLCKQLAEEFDFAKKLNSQARQASSETGAKVRTWAAINRFYKNCKAGIKGKKGYPKFQKNNRSVEYKTTGWKLDPNTKKHITFTDKNNIGRLKLIGSRDIYFYSPDQIKRVRLVRRADGYYCQFCINVNVTEDVKPTKQILGLDVGLHDFYTDSEGHKEPNPRFFRKGEEELKRCQRRLSRKQKGSNNRGKARQRLAKKHLKISRQRREHASATRWVVKSQGSQTSFRAIPDENSPWSPSELYLLIGEAHLPSPIIPMCGMTSLPLSKRWLRDDKAG

SEQ ID NO: 25496 - protein, 362 aa, Halothece sp.
LHRVWKRWLAAYRWIYNWTIEKLKKEGYISAYTLQPLARKANRPDWVKELPGHQLQEAVSDAVDAFAQAKANGGQAKFKSVKAPSQVIKFKAGNYKQGCWYPKKTKGLTFYSPESFPNECLYATQLVYQKGKWYGIFPECREESCTETDSVIALDPGVRTFLTGYDGNRVLEVGERDLGRVNRLCTHLDDLLSRIAKCNSKRKRFKMRKAATQIRHRIQNLVKDLHNKVAKFLVSYYKVIFLPTFDTSEMVLKSKRKINSKVARNMMTLSHHKFAEHLLHKAKRKGVLVVRCNESYTSKTCPECGHIHDRLGGSKKFKCPSCGYTVHRDWNGARNIMLRALAATPFTLTSNAIPSLSLLNYE

SEQ ID NO: 25497 - protein, 406 aa, Halothece sp.
MSEVQTITVACKLKVDYGVAKEIDDTLLAFSSACDWVNQNTPPKMTNKTAMQSLVYQEVRTRFGLSANLAIQAIRRVCANRKTAKQKNKPVKAFSPTSASYDARIFSFREKDWTVSIKLINSRPRLELLIGNYQRHLLKGSKPTSATLVKRKDGTYYVHIQIDRDTPDPTETDQVLGVDLGRTDIATTSQGESWSGKQITDKRNHYHQMRAVLQRKAVKGTRSSRRRCRQLQKRLSGREKRFQKWVNHNISRLLVDNAVTNNLVIALEDLTGIRKRTNKNPRSKKDKRLGNNWAFYQLRQFISYKCALKGVKLVFVNPAYTSKTCSQCLHIGERKGKRFSCEHCKNKMDADLNGAKNIEALGAVVNQPRGTGLSCRLSLNREYVQLSLFDNSGLQKASRERVSGET

SEQ ID NO: 25498 - protein, 387 aa, Halothece sp.
MFVLEFKAKGKKSQYRAMDEAIRTVQFIRNKSVRYWEDNEGVNKYDLNKNCAKLAKEFPFANKLNSSARQSAAERAWASISRFYSNCKKKISGKKGYPQYQKNNRSVEYKKSGWKLDCNTRKHITFTDKNKIGRIKLIGTRDLHFYSPDEIQRVRIVKRTDGYYVQFLINIDVKENITPSGNTIGLDVGIESFYTDSNGYKEPNLNFLRKGEEKLKKLQRSLSKKQKGSNNRKKARQKLAKHHLKISRQRKEHALRIARCVCQSNDLIAYENLQIQNLVKNHNLAKSINDVAWYQFRVWLEYFAQKFGKITIPVNPKYTSQKCSNCGSIVKKSLSTRTHKCKCGSCLDRDENAAINILNDGLRTFGQRETANLEARKRFRRFDRYFG

SEQ ID NO: 25499 - protein, 216 aa, Halothece sp.
MGENLNLEWQNYNRRVSSLKEGKPQGYWDFELARITEKRNRQVRDAVNKAAKMVINYCLNKDIGIIVFGWNKGQRQGVNIGRKNNQNFVQIPTAKLKNRIQQLAEEHGIEFVETEESYTSKASFLDRDLLPTFGEKPERCAPTGKRVTRGCYQDSQGRIVNADAQAAANILRKVEIQLGLVLAKVCRAALNLPQRFYLWNSKRKARSIMALGGAVC

SEQ ID NO: 25500 - protein, 345 aa, Halothece sp.
MWFDGEIDHKPKLPGYRTKGGLCSFTFPSDGLRFNHEEGYWLLPMSRVIKKYWEGGEEEEFSIPSVSYINDNNIAEIRILPQHGKLWAELVYKVEEKVETDLDYSQALGCDPGVNNLLTCVSTLGKSFIVDGHKVKGVNANYNKKVAKYKQGKSDFYWDEYLNGLTHKRSCFMRDAVNKTARFLINYCLNHRLGNIVFGWGQGVKTNCNLGSKNNQNFVQIPTARLKNRIKELAESVGIQFTETEESYTSRSSYLDNDYLPVFGGEKPANWKASGKRVKRGLYQARNGKLINADCNGAANILRKVSTQLGLGLTEVCRECLSVPKRYDIFSSMKKSYRRRFDCEI

SEQ ID NO: 25501 - protein, 430 aa, Halothece sp.
MYRCQQNRIKPSSEVIPILEHICYTANNLTNCGIYYARQTFFNEGRIIGKYEPEEVLKQQVNFKALYSQCAQQILRSVAESFKSYKGLRKAFFKGEISNHPKLPNYKGKGGMAVASYPKQALKLKDGQIRIPLGKTIKAWFGRSEFFVPFPSNLEWESIKELRIIPRNREFYVEWVYERPEVKTTVNSTEALGVDPGLDNWLTCVSTIGESFIIDGRKLKSLNQNYNRRVSSLKKGKPQGYWDFELARITEKRNRQVRDAVNKAAKMVINYCLNKDIGIIVFGWNKGQRQGINIGHKNNQNFVQIPTAKLKNQIQQLAEENGIEFVETEESYTSKASFLDRDLLPTFGEKPERWQPSGKRVKRGCYQDSKGRIVNADANAAANILRKVEIQLGLVLVKVSRAALTLPSRLYIWNSKRKSGATRFLRGAVC

SEQ ID NO: 25502 - protein, 191 aa, Halothece sp.
MQRKLGLLQRRLSRKKRGSKNYHKQRLKVARLHHKIDNARKNFHYQTAHQLCNQADLIFVEDLDFRMTAKGMFGKQMLDAGFGQFRQILKEVCWKRGKYFAEVDAKGSTQTCPRCSTHVGKDLSVRIHECPQCNLVADRDVAAACVLRNRGIEKINSTVGQAGSKTPRQSGCRETGILVLDQWCNPIHGNN

SEQ ID NO: 25503 - protein, 327 aa, Blautia sp.
  misc_feature (315)..(318): Xaa can be any naturally occurring amino acid
VRKINRAVKVRIYPNAEQRVQIEKTIGCSRFIYNCMLADKMEHYKKEKKMLRNTPASYKKEYPWLKEVDSLALANVQMHLESAFHKFFREPSAGFPRFKSKKSSRKSYATNVVNGNIFLEGKYLKLPKMTAVRMKLHRPISEKWKLKSVTVSREPSGKYFASLLFCCENQTAEKRPAEKFIGIDFAMQGMCVFSTGERAEYPMFYRNTEKKLAREQRKLSRCQKGSQNYKKQKKRVALCHEKIRNQRKDFQHKLSASLAESFDAVCVEDLNLKGMAGGIHLGKGVHDNGYGLFLSMLEYKLEERGKYLIKVDRYXXXXAEEKSCTVP

SEQ ID NO: 25504 - protein, 409 aa, unknown
  TnpB Polypeptide
MSFPAECMGSSDTVTKSRKIEIFPTADQKAILRRWFGTSRYTYNASVSALQEQDTPKNFKGLVPIVLDRLPEWHVETPRQIKVGAVMDACQAVRNAKIKAKATDERQNVKFRSRKHRRQTLYLRADSLKSNGFYVRFLGDMKMSEPLPAKPQGTGKVSERDTDAEVKDSQLIMEDGRYFLCVSYVEKKKTREPSGRIVALDPGVRDFMTFFSEDCFGWLGMQCINRIQRLCQHCDNLLSRATQEQRPLRRALRKAANRIQVKIRNLIDELHKKVAHFLVTNFDIILLPTFETKQMTKRGARKLRKKSVRQLLTLSHYRFKIFLKQKALEYGVRVIDVCEAYTSRTVSWTGEIVANLGGSKVIKSSEGHRMDRDLNGARGIFIKNVARALTVRPCSANLGASKSLIPSAT

SEQ ID NO: 25505 - protein, 367 aa, Microcystis sp.
LHKVWKQWLAAYRWLYNQTIDLLGSGAKPNIYEMQATLRSFPKPDWVKALPGHQLQEAVADACDAYQQALANNGSARFKSCRATSQVIKFKPGNFKNGTWYPRATKGLSFTSPQEIPTACEYGTQLVYCRHQWFACFPTLKPVQVTLEKRVIALDPGVRTFLTGYDGETILEVGGKDIGAIHRLCLHLDQLCSRISTSKSQRQRYKMRKAASRLRGRIQNLVKDLHAKTASFLVRHYKVIFLPTFETSQMSSKSTRKIQRKSVRSLLTWSHYRFAQHLQQAANRQGVLVVRCNESYTSKTCPECGHIHEKLGGSKTFKCPQCGYQAPRDWHGARNIMFRALQATAVIFRDDAVLFQGLGSDTQLCLG

SEQ ID NO: 25506 - protein, 437 aa, unknown
  TnpB Polypeptide
MVSLSPSAYLNAYAREIQHLQVLDERATLLSYLKLFPNIRLETFSLIFFLSGEIEERRMRTYKFRLYPSGQQEKHLIHQLWLAKNLWNGLLEHCKETYSNFDYFPTKNTLQLMTKNYGMFSQTQQEVSHRLHAAVMKVFVKRKLGQRCGFPRFKSLERMKSIHYPQNGVGFRLDNRLRVNPFGEIKIKKHREIDGRIKTLTLKREATGKWFAIFCADEPKKQPKENHGEWVGIDLGLMNFATLSNSKVISNPRHTRKYEDRLTYSQRELTKKNKRGKNRQRARLKVARIHERLANTRRDFLHKLSSNLVSVHSRIALEKLASKEMAEKNFGKSIYDAGWNMFANMLAYKAESAGCKVVFVDPRDTTKECSVCGTKTEKALSERTHDCPFCGLSIDRDINAARVILKRATVGMTGSNASGDERMLSSLKEEAHAFRRR

SEQ ID NO: 25507 - protein, 437 aa, unknown; identical to SEQ ID NO: 25506
  TnpB Polypeptide

SEQ ID NO: 25508 - protein, 372 aa, unknown
  TnpB Polypeptide
MLRAHKIRLNPTLEQELYFRKATGNARFAWNWALAIIKEAGANQAKLPSVNDLRIKFNQIKRIEFPFIMETTKCAPDQALLDLKQALSNFFNDLKKRKTGKKRKDGNQVNFPRFKSRRKGFGSFYLANDQFAVKGYEIKIPKLGWVNMTEQLRFAGKLMSARISERAGYWFVSILVELPELISQAPERVIGIDVGIKTLAVDSDGEGFENQKHFSLAQKKLRRLSRWLARKQKGKKNWAKAKLKLARWHLRIANLRKDALHKMTTRLAQKASTIALETLNVPGMLKNHKLAKAISDASFAEIARQLTYKAQQVVLVAPFYPSSKTCNGCGVINKELTLAHRQWKCPSCGATLDRDLNAALNLRDEGIRIIGA

SEQ ID NO: 25509 - protein, 539 aa, unknown
  TnpB Polypeptide
MARRGAPRGGSPSRGPHRSELRWGAPGRVPMGSPGQPRGEPRRYAAPNGWTLQAFQFALDPTPEQWQVIRRQWGGRRYAYNWAVRTLKADLDAYRERGAPRSQLGDPIGTGSDGEPLRGEPQTGESKEPPSFYGLRWRWNRAKATECVDGETGEAWWPQISKEAFANGIKDAVDAYWRWQQSRAGKLDGRRVGFPRLKRKGRDPDRCTFSTGVIRVEPDRRHVTLPKIGTVRTCESTRRLERLIRLGRARILAATLKRVGERAVVVFRVEIQRPQGCPTRPASWGAPQRGHPDPASTVGVDVGVRWLATVATAEAVIERVPNPAPLARNLTMLRRLSRSISRSQRGSNRCRRKERRRARLQAHIAAIRRHEIHRLTTRLAKTHGRIVVEGLDAAGMLRQKGLPGARVRRRGLADAALAEVRRQLRYKTTWYGSELVEADRYFPSSKTCHRCGLVQDIGWAEHWRCDGCGARHQRDDNAAINLARYRSPGAPHKASFVGAPPVGSVGAFVKRRAAVRPGLPGHAARKREAREGNPVRGAA

SEQ ID NO: 25510 - protein, 242 aa, Moorea sp.
MIVREAKLLNGSQSQYARLDSAIRTAQFIRNKAVRLWLDEPDVDKSRISRLCKELAQQFPFAKKLNSMARQASGERAWNSISSFYRRCREGAKNKGYPQFKKYSRSVEYKTSGWKLSEDCLTINFTDGFKAGRFSLFCNHKTREDLFRLKINRVRVVRRADGYYAQFCFDASRFEAGNYTGNLVGIDLGLKYFYKDQNDNSAIYPKYLRQAEKRTRETTAAAVKKVCQRQEASIKQLPQSQN

SEQ ID NO: 25511 - protein, 355 aa, unknown
  TnpB Polypeptide
MINASGVIYNHCIALHKRYYRMWGKHLSCAKLQSRIAKRRKCNPFWQTVGSQAVQDICQRIEKAYQLFFKHNKKGVRPPGFKKVRKYKSFTLKQAGYKFLGGNRVKIGSRVYQFWKSREIEGKIKTLTIKRTALGELFLVVVVDGNDAPEIKFTTSKIAGFDFGLKTFLTCSDGTKIESPQFFKQSLNAIRKASRHHSKKLKGSSNREQAFENLVRAHEDIANRRSNWFWKLAHELTNKFDVLCFETLNLKGMKRLWGRKVSDLALRDFLDILEWVALKKGKLVVYIDQWYPSTKTCSCCGHVLENLDLSVRRWRCPSCLSVNDRDENASLNIKRVGSSTLGVGDVRQSQTAISV

SEQ ID NO: 25512 - protein, 388 aa, unknown
  TnpB Polypeptide
MADDPDLRATLAGLQGIQQRISAACYNDGKPLSALALHRAVYTDVKGTISSQMTCTAIRLVAGAYASAKANKKPAQRPFQFTRTTALFLVGARGRDARFCDDGTLSIWTVAGRKRIAYSVPDAFTSTRAEAVEIDSMTVIERDGRLLGRVVVTLRVPDPKGIHPVGIDLNETNALVAVDPDGNPLFVSGRDFTVRNTRTRKTRRRLQAQRATRTAQKRDTRSIRRTLKRLGRTQRHRTRTFCQQTAATLVAWVPADSVLVFERLTLPQPSKKLRVRTGTRRRLSQWQRRLMRQRVTNAAERRGLLVDDVNPAYTSQDCSRCGLRGIRKRHTFTCPHCGHEAHADVNAAVNIRHRYTLLRQRGPLSTGSEALSLVASDEGKLSPSGDSR

SEQ ID NO: 25513 - protein, 370 aa, unknown
  TnpB Polypeptide
MIRSHNIRLNPTPEQAQHFRQAAGTARFCFNWGLRKVKEALDAGQPLPQARALRDEFKRIRTEQFPWTYDVGKSAIEGAFVNLGRAVKNFFDSKNGRRKGKRMGFPRFKSRKRGYGSFYVANDRMQLDGHWMTIQKVGRVNMTEPLRFVGKIMGATIRYRAGWWWISIPVEVAHTPPVHQGGAIGVDLGVKSLAVTSEGEVFENQKHLKRAVRQVKRLQRVASRRQKGSQNRKKAVLKLAKAHFKVACKRVNSLHTLTTYLVQQASLIGIEDLNVAGMLKNHRLAQAISDVSFAEIRRQLDYKAPAHGSHVVVVERFFPSSKMCNHCESINHALTLGIRTWTCPTCGCTLDRDVNAARNIRDRAIRRAHA

SEQ ID NO: 25514 - protein, 385 aa, unknown
  TnpB Polypeptide
MERAHKIRLNPTPDQEQYFRQAAGNARFAWNWALGIIREARHMGTNLPLVGDLKAAFNRIKRDQFPFMLETTKCAPEQAFADLRQAIANYFNDIKKRTHGKRRKDGKRVGFPKFKSRKRGYGSFYVSNDKFTVDGHWIKIPKLGWVNMTEPLRFDGKIMSARISERAGYWFVSIQVQVPEPEWQVSNRVLGVDLGVKALAVDSDGEVFENQKHLTVARRKLRRLNRWLARKQKGSNNWHTAKRKLARLHLRIANLRADATHKLTTRLAAKASTIALETLNVVGMLKNRKLARAIADAAFSEMVRQLGYKAQQVVRVDLFYPSSKTCNACGYINRGLTLAERSWTCPECGTVLDRDVNAARNIRDEGLRLVSAEELIVPGRGYVGT

SEQ ID NO: 25515 - protein, 382 aa, Natronomonas sp.
  misc_feature (285)..(329): Xaa can be any naturally occurring amino acid
MYYAYKYRLNPSDAHRKELDRHRDICRQLYNHTLYRLNEYQDEHGELPSMTSLRSELPDLKKWWDGLSDVYSKVLQTVVERLFDNLNSLSKLKENGYGVGQLKWKPPREFRSFTYSQSGFKLDKKGGQTVLSLSKLADIPIRLHRPIPDDATLKQVTVKKEPTGEWFATFGVEMDRELPEPPENPEKCVGIDVGILKYAHDTDGTAVGSLDLSDERDRLEREQRKLSRKQHGSNNYEKQRRRVAECHADLRRKRRDFLHKLSAYYAREYDLVAVEDLNVKGMMEXXXXXXXXXXXXXXXXXXXXXXXXXXXXXXXXXXXXXXXXXXXXXRGRTSSRLAREGRLRSARPAVSRRRSRCGSVNTPVLPAGLRWTGMRTRSSDYV

SEQ ID NO: 25516 - protein, 195 aa, unknown
  TnpB Polypeptide
MVRELYRRKSEYSTHMHGNMANRMVNNASVFITEPMDFKALAKRVKETKRQNNISVIKKPDGTEQVICKYKRKKRFGKSVTDRSPAELMRILQRKCSQYGLLYYEVDKWEYRASQYDHKTNTYTKIQLSQRFKVIEWNKVQRDLYSAFLLSCRRNSKKPNRKKCKELFSHFVEMHDMLIHQMKTNGISRPACFGF

SEQ ID NO: 25517 - protein, 627 aa, unknown
  TnpB Polypeptide
MAKTQMLSFPIRLPDALQAEALRRLHASRSAINEIIVDLWPRLDQFAGDRSGPAWKQIEPYVLKRSDHGSRQERCEMEQAGRILRAQASRKQVFQSILPLLSEGLIRPAEEKRPARKDYRAIKEQVRQLHADQEAAGEDPDAFMAMTNLVEQACNRYLQMETFPTTYEDLQPVPVLSVGQLTFAGDDGMKLGQTYRARIEVAQFCDLATHTEQHRATLTLKLRTPDEQGKWAWGGWSEAIPLPETVCGYLWQGAKPQAPTLREIRSDDGSRVAVLDLILEVGAQVVSPLEQEARVLGWDWGVRSLITVSVLELSEGDEPSHQVSRPVFLDAGGIDGRQARLRREIDRLKACKERYERLITHAKKEQEAHGTELPAHFAGWQERVSAYSARIKQCWKKYERRNAELAHLASNLLILLALLYDCRLICGENLTTLKTEGRGRGVRGRFRNWRNNTTVRGELWRVLKYKCHLLGIRARQVEPRGTTHTCPRCHHPAKTYASPAPADRKKALDWGPWLCCNSPTCSWSGARDYAASLNIARLGLAYLVTYHQTKRYVSYRMTSSEVKPASYRGAGATLLLPSQGITPRPFEGKDLYYAGWSFSIALRTSQPKAILAVLSTSRLRKYVLKRA

SEQ ID NO: 25518 - protein, 441 aa, Bacterium sp.
  misc_feature (379)..(379): Xaa can be any naturally occurring amino acid
  misc_feature (387)..(387): Xaa can be any naturally occurring amino acid
  misc_feature (394)..(394): Xaa can be any naturally occurring amino acid
  misc_feature (397)..(398): Xaa can be any naturally occurring amino acid
MKKKDSTTHLLTERIVIRKGHNWFDGSKYSTQISRRIRNATTYLMRHEKKPNGKYLSHRDADKWLKKNNAELYTKMPSAFSQRTTQIVGQDFSSYFAALKDFAKNPSAYKKKPRPPRYANKANTLTVGRNGFCLKQGNLHLAGNTFPLPLKTSFSFDQEYNAKVKDVIVHEVRIVPMGSCFVVELIYNPAKLQALGSFCPILDKGRKAGVDLGINNLVAIASDQHDVRPALINGKPLKSINAWYNKRAAKLRSAGKYQHLPEIANKRYHRTRDLLHRASRFVANYCVSNNIGTLVIGLNKGWKQDCNVGKVNNQKFVGIPHTVLIEQIKCKCYALGINVIVREESYTSKASALDNDFIPTHGDDVIPKFSGRRVKRGLXKSPQGLIXADINSAXNIXXKETGEALNVLACRGCMFQPVLVTLGFPNVTKTKREADLLPLAA

SEQ ID NO: 25519 - protein, 451 aa, unknown
  TnpB Polypeptide
MPGSASTRSQAWRMSASISELNALRAWGRFIVTMRTCPRCSTSACGGSLTGLSGGNPGPEAGDEAGVLRGTAGDGSLSNPPLSDISRYNVRVSRYRLVITSQQESILLRHCSDARYVWNLCVEQESEYRPGRGKMPRFAERCRQLTEARADNPWLKGGQDEGFRIVTVTPGDVRRLNRTHAAVKVPKAGWVRFRWSRPVPGGVKSFRVTRDRAGRWHVAFAAVPGPVPGPGTGTVVGIDRGVKVSAALSTGETLHCPGLTGREARRLRCAERKTAKAKRGSGRRRKAKATVARLKAREADRRKDWAEKASTDLARRFDVIRVEDLDIKNMTRSAKGTVEQPGRNVAQKAGLNRGIGKAGWGLLVRRLQDKAPGRVQKVPPAYTSQRCSACGHVARESRESQAAFRCVACGFACNADVNAARNIAAGHAVKARGGDGTARPVNREPQPALLA

SEQ ID NO: 25520 - protein, 490 aa, Asgard sp.
MLSKEHRQAKKVYQTLIADLPKNELEKALLKIKQITKPSVKKKPLQLTNKVKITPTEEQKQVLWVLSENCRLIHYFANKERKEWWSKNQHLPKKKRDKENKPSYNKQSKQLPKLKEQYPRYKQNYSKTLQDTLRQLEADYKSFHALRKNGDKNARPPGFKGKHYFTTMHYNQKGFKIAGNKITFTHFYPAKKAEKVDLTFEMQGKLTFENKKVKQVTIYQVHKTKEFYLSIIYEENTPEYFDNGIYQTIDLGLMNIVAAVNSHEGKTITVKNKRVEKYWQPKIEEIQSKRDHCKKYSNRWHRYNDKMWKMIRKQANQRKDFQHKVSKKIVENTKANTIIIGDLNVKAMSESKKNDKKNDKSRHRNMQSSGSIGRFAGFLTYKAEKAGKKVIRISERGTTKRCCYCMQKKNRKLSERTINCDCGLVINRDVSGTVNIMQRLLALLALSLKRLVVRQRLLKEFREKFFATHSQKSNESSSTLELGGLATKSN

SEQ ID NO: 25521 - protein, 282 aa, unknown
  TnpB Polypeptide
VKQKGNQLRFPKSFGGFTVTPRCVTLPNFEKLNQVRIVPRNQVFCVEIVYSIFVDDTIFRDNGRIMSIDLGLDNLATVVTNTGLQPMLINGKGLKSINQYYNKQNAHYQRIAKQMNGKNYTNRLHQLTRKRNFKIEDALHKISRFIVGVALENDITTIVIGNNKNWKQSISLSRRTNQSFVTIPHQKLIEQIVYKAQLQGIRVIRTEESYTSGTSFLDGESPVKEFYDKKRRIYRGLFRSNQGVFVNADVNAGYQIMKKVFPNVFADGIEGVVLHPVRVTIG

SEQ ID NO: 25522 - protein, 410 aa, unknown
  TnpB Polypeptide
VPLITLKAQIHADPQIEAVLKDAMFCATKVYNGLLWHLRKEYQETGKVNISRKNLNRILKELPRAKGYYSMSVQLTRDEVREAYKSFFALKKKGLVQHEAPGFRRKGQLSPLKYVQSGFKVEGDKVALSLGTGREDGIREVTFRISHRPDVKYERVRELSIIYDKVSGRIEARLVVEVKAGENNGTGRAAVDIGETVLMACAFDDGTVVLYSGRHIKAIRRYWQKVRSSLKQNSRRWKEMTHRERRQVEHLLHISTSHLIGECMRRGVKEIAIGDLNGIRESVDYGDRLNQRLHAWPYRKVINMLRYKGALVGIIVRDDISEERTSITCHACGRVMSSNRRHRGLYACSCGWRAQADVNGALNIYERAYKVSPVKGSSGRVARPAVVSYHLGWHGVAEPKHEGKPLCASA

SEQ ID NO: 25523 - protein, 290 aa, Sulfolobus sp.
MARRVKAIRDTVSMKIALSEPLLVLVNNYVKAIRFTLFWLKENVPNPDEKGVLGKVHEELYTRLREEYNLPSKVAEDCYRDALSVYKGWYNNPRRGRFPRVYRPTVWLTPKASYNVDFEAMTVRIASVGDLQILGYPRNLGEYANWRMKEARLVVRGDKAFLKMVFEKPLEKVEVKESVAVDINMSEIVVGKDDISYVRIPTRLNEVHHWKSLAESLQRKYPRRWRENKRILYRIRFFNQRARRISLGRLGSGLLKLLGILVPMLLSWRVSRILSRMLIDCQESLGINST

SEQ ID NO: 25524 - protein, 201 aa, Sulfolobus sp.
MSEIIVGKDDINYVRIPTRLDEVHHWKSLAENLQKKYPRRWRENKRILYRVRSFHQRARRIMEDFARKVGKWVVEIAEDFGANVIKLESLKNLVKNVDKLPKEFRDKLYLMQYRRIQYWIVWQARKHGILVQYVNPSYSSVSCPKCGKRMEEKGYRWFRCSCGYENDRDVIAVMNLNGRGSLALSSAHQMRDVNPNRWWER

SEQ ID NO: 25525 - protein, 439 aa, unknown
  TnpB Polypeptide
MKIIRSDKLNINTDAQQKRVLGDTLSLYRKYVRDLMVLINARWRFFQHAQGNDIVKMVEDLIHPTKQRPQVKHPHFHKNYYKFPSYLRRVAIMDAAGQVRSFHTRYDDWLDNGMRNMPPKLTVSTATFPSLYKGQCIKFSDDNKTAFIKVWVRKDWIWQAFRLSGKSRFLGKGKALSPLLTVKGKQWALSTPVKMDIPLKDKADYSGRVLAVDVGINTAATCAIVDKSGTVVHRRFIDRTDKDRTYHIMQRIRSKARKATRHGNKLDKGFCGSHHRQLRQLSHNQAHQISRQIVDMAVDFQCDAIVLENLKYWRPKAGRKGSVMKMRFHTWFKSALSDRIKSKAAEQGVRTLDIYARGTSSHAYDGSGEVKRDKGSYANAQFKTGKRYNADLNAAYNIAARGIVNLYYPSLHKQQWSRGKPNACPTTGNPLVLSSLWLL

SEQ ID NO: 25526 - protein, 362 aa, unknown
  TnpB Polypeptide
MQFNQWLKVSRFVYNTTIALLRDYEGDKKPSWMDIKKMFTRLLPDWTKDTPFQVKGMAIKDAHNAFWKTCKANKGSGKPTTFRFRSRKHPVKSCFIPKSAIGTNGIYPQISGKGLGYAESLPESCLDSRLVWKAGKFFLAAPSKHRVPSGDNQAHGVTQSIVAIDPGVRTFATFYSTESCGFLGGADFSRIQRMAHYLDNLMSRATKANKQKKKRMMLAGLRMRQKVQNLIDELHHKTALFLVKNFDCILLPTFETSQMVGRSGRKIRSKTVRNMLTFAHYRFKQFLKNKAFEHGKTVMDVCEAYTSKTHPETGEIKQVGGAKRIRLLSGEWVHRDIVGARNILLRALVDKPDCFTVAVSVA

SEQ ID NO: 25527 - protein, 267 aa, Escherichia sp.
MHQENTMLPRRISVSLFIDQSIIWPVKRLQAFKFQLRPGGQQEREMRRFAGACRFVFNRALALQNENHEAGNKYIPYGKMASWLVEWKNATETQWLKDSPSQPLQQSLKGLERAYKNFFQKRAAFPRFKKRGQNDAFRYPQGVKLDQENSRIFLPKLGWMRYRNSRQVTGVVKNVTVSQSCGKWYISIQTESEVSTPVHPSASMVGLDAGVAKLATLSDGTVFDCRPCEMHVIGKIKNHILKMPLPGSVVASVSPDELLKTLFKRKG

SEQ ID NO: 25528 - protein, 255 aa, Bacillus sp.
LPKLGLVTFAKSRELEGRILNATIRRNPSGKYFVSILAEVEVQELPKTNSTVGVDVGLKDFAILSTGEVFGNPKWFRILEKKLADEQRILSRRQEVALKRKCKLDEAKNYQKQKRKVARIHEKISHARTDYLQKISTYIIKNHDVVGIEDLQVSNMLKNHKLAKAISEVSWSQFRMMLEYKAKWYGKQVVAVSKTFASSQLCSSCGYQNKDAKNLNLREWDCPSCGTHHDRDINAGQNLRNEAIRLLTAGTVGLA

SEQ ID NO: 25529 - protein, 401 aa, unknown
  TnpB Polypeptide
MSNKATHRKTYNYKLEPTPEQEQAMETVLRHCRTLYNIALEQRKTWWQRGQGIGASYYQQQNELPDLKESFAAFKQVHSLVLQDVLRRLEKAFESFFRRVKHGEQPGYPRFQGKDRYHSFTYPQYGNGATLDGGLLSLSKLGRVKIRLHRPLEGTPKTVTLSKEADGWYACISCEGVPLQPLPKTGKVTGIDVGLKVFYVTAHNEVCENPRHFRKAEAALRRKQRKLARCEKGSKNREQVKAQAAKQHQKVKRQRCDFHHKEALHLIRQYDTIYLEDLQVANMVRNRHLAKSISDAGWAQFRSILEYKAAWAGKRVVAVPPHYTSQVCSRCGAYVQKSLSVRTHVCPECGLVLDRDHNGAINVLQAGLQQDEQAQAEQVGAPPSGGNVAGCRRRSPRSPVL

SEQ ID NO: 25530 - protein, 409 aa, unknown
  TnpB Polypeptide
MLRNKAFVVRLYPNAAQAERINRTLGCARFVYNHFLARRIESYRQDGKGMIYAATDKALTLLKREEGTAWLAEVDKFALQQSLRDLERAYQNFFRTAKKSGKKVGFPKFKKKRTGEAYRTQFTNNNIEIGEGKLKLPKLGWVKTRGQRDMQGKILNVTVRRIHEGHYEASVLCEVEIPYLPAAPKFAAGVDVGIKDFAIVTDGKGEFEHHANPKYYRSSLRRLRKAQKTLSRRKKGSARYGRAKTTLARIHKRVANKRQDFIHKLTTSLVREYEITCTEHLKPDNMRKNRRLALSVSDAGWGEFIRQLEYKATWYGRLVSKISPYFPSSQICHDCGFKNPAVKNLAVREWTCPNCGETHDRDENAALNIRREGLVAAGMSDTQNAHGDCIRPTSVGSGLRSENHATSVV

SEQ ID NO: 25531 - protein, 444 aa, unknown
  TnpB Polypeptide
MFVTHSFQIPYEKHLYDELRNMQREAASVWNDIVREANSYYFTTKRWLSKRGIQSVRKQTYNLHSQTVQAIADKYAANRETIRQLRITDKKAKYPWRRKYYYCIPLKKASMEVSEQTITVKKAEYEYPLVDLLTKKKKKNWNEKFPKRKHSISIPNLTMEDLTKCNYAEIIWRNGAYWFAYSVEVSEKDLSSYEFKVAGGDLGEIHAVSVATEDKSLLVSGRSIRSISQYRAKTLAELSKLMSRCKKGSRQWRKYKQARNRMRQKSKNQLEELEHKTTKEVISFLEEEKVTHFVIGDVSGIEKNTKKDKIKKRKNNKVRRQQLSLWNQGKMKEKLIYKAKLKGIEVEETEESYTSQDCPFCGGRHQTNGRNFICSVHKTEVHRDVNGAQNIARKLYPMKVKPMESVVYKQPVWYKIHLSDERRQETKHPKDKSKKVKSIAERTA

SEQ ID NO: 25532 - protein, 352 aa, Vulcanisaeta sp.
VPSLGEFFRGERGPTTPAIPGEGVYPVEFTNRRTIIVRLLPNGAQERRLRRLADATAKLWNELNFERRQFFSGKGVDFRGTWSKYYEKYKRMLGVNAQAVMQKNNEDWNSFFSLLRLKKEGKLPPHMRRVSPPGYWKDRDTGRRKLIIVVRQDRYEVDEQRRIIILKDFGMEVRFVGRLRWFGKQGRLEIIYDEGKNAWYAHIPVEVGVEETRTGKRSKHIVRGERRVIQIESPKGNKVASIDLGINNLASVVVSDGTWLLYKGVRAKEDFFYLQRLISRIQSLRDTLKDKLLDDAIDELNHEVRRLFGKLMRRLLHLYRNFAKHLIETASRAGSLNHLPRLSLQYCPGKGQ

SEQ ID NO: 25533 - protein, 261 aa, Vulcanisaeta sp.
MLGVNAQAVMQKNNEDWNSFFSLLRLKKEGKLPPHMRRVSPPGYWKDRDTGRRKLIIVVRQDRYEVDEQRRIIILKDFGMEVRFVGRLRWFGKQGRLEIIYDEGKNAWYAHIPVEVGVEETRTGKRSKHIVRGERRVIQIESPKGNKVASIDLGINNLASVVVSDGTWLLYKGVRAKEDFFYLQRLISRIQSLRDTLKDKLLDDAIDELNHEVRRLFGKLMRRLLHLYRNFAKHLIETASRAGSLNHLPRLSLQYCPGKGQ

SEQ ID NO: 25534 - protein, 482 aa, unknown
  TnpB Polypeptide
VVKSMIAIQAKLIFLNQEDKQIVLDLMRRWSSCMRFAYKRLLEGYDRKTLKRDLPRTFNLNSRYVDDAIMKARGILESSRQLDNNPKKVIFGGRDLFKKLQKRHINGKEYQKLKTKWQEKRKGNLYSRGDKSKKGNLNTRIEIKENGTFLRINVGERKYVYARIEAGYKKNKSREELLQEITESNIPYSVELKLKNGSIYAYFAIEEEYPEIKITKEKGAIGIDINAYPDNISWAETNEKGNLISYGNMSMPELASGNKDKREYFRWQYAHEIVKIAKEKGKAIVIEELEIKDKGKRGDFSGRKSRRIRHNFSYKSLLSKIKTLARRERIEVTEVNPSYTSIIGMLKYAPQYMITKDIAAAYVIARRGLGLQEKIPDNYIKFLNALTVDELEELKEHVKKTVRNKHINKKHLKEIDKAIKFLQSLESKPGRVLRPLDGTSFSTYDFWRVLKAAVVTPLSPEKVPRDFSALRELLIQGKWGDP

SEQ ID NO: 25535 - protein, 160 aa, Sutterellaceae sp.
LKSLSIRKTVSTLSNTQRLPIDCPDGKKNPFLKKCHSQVLQQSLKDLELAYINFFEKRSNFPKYKKKFQHDSIRFPQGVELDEVKQQIRLPKIGWMGYRKSRDIIGTIKNVTVSRRGEKWDVSIQTEYEVVSSAPNPSEIGIDMGVNVLRLCQTGTSLNL

SEQ ID NO: 25536 - protein, 386 aa, unknown
  TnpB Polypeptide
MQTITKTCKVKLNISEDRKQDIFETFKQYNYALNFAITQAWKPERKIINKAILHKETYYPLRETTKLPANFICSARNKACDVIRLNIIKWHNHKRASKPTFKSFSAIQLDARTLTIKNRSCTFSTINGRIKADYYLGDYQKQILDDVNYEFRTATLTYKNNSFFLNITITKPALIKKPDAVMGVDCGIKNIAVTSSGKFFKSGFLNDRRRQFRDKKAKLQSKGTRSAKKVLQRFSGRENRFANWVLHNVSRKIVNEAIISNAQVIAFEKLTDIRERANYWRKKERAKVNLWAFSKLQQYVQYKALEVGIDTFFVKPQYTSQRCSKCGHIKPSNRNGFSFVCKHCNYSLHADLNASKNISIKALEGKNPSWVEPPSKLALKTKFISV

SEQ ID NO: 25537 - protein, 412 aa, unknown
  TnpB Polypeptide
MPVIVKDWMLVKGVVFRLESGLPSEAKFLLEDFRLAVNNAIRAGLQAHITSRNAMVEIAYRDFRQEHPRMYSQHLVSAFEVAGSVLKNHRKRVRKGVTCRIPYVKRLMMKAENQAYKLDRESGTIDLPIRAGCHVELRLVVSQYHRKYLDDMALSLGSLTVLPDRVVVAFRKDAPKLFVPESALSLDTNERSLDGVFVEGGVAKAVKADFPEVAIIQQRHHDRRKRLQKKKAHDRRTSRNLCRTEGAREHHRIDSRLHQVADSVLKFAEERRSAIVLEDLKGFKSKRSKELNRRLSLWPRRKLHQIIEYKAQWKGIPVVKVDPRNSSRTCPTCGRIQDSRMGTEFKCECGWHLDRHINASMNLLQTAISKGMAGGLRFNPGAFQHDVMMTLYEPAMAARSEPNGTSGIVGMT

SEQ ID NO: 25538 - protein, 499 aa, unknown
  TnpB Polypeptide
MITTVQFRLYPSPAQEKALNAICTIYNKVRRIGYKLLFHNANHIQQQLMALCHNNAYVNTILSANETRLKQQDSWQEKSRTYLESKIEVIQDKIAEVKAKSERDKRLSGLYSRLSSLTNRLANLKLKPVVFGTKQMFRKRLLRKISREEFKIRRDASFSCSGKAQYHQKNQNLKILPNNHIKIRTFRNERGKKWLIIPFSVNVSQAHWLEEVKNVDKYTATVKKKLIRDEFRYYLLVSYESPETRMKINFNNGCIGIDANYNFATLANVDRNGHLRSYQKVTYGNLHTYRTNKRNDYTSYKADKILNVCINKRKPIVIEDLAFEQFFSYNKNLNRKMSNFKKNLLDILERKCIKKGVPVIKVPSYYTSIIGQLKYARSYNLSIHYLASYVIARRGLGFEEDIPADYEWLLSQVGDRIKPRLKKGSTYYNWARIHDFFQYSGITSFRPSEIVRKVLLVKNGLNSVTKAQPDNLRAGLSRKGKIESFYKFWNYINNNGIYK

SEQ ID NO: 25539 - protein, 392 aa, Peptostreptococcus sp.
MIKSIKVRLNLNNKQRTKLFQYAGCARFAYNWAIAREQDNYNQGNKFLSDSELRKEFTQLKKLQEYKWLNEVSNNVTKQAIKDACNTYKRFFKGQCKYPKFKSKKHSTPSFYQDNIKIQFTDTHVKVEKFSMSKKQNKQKLNWIKLCEKGRIPTDCKYVNPRFTYDGLYWYVSVGIEVEDATTIPLNDGIGIDLGIKDLAVCSDKNTYKNINKTQRVKKLEKRKRRLQRCISRRYEKNKKGVSYCKTSNIIKREKELLKVAKRLTNIRQNHIHQATSEIVKRKPSFICMEDLNVSGMMKNKYLSKAVWQQGLYEFRRQIKYKSELNNIPVIIADRLFPSSKLCSCCGNIKKDLKLSDRIYKCQCGNIIDRDFQASLNLKIYGENVLKQQSVS

SEQ ID NO: 25540 - protein, 189 aa, Granulicella sp.
MGIVNLATTSDGDHAVGGKMIGLRCRHRRLRKRLQKKGTKSATRLLKKRSQKESRFAADLNHQISKKLVTEAQRTDRGIALEDLKGIRDRVRLRKPQRVNLHSWAFAQLGGFIEYKARRAGVPLLYVDPAYTSQTCNACGNVDKKSRIDQATYHCRACGVVAHADVNAARNIALRGESGWAVVNQPYAA

SEQ ID NO: 25541 - protein, 178 aa, Okeania sp.
LQYLNRHKVKFSSNWKKAQLQIAQLHSKIANIRKDDINKLTTYLAKNHGQIVIEDLNVSGMMSNHKLALAVADMGFYEFRRQLEYKCELYGSKLIIVDRWFPSSKTCSRCGTVKESLSLSERVFRCEHCGFNCDRDLNAALNLAMAGSLLRNASAFRVSVAKQTSVSVCGLDNADVAR

SEQ ID NO: 25542 - protein, 209 aa, Paenibacillus sp.
MSETWSWLRLCHSVPHRMMRKVGIDVGLKDFAILSSGEVYGNPKFFRRLEEKLARAQRKLSRMMNGSSNWNKQRIKVARIHETISNARKDYLDKVSTQIVKNHDIIAIEDLQVANMVKHHKLAKSISEVSWSMFRSMLEYKAKWYGRIVVAVGKAFASSQICSCCGYKNKDVKDLKLRVWDCPDCRTHHDRDFNASLNILTEGKRLLTV

SEQ ID NO: 25543 - protein, 382 aa, Lactobacillus sp.
MSREYQRLANIVSQWIFDHEFPLSWLQINYRLYKILRQGSPLNSQMVQSVFRTVVARYKTVQEQMKQHPYRYKNENNKWIRVPRDLTWLMKPIQFCRPQADLVRQRNYSFVNEMTQVSITTLSKRTKLAFTDKGFEEYFRGNWKLGTARLVHNRGKWFLHIGITKEVSDFDQQDNPKIVGIDRGLRFLATSYDYLGKTLFFDGQKALRKRKKFLQVRRQLQSKGSKSAKKKLKQLAQRENRWMTDVNHRIAKTLVAVYGSHTLFVLEDLTNVTFNTDDLPKSLRSSHRSWSFFQLEAFLTYKAQAIQSTVVKVNPAFTSQRCPKCGLVEKTNRHHETHEYWCRRCQYRCNDDRLGAMNIGMLGQEWLSGVKRPKIKKLTAIG

SEQ ID NO: 25544 - protein, 410 aa, Lactobacillus sp.
  misc_feature (197)..(217): Xaa can be any naturally occurring amino acid
  misc_feature (352)..(373): Xaa can be any naturally occurring amino acid
VQLPYHYGVKVRVFPSTEQKRLIKRNSDASRFIYNQMNGMNNDLFWLRQVKIPIAIVLDRIADLTERLKKPSTAISNMHGWLNHPDFDSLMKANAIKNYKTAWKLFRQVHQAGTPKFHKRGYTQTYQTSCLYGAKVTEPTMSNGSARLNDSHHLQLPKLGCLRFKGLPSKILDRTNDVRIGTTTVSMDAVGHYFVSXXXXXXXXXXXXXXXXXXXXXQRLLLAKLQLKVANQRKNFLHHVSTALIKNHDLVVAEELRGKNMLRNHALAMSISDVGWRTLLSMLAYKADLYGRKFLTIDPRNTTQTCSDCGHVMAGKNKLTLADRKWTCPNCGIFHVRDHNAAKNILAKGLAXXXXXXXXXXXXXXXXXXXXXXRRLALYLSKLWSPCLEVWFSQASVFKRAWLTETNRYP

SEQ ID NO: 25545 - protein, 382 aa, unknown
  TnpB Polypeptide
MRFAFKYRIYPTRPQTEFLNCELRDAASLYNAALEERIGAWKVCRKSINYYDQANQLKAMRADGCLTLANFSCCQDVLRRVDKTFKAFFARVKRGDTPGFPRFRSFRRYDSITFPSYGDGCRLLDTGKLRIQGAGHIKVKLHRPVEGTIKTVTVKREAGRWFVCFSVECEAKPLPRSAAEIGIDVGLNSFAVLSDGTEIENPRCGRNAEARLRCCQRKVARRANKKSNRRRKAVRLLQRAHSHVGNQRADFAHKESRKIANRYGVIAVEDLNVKGLAGGMLAKSVHDAGWSMFLNFLAYKAEDAGREMVRVDPRGTTQMCLCGARVPKTLADRWHACPACGLSAGRDHVSAQVILQRAGNRPSGANVEVVVSCVSREAVCFS

SEQ ID NO: 25546 - protein, 382 aa, unknown; identical to SEQ ID NO: 25545
  TnpB Polypeptide

SEQ ID NO: 25547 - protein, 526 aa, unknown
  TnpB Polypeptide
VKKSKTTTFLLELPLVVDPAQARQVRAHLEAARCLYNALLGEARTRLRQMRADPAWQAARALPRTQPDGRRTAFSRLRKDYGFSEYALHAFAKEANCTWIADHIDAVTAQTLASRAYQAVNRVCLGKASNVRFKSRGRGLHSVEGKRNDTGIRFVLQRPEAGNAGHLVWGKQRIPALIDWQDPLVQYGLSHKIKYVRLVRRAASSAQAKGADAFGKRYFVQLILEGAPYQKPKHQPGSDVVGLDIGPSTLAIAARWGAARLVTLCEELQPNVRKKRLLQRKMQRQRRATNPQNYDGRGRVKKQGKRRLQWHHSQGYLATRRQHAAQERILAAQRKSLHGKLAHQIVCVGKEIHIEKTSYKGWQKRYGKSVGLHAPGMLVEHLKRTVAKTGGTLTEVATFKTKLSQYCHGCTTYQKKPLGQRWHVCACGVGPVQRDLYSACLLAYLNPGETTPSIAHDEWEGAELRLRAAMESLQQRANAGESFPQSMGIPRAGARRLKSLGSPQQELVPFIGRQEALGEEQEPLRL

SEQ ID NO: 25548 - protein, 175 aa, unknown
  TnpB Polypeptide
VGLEELEKQGMFTRSRVWNRRISRSDWRGIAKILEGRLWEVKVVELDPYGSSSYCSRCGWENRDLNGADVFVCGGCGLRINRQLNAAINLYMRMRFGYTEKWVGGRKRVELRVEGAPQKAWWDRVVLPSLVGGCVLTGAELKGISEPVRSLYDAVRPKLYYAYDRHADAYLRIPT

SEQ ID NO: 25549 - protein, 359 aa, Frankia sp.
MSRYRLDPAAEQVAGMEEHCGHARFVWNLAVEQQSWWTPGRGNPPNHAERCRQLTEARAEFEWLRAGSQTVQQQALRDFDQAMRNFFNGSHRRPTFRKRGRPEGFQIVGKNARVETLNRKWSRCWIPKVGWVRFRVSRTIPDFRSYRVTRDRAGRWHVAFAVAPDPVPAPGTGEVGEVVGVDRGVAVSAALSTGELLSCPTLRPKEAERLRRLQRRLAKATRGSNRRGRLKTRIARVKAREADRRKDWVERTSTDLARRFDVIRVEDLRITNMTRSARGTAEQPGRNVRQKAGLNRGILANGWGLLARRLEQKAPAGWRRSRPPIPVSVARPAGMWRPGTARAKRCSGASPAGIRPTRT

SEQ ID NO: 25550 - protein, 390 aa, Moraxella sp.
MTTIRGHIIELTPNNTQATHLKKACGVARFSYNWALSEWKKQYEQDKQYRDDCLAKGITIDENRLNKPSQGKLRKQLNSIKREQFPFMLEVTKCSPQLAIMQLGDAFKRFFKGESKYPQFRKKGVNDRFSLSNDQLKLKLKKDKPFIQIPNLGLVRMRENLRFDGKILSAKVFTKGSKWFVSIAVELDDTQKPLPKTGKSVGLDLGITDLATLSDGTKIKALKPLKNKLKKLQRLSKSLSRKQKGSSNREKAKTKLSRLHLKIFNIRKDFLHKLTTDLVKRFDVICIENLNIKGMVKNRKLARSIHDLGFYEFKRQLIYKANQWGKTVKELDRFYPSSKTCSNCGFIMAKENLTLAVRHWICPSCHANHDRDINASINILNQADKVLTLS

SEQ ID NO: 25551 - protein, 390 aa, Moraxella sp.
MSKLITMTTIRGHIIALDPNNTQATYFKKACGVARFSYNWALSEWKKQYEKDKQYRDDCLAKGIQIDETKLHKPSQGKLRKQLNSIKRQQFPFMLEVTKCSPQLAIMQLGDAFKRFFKGESKYPQYRKKGVNDRFSLSNDQFRIDGKRIKIPNLGWVKMRENLRFDGKILSAKVFTKGGKWFVSVAVELDKIQKPLPKTGKSVGLDLGITDLATLSDSTKIQAPKPLKNKLKKLQRLSKQLSRKQKGSNNREKAKTKPSRLHLNIRNIRADFLHKLTTDLVKRFDVICLENLNVKGMVQNRKLSRAISDLGFYEFKRQLIYKANQWGKTVKEVDRFYPSSKTCHCCNHKVDELPLNIRNWICPNCNVSHDRDINASVNILNHATKVLTMT

SEQ ID NO: 25552 - protein, 393 aa, Phorcysia sp.
MLYVYRFRLYPTKEQVEFLNRQIGHCRFVYNKLLEITKENYEREGKSWNYYEYKKLLPKLKEKFPFLKEANSQSLQEAIKWLDRAFKNFFKGLAKFPKFKSKKRINSVSIPQHFRIEGNKIKIPKLKTPIKFKKHREIEGRVKSISITKLPSGKFYLNILVDREIKPLPQTDKVVAIDLGITHFCTLSTGEKIENPKYLLKTEKRLKKLQRKLSRKVKGSNKYRKLQKRIAKLNEKIVNQRNDFLHKLSKRIIGDNQAVIVEGLKVKGLLQNSKLSKHIANASWRRFISYLEYKAKFYGRKLVKINPFYPSSKLCSVCGYKNENLKLSDRKWKCPNCGTQHNRDYNASLNLLKEGLKLIKGSLTIRAVGLERPELTPVESAVALVEAGSSSSQ

SEQ ID NO: 25553 - protein, 402 aa, Escherichia sp.
VKRLQAFKFQLRPGGQQECEMRRFAGACRFVFNRALARQNENHEAGNKYIPYGKMASWLVEWKNATETQWLKDSPSQPLQQSLKDLERAYKNFFQNRAAFPRFKKRGQNDVFRYPQGVKLDQENSRIFLPKLGWMRYRNSRQVTGVVKNVTVSQSCGKWYISIQTESEVSTPVHPSASMVGLDAGVAKLATLSDGTVFEPVNSFQKNQKKLARLQRQLSRKVKFSNNWQKQKRKIQRLHSCIANIRRDYLHKVTTTVSKNHAMIVIEDLKVSNMSKSAAGTVSQPGRNVRAKSGLNRSILDQGWYEMRRQLEYKQLWRGGQVLAVPPAYTSQRCACCGHTAKENRLSQSKFRCQVCGYTANADVNGARNILAAGHAVLACGEMVQSGRPLKQEPTEMIQATA

SEQ ID NO: 25554 - protein, 403 aa, Streptomyces sp.
MRDVKATHVKRAFKYRFYPTDAQAAELSRTFGCVRKVYNLALAARTEAWVLRQERVNYNATSAMLTAWKKTEELAYLHEVSAVPLQQALRHLQTAFTNFFAKRTKYPRFKSRKKSRKSAEYTTSAFRFRDGKLTLAKMTEPLAIVWSRPLPEGATPSTATVSQDAAGRWFVSLLCEDPGVTPLAATDAAVGVDAGLDHLLTLSTGEKITNPRYERRDRARLAKAQRELARKAKGDGANRAKARRKVARIHARIADRRRDTLHKITTRLVRENQTIVIEDLIIRNLLKNGRLARAISDAAWSEFRSMLEYKAQWYGREVIVVDRWFPSTKLCSNCGTLQNAMPLSVRTWTCDSCGVTHDRDVNAARNNLAAGLAVSACGAGVRPQRSSPGGQSAMKQEPLQREP

SEQ ID NO: 25555 - protein, 323 aa, Streptomyces sp.
LLRAYKFLLRPTVRQTVALGEMLRDHCSLYNGALQERRDAYRHVSRTSIKYGDQSAQLKEIRAFDPERQGRWSFSSQQATLRRLDKAFQAFFRRVKAGQTPGYPRFKGVGHFDTVTFPKDGDGCRWDSTPHDPQTRVRLQGIGHVRVHQHRPVRGRVKTISVKREGNRWYAVLSCDDVPAEPLPATGAVVGIDMGITHFLTTSDGAHVAGPRFLDQAADELAEAQRHLATFPKRTRRRTKAHRAAARRVAKLYARIRRRRLDHAHKTALTLVRDHDVIAHEKLNTAGMTRAPKPRPDPDAPGTFLPNGAAAKAGLNRSILDAG

SEQ ID NO: 25556 - protein, 383 aa, Streptomyces sp.
MKLRYNERIYPTPSQQRDLARFFGCARVVYNDGLRARREAYRNSEPYISDVTLQKMVITAGKKTPEREWLREAPSVCLVQSLQDLHTAYRNFFASKRGVRQGPKIAPPKMKKKSGRQSIRFTRNGFKLRDNGRLFIAKLGDVAVRWSRPLPSDPSSVTVIKDPAGRYFASFVVETDDKPLPDLDWDETETGIDLGLSSYAVLRGRKISSPKFFRRQEKKLRRAQRKLSRAQKGSNNRRKAKLAVARVHAKIADRRRDFIERETTRIVRESQAVYLEDLDVKGMGSKKGKRGKSVHDQSFGMFVRTLEAKCGRYGRGFAKVDRWFSSTQMCSACGSVEGPKGLEGLSVRQWTCSCGARQDRDENAEANIRAEGRRIFAAGQAGK

SEQ ID NO: 25557 - protein, 196 aa, Streptomonospora sp.
VPSSVTVVKDSAERYFASFVVETEPEALPETGSVVGIDLGLGHFAVLSDGTKIDSPPRFLRRAEKKLKREQRNLSRKQKGSRNRDKARLQLARAHAKAADARRDFHHRLSTRLFRENQAVAVETLAVKGLARTRLAASVHEAGWSAFVAMLEYKAAKFGRTFLRIGRFEPTSQVCSVATAAGLAVSAWAPARGRTK

SEQ ID NO: 25558 - protein, 406 aa, Streptomonospora sp.
MQLRYRFRLYPNGPQRQALAQAFGCARVVYNDALRARETARTGGDAFPTTGDLSKKLITRAKATPERAWLGDVSAVVLQQALRDLDAAYRTFFDGLTGKRPRMGAPRFKSRKDRRQTVRFTANARWRITTGGDLSLPKIGNVRVTWSRALPSVPSSVTVVKDAAGRYFASFVVETGRDETLPETTGEVGIDLGLGHFAVLSDGTKVDSPRFLRRAEKKLKREQRRLSRTQKGSANRDKARVKVARAHARVADARRDFHHRLSTRLIRENQAVAVETLAVNGLARTRLAKSVHDAGWSAFVRMLEYKAARYGRRLVRIGRFEPTSRVCSVCGVKDGPKPLHVRVWTCGDCGAVLDRDVNAAVNVATAAGLAASARGAQVRPEPVRAQRDEAGTRRSGRPAAVGIPGS

SEQ ID NO: 25559 - protein, 459 aa, Streptomonospora sp.
VSTHHQAYLFALEPTAEQEQALASHCGAARFAFNWGLARVKANLGQREAERSYGVSEAELTPSLNWSAYGLRKQWNAAKHAVAPWWGENSKEAYACGVADLAAALKNWNASRTGTRAGRKVAFPRFKSKRSRKSFRITTGAFGLDGTDNRHVKLPRIGAVRTHESTRKLARHLYRGSARILAATVSFQRGRWHVSFTVEKTAPAPVPATDGGTVGVDLGIKHLAVLSTGATVDNPKHLDKTQRRLRRAQRRASRRRGPDRRTGQQPSNRWRKARAAADRLHTKAAAARRDGLHRLTTRLVDEFDTIVIEDLNVSGMVANRRLARAVSDTGMGEVRRQLTYKAAWYGRRLVVADRWFPSSKTCNDCGAVKAKLRLSERTFACEACGVVADRDANAARNLAGLAEAASSPSCGARMNEPAGNPRKTGRAGYGYRHGKAPPEGAGPTPRREATAQGTFLHVS

SEQ ID NO: 25560 - protein, 351 aa, Streptomonospora sp.
VSSAPLQQVLRHQHTAFANFFAGRAAYPRFKSRNGKQPAHDTRSAFRMRDGRLFLAKQQAPLAFVRSFDETDPAALDPTAVVVSREPDGRWYVAFAVEAEDPQPAPEAGSEVGIDLGVTDLATLSTGERIANPRHLERKARNLKRYRRRMARTTPGSANRNTAKKKAAAAHRKVRHARTDSLHRTTTRLVREHDVIAIEDLNVRGMTASAAGTVEAPGKRVRQKAGLNRSVLDAGLGEFRRQLEYKARHYGRTLIVVDRWYPGSKTCSHCGHVLDTLSLGTRRWTCPACRTRHDRDLNAAKNIRAAGRVAARERPPGEAWAPLGPRCANMRSLRSSHSRGGEYAGLAELAQ

SEQ ID NO: 25561 - protein, 373 aa, Obesumbacterium sp.
MKRAYKYRFYPSPEQAELLAHTFGCVRFVYNSILRWRTDAYYERKEKIGYLQANARLTALKKEPEHVWLNDVSCVPLQQSLRHQQAAFSNFFAGRAKYPTFKSKRHKQTAEFTASAFKYRDGNLYMAKSKAHLDVRWSRQLPSAPSTVTISKDAAGRYFVSCLCEFEPVSLPITAKMVGIDVGLKDLFVTDTGFKTGNPRHTAKYAKRLALQQRRLSRKKKGSKNRAKARSKVARLHAKIADCRMDNLHKLSRKLINENQVVCVESLKVKNMIRNPKLSKAIADASWGEFTRQLAYKGEWAGRSVVAIDQFFPSSKRCSSCGYTMPKMALNVRSWICPECGANHDRDVNAAKNIKAVGLTALAHGATVNPKAA

SEQ ID NO: 25562 - protein, 427 aa, Escherichia sp.
MHQENTMPSTPDICFFFTDQSIIWPVKRLQAFKFQLRPGGQQEREMRRFAGACRFVFNRALARQNENHEAGNKYIPYGKMASWLVEWKNATETQWLKDSPSQPLQQSLKGLERAYKNFFQKRAAFPRFKKRGQNDAFRYPQGVKLDQENSRIFLPKLGWMRYRNSRQVTGVVKNVTVSQSCGKWYISIQTESEVSTPVHPSASMVGLDAGVAKLATLSDGTVFEPVNSFQKNQKTPARLQRQLSRKVKFSNNWQKQKRKIQRLHSCIANIRRDYLHKVTTTVSKNHAMIVIEDLKVSNMSKSAAGTVSQPGRNVRAKSGLNRSILDQGWYEMRRQLEYKQLWRGGQVLAVPPAYTSQRCAYCGHTAKENRLSQSKFRCQVCGYTANADVNGARNILAAGHAVLACGEMVQSGRSLKQEPTEMIQATA

SEQ ID NO: 25563 - protein, 339 aa, Moorea sp.
MAKRLLLSGFTICESQSQSCISKLFCSRSVAYGQGRAKYPRFKSYHHRQSIQYPQKVKQVGDCLKFPGKLGVVKAVIHRPLDGEIKTVTVSKTPSGKYYASVLMEYELGDAKPSTDGKVIGIDLGIKDFAITYDGEKTSKFSNPKHLAKYEKKLAKKQRIAARKKKGSNRRIKARKILAKVYEQIGNVRQDYLHKLSRKIVDNNQVVVVENLNVKGMVRNHKLAKAISDLGWGTFVNFLSYKCEKEGKVLVEINRWFPSSKTCSNCHYRIKELPLDVRTWVCPSCGTHHDRDGNAAKNIRAEGIRVLSSSGTGEVNASGEEVRPRRGRPSKLRHSSVFA

SEQ ID NO: 25564 - protein, 311 aa, unknown
  TnpB Polypeptide
MRVYIHITIEGISKPKYNKDGIRRHQYGKGFIGCDIGPQSVAYTSKEEVGLKNLAERGASIKTREQKEARILRKMDRSRRAMNPENYNEDGTIRKGKKAWKKSNRYKKLYSQYRNICRIAAENRHMAINEEVNHMRALGNVFITEPKNAKKLQKCSKKTERQDKPSVVQKSDGTEQLVYKYKRKKRHGKSIKNRCPGYFQAQAKAKFEITGGVYIEVPVTYRASQYDHTCNKYIKKALSQRMYELANGTRVQRDWYSSFLMYCIGTDLQNISRYKCKRYFDELYAKYLELEQYIINNKITVMNSGIKFKAA

SEQ ID NO: 25565 - protein, 399 aa, unknown
  TnpB Polypeptide
MLKSYKYKLKPTNEQIVLLNKHFGSIRFIYNYFLNERKHEYETNKNSINYYDNAKSLTELKKQDNYSWLKEINSQSLQDSLKNLETAYKNFFRFKKGFPKFKSKHDKNSFTIPQFVKLNKNELSIPKFKDPIKVIIDRKFNGLIKQCTISKTPTNEYFVSILVETEHNKLPKTNKSVGIDLGIKEFVITSDGYKYKNNRYTKTYAKKLKEHQQHLSRKIKGSNRYNKQKLKVATIHKKITNSRIDNLHKISTDLIKKYDLIVLEDLNIKGMVKNHKLSKHILDVSWGKFVTMLRYKSEWNDKKIVNIDRFFPSSKTCNCCGYINQNLKLNIREWVCPSCNTKLDRYLNASINILKEGNKILSSGTDDYRRGDEIRPTSVGTIGETSKILNNIVKKPIGL

SEQ ID NO: 25566 - protein, 402 aa, Escherichia sp.
VKRLQAFKFQLRPAGQQEREMRRFAGACRFVFNRALARQNENHEAGNKYIPYGKMASWLVEWKNATETQWLKDAPSQPLQQSLKDLERAYKNFFQKRAAFPRFKKRGQNDAFRYPQGVKLDQENSRIFLPKLGWMRYRNSRQVTGVVKNVTVSQSCGKWYISIQTENEVSTPVHPSALMVGLDAGVAKLATLSDGTVFGPVNSFQKNQKTLARLQRQLSRKVKFSNNWQKQKRKIQRLHSCIANIRRDYLHKVTTTVSKNHAMIVIEDLKVSNMSKSAAGTVSQPGRNVREKSGLNRSILDQGWYEMRRQLEYKQLWRGGQVLAVPPAYTSQRCACCGHTAKENRLSQSKFRCQACGYTANADVNGARNILAAGHAVLACGEMVQSGRPLKQEPTEMIQATA

SEQ ID NO: 25567 - protein, 448 aa, Ligilactobacillus sp.
MEMQVTIKTKLKISNSEIAWSFSKTMEQYRQACNYVSEYIFNNDFDMKQSRLNKELYTKLRNLFSLKSQMAQSVIRTVIARYKTVKTQMARRPYKYQDQNTGEWYREVRDLTWLHKPISFNRPQVDLQRNRDWSYLSSGQLSINTLDGRVKVDPICRGFNQYLDGTWKFGLAKLLKSSGKWYLHISATNDGRVKVDPICHGFNQYFDGTWKFGLAKLLKSSGKWYLHISATKEVTDFDKQTVKHVVGLDRGLRFLATSYDEQGKTVFFDGQAIMRKRAKYQKLRATLQAKGTKSAKRRLKKLSGRENRWISDVNHCLSKTLVQKYGANTLFVLENLNGVSFERTDLPKALRNQNKSWAFYQLEQFLTYKAHLNNSEVVEVSAKYTSQRCPKCGVIKKDNRNHEKHEYHCDNCDYRSNDDRIGAMNIQLLGTQYISGQEQPKFELTTNA

SEQ ID NO: 25568 - protein, 311 aa, Nonomuraea sp.
VIKKVCDACRTLHADLAAGNLGKPGSPRRLKAEAKPVSFRPLAAQPYDDRCLSWQHDARTVSIWTTGGRLKGVAFTGSDQQLALLAAHRRGESDLVCRDGMWFLHATIEVPDVPAAAPKGFLGVDLGIANIATTSDGVRRSGEGLNAVRHRHRALRRRLQVKATKSAKRLLKRRRRKEARFAADTNHVIAKQIVTEAERTGRGIALEDLQGIRERVRLRKPQRVTLHGWSFRQLGGFIDYKAARAGVAVIHVDPSYTSQQCSQCGHVDRRNRPGQATFSCTSCGFAEHADVNAARNIASRGETGWAVSHAA

SEQ ID NO: 25569 - protein, 408 aa, Streptomyces sp.
MQLRYAFRLYPNTGQRTALARAFGCARVVYNDAVRAREDARRAGEVFPTAGGVLSRKLITQARQTPERSWLGEVSAVVLQRSLRDAESAYRNFFASLKGERRGSKSGAPRFKSRKDTRQSIRFTANARWSVTGSGRLNLPKVGAVKVKWSRSLPAQPSSVTVVEDAGGRYFASFVIDTDPDTDAHRMPDSDHTVGIDLGLTHFAVLSDGTKIDSPRFLRRAEKKLKKAQRELSRKQKGSNNREKARLKVARAHAQVADARREFHHRLSTQLISENQGIGVEDLAVRALARTGLAKSVHDAGWAQFVAMLEYKAVRYGRTLVKIGRFEPTSQVCSGCGAKDGPKPLYIREWTCAACGAVHDRDHNAANNVKTAAGLAVAACGAPVRPGLVLAQRDEAGSHGFPSEPRAA

SEQ ID NO: 25570 - protein, 697 aa, unknown
  TnpB Polypeptide
VGCSLLSPLVDYAGSGPVKRNNASTMRCRMAKNNDLIIATAPCIARAGVTQDGEPLPAQELAQRVGWLADLTTRVAELIVKERWNPLDLTQLASNLDHEGNPLPSKAYVALQRLGWNSKLDSDSDLYIPDRVNRAALEHAGRLLKNAVHRAAVTQAILDSWPAKPFKRTPAEWDALHEAEKTLGVELQRAEVTNRTRAVNTFLEQHGRLPTHITELEASPRVAREVLLAAADKQLVVVTRPTPGEALLNVKLPLVANPSKRADWERVWIPLTVGAHVPINADIRTPTLRVKTLARGKLEVRVDLPWSIPKPDLLAQTGKNMPGHHRAIGADWGVNTLWTATTAWVEDPHAKQCVVRTDGRPYSYGGEGIALKIHRLRLETEALTERIQHLERLRDGCDSVPPLDVIAKISMLVEARTSVSQRRTQLGKALAWSAATWLVDLAVHTGATAIFVEDLRTMEARGCGKKQNVRCSNQVRGVALKALYHQAAKHGLMVVTVPARDTSRLCPRCLTPVRHVVASDSWVSGHAWTRCRGCGYSADRDHAAAERIVSRGLAAQHHIRYNRKQGSHRILRSVNVVVRVTRTRRRSTRASVVQSPARRYASRPQSPQLGKSGGLRSTLATPATSSNPRGLVQRPAGPSPSLVAPSATGQVGVTLPKVRVRLAVLRRGQARGFHPLSYPTHVPRARVSWATPLSPLT

SEQ ID NO: 25571 - protein, 379 aa, unknown
  TnpB Polypeptide
LYPTRAQEKQLKNTIGCARYAYNWALQKWQEMYAAHDKDKASPKPSVLKLTKLWTQEKPDWAHETAYCSQQRAIHNVGVAYQRLWRGLSAKPKFHKKGGKETFYVDNAKAFWHGNRIQLPDIGRVRVAEQIRFEGKVMGYTVSHYAGQWHLIAQVNAEGDVKPQCANPESVVGIDVGLLNPAVASDGTILQLPVEKLQKLDAKLRRQQKALSRSQRNSRNHAKLLIKKQRTQNKINNIRKDAVHKFTTAIAKSHGTAVIEDLDIKEMKDKAPARSVRRAYNSSLMGAIRWQLSYKVQHLIKVNRFFPSSKTCSNCGHIKSDLTVGERTYRCDHCGAVIDRDLNAAINLMKSGLVKPDASVEQVGTDLRRSRKYKRTQCP

SEQ ID NO: 25572 - protein, 379 aa, unknown
  TnpB Polypeptide
VKYLKTVLRAYKYRIYPNKTQAELINRIIGCCRFVYNYYLAKKIDLYKNEQKSMNYTACANDLKNLKKEYEWLKEADSISLQQSLRDLDTAYQNFFRRIKNGEKEVGFPKFKSKKNPKQSYRTQNVNDNIQIIGNKIELPKLGLVRFSNSRNINGKINSCTISKTNTDKYFVPVLVEEDIKELPEINNTIAFDLGIKDYITTSDFEVIENPKILGKYEKKLIKLQRQLSRKQIGSNRYKKQVLKIGKLHKKIKNIRTDFLHKLSSRIINENQVIISENLNIKGMVQNHKLAKAISDVSWNEFCRVIEYKANWYGRIYHKIDRFYASSQICNICGYINTEAKDISIRQWICPKCNAQHQRDVNAARNILKQGLRELSLTA

SEQ ID NO: 25573 - protein, 430 aa, Lentzea sp.
VESNPCAAEQGQTYEGGTASCYLWLVCSKVKRAFKYRFYPTGAQAAELSRTFGCVRKVYNLALQTRTEAWTHRQERVGYQATSAILTAWKRTEELAFLNDVSSVPLQQTLRHLQAAFTHFWARRARYPRFKSRKRSRASAEYTRSGFRWCGGVLTLAKMSEPLDIRWSRPLPEGAMPSTVTVSRDAAGRWFVSLLCDDASVRPLPPTDSVVGVDVGLEHLLTLSTGEKIANPRHGRRERVRLARAQRILCRKQIGSANRTKARLKLGRVHARIADRRADHLHKVTTRLVRENQTLVVEDLSVTNMVRNRRLARSISDAGWRQFRHMLEYKAAWYGRRVIVVDRWFPSSKLCSVCGVSTGDMPLHVRTWTCGCGAVHDRDVNAARNILAAGLAVTVCGAGARPQRDVPGGQSATKQKPPRREPRESSRLHG

SEQ ID NO: 25574 - protein, 384 aa, unknown
  TnpB Polypeptide
MSDEEYKKLLKQYHKLSDRHILVVETDMPYPDVLKVVALSDKIRKAGNELVRLMRKNYDQLMRTKKYRKLLKLYGNTEDKDKRKALANQLNDMQKSYDVTWDFCRTSMIPIGKKYSIDAVFALTKAEDIWRGMEKCLYDNGKTTHFSKYGELPCIRAKQINRGIPMFVEDGKLRFKLRKMQFGIQVNDRFQSDEVNAVLSYLENPDKMDADAVNTLIEEACCIDTYRPCYATLVPRLIRGKYRVYLHLTIEGKAKSKYDRFGNPRHKYGKGMIGADIGTQTVAYTSDTEVGLKNLSERGNSIQTSERKERLYYRAMDRSRRATNPQNYNPDGTIKKGKKTWKYSDRYKKLKAKHTELCRINAVNRQLAINEDANYLRRYIRHRT

SEQ ID NO: 25575 - protein, 330 aa, Lactobacillus sp.
MNYLLKQLKHDYPFLKESDSTSLITVNHNLAVAFKNLFNHRGGYPRFKSRHCVRQSYTGHSTCKIEAKRRLKLPKLGSIRTSKTNQLKDYRIKRYTISHDPDGRYYISLNVETDIDELPRANRTVGIDAGLTDLAITSDGDKYATLNVNWLENQVANWQRKYSKRKNRAIVAVRQWNHDPNHLEQMGVNDYQNWQKARQQKARYQAKIANKRKDHLQKLTTDLVKNYDVIVIEDLRTKNLLHNHRLAKSISNASWYQFRTMLEYKCNWYGKRLIVVSSNNTSRFCSICGYNDGKKPLNIRAWTCPKCGTHHDRDINAAVNILNSGLKLLG

SEQ ID NO: 25576 - protein, 450 aa, unknown
  TnpB Polypeptide
MPKKTKSNTSKTKQDNDFTMSNPMQGELAQGELFSIAGYPAQSKDQTLSAKQNISLIDSQEQKSSKILAQDSTTKEKDLKPYWNDVCEAISSKLWLPTEIDFAGSDLSSSNLLLNKPVEKSWFSTIKIATQKQSSQKTCYPSSTLHVAGCTENAVIAKSKKIRIYPTLEQRALLKHWFGTSRYVFNKTVEYLKQPGTKARWMKVAPIIKSELPEWADPVPCQIKQIAVRDACFAVRDAKKKTIKGEHSFVKFRSRRDRVQSVFIPSTAIKPKGVYHTILGELRLSQELPEKIRDSRLILHRGQYFLCVSTETSVVATENQGGGICALDPGVRTFLSFYSPDAAGKIGDQDFGRIQRLCFYLDQLVSKISKAKARQKRKLKKAADRLRTKIRNLIDEIHHQVANWLTKNFGTILLPTFETSQMASRSGRKLRCKTVRAMLTWSHYRFQQFL

SEQ ID NO: 25577 - protein, 367 aa, Bacillus sp.
MSPEGLNQRFNRCAVLFLQRVFSLLIKSKLNDFSQISNQYTSYFQRIRILDATIFQVPNHLAPIYPGSGGCAQTAGIKIQLEYDLHSGKFLNFQMEPGKNNDKTFGTDCLDTLRPGDLCIRDLGYFSLKDLDQMDQRGVFYVSRLKLNNRVYVKNDYPEFFRDGTVKKQSLYVLLNLEDIMHQIKPGDTYENPKFFRSLEDKLAKAQRVLSRRLKGSSRWNKQRVKVSRIHEYISNTRKDYLDKISTEIIKNHDVIGIEDLQVSNMLKNHKLAKAISEVSWSQFRSMLEYKAKWYGKQVIVVSKTFASSQLCSCCGYQNKDVKNLNLREWDCPSCCTHHDRDINASINLKNEAIRLLTARTAGLGLA

SEQ ID NO: 25578 - protein, 147 aa, Oscillatoriales sp.
VYARVAKSRQVFLHKLSRKLVNENQVVVVENLNVKGMVRNHNLAKAISDAGWGTFTNFLAYKLEKKGGKLVGIDRWFPSSKLCSSCYYQIDKLPLDIREWTCPNCGTRHNRDGNAATNIRAEGIRMLQTDGTAVSEERRGSKTNERT

SEQ ID NO: 25579 - protein, 289 aa, unknown
  TnpB Polypeptide
VTIGVVGLDLNVSNIAFVADNKAGLLPFAENVPTYQKEIRQLQRKLERSKRANNPTNFHPDFQAKKGRKTITKKGTNIKGRRKWNNSKTYCQTAAKKRELERKKTSYAKSQNRKIVNEILRYGKDIKTENVSVKGWQKRYGKAIGAKSPGFVQSELKRKVESTNGSFQKFSTRKTALSQTHLNGERIKKSLSERVHRDNSGFRMHRDLFSAYLSRHINDEDNLLVQSAQQEWKRSEPILKAAWQEFQINRKQVSVSESRLSHSPSERFALKSGEFSQIAVLCKQNRATS

SEQ ID NO: 25580 - protein, 370 aa, unknown
  TnpB Polypeptide
VRKSFKYKIIPLGNAEEKAFKTLDLCRFLYNCALEERILAYRDSKSLSYYDQQNELPDLKEAFPEYKEVGAHVLQNVLKRLDTVYQNFFRRVKTGKGKAGFPRFKGRNWFRSFTFPDNSGWKVKKNRLVLSKVGEFKIRLHRPIEGTIKTVTIAYRSTGEWFVIFSCDGIESKPLSKTGKSVGIDLGISSFAVDSDGAIMDAPKFFRAQEKYLRRCQRALARKKKGGKNRERARIRVAKAHQKVVNQRHDFFYKMANHYVRNYDEIFVEDLRIKNMIKNKRLSKSLADAAMGNFLNILGGKAANAGRIFQRENPRRTSMTCSDCGNVQKMPLHKRVYKCSKCGVEKCRDYNAAINIKRAGQARLELSTCL

SEQ ID NO: 25581 - protein, 409 aa, unknown
  TnpB Polypeptide
VLAQTLATRAYRALNRVCVGQARRVRFKSRGRGLGSIENKRNDTALRFVVQTQDEGRGPGYLLWHDDQLEALIDWDDPVVTHGLSQRIKYARLVRRRASSPRAQGADREGERYFVQLILAGVPHHKPKHITGTDTVGLDLGPASIAIVPREAEARLEPLCAELRPDARAIRRLQRRMDRQRRAANPEHYDNKGRAKKRGKGAPRWKQSRGYQATQRRKAARERKLAAHRKSLHGRLVHQIVAVGHTIITEKISYKGWQKRYGRSVGLRAPGMLIDHLRRTVASTGGTLHEVPTRSTKLSQYCHGCGKTVKKPLWQRWHQCACGIGPVQRDLYSAFLAAFLDPAEPLPSCARYVVPWEGAEARLRAAHERVKERAKEGQVLPQSMGIPRAGARLPESRSEPTQEPACSLR

SEQ ID NO: 25582 - protein, 380 aa, unknown
  TnpB Polypeptide
MKHKAYKFRFYPTIQQEELLAKTFGCVRFVYNYILKWRTDLYYQKKQSVSYTESSRKIAEIKKIDDLKWLNDVSSVSLQQAIRHQQASFKNFFNGLTKYPILKKKNDRQSATFTRGAFKYKNDNIYIPKCEEPLKIKWSRNLPCMPTSITISKDTAGRYFVSCKCDVELIQYPISAKKIGIDLGLTHLFSTSNGDKIENKKLTKKYEKKLKRASQNLARKKLDSKNRQKSRLKVAKIHAKISDSRKDYLHKLSSKLINENQVVCIETLRVKNMLRNHSLAKTIADAGWGEFIKMLTYKADWYGRTLIAIDKFFPSSKRCNCCGYIIDNLPLNIRSWTCPQCQSSLDRDINAAKNIKEAGLALLAFGENVSLVSLDTSCSQ

SEQ ID NO: 25583 - protein, 393 aa, unknown
  TnpB Polypeptide
MLKTKKIRLKPTLEQEVLFWKSAGVSRWAYNLFLSENERLYDEFLKTGIGNKSISQGDLRKYINRELKPTTHQWLKEVGSNVMKQAVKDADISRQRWFKGISEKPKYRSRKNSTPSFYVNYESLKRKPHGFQGEKIGYVKTTESLPKIPKDKRYSNPRITFNGKYWFLSVGYEVDVEAYELSGESIGIDLGIKNLAVVGNDHLFKKYKNINKTKRVKQLEKKLIREQRKLSRKQLANIKSYDKNRKPIYSKPLNECKNWVKQIQVIKNIHRQLKNIRTSYLHQTTTEIVKTKPSRIVVEDLNVKGMMKNRHLSKAISKQCFYEFSRQIKYKSERLGINFVKADRFFASSKVCSSCGHKKVDLKLKDRTFNCPNCKCSIDRDYNASINLANYSI

SEQ ID NO: 25584 - protein, 439 aa, Bifidobacterium sp.
MTSYEAVRVRLDPSPRQERLMESHAGGARYAYNLMLTHVQRQLALGERPDWTMYAMRRWWNEWKDELAPWWRENSKEAYNSAFEWLSRALRNWSDSRKGSRAGRRVGWPKYKSKRSSVPRFAYTTGSFGLIDGDPKALRMPRIGRVHCMENVARRVHGGRVVRMTVSRHAGFWYASLTIERQSAGTRPKTGKRESANHPVGVDLGVRTLATLSDGTTFPNPRNYVNAQRRLRHAQQTLSRRNKDMSHGRGSNRWNRALARVRRIHAHIAAQRADHIGKLTTWLATNYTDISIEDLNVQGMSHNRRLAKHILDADFHEFRRQLEYKTARAGTRLHVIDRWYPSSKTCSRCGTVKAKLPLSERVYHCDKCGLDMDRDLNAAINIMVAGSAPETLNARGGDARRDRRKPAAQTPAKREPSSQNNGMRLGAGPGNEAMQTTTN

SEQ ID NO: 25585 - protein, 278 aa, Halomonas sp.
MQQWRSMLKAIKIRLYPTPEQAALLACQFGAVRFVYNTGLRIMSHRYKRHGQSLSAKHDIKRLLPVAKKSRKYGWLKCADSIALQQSCINLDQAFQRFFDPKQKAGYPRFKSKRGRQSSYHCVGVKAGGNWIKVPKLGPIKAKVHRPVDGKLKSITLSRTVTGKHYASLLFETEQAAPAPLKDVDAANVVGLDMGLSHLAIDSTGCKIANPRFLKQAQQNLKRKQQALSRTKKGSANRAKARLLVAKAHERVANARNDFQHKLSRQIVDDNLCPWRLA

SEQ ID NO: 25586 - protein, 433 aa, unknown
  TnpB Polypeptide
MIKSSKHTIKFSNNIKLKNLDYILKEYRRCLQHFINYLWTTPYSWTDDKNIIHTMDIKNNKYDAPQFVTSNIISNSGLITNLSGRLLKCCMTQAIGMIKASLEKQRKRIYIFNKHKLSGKSKKSLKLLIRKIRQNIPQKPNGYIANMELNSICADFMFTPESNDFNGFLQLKCLTTNKIEIKIPIKFDRHSIGLMNRGKMINSFLVKNNSIDIRWEIDIPKLRDDGNIIGCDQGLKTVLTCSNGITTLLEDNHGHSLDSILNTVLKKTRGSNAFKRAKEHQENFVNWSINHLNLDNVKQINLEEIWNIGYKNRTSKKLSHWQNTLIRDKIESVCEERGIRLIFQSSTYRSQRCSCCGNVRKSNRKGKIYSCKHCGNTMDADLNAAKNHEIILPEIPYDLRNLNLNRKDGFMWMGDGFYDLDGRSLQSLLHKKE

SEQ ID NO: 25587 - protein, 366 aa, Paraburkholderia sp.
MEITTRVLRFRLKDKHAPLLRELAREVNFVWNYVNELSFKVWQREGRFLSGYDFHPFTKGAGKAGLGLHSQTIQAIGEEYAVRRKQARKSRLRWRVSGGPRRSLGWIPFKASALRYRNGQVFFAGKALSLWDSYGLSKYELGAGNLSEDARGRWYLNVTIKIEKKPRPPTGEMEKSVGLDLGLKDFAATSDGHVITLDRHYRKLESELGKAQRARKKARVRALHAKIKNSRKDKLHKLSTALVKEYGAIFIGNVNASALAKTRMAKSVLDAGWSLFRTMLQYKSDHAGVWFDEVDEAYSTQTCSCCNRRTGPKGREGLGIREWACPGCGANHHRDINAATNILAAGRRRLAEGIPVLPALCAAAAG

SEQ ID NO: 25588 - protein, 401 aa, unknown
  TnpB Polypeptide
MQLRYNYRLYPAPRQQIALAKAFGCARVVFNDALAAREAAYHAGRPYLTDAQLSAQLTVVKATPERAWLTEVSAVVLQQALADLNTAYRNFFASLHGTRKGPKMGKPHFRSRKDHRQAIRFTANAQFKVLPNGKLRLPKIGDVPVRWSRPLPSTPSSVTVIKDSAGRCFASFVVETEPSPLPEAEPVIGIDLGLNDFAVLSDGRKITAPQFLRRAEKRLKRRQRELSRKRKGTRNRDKARVKVARAHARVADARRDFHHQLSTALIRDNQAVAVEDLAVQALGRTRLAKSIHDAGWAGFVAMLEYKARLYGREFHRIGRFTPTSQTCSLCGVKDGPKPLHIRTWQCRACGAWLDRDINAAVNVAKAAGLAVTACRAQVRPGLVLAQRGEAGTHPKSHRDAA

SEQ ID NO: 25589 - protein, 326 aa, unknown
  TnpB Polypeptide
VFTQTLRHVDMVFKSFFALLKNKSVKNKIPKYLDKVNGRYVATFPKQAISLKEFKKTGKLRLSQTVIYIVTKLIDFSSLKEVRIVPRMHHYVIEVIYQVKENTHCDNGKYASIDLGLNNLATVAFNEGSKPLIVNGRPLKSINQYYNKKKAQYQSRLKGNKRTSKRICTLTNKRNNKVTDYLHKTSRLLVNQLVSQGITTLVIGKNPNMKQDINIGKVNNQNFVMLPIMRFSEMVKYKCELEGIKVLFNEESYTSKCSFLDGEPICKHDKYIGKRIKRGLFVSRHGIKINADVNGAYNIMIKAIPNAFSDGIEGVGVHPMVLTIKR

SEQ ID NO: 25590 - protein, 379 aa, unknown
  TnpB Polypeptide
MLRAIKIRLYPNKTQEQKLNKVLGCYRFVYNHMLVRKQEAYKSDKTNLGINELSKYFHHELLKDKQFQWLKEQNTKVMQQAIRQMFTAYDKFFKEHKGFPKFKSKRDKQSALFPIDAISKTNTFDTRKITLTKNLKNISFRCSDLYFKRLQKYKDNIRRATLSKTKSGCYILSILVEINDNELLKFSKTSRDVGIDLGVKDFVILSDGEVFENKHFFKKDEKRLTKLQRQLSNKRKGSSNFHKQCKRIAKTFETITNKKENYIHSVVNYLLRHYDTIYMEDLNIGGMMKNHKLAKAIQEVGFYKFKTTLQNKALQNDKKVILIGRFYPSSKTCSQCGYIHKDLKLKDRQWQCPNCGSYHDRDLNAALNMLYEGRRISAA

SEQ ID NO: 25591 - protein, 421 aa, unknown
  TnpB Polypeptide
MRLTEQHIFYKESKRYSSLDRICFLSKNLYNFCLHKIKEEFNNSGKWIRYNELEKELRTIKQIDYVSLPNNSSQQIMMLLDVNLKSYFKALKVFKKSKTAFSGCPKIPNFKHKIKGRNIVIFTSVQFRFKNGHIFFPIKSGIAPIKTKINADNKIYQVRIVPRNGFYTIEVIYEFKEKINPILNNKWLSIDLGLNNLATCVTTNGDTPFIVNGKPLKSINQYYNKKKSKFKSKLGFYINNKNKTVQYGTSKKINNLTNKRNNKVNDYLHKSSRLIINYCIKNDINNIVLGKNTGWKSNVKMNKKTKQTFVEIPFNRFESYLMYKCQKEGMNFISREESYTSKASALDLDEIPTYNLKSNLNYEFSGKRVKRGLYKSRNEILINADVNGSINILRKEIGDEWLKPILFNRGFVVNPLKILSL

SEQ ID NO: 25592 - protein, 489 aa, Bacillus sp.
MTTENQIHYKTLQIWIKKGHRMYSYFQESCQNAKNMYNTTNFYIRQVYTGLTQDKELQPLQKEILDTIDKNIGKMNHTQLLAYQKKLEKEKTKPKEKQKEVKCNLFSEPTTEKPYVDFNFLDALFKAMIQKDYRALPTQSSQSIMKNVFRNWKSFFASLKNYKKNPNKYTGKPRIPKYIRSSEKEILYTNQDCIIKNDKFLKFPKTKLQLNIGKLGLTEGKLKQVRVIPKYNGYVVELVLDVPSEQQSVEENGRYMSIDLGIDNLATIVTNTGMKPVLVKGKHVKSINQYYNKMKSHFTSVLRKGKQTNEGPFTSKKIEKLHQKRYLKIKDIFHKASHHIVKLAQEERVCKIVIGQNKNWKQETNMGKKNNQTFCHISHSLLIQMITYKASAVGIQVVVTEESYTSKASFLDHDFIPTYGTNDQNATFSGKRMKRGMYRSAKGIEINADVNAAANILRKVVPNAWTNGIEGLGEKQLASVLTPLTLIVH

SEQ ID NO: 25593 - protein, 396 aa, unknown
  TnpB Polypeptide
MLINKAYEFRVYPTKEQAAQLAVHFGQARFVYNFFLRKRIDFYAANAGKKKQGLNYYDTAKMLTDLKKQPETAWLQESNAQVLQQSLRHLDVAYNNFFNKRAQFPSFKKKQARHSLTVPQGFRFDPKQGTLTIPKISPFKIIAHRKVEGTIKHVAIKKNPSGRYFASLLCEVEKKVEPKKKGPEIGIDLGLKSFLVASNREAVDAPKHLRNSEVKLVKLQRLLSRKVKGSNRRSKARLKVARIYEKISNQREDFLHKLSSRLVSENQAIFAEDLNVKGMLANHCLAKSVADSGWSEFVRQLKYKSEWNGVYFGQIDRFFPSSKRCNGCGWINESLTLQNREWTCCGCGQVVDRDFNAAQNILQFGKLQRTEGRSETKRPGRGGAVMPLIEPGSRLL

SEQ ID NO: 25594 - protein, 508 aa, unknown
  TnpB Polypeptide
MSKATTPSFILELPLKVSPSQEKILASRLEAARQLYNACLGEALRRLSLLKESKDFRKVLELPKGKEKTEAFKALNEKHGFSEYSLHSFAVATKNSCFIGNHLDTHTTQKVATRAFKAVKEYSFKKRGKPRFKGKGQFDSVESKTNKSGIRFREGEILWSGLELPCIFDPKDKHGVEAHGLSCKTKYVRIVRRRIKGKNLFYAQLVQEGLPKQKAKNLIRDDTVSLDIGPSTVAIFTGNHAELKQFCEELVPMNKRIRMLQRKLDRQRRANNPENYNEDGTIRGGKKLFWNSFNRYLETRAEISELFRRQAEYRKSLHGRLINRILAHGKHIKTEKLSFRAFQKMYGKSIGFRAPGMFMSLLARKAESAGGGVEELNTRKLKLSQTCHCGSIIKKPLSQRWHVCECGVKAQRDLYSAFLGYHVKEDILDTSMAAMSWEGVEPLLQQAVSRLIQSANEGMIYPQSFGLSRRQSGSPVKTDGVKTKAQDVVARKSESLGEGRTDIRTPRF

SEQ ID NO: 25595 - protein, 391 aa, Deinococcus sp.
MLAWYRHGGLADPASPLSAPSPRSRVTVPEISIDDLAGVCSAFFPGVSPSLVRGVASQVHRATSRYHGRTVPAETLQTGFQHVHVPLDAGIQATGPDRVWIDGLDTAVVADLWQLPMGLTGALVSAGQAFRHGTEREVSTMLRAASDGYRPALSDLDVTLRRYGALLGVDEPRVPGGPAVPARADHATLRRVTRPDGTPGWTVTWSVRIPHGWLPAANVADAVGVDVGLRRVLTAASGGGRWMVEGHPAIDLNLAFVSASTSALVRRSVFERQAAELDEVLKVVLAHEVVGVERTNWTRMSGRVDGRERVTRMMLTGATAVLDWVRALSPVSGSRVVEVSPTGSSCTCSACDQSGTVTEWQFTCGTCTHSDDADVNAARYMRRRALEEAGS

SEQ ID NO: 25596 - protein, 416 aa, unknown
  TnpB Polypeptide
MGRLKQNPHGLLVTDIVKVEGDYDILENLACIANGLWNSAIYLIYQRYAKEKKFYFYSDLCMLMKEHVLYRLLPSQSAQGVLQKVDGALRSFIKLKKVDPDAGPPGFHPKNTPWIIPFKSGQFKFNEKDSTIKLTMSLRYRKEKGMDFIVVRTSPLRHKGKVKYLELYQRDGLWFASVVLEMAAVPKIRTDGNLYIDLGIPNLVAVYDGDTTTLYKGGEVSAILRYREKTKAKFQAVLSTHGKRTSKAKRNMSRKLTAQADHAIHAMTKDIVARAKREGKGIVVGDLKHLRKNVKFNDNANQKIHQWQFGRTTTQLDYKGGYSGVPFDTGSEVDTSATCCLCGKKENGRVKRGLYRCKKNHVQFNADALGAVNISKRYRRIPLRQCSEIGVVGSLASPVVVLWDHHRWVPLDEANL

SEQ ID NO: 25597 - protein, 336 aa, Microcystis sp.
MLKAFKYRIYPTSEQSVLLAKSFGCARWFYNYALNLTSETYKQTGKGLSRDEIIRLLPSLKKEHEWLSEVPSQVLQQAALNLSSAFLNFFEGRTKYPNFKKKQNRQSIRFPQHCKLKDDVLVLPKIGEVYCKVSRQPEGSLKSVTVSVNPSGEYFASCLYDDGQDLPQKLTLSEAEGSSEGKAVGIDVGLTHFAITSDGTKHGNPKYYRKYEQRLARRQKKLSRKQKGSNNRNKARVKVAKVHSKIVRCREDFLHKLSRKLVDENQVIVVENLAVRNMVKNQKLAKSISDAGWGQFCTMLKYKAEWEGKIYIEVDRFFPSSKTCSNCLNRVDEYSR

SEQ ID NO: 25598 - protein, 361 aa, unknown
  TnpB Polypeptide
MNSASFIKTKVLRLRLKDKHAKFLRDLAREVNFVWNYCNDLQITMFNRERRFLSRYDFAKFTRGATKEGLHLHSQTVQAIAEEYATRRRQFRKVRLNWRKSTGCRRSLGWIPFKASAIHTAHSQVKFAGQWLSLWDSYGLEAYRIRAGNLCEDARGRWYLNACVAVPVAEATDRARAQRDVGIDLGLKELAATSAGEKLSAPQFYRGFEAKLAIAQRAGNKSRVRAIHAKIANRRKDALHQFSTRLVRGHDTIFVGNVNAAALAKTPHAKSVLDAGWSAFRTMLRYKCDFAGATFAEVNEAFSTQTCSACSVRSGPKGIAGLGIREWTCGKCGAVHDRDVNAAKNILAAGRRRLAEEIPAL

SEQ ID NO: 25599 - protein, 244 aa, Bacillus sp.
MLVQDGRVLSATIRRNPSGKYFLSVFVETDVQSLEKTGSSVGIDVGLKDFAILSDGIVYKNPKYVRQMEAKLAKAQRVLSRRQEVAIKQKRKISEAKNVQKQKRKVARIHEKITNARTDYLQKTSTEIIKNHDVIGIEDLQVSNMLKNHKVAKAISDASWTQFRTMLEYKAKWYGKQVVAVSKTFASSQLCSSCGYQNKDVKNLNLREWDCPSCGTHHDRDRNASKNLKNEAIRLLTVGTTGIA

SEQ ID NO: 25600 - protein, 444 aa, unknown
  TnpB Polypeptide
MQKHKFAVFTQLHEKNNHDIIEYIESSRSEYAKALRETFYAIKRSGFNKSKYNTYLQHKYGVVSRTASSIILDAQGRFNALKGLKKHEKRQLKQKIAHLENIIIPRLVERRNSNSSMLRKGLSISLIKQRNLRLKIVAKKAKLNKLKQKLNNLSYQLETGKLKLCFGTKRLLKQDYKKFIEKRDSQMTFFGAREETSCNQKLQLTYNRKNNQFLIQLRKDFGGYKSAKGNEKYAYGKVYFNCHKNRIISILKNKNSPLSYRIIKKNERYYLYCIFEIQLNEDDFITRSDYGTIGLDFNKGFITLSETNKYGHLMQTQFLPYRFKSGNKTKTDLQGIANHVTRLARQSGKDVCIENLDFKTMKSKTETKQGKKYNEMIHSLAYRQFSDMIESVTYRNKVNLIKVNPAWTSWLAKRLYCPTMKLNIHVGASYVIARRGQGYEDTVK

SEQ ID NO: 25601 - protein, 404 aa, unknown
  TnpB Polypeptide
MIKLHDGEKKKMKAYKTEIYPTQAQIELIHKTFGCTRYAYNQYVYENLENLASGRDFISAFSYSKRMNNDPNTPSWLKEVPSKAVKQALIYAERAFRDYFSKRRGKPRFKKKGKNDSFYLIGTLKVERHRIFVPVLKWVRLKEFGYIPEKISSVTISMKNGRYYISCLCKEEKDEQIALSNESMGIVFGLKNQFVTEDRTIPSINHSLHIKKLEQRLRREQRCLSRKVKANMIKKTYYRKGAKKGQLKSFQWAKPLSECRNIQKQKRKVSKIYERLTRIRTDYNQKALLSLVLERKPSSITIESLLVRNLMKNRHLSAPIMKAQWYQSRLYLENLCNRLGIELRVVDRFYPSSKLCSTCGFKYKDLKLKERFWTCSNCGSKHDRDRNAAINLSQCKTYTVLTKV

SEQ ID NO: 25602 - protein, 395 aa, unknown
  TnpB Polypeptide
MLRGMKIALDLTDEQVQQMWKSAGVARWSYNYAITRAKKHYLNYLEDNTLSKTLTEGQIRKELTVLKNTTHPWLKEVGSNVIKQAVRDWNDARIRFFKGLGKAPKYKSKNISKPSFYVNYESLRRVNGGFRGEKLGFVKTTQPLPRIPKGSHYKNPRISFDGKYWYLSFSYEVLDISVDLTDLVIGVDLGVKNLVTLSTGEFIENINKSRRVKQLEKQLRQEQRHLARQMQANTKGYLTTANGGRKPIYKRLLELCSNIQETKRKIKLINRKLHSIRMNHLHQTTFYLVKQLPKGIVIEDLNVKGMLKNKHLAKHIQNAMFYEFRRQLEYKCLQYGIYLVVADRFYPSSKTCSYCGVIKSDLKLKERVYKCDSCGLEKDRDLNAAENLAYYFYRG

SEQ ID NO: 25603 - protein, 333 aa, unknown
  TnpB Polypeptide
MIKHKSYKFRLYPTEEQKVIFTKTFGCSRAIWNMMLADKIKYYKDTGKTLNNTPAQYKKDYPWLKEVDSLALANVQLNLQKAYQSFFKNKSHFGFPNFKSKKKAYNQSYRTNNQKGLIVINNNKIRLPKIGWIRLKQHRKTTGLIKSATISKTATGKYFISILCEIEENIKTFPKTNSSIGIDLGLEYFAILSTGEKIENPRYLVRASKKLAKEQKILSRRGLLARQRGKSLNDCSNYQKQRLKVAKLHEKISNQRRDFLHKLSTTIVKNHDMICMEDLSSKNLMKNHRLARAIGDASWSEFVRMLEYKADWYEKTSVKDKPLVSLFSNLFEL

SEQ ID NO: 25604 - protein, 360 aa, Okeania sp.
LKSRYKYRIYPNHIQITKLNQLFGCCRYVWNSTLAHCNQLYFNGQKKPSYVDLTKQFITQAKQELVWLKEVASTPLQQSLKDLSQAYKNFFDSCKGKGQRIKVKPPKFKYKKSRQSARFVGENYKIGQDKIYLPKVGKIKIVWSRKLPTKPTSLTIIKDSANRYFASFVVEINPEHLPKTDSSIGLDLGISTFATLSNGDKINAPKPLKNNLKKLAKFQRKLGRTEKGSKRREKRRLRVAKLHAKIKDIRTDFLHKLSTNLVKKYDIIVLEDLNVSGMVKNRKLAKAISDLGWRQFRTLTEAKCDKYGKEFRTISRWEPTSQKCSNCGFQGGKKELNVREWTCLNCGTFHDRDVNAAVNI

SEQ ID NO: 25605 - protein, 420 aa, Thermoprotei sp.
MRRTSVVELVVDKGSEERLRPLCSLSSKLWNEVSYARRRMFFEKRGVDLKATYKEYYEKYKALIGSATAQQILNKNDDAWRGFFKLLKLKREGKLPPFITGVNPPGYRKKNDKRALWAVLRKDQYRVEGDEIVLKGLGAIGRIELRYRGLIHLKGERGRLEIHYDQDRRKWYAYISFEVSGKAVRGVWASIPRKPRGNLAAGIDIGINNLMAVYVENGLVKLVNGRPLKAMSHYWRVRIAEHQSALSKYGLKTSRRLRSMHSRWRGQVKAYVDSRVRQAVEWLHSVGVSVIKVGYPKYIAQEKGNFNNVHVWTYGYLLRRIHEVAEEYGITAVYVDEVYTSSKCPIHGEGCGERIKRGLFKCAKSGKALNADLVGAFNILITPSPVWDRGNGLEAQPGIEPSGGGDVVPNLPALAGTLAL

SEQ ID NO: 25606 - protein, 412 aa, unknown
  TnpB Polypeptide
MRSQKIRLKLTKEQENLAWWYSKVSRNFWNLLVDIDKCNNKGEFDEILNKNGNKTYYSKFYNRDIYKLNESDYLNLAKFVVAKNHEGDNENWSWYYQPNQSFIYAFLSRELVKIRKQNKGRLSFRNIDKTQPNFNVRCDIFPSRKRPSRIYLKEDGKLQIPTIGAVRFGSVRTDFNLSCKKQVANISFDGKYWYLSYTEDVESQVAELPDYTDGVGVDLGIKTLATISDGTTVPNIKTFRRVRILNKRLKRLQRKVSRKYHINKCNKHNKTKNIIKLERQIKLIHRSLRNIRINHIRKFVSELVKKQPQFIAIEDLNVKGMMKNKHLAKDVANCSFYAIREHLIRKATERRIAVRLVDRFYPSSKTCSNCGSYKKDLKLSQRVYHCSNCQERIDRDFNASLNIAKTDNYVLA

SEQ ID NO: 25607 - protein, 420 aa, Selenomonas sp.
MSMKDNESLTRVEKHLIRPSSPCFSLIGDFCHRAKNLYNHANYIVRSRFIKDGYWTRYKELDQILKHDLEYPDYRAMPTAQSAQQVLRLLDKNWKSFFAAINDWKQHKEKYLGRPKLPKYKEKNGQFILVMTNQNCKLVNGEIRFPKTFRGFHVVPKFVNHQDTGRKFDTFQQVRFVPSGAYIIMEIVYTIKPVPQMNDNGRYAGIDIGVDNLLTMAANTGAAPLIVNGKVPKSVNQFYNKELAYWKSVCRMTSGRYSSARIDRLTAKRNRRIDDYMHKASKLIIKECVQQDISTIVIGKNKEWKQESRLSKRVNQHFVQLPFARLIRMIEYKAKEKGIAVVLTEESYTSGTSFLDGEEPGKKNYDKNRRVHRGLFKSNTGRLINADVNGAFQILRKVFPNVSADGIEGVVLRPVVVVAA

SEQ ID NO: 25608 - protein, 397 aa, Selenomonas sp.
MQRAVKIRLLPTKEQECLFWKSAGTARWAYNYFLEANEAAYKAWLKNDKVGKRSVSEGEIRKHINNVLKKTTHTWLKEVGSNVMKQAVKDANLALQRYFKGISGKPKFKSRHRSKISFYVNYESLVRKPNGFHGEKIGFVKTAAPLPKIPKGKKYANPHISFDGRYWYLSVGYEVQQEETELTGGSLGIDLGIKSLAIVSNEDATETHFYKNINKSAEVRRLEKKLKREQRKASRKLESNIKSHDKNRHPIWIRPLRECRNLDKQNKKIQLIHKRLTDIRNNHLHQTTSEIVKTKPSQIVMENLNVKGMMKNKHLSEAIAKQKFYEFKRQIQYKAEMYGIKVIEVDRFYASSKTCSHCGNVKKDLKLSDRIYVCPVCGAKLDRDLNAAINLANYKMA

SEQ ID NO: 25609 - protein, 366 aa, Oscillatoriales sp.
MLKAFKYRIYPTSEQSVLLAKSFGCTRWFYNYALNLTSETYKQTGKGLSRNEIIKLLPSLKKEYEWLSEAPSQVLQQAALNLSSAFLNFFEGRAKYPNFKKKQNRQSIRFPQGCKLKDDTLKLPKIGDVHCKVSRQPEGTLKSVTVSVNPSGEYLAACLYDNGKDLPEKSTEGKAIGIDVGLTHYAVTSDGTKHGNPKYYRKYEKKLAKRQKQLSHKLKGSGNRNKARVKVAKVHAKIVRCREDFLHKLSRKLVDENQVIVVESLAVRNMVKNHKLAKSISDAGWGQFCTMLNYKSKWAGKTYVEVDRFYPSSKTCNNCLNRVDSLSLDEGLRILTAGHTVTASGGRVRPSKGTAFTRHLPVNEES

SEQ ID NO: 25610 - protein, 439 aa, unknown
  TnpB Polypeptide
MLLSMKTMLTAKLQLHTTSEQFAALRATQLAYRDALNLVSQYAYEHGKMSNKVKLQEGTYDEIRARFHLPSQMACSVPRQVGATYKALWSKVKQNAQARKAGQTKKRYKGLDQAPKYLSPTLTYQYGKDYSFKKNQQLSVLTLEGRVIVPYTGYDHHLELIQKGAKIGAAKLWYDKPKKRFYLLVGLEVETPDPTPETHKQVVGIDVGLRYLAVTSTTKGDYTFYSGKRVRAKANHYARLRKRLQKKGTRSATRRLVRISGRERRLKQDANHVVSKRIVKQYPNSLIGLENLTDIRERTKRRKGKRATRKQRKANAASSKWSFAELHNMIAYKALLNESMAIKVDANYTSQACPCCGHTARENRPNKGLLFVCQNCHYTLHADLVGARNVTMRTLLIRQDWMSTGSLSMSPDVSNAEAKAERLRRYSELRWSPDTSPRA

SEQ ID NO: 25611 - protein, 380 aa, unknown
  TnpB Polypeptide
MRLTRRLRLAKTEQLDTLAHWAGIVYSMVLVFFWRILRKKNHWLSQYAMHRLVRNDNLHSQTVQGIIDIFYANIKSWQQLRKTNPKARLPRKRRWYFVIPYKEAAIQLKDKKLILSNGRGNAPLIIDWAYDKPKYIEISYDDGYIVSATYNVAPADPVQEGDTAGVDLGDIHIAAVRIKDKTIIFNGGELRSKRRYINKETGKMQGKIDKCKKGSKRRKKLVKAKKKMRKRLNNQIKDILHKQTTKLVYTLKNANVKTAAIGDVRNIRQNVDYGNHANQMIHQMFSGQARQMIEYKCKLHGMETVIINEAYSSQTCPKCLKRNKTNDRNYKCRFCGFEYHRDGVGAINIRQKQMYKKYVSVVGDMTPPVGMLYCYTRHNL

SEQ ID NO: 25612 - protein, 428 aa, Streptomyces sp.
VYTDRRSIPSRPAASSAVKKSSLFTLSTIDCSCSHSVGLRGWVVQLRYQFRLYPTRGQQQALARTFGCARVVYNDALRIRKDAHAAGTPFPKSGDLSKQLITEAKRTPERAWLSNAPVGVMQQALRDLDQAYRNFFDSLSGKRKGPKMSEPRFKSKRDNRQTARYTRSDYFRVLPDGKLRLPKVGEVRVKWSRDLPSDPSSVTVVKDASGRYFASFVVQTDPSEVLPESSGEVGIDLGLTHFAVLSDGRKVSSPKFLRRAERKLRKAQQALSRKKKGSNNRKKAVARVARLHARVADTRRDHHHKLSTQLIRENQAVYVENLSVKGLARTRLAKSVHDAGWARLTAMLEYKAARYGRTFGKVDRFLPSSQTCSVCFVIDGPKPLSVREWTCGACQTIHDRDVNAARIVLAAGRADKPNACGGTVRPAA

SEQ ID NO: 25613 - protein, 437 aa, unknown
  TnpB Polypeptide
LRGTSEVTRTVIVRSVPLPRRTFRIFVELEGMYRNIVEQLVLYAVNNNITKFTRLKAEKYREVRSLYPQLPSHYAYTACQDAAERAHSFLRMRKIGRARKAYPEVRSVSIWLDDHLWRAEGLTSISLATHRGRVNVSIELNKHFLRYVNRGWRLASEAKVKLDRRERRLVFYLTFKKEVSEYRPKAYITVDVNENAEAVLIDGVVYLFETDLSRVTLGYYYRRKRVQEKYDRAYGPGSRPVRRVLRRLGNNEKALKKGVRWKLAALIVREAARRQAAIVLERLGKEPANHMIKRIKDHQLRHRVYQAAFKGVQRAIEEKAREYGVPVIYVDPRNTSKICPIHGTEIIYGRNRHGVCSKGGETWHRDVVACYNLLLRALGGDGGYAPSRLRAFVAVDGGPVPLGPTAAHEPAGVPRALWARWRSLGATSDHKLVRVST

SEQ ID NO: 25614 - protein, 195 aa, unknown
  TnpB Polypeptide
MTSYPRAGGVGWVGRVATARLARAHAHVRAARQHALHQVSNRLVNTHDRLALEDLNVAGMLRNHRVARAVSDAAWAELARQIRYKQVWRGGQAVTVDRWFPSSKTCHACGHVVAELPLHTRVFTCPNCHTPPICRDLKAAINLAVWAERHAQTPDPEARGRVTNARRGTSAGRGTRRGETGPDDAGTSPSAARPA

SEQ ID NO: 25615 - protein, 376 aa, Synechococcus sp.
MIQRAYKYRFYPTPEQESLLRRTLGCARLVYNKALAARTDAWYERQERVGYKETSSMLTRWKKASGLSFLNEVSCVPLQQGLRHLQSAFANFWAGRTSYPNFKKKRNGGSAEFTKSAFKWRDGSLYLAKCKEPLAIRWSRLLPKGAEPSTVTVKLSPDGRWTVSLLVEVDVKPLPPIKKQVGIDLGISSLLTLSDGEKVANSKGFKAKYRKLRNAQKALSRKQKGSSNRHKARLRVARVHAEIADARKDMLHKLTTRLVQENQLIAVEDLAVKNMVKNHKLAQAISDASWGELVRQLEYKCDWYGRKLVKIDRWFPSSKRCHSCGYTVNKLPLKIREWTCSSCHMHHDRDLNAAKNVLAAGLAVVVCGASVRPNRA

SEQ ID NO: 25616 - protein, 394 aa, Synechococcus sp.
MTPVTTTLKLKFFDLNQAKANMFGQTTAATTQLANELLLVPHAERKKLTTAQVVTPLKSALSNQVIRILKGKAGKRAKAFKVFWPEVNKQNWKVAKVGTTYSVSFPTVQGVKRVPIAVHPHFIDQLDDIINGDVEKGSLKLMQLRGVWYAMLSITRDVPEKKSTQRIGVDRGQNNLAVAATASGRCLFFSGVDVKHRRRRFQQLRRKLQAAGKYRAVKKLERRESRWMREVNHTISRRIVRFAQSQKADLYLEDLSNIRQTSKQRKMNRSDAGTSRHTWAYYDLETKLVYKMALAGRQVNKRPAAYTSKSDHRTGQLDGKRNGHTFTGANGYQCNADWNAAVNIAQWDGFSCPLILKEAASVMGVVASADGVFDNPLNSMNQSAQQLTLFPMSA

SEQ ID NO: 25617 - protein, 460 aa, Lactobacillus sp.
MVQAKRKKKQKTIPRNSELIDQLASEYYIKATPELDRAAEIAHKIYNAALYQLRQALFKRKGSIYYEGLDRIFKNKRNANELMLYGQMPTVQCAQQTLKEVAAVWKAWFCALQSYKIAPQKFTGRPRIPRYLKKSRRHTFYVTPQNARVKEVKSADGKDVVARYLIIHSLGLSIKLADGIKKINRIAIKPLSNGYKLTVAYTPAANQKPYLPDNGRYIGIDPGVDNAFACVSNTGDKALLINGRAIKSANQYYNKRMAKLKSLQAQYHQLESIINTKQGPKAVYGQTKSMQRLTDWRNAKIRQFAHKASKRIVDYALSCGANTIVIGKNKTWKRSVNMGKKNNQNFIGLPHQQMINMIRYKANMVGITVICTNESYTSQTSALDGEKPCWNNGNKSRKKQGLSPANRRIHRGMFRTNKGLLVNADINGAMQIVRKVFPNVSFANGIVDAVLHPAKWSPLI

SEQ ID NO: 25618 - protein, 470 aa, Lactobacillus sp.
VPNEEKYGFTRQYHVLLTDKQKIQHEKALKTQNALFQYALKYLFKTYGAKHIGRPMPFSQKPIQYVLNKIKTGFIKDKYGLARWKKSVLFLSSHSADEFLKTVYTNFSQYRKRLVKADKSMDEKARYNFKMNVTKDKYGKHKNQLHKSWYRKGSINFLRNGASFRDITSQKLPEDSKGGIRIEDKHIDNHTFLTVADFGTVEVIEDLSELNLKDIALTKIKKLPDGTYRLQLTFSLPRKKQEAKTIQGFDWNMAGNEAFCSSDGKRIKVSDRTIKRADEYEQKINEIKSFRDLEENIHGRSKRYRRLDRRQQKLNAKRTNLLTNEYRHLVHEVADGCDTIVVEKLDAYEMRKRGKGSAQSKGINRRLAVLKPYELMTILESLVKKQNKRLVKVDSFWTSKACHDCGYINKDLKVGQKEWQCPSCKKTVDRDLNAARNILDWGIHPEHHAKLKKTAEEGKNLSPSSLVTEV

SEQ ID NO: 25619 - protein, 424 aa, Halobacteriales sp.
MKRSNTFDVAPRSPTDEELLSGVLDASASLWNELTYERRQRFFGELDGSVLDAPRVHDTYKGVLGSAAAKEMKRKNDEAWRSFFAAKEKGEHAGPPGYWGNEEDGRDLRWYGRCDQYTLELGDRSRLEIPVGKHLKDEYGLGDTERLRLEVRGRPKWDGKPGRLELYYDELSDQFRAIQPVTVDNSRQDSSLADETAALDIGANNIVACTTTTGQQYLYEGRDLFDRFRETTREIARLQSKLREGRYTSKRIRRLYRRRGRRRDHAMDALARDLVERLYEEGVSTVYVGDLTDVLETHWSVRANAKTHNFWAFRTFIDRLAYTAEEFGITVEVRPEAWTSQECPNCGSTEDTTRHQDTLTCPCGFEWHADLTASETFLRRHETDVPRPMARPVCLKWDDHRWSASPRAHPPNEEHTDQSILRSA

SEQ ID NO: 25620 - protein, 400 aa, Gloeocapsa sp.
MSLVGFKTSLRLNNKQATLAAKHAGVARHAYNWGLATCFQALENNEKLPSSIDLHKKLVAEVKSVYDWYYEVSKCAPQEALRHLSTAFKNWWVHKHCKRPVFKKKGKGDSFYLEGNIRISGNKIKIPIFGWVTCDEILPTVIPKNVTISKRANKWFISFRYELENRITTKKAERVGVDVGINALATCSEGTVFPNPKAYRKAKRRLARLQRRVSKKVKGSSNRKKAITKLGIAHKKVSDIRKDNLHKITTFLAKNHSQVVIEDLNVSGMMKNHRLASAIADCGFFEFKRQLTYKCDWYGSELIVADRFFPSSQICSNCGNRQKMPLKARVYNCPNCNISIDRDLNASINLKNYASTSSSGETLNKACGEDTTLDSKAIESSLKQEISFKPIQLSLFDFSV

SEQ ID NO: 25621 - protein, 278 aa, Gloeocapsa sp.
MSIRGKAKDWGMPKTCTIIFKQNKWYVSITVDCIPTRPTTDIGAIGLDFGVNHAIATSEGALIDNPKFLKQAQEKIKQIAKKARRKRIGRKGVKPSRRCRKAQKALGKIQSKVGRQRQDWQHQISSRIVSDNSLIATEKLNLKGMTRKSRGKRKKQKTGLNRSILDVGIGNLKSLINYKVTEAGGFYIEVPTTKVKPSQTCPKCGYQEKKTLAQREHNCQKCGYKANRDVAAAQVMLNYARGLERASIDAESPSSTLCGSMKQLGALKRQKPRHDSAR

SEQ ID NO: 25622 - protein, 404 aa, Okeania sp.
VITLTYQYKLRPNKQQEAEINLILDVCKSVYNYALRERKDWLSSRKSSIKSCSIVSEYIIPADAPYPNYNNQAKSLTIAKKTYSRLKSVNAQVLQQTLKTLDRAFSDMKSLGKGFPRFKKKLRSFVFPAMLKNCLGCGQVKFPQLGWVKIRQSRQYPEGFQAKQTRIIKKATGYYLMITFTSSELVPDNPVGKVSLGVDAGVESFIATSGGRLTKAPKFLLDQLRELKLLQRRLKKKKIGSNNWLKSQNKIAILHEKIANSRRDWHFKLANQICDLADNIFVEDINFKSWSKGIVRKQSLDSGIGQFINEILPYICWKRGKYYAKVDKNYTSQECPKCGHRQKKKLSDRKHNCSHCNYQENRDVAAAKVIRNRGLIAVGHTVNKNACRDGLAGVQLSLFDLLPS

SEQ ID NO: 25623 - protein, 415 aa, Tolypothrix sp.
VLKAVKVRLYPTTEQQEALAKSFGCARWYWNYALNACIQHYEETGKSLKLNVYKAYLPQLKVEHPWLKEDCYSAVLQCVAINLNKAYSNFFEGRAKFPKFKSKHHKQSIQYPQNVKVVGDCLEIPKIGVVKAVLHRPIEGKVKTVTISKTPTDKYFASILLIGDGEVGFVSGNKTLGIDLGLKDFAIVHDGEEVTKHSNPKHLKRHEKNLARKHKKFTRKVKGSNSRNKYKKLVAKVHERVSNSRQDFLHKLSRKLVDESQIIVVENLHIKGMVRNRKLSKSISDVGWGMFVNFLDYKLKAKDGQLIEIGRFFPSSKTCSCCGHVVDELTLDIREWHCPKCEIHHDRDGNAALNIRKEGLRILQNNGGGNPVIADRGCVRPPTRKGKGQRSMKSEAHTVPDFLRCWVVHVIQLGI

SEQ ID NO: 25624 - protein, 483 aa, Tolypothrix sp.
MERSTKAWEVEPVVKAKKTMGVQKVLLSPDSETKALLDYLCQQAGKLYNNGVYFARQVFFKTGKLLTGKFDLAFEPSVSKTLIAQSLPSTPMQQTLMSVTEAFKSFKELRELYFKGQLHFKPKPPDYLKGSKLFKVAYPNSGGQKPTLINGRLRFSLGLTVKRWFGVSEFFLPMPSNIEYSLVKEFTILPKNGAFYLEMSYEVEKQKHDLDVSQALSIDLGTADNLAACVDTLGNSVLIDARAMKAMNQLWNKKVSTRKEGKPEAYWDNWLDRVTRKRNHQMRDGINKAAKLIIDHCLKYGIGTLVVGWNEGFKSNADMGRLNNQKFVQMPLGKFKDRLKQLCELHGIRYQETEESYTSKASYLDGDSLPKYGEKPQGWKASGKRIKRGLYRSAKGLIVNADLNGAANILKKVASNLSLDLGLLGRRSLTTVARIRLWVLPKATLSAESSVSLDLRVSTNCCCGRHEVSLIYLQLIKSFESQG

SEQ ID NO: 25625 - protein, 363 aa, unknown
  TnpB Polypeptide
MSSSVNFVWNYCKNTQREALKNRSVKRIIDPLTGKTIFVPYFFTKFEMNSLVSGSSKELGIHSQTIQAISEEYTTRRKQFKNILRWRGKNSLGWIPFKATAIKIYNNKVSYNKNTFQFWNSREIPDDAIIKSGSFAQDSRGRWYLNITFETRMNPYSNDNLIENGVFIDSNYLAKCSNGIKIDIPKISIKYIRKIKILNKLKKKFLKKKPILKILKRKAPKTKQEKNLRAKIENIKLDHFHKESSKIINFSSSIITNQISVKRKKSDKNNHFISFGPISKPFQNMLCYKAIRAGRTFKVIPEKDLIWAFSKCCSLQPRTILRIRVWKCRKCGKINHFSTNADKNLLSVYKNPLRIGHDTPRSI

SEQ ID NO: 25626 - protein, 435 aa, unknown
  TnpB Polypeptide
MKTVITAKLKLNTTPEQFKALRQTQLAYRDALNYVSQYAFEHGKMSNAVRLHEGTYPELRARFHLPSQMACSISRQVGSTYKGLWTKVKQNAQHRKSGQTKKRYKGLDKAPKFVSPTLTYQYGKDYSFKKEQRVSILTLAGRVAVPYSGYEKHVIHIQKEGEIGAAKLYYEKPKKQFYLLVSLEIETPDPTPETHTGIVGVDVGVRYLAVTSDTKGEQAFYSGKSIVASANHYARLRKRLQKKGTRSATRKLVEISGRERRLKADANHVVSKRITEQHPNTLIGLEDLSHIRERTKRKRGKKASKKQRKANNTYAKWSFAELQSMIAYKATLHESMAIKVDANSTSQACPRCGHTSPKNRPDKGLLFVCQNCHYTLHADLVGARNITMRTLLSRQDWVRTGLLSKVPDVSDKEAKAERLRRYSELRWSLETSPRL

SEQ ID NO: 25627 - protein, 557 aa, Hydrogenobaculum sp.
MKKNSKQSLAQNTELRTFSIRIKSDKLEKKLKNILFAYKHFENILLILINQNYNLYKEDKDTNDFNLLTSPQLMRNALYEYNSKHLTQVEYLKNKYKDNQLWQALKETAKKLKSHNLLHIINRVKANFKTYFTNLELCKQNPSLFQGMPKPPKPKKLSKLTNYSVELDKYCSLSFAHLEKKNLVGINLSNSIVYIHINKEQVKKLTDINKLYSARVIYDNGDLYLQISYLKELKKTQTKQLKYASIDIGINNLMAVFIDDENTPSLIVDGKPFKHYNAKFNRLVAKLNESKSKEVLEWGVSKTGTKYPVKYTEKGKRIGKFISFLYSKRNRFFTDQFHKMAKRVVEYLHLNGVSELFELFISKNLAQLKSNGECELSKAVKQNLIQIPFIKLIRYIEQKAQEYGLHYIDERYTSKTSCISDDIKSIQVCSKHFLELRGASACLSASKRVDNALDSPHLTNAFKGKRVKRGLFLDTVINKVFNADINAAVNHIKIGTGKCFVWLKDKLFKLCNPIKIKSDYEFCELLKSLQNSVSGKSVFYNTEAPQSNRLVENVSFC

SEQ ID NO: 25628 - protein, 350 aa, unknown
  TnpB Polypeptide
MDRLIGEKEIHIFVRSDRYYLEPIKDGEGYLVLKDFHPRIRYVGRIRWEGKQGRLEIIYVNGRWFALVPIEVGVDPPKSNSKGYVKPNYKNKKGRIVNPRSIRQRDPIGDKEAFMDMGLNNLFAVTISDGSAMLIKGGKIKSEYCWWKREITTYQSIRDMLRRLGISTWIYYHEKYLDAMYKRDERLRHLYITAIRFLADELYRRGVRKLYIGYPIMLSQDNGNEYNTNIGWFRKIVLWIVDIFMEYGIDVEIFPEDYTSGECSICGNKHKNGRIYRGLYECKKTGKKINADINAALNIARRLGYIIRIARKIESYLVTHNGVKPLIPLQRANTRDPSIETPPLRAGRVS

SEQ ID NO: 25629 - protein, 454 aa, unknown
  TnpB Polypeptide
MAKAGSRSKSESTVLFHLGFRTKLAVTEAQAQYFARACGTARFAYNWALERWKEQYEQHKKAPALVPLPSETALRRELNRIKGVQFPWMYEVTKCAVQNAIRNLGTAFKNFFSNPKQFKYPKFKKKFVDDSFTISNDQFKINEERSHIHIPLLGWVRMCERLRFKDARVLSATISRKADDWYVSISCELSDLSHLTAAKNHGRVGVDLGISRLATLSDGHVFEAPKPLKEKLGKLRRLQKRLSRADKGSRNRHKLRLRIARLHRSIADIRADALHKLTHFLSANYSTVVIEDLNVKGMMSNRHLARAIADIGFFEFRRQLAYKLALRGGELIVADRFFPSSKLCRHCGQRHAGLELSDRTWVCPHCGRPIEDRDLNAALNLYHYPEMKWDQPRAPAQGRSSESTADKAPPAVADHDGELDDRTAILLCAEEGTGNTPGASRGNRIPKNGEETPI

SEQ ID NO: 25630 - protein, 398 aa, unknown
  TnpB Polypeptide
MRKAYKFRLSPTKQQEEKLFWTLNRCRELYNAALSERKDAYRMAGKSISYYEQKRDLPEIKEIRPEYHDIHSQVLQDVLLRLKRAFDRFFERVKNGEKPGYPRFQGRNRYSSFTYPQSGFTLDEKHITLSKIGTLRVKVHRKIEGTLKTCTIKHEAGQWYVIFSCECEQPEPLPVSYEDVGIDLGITHFAALSNGEFLESPRRYRKAEKKLKKLQEALSRKKRGSHRRKRAVKAIAKAHRKVRNQRRDFVQKASRKLVNRYQVIVLEELQTKNLVRRPKPKQSEETGQYLPNGAAAHGGLNKSISDAGWGMFTEMLQVKAAWAGRVVAFVDPKYTSQVCSNCGVVKLKTLEERWHSCECGCELDRDTNAAKNILKKYARAGSALQILPRGESVEAPAF

SEQ ID NO: 25631 - protein, 310 aa, Enterobacter sp.
MIKHQAFKYMLDPNQEQLSMMTVISGACRYVFNKALEIAVQNHIAGEKYVPYNKTAPLLVQWKSQESLSWLKLAPSQSLQQSLKDLDRAFHGYISRKSGFPKFRKKGTDESFRFPQQRVKVDEVNKKVYLPKIGWVRYRKSRDVIGEIKNITISQTANKWYVSFQTQIEIPDPVHTSSLTAKVTLSDEGTILLSDGKKYALPETYSRHFNQLNKLIRQKNRKIKSSQSWLAMHHSIILKKAKLRNILMDFLHKTSTLICNNHAKISVDTEKGNSARKTSPLPVNFKPYEFLRQLKYKQSWNGGSVCVEQT

SEQ ID NO: 25632 - protein, 256 aa, unknown
  TnpB Polypeptide
VCVKLYPSGRIYVIFLVEEPEAEEQQSEKPKNAVGVDLGITRLATLSDGRYLENPRPLERSLERIRLLQRRLSRKKFLSNNWIKAKRRLAKQYEHVKNLRRDLFFKLGVLLSQKYDVLVLEDLNVQGLIQKGVTKTRRMRLYDSSFSELRAVLEWEFRKREKLVLPVPAYNSSRECFLCGGINKGLTLEDRVFLCPHCGFTLDRDLNASLVLLKRAGWVPPAAPVELRPIPPLPSLGLRGQGRRGDDSGSSRLQAG

SEQ ID NO: 25633 - protein, 447 aa, Lyngbya sp.
MRNVAKVRLYPTDDQKQTLAKAFGSVRWVWNYCLELNNQVYKETGKGISGMQLKKQLPILKKKEETAWLKETYSQCLQQSVLNLSRAFVNFFEGRAKFPRFKSRHGKQSIQYPQNVKIIENYLSFPVIGNIKANIHRRFDGSLKTVTITKTKTEKYYASILFENEEQEPEISSEGKAIGLDLGLTHFLITSEGSKYNNPRHFKKHSHNLKRKQQKLSRKQKASNSRNKARRLVARAHEKVSNARQDFLHKLSRKIVNENQVIIAENLNVKGMVRNHNLALAISDCGWGMFLNFVDYKAKRDGKTFVEIDRFFPSSKTCNVCLNVVESLPLDIRQWECNHCHTQHDRDINAAINIRDEGLRVIAGRINCAGDPRRQPLASGTEATASGGGVRRNLRSSRSLHPRERRPLIGRKSSVRQLPINEQSKDASTKTVQETGSLRPKAKRRRR

SEQ ID NO: 25634 - protein, 379 aa, unknown
  TnpB Polypeptide
MLRHKAYKFRIYPNADQEVLIIKTIGCVRFVYNHFLALWSEEYSKNGKGLTYNSCSAMLPQMKKNEATSWLKEVDSIALQSSIKNLSDSFSRFFKKQTNRPRFKSKKNPVQSYTTKNVNNNIMITDRFVTLPKLGIIKFAKSRELKGRILNATIRKNPSGKFFVSILCEEEVPELPKTGLEIGIDLGITDFAILSNGQKIDNNRFTSKMEKTLKREQRKLSRRALNAKKAGKELFEAKNYQKQKQKVARLHEKVINQRTDFLNKLSTEIVKNHDIICIEDLNTKGMSKNHKLAKSISDVSWSSFVTKLQYKAEWYGREIIKVDKWFPSSQLCSECGHKDSKKSLNIREWSCPVCHSHHDRDINASKNILAEGLRLQTLA

SEQ ID NO: 25635 - protein, 407 aa, unknown
  TnpB Polypeptide
MTYTHFKRIRARLYPTAKQKQYLNELFGCGRFVFNKCLDMSKEYYKQESKSANLKVLGNFFHQNLTKNPENKFLTEHNTKVLKQEAINLLEAYKNFFVNGSGFPKYKSQKDTQTLRFPIDTISKNTFTGRWRINLIKQLQSLKFKLSDKDREYISSGRNIIKSITVIREREGSHWLSILVPHTPIKYKTNDNVVGLDFGIKEFATLSDNSVHKNNRFYVRKQKINKRLQQSFSRKQKGSSNWKKAKTELSRAHSKIKRQRSNYIHNVTAKVVNDNQVIAIESLNISGMLKNHCLAKHIQDVSISEAIRQLRYKCEWRGRDLIEVGRWFPSSKKCSGCGSVKKKLKLSTRTYKCENCGLVIDRDLNASINIREEGLKIKRETLPRCGEDVRPKDLCPEANLCESEKHL

SEQ ID NO: 25636 - protein, 389 aa, Nitrosococcus sp.
MADDRNLTSPTYNEALAKKIFSRLGAYHKLMDNWLNPMEGNLGKRGIPRVGFSRRGECAPSCLSKPVMYFRHNYIITSMSGIVRTAKLKLDLPYEAAARTVLAWTDACNRVSQIAFDNGKISNAVRLQKLSYEAARATGLSAQVAVSCIRHVASKYAAVRRNQHSITAPCSFKQQAVILQGGKRGRDVSLRASGLSLWTLDGRLKSVPFHGPPGLEDKLTHWTFGDGRLFICPKSKTVFLTLSFKKEVEQRTAPNDAMIGVDRGINVIACATDGRRNWMRRGGHTKHVRNRYLHTRSSLQKKKAEQPTRAKAKLLKRLSGREKRFMQAVNHEVSKSIITFALKAGCPAVAVEQLDHIRDRKLRKAQRAEIHRWAYGQLAFFLRYVRDQR

SEQ ID NO: 25637 - protein, 392 aa, unknown
  TnpB Polypeptide
MYALKRELKLNNKEVSLLRGNAGFKRFVYNYGLELLKASWSLEGIKASDSQRLDAIKKVLSSYTMELPEYAWMKKYPSTVYQSAFIDLKNAVSRWRKGLGKFPVKKTKKKGDSFTVYKTSGIYPEKGKPALPFTNRVVIQPGKIIKLPGLKEFRLKESINFICSSQTFTVSRTGEKWFVSFVLDAEKIPPIIHPIHQIGVDLGVKCLATCSDGSVYEMPVTTKKAKTKLGKIQWRNRHKILGNKRRGIKASKNAQKHYKKLSSLQAHLANIRYDTVQKMTTDLSRRAYRIRIEDLNVSGMMANHKLADAVANNCFYEVRRQLIYKQKHYGTTVELVDRWFPSSKTCSMCGHIQPMKLTERVYNCMACAHVQDRDMNAAINLQNATPERVRLA

SEQ ID NO: 25638 - protein, 262 aa, unknown
  TnpB Polypeptide
MHTVKIYQLNTLSNTQLQRLREVQVEGAHMWNFCMETHKAARLQHASWPGRNELQKTTQGRFGLHSQSVQMVVHAFLANIDTTHQLRQTHPHMRMRYPYKEKRFYPVSWPMQAVSKENGRVVLPMGRGRKSLVLPLDLPDNSRSCTLVWNNGYELHVCVEIAQRETTPGNVHATVDLGEIHLAAVTTNTGKAMIVTGRGIRTLKRQRTMHPRSITKKQSRCTKYSRRWKKLHTSLCCLDRCPGSTTRCRRGSYGNRPHWTLA

SEQ ID NO: 25639 - protein, 399 aa, unknown
  TnpB Polypeptide
LIIAHKIALKLNVQQRIYCARSAGTARFAWNWALNEWKQSYEAGEKVSEAGLRKRLNAIKREQFPWMLDVTKVAPQQAIKNLGTAFTRFFTGKSKYPQPKRKGQHDSFRADNGPGTFKVTGRRLKLPVVGTLKLREELRFTGKPMSVTISREADRWFASIAVEVEHTPPTSENQAVCGVDLGISRLATISDGTFYQATHALRREIRKLRRGSRRLSRKQKGSKNRAKAKHRLAKLHARIVHVRRDSLHKLTTDLTRRFSTVVIEDLNVKGMMANRKLARAVADVGMYEFRRQLSYKAEMRGIRVVVADRFFPSSQLCSTVGCEGRAAGLGLAVRSWTCSHCNTTHDRDLNAAKNLERYSTVSSTGINACGAGSSVAPGQPGRRSLALKQESYIVINDYI

SEQ ID NO: 25640 - protein, 365 aa, unknown
  TnpB Polypeptide
MQKGVKFRIYPNREQQNLINQTLGCCRLVYNRGLAMRKEAFENGSKIGYSQTSAMLTELKKSDDFAFLKAVDSIALQQSLRDLDRGFVNFFQKRAAHPTFKSKHNRHQSYRTINQRDNIRIAGRYIKLPKLGFVRIRQSMEVGKINHVTIEHTPTDKYFVVLNVEFEPQPRQNNGGCIGIDVGIKEFYTDNNGKSVANPKYLEKTMCKLIREQRRLSRKQKGSGNRRKQRVKVALVHEKITNQRNDFLQKQSTMLIRENQTICIEDLKVKNMMRNHKLAQHIGSAAWGKFFDMLTYKSAWYGNDVVKVPTMYPSSQTCSSCGYKNPLVKNLAVRVWECPDCHTVHDRDGNASINILNKGLQMQSA

SEQ ID NO: 25641 - protein, 959 aa, unknown
  TnpB Polypeptide
MTKKSITRTINIKRYKRKQRKLEYKLKQNPNLQAPIKNIGFKESKSRIVNDEYRSLKIILGAILKKPEDLQLFEDHAIIMHHLSTFTSQLIHIYIGQLKKNNIQEPITQSTYEHAMKLIATKDFELSEKEKNLFNAFNTLKTSIGIQEFEKYTSISHLIHTAATQMFTNFKVNITTHYYKRLRRVIYLLIEHHPEYSKLEDDDKSKKRLQILNSIIDRNMNSEHTQFQDLINQCIKDFIPGDHWTKGSLGSELACCYAKFIYPTFALEAKLEDMGKKALNEYYKKKTNNVIESQDKTAVIIEKNRGPIPKKTFKKYPKISKKKKSELSNELIDEYTIKKKYACFQSVPIKSSFIIGYYGINSQSLLYIGDFTGIPGYINKRKTMDELGKDPKKKKMIWGRYFNLNHPIFQKQYKKGYRFDYSISTDGFGCTLKFVPKTKPTYAESGYKKSKLNPKKSSDVNEIDNDVSNESINPKTLSDTNEINNGVSNGLNNECTSELSDNKTINETTLSSKKLIKPKIIKKIPVKKHKAPVKPKTIKEKGWHCPQISDLDPNDRLKLANRKLAGVDPGYKNLVVIVSGSKANGTFKKYVYKASHRKLDTQFFKIQKTRNKLRKQHSLNELEKPLSATNSKSLDVEIFLEYIKVHYEVSLKVNAIYQNIVFRKIKYYSQLRAKSSLEKLVNDIKRIFGPDVVLLYGNWSRSTQMKGLMPVPGLGIKKRLARSFEMYDVDEYCTSKMCCNCHKELKNKVVIDKNTGQRKEIYRVLVCDKCIGEDGKMIESRHIHRDINGAVDILKLGKLDIEGKPRPEAFCRKPLDTNKSKTQVKTRSKKQVKKTISNKQVKKTISKKQVKIISNKQTIKQEIKPNVQSKIKPNIYVKTQPKIKPNIHIKTQPNGLSMIENPSVTQTQRQKIFKKINPGLMDDIIIQSKIKMIIIPDEYDHNQNQGPSNDPHLQDEFCK

SEQ ID NO: 25642 - protein, 408 aa, unknown
  TnpB Polypeptide
MPRRLIVASKIPVPSSMNEKTAELNKASARIYNKTLSLVRKIKQKKGFWLSENTVQKYILRWGSDIPLHTHSKQAMVQQYFNALKSYFSVRKKNPDAKPPFRTKQYMPTIWKASAIHIKNQQLVLSNGRGNQPFVIPIPSSLDLSRFAIKLAKLVWNPKNRRYYIHLSVEVDGHTFEPGDSVVAVDLGVVHPIAAFNGCEVRIWNGGELNSKLQYKHKRLAGIQQALSQTKPGSRKHKKLLKAKQRVLRKLSNQITDILHKITSSFVEWARQNGARIIVIGDVGGIRNKVKYHAKANQKIHDWKFRKITSMIEYKAKLAGIEVKYVSEEYTSQTCSVCGHRRKPSNRNFKCPVCGFEYHRDGVGAINIHKKYLGYGRVVADLAPTVGVRFNPHLRGPGISPWKLALSQ

SEQ ID NO: 25643 - protein, 374 aa, Oscillatoriales sp.
MKTVKFKLYQSKRNRHLKRSINAAGVIYNYCIALHRRYYRIWGKHLNCAKLQAHIAKLRKRNSFWQLVGSQAVQDICQRIEKAYQLFFKHHSKGVRPPGFKKVRKYKSFTLKQAGYKFLGGNRVKIGNRVYQYWNSREIEGTIKTLTIKRTPLGELFLVVVVDGVVEPYVKSETGKIAGFDFGLKTFLTVSDGSEIESPQFLKQSLSAIKKASREHSRKRKGSANRERARLNLVRKHEDVANRRSDWFWKLAHELTDKFDVLCFESLNLKGMQRLWGRKVSDLAFGEFLNILQWVAKKKDKQVVFIDRWYPSSKTCSHCGQVLKELDLSVREWRCPSCQSVNGRDENAAINIQRVGASTLGLGDVRRDLPAITV

SEQ ID NO: 25644 - protein, 403 aa, unknown
  TnpB Polypeptide
MYAIKRELKLNHKERTLMARHSGYARFCYNYALSLYQGVKELQGASSKKVAAIERVFTNHVKKLPEHKWTNTLSSRVYKTTFRHFGEALSRCFKGLGKFPRFKRKKDGDSFTVDAADWNHAILLKPQKSIKIPTLGTFRLKEAIPFPCMAQTFTVSRTADKWFVSFAIKAQKIPPLFHPVVETVGIDLGVSTFATLSDGNYYESPRPLTKAKTKLSKEQWRNRNKQLGQRRLGVKASNNAQKHDRRIAKIYGKTANQRRDFLQKTTTEISRKYAHICIEDLNVSGMIANHKLAAAISDCGFSEFRRELEYKSPMYGTTVELVDRWYPSSKTCSNCGHIQSMPLKERVFHCQHCSAIINRDLNAAINLAHYSLLRPVRSEVTPVDKKEPTPLVEAGSEHQIYYE

SEQ ID NO: 25645 - protein, 497 aa, unknown
  TnpB Polypeptide
LYRTIPIRAKFSPEEELFWIDQCQHANSLINCAVYHTRQSYFSKLESIEAYTTYWRGDDLRCGWKAYRSETTYPELDKVLKNNPHYKSLAAQSAQQTLKTVGESINGYNKLVGLYYEAKVGKPLLIRYRKKRGLAAVTFPRQALIYSDSASGSVRRSHSDEGTSGRASGYFKPSISRETKPELITEITLPLPEFIDSDWVKEVTIRPSFGQFWIDWVIDDGKEPPGVNPNLDYSHAWGFDHGGGNWLTGVSTKGKSLIIDGKKLRSMNQGYYRLVAKHKQGKSEFYWDANLDRIQRKRNNQMRDAINKAARFIVNQCLNDGVGNLVIGWNEGQKVASTMGKRANQNFVPIPTGRLIERLKQLTIEYGIILTITEEANTSKASFLDGDSLPKHGEKPVGWVPSGKRVKRGLYRTKQGLLIHADCNGAANILRKVAIQLGINLVKVGSGSLTLPQRIDLFSRLSRSYRKNCGAGRLARPRSHILLESLVFQPREMSTTQ

SEQ ID NO: 25646 - protein, 372 aa, Chloroflexi sp.
MRKMFQYRIFPNKKQVRKLNETLEECRWLYNHLLECRKTSYEQEGRSLSLYEQQETFPILKQERPSLKGVHSQLLQNVAVRIDLAFKAFFRRCKAGEKPGAPRFRGMNRYDSFTFPQSGFSITHDERLCLSKLGSIKMVYHRPIKGKLKTCTVHRSSTGKWFVSFSLECEPERQPELSTQVGIDVGLKTFATLSTGEEIANPRFFRKEEKALAKVQRRHSKLAKGTPQRRKHRQAVARVHERIAFRRDNFTHQESRKIVNHYGVIAVEDLHVNRMTHNHCLAKSIADASWSGFFDKLFSKAEEAGPRALKVNPAYTSQDCSRCHHRQVMPLSERTYHCPCCLLSIDRDLNAALNIRGLGLQALGLSVEAPPL

SEQ ID NO: 25647 - protein, 476 aa, Lachnospiraceae sp.
VFSTIIIAGNKHSVNTDRKETSMAYGIMKYRISQDRMPDLSAYLDEQTRMAKLLRNAALFRIRNHFTAQQKESLTDNEQEVEDEITRAVAAGMKQPKAMLTYEELWKIMTVCSNPDYYAGLSMQCAQNVLKQACRDFKGWLAALKAYKMHPEKFLGKPRMPGYVKSDQAIAKYTNQDCRIQPDGFLKFPKTKQMLPLGHAFPDGVPLKEVQVIPEYGSFRVIVIYETEGSTVSSPGTYHAAIDFGVNNLAAIVTDRDIPCRIYKGGAVKAANQWYNKQVSRLLSVMMKGKDPDEYHCPQTRQMTALARRRKYFLEDYFHKTAKDIVGWCVQNGIGTLVCGHTKLWKQKADTGKRNNQAFVQIPFNNLMSILEYLCARAGILFLEQEESYTSQASAVDRDPVPVFDGNHKPDVHFSGSRIRRGLYRTADGTCVNADLNGAANILRKAVPGAFAGMDVKAILRNINVVRFGNLYKVSG

SEQ ID NO: 25648 - protein, 286 aa, unknown
  TnpB Polypeptide
MALKAFSYRFYPTPEQESLLRRTLGCTRLVYNRALAARTEARYKDLKRVGYAETASMLTEGQKTEELDFLNQVSCVPLQQCLRHLQTAYTIFFDGRAKYPNFKKKRNGGSAEFTKSAFRFKNGQIYLAKCLDPLHIRWSRTLPIGAVPSTLSVKLAPSGRWSISLLVDVEIKLLPKSSNQVGIDLGITSLLTLSTGGKIANPKGFKAKYRKLTKAQKSLSRKQKGSNNRHKARLKVARVHQEITDARKDHLHKLTTQLVRENLRHRPGGLSCEKPGEKSETSYCHK

SEQ ID NO: 25649 - protein, 425 aa, Micromonospora sp.
MQGETQYLPVRTSRESAMSQWQTVVVQLRFNYRVYPTSGQQQALARAFGCARVVFNDGLRTRQQAQAAGLPYVTDAELSRQVTAAKLTPQRAWLGEVSSVVLQQALADLNTAYRNFFTSVSGKRKGRTVGAPRFRSRKDNRQAIRFTANARFKVLDNGRLRLPKIGDVQVRWSRTLPAMPTSVTVIRDAAGRYFASFVVQSTHEPLPSAASEVGIDLGLTHFAVMSDGTKVTAPKFLRRAARKLKRLQQDLSRKTKGSNRRKKTVVKVARAHARVADTRRDWQHKLSTAIIRDNQAVYVEDLCVTGLARTRLAKSVHDAGWAQFTAMLEYKAARYGRTFARADRFFPSTRMCSDCGRVTDKMMLNVRTWICPCGSHHDRDVNAAKNIRAAGRADLNDRRAQIRPASVPAPRSEAVTHRKLAPSGA

SEQ ID NO: 25650 - protein, 406 aa, unknown
  TnpB Polypeptide
MFTATRIRLYPNATQENAMVRQFGCVRWAWNDALAETRRLYQETGKGLGYESMAGRLPILKQEHEWLKEANAQSLQQSLRNLSRTFVNFFERRAGYPRFKSKFGSQSIQFPQGVKVNEKRVFLPKVGWFKAVIHRPIVGEIKTVTVTREPCGHYYASILVDDGRPVPAASFNGPVLGIDVGLIDFAVTSDKNHFANPKHLKLAEKNLKRKQQKLTRKVKGSSGRDKARRLVARVHERVKNRRKDFVHKVSTRLVNKNQVIAVEDLNVKGMLCNHSLAKAIADVGWGVFTQFLKYKTARAGKGLIKVNRFYPSSKACNACGCVRYNLDLSVRFWTCGDCGASHDRDENAARNIRDEAQRMIWAGIIPASAPGTGAAAAGGNVSRGRGRKSSITQIPVKAEAVAFMRQ

SEQ ID NO: 25651 - protein, 439 aa, Moorea sp.
VIKRVLVIEFKAVTNKAQKVAIDEAIRTSRFVRNKVLRYWMDNKGVGKKELYRYNTDLRAEFKFVEDLNSHACQASVENVERAIHRFYDNCKKKIPGKKGYPRFKKSSRSVEYKTSGWKLCPDKKSVKFTDKKGIGKLKLKGTWDLWRFDVKLIKRVRIVSRADGYYVQFCVKVDNSETVETTGKIIGLDVGLKDFYTDSNGYREPSPRFYRKGEKRLKFYQRRVSRKKTGKAVGHATRTANRKKAINKLGKTHLKISRQRQEHAKRLARCVVRSRSVGFAESNDLVAYVRAACRRQDLRVKNFVKNHCLAKSINDAGWYQFRNWLEYFGTKFGKVTVAVNPAYTSQNCSNCGEEVKKSLSTRTHICQCGCSLDSPKATLRERDHNAAINILNRALSTVGHTGTWTIISPNAGGDRASTVLGENQVQQAGSLNRESPSF

SEQ ID NO: 25652 - protein, 528 aa, Rhodococcus sp.
MTSTDLAAPTAAVSADPARPVVRAFVYVLDPTPAQIEALRSHCGAQRFAYNWALAQVKANLDQRTAERSYDIAEAGLTPSMSWSAYSLRRHWNIIKDTVAINAETGQVWWSANSKEAYSSGIANCANALSNWSAARSGKRAGTMRFPRFKSKRAASSCRFTTGCIGLVTTDGDRRHVQLPRIGVIRTAESTRKLARKTIAERARIRSATVSFRRGRWQVSFSVEMTLPARALPPTTTGPRSVVGVDVGVKHLAVLSTGELIENPKHARKQAKKLRRLQRRGARRTGPDRRTRQQPSNRWLRTQDQIQRIHARVANSRRDHLHKLTTQLVRAYDTVVVEDLNVSGMSRSGGAYKRGLNRAIGDAALAEIRRQLTYKTDWTGTGLHVADRWYPSSKTCSNCQAVKTKLPLNVRVFICDHCGYRGDRDHNAALNLAALAVSVEDGTSPASRGRDVKAARQKPTIRPAHQRADGIAAGTPHTSGERGRSNPATHAEYENGTQRERRQPNQSRTAAAVHDCCMLPRGCPVNGS

SEQ ID NO: 25653 - protein, 310 aa, unknown
  TnpB Polypeptide
MEYKYIGYKIRLYPTQDQIKIFNEYFGLARFVYNLALEIRDNQYQSYMRGETDVKYLSYISINNEIRRLRKTDPKYKWMCKYSSDTICTCIKDLLNGYMKFARGEVVNKPKFKSKKDLGSHSFPVRPDRMVITDNQVRISSIGWVNCKYIDQKIYGSGDKNVKNLNYINFVNPRVSYDGCYYWISFEIKTYLNDKIISYNSNYNYLYNQEYQLKEYNKAIGIDLGCKKDNWIVMSDGYRQPLPDFHLEKRKIAKLFRKASRQRRINKEKSERTNPINNQYMNPSNNEYKTNKKINKYYKKDGKQKIRFYI

SEQ ID NO: 25654 - protein, 390 aa, Streptomyces sp.
MVDHVKLVVQVKLLPTPAQASALEATLRNCNRAATYASHVAFTKKLKDRNGLQKAVYADLKALFGLSAQPAVRAVKKVVDAYATLKANLQAGNLGSPTSKRHRTAVGNPIGFRPEAAQPFDDRCLSWQYDARTVSIWTVAGRMKDVRFACSPDQLKTLVQYRKGESDLVRRGGTWFLIATCDIPEPEPYQPADWIGVDRGIVNLATTSDGTNHQGRRLGRYRRWQARKRAELQAKQTRSATRRLARRARKEKRHATQVNHRISKKIVSVAQRTGRGIAIEELGGIRERVRLRRDQRGTLSSWPFHQLGQHLAYKARKAGVPFLEVDAAHTSQRCPRCGHTERANRPTRDHFRCRRCGLAGPADVVAGVNVRNRARSVWAFVTMPVPAPAE

SEQ ID NO: 25655 - protein, 394 aa, Nonomuraea sp.
VRRAYKFLLRPTCRQEIVLMACLEDHRQLYNGALEHRRTAYRKAGVSVRYGDQSAELKQIRADDAGGQGRWSFSSQQATLRRLDRAFGVFFARVKAGRGRGYPRFKGRGWFDTVTWPKDGDGCRWNSQPEHPSATFVRLRGIGHVRVHQHQTVKGRVKTVSVKREGARWFVIVSCDDVPADTLRATGAAVGVDLGVAWLVTTSEGEHVANARHQEASASRLADAQRALARKERGSRRRRRVVAQVAALHAKVRRQRLDGAHKAALALVRGYDVIVHEDLRIANMTRSASGTIDTPGRNVAAKSGLNRSILDAGWGVFLTVLAYKAESAGRKLIAVNPANTSRTCAPCGHIAAENRVSQAVFTCTACGHAAHADVNAAVNILRAGLALRDAAGAA

SEQ ID NO: 25656 - protein, 406 aa, Nonomuraea sp.
MRRSFKFLLRPTVKQRIALTAMLDDHRALYNAALQERREAYRRAKISIRYADQSAQLKEIRADDPTGQGRWSFTSQQQTLRRLNKAFESFFRRVRAGRKPGYPRFKGRGWFDTITFVEGDGAKWDCQPRHPSATFVRLHGIGQIRVHQHRAVRGRVKQLEVKRESARWYVIVSCDDVPAVPLPASGRQIGVDMGVVHFATASEPLAGVSDEQGHIPNPRHLEAAQKELAAAQRAHAGTRHGSRRRRKAAQKIGRLHRAVARRRADHAHKIALALVRTADVIAVEDLRIANMTRSPKAKPALEQAGVFLPNGAAAKAKLNTSILDAGWGVFLSILAHKAESAGRELISVNPANTSRTCPRCGQVSRDNRKVQSDFACVACGYAANADVVAACNIKRAGLVLRDAGAA

SEQ ID NO: 25657 - protein, 469 aa, Nonomuraea sp.
VGLAAAYGLAQAKTEFAWLADAPSQVLQQTLKDLDTACARHGAWKVRWRSARRWTPSFRFPQGSAIAVERLGRRWGQVKLPKFGWVRFRWSRPLGGAIRSATVSRDGGHWYISFLVEDGQAAPAAHPGPAVGIDRGVVVAASTSDGAFHDRAYITSGESQRYRRLQQQLARTRWGSNRRRQVVAKLGRIMFRVRQRRQDFNAQTAASLCARYGTIVLEDLKTANMTRSTRGTAEAPGRGVTRKRGLNRAITRQGLAWPGTRPHQCGPLHRYSDHQGEPGVHEHHVFGLRPCGPEVPRESSGLPVHRVRPGRTRGRERRRQHQTRGRAVRVRTWRPRHWAVCESSTTPATSAAACRTRGTGNPSPLGRGGSQRPEISSTAVRTSSLVMVVSSAEVAEAPCEASAASRTSRRMAARSNSDRANRPLPSPSISRSSHTQVKTSSRSRSAASSKWSPDLSASSTAISDSSAGV

SEQ ID NO: 25658 - protein, 408 aa, unknown
  TnpB Polypeptide
MNKIKDDNYIEIGYKFRIYPTEEQKAFFEKHFGCVRFIYNYLLNLRMEAYKNDKTVSGYEAKRYIARLKKQEDYKWLSEVNSQSLQEAAIDLDKAYRRFFKKLGAFPSFKKKVNRQKFKIPQHFNLSKKGYLKIPKLKSRVKVNVHRKIEGPINNVTISKTPTGKYFASFNCTIAKNKVIKKKDNRVDKIGIDLGIDSFVATDKGYKIKAPSFLRTLERRLEAAQKSLSRKKKYSANYNKQRIVVASIHEKISNQRQDFTHKLSFKITDENQAIYLEDLNVKGMIRNHHLSKSISDAGWGEFTRQLKYKSLWRNKELVQIGRFEASSKICNVCDWKNKDLGLSQRKWLCKECSTFHDRDINAAKNILKIGQDMPDSKPVEKSTAVFSFKKRQVGSVKQEPVSLYEDAR

SEQ ID NO: 25659 - protein, 505 aa, Zestosphaera sp.
MAGQQKQRMSLVGGNPTVMPAMEVPNLLKTKKESVRTVRLRLLPTKQQDKRLRKIADTCSKLWNEVNYVRRKAFFEKKKVNIEETYREYYERYKKLVGCVTTQQVLNKNNEAWNSFFKLLKLKKEGKLPPFIKKLTPPGYWKDKTLGKRIKRIIIRSDRYYIEQVNNGEGYITLKDFNVKVKYVGRIKWSGKQGRLEIKHEFNRWFAYIPIEVGEDPSKSNPKGYIRGGCDKIQRGKPRGEEAAFVDIGLNNLFAAVVTSGDAILVKGGVVKSEYYWWKSEKRNTQATRDLMRNNGLKIWERFHHRYLRALFKSSERLRHLYRTAVRFLAKELHERSVKSVYLGYPYMITQDNGNEHNTNIWWFRKITQWLYDVLKEYGIELFIVLENNTSRECSVCHVIHENARVHRGLYVCSVSGRKMNADLNAATNIAYRVGYVVSVKKVESFIVTHNGVKPVTPLRRGIAQDPAVKPRPSRRGEGHPPQLCGVASVCQADQRRRISRRNPC

SEQ ID NO: 25660 - protein, 369 aa, Zestosphaera sp.
LRTLEGYRVLTLKYPLDSYVKEFIYKYRVLASHIYWCKRLSIDPDSEVVNTLTRSVKSYWRDNLLDEGDPLYLFKNIERTPIPYKVILNIPLVDAIHERKGAYIRDGKLVLRLDKTREYPIPKRALRLLEKRLKESPDERYVRVLERNNELVVQIVLHKKNVVDVPEDPLLVVADINSDYGIVVHFWDGKLIKTIKLRPPNLSNKRVYTKRLMMLRDRLYNMGCLTERQINIYPVLIRRALSYSYKGWIQQSVARVVRKIRRIAKRHNKRPLIVIDIPEHTSLRDTRLQKTLLSFARSLKNILSWYGIYWIEERLYSSFCPKCGNKLTVYKKTKRTRIMICSKCSFKADRDEIPLYWALKTYKHLLRHK

SEQ ID NO: 25661 - protein, 360 aa, Zestosphaera sp.
MPRIIADKETLEQFQFVTINGRLIPKTGEDFMKLCFLAYRFRESVRHELNLVFRDVPQRDAYKELAKMLPSSIYGETAYKYAKLLAEGSKGKIKVRRIWVASRGGVTWGGNLNIRLASSNRVLVRYYGGEWIELESRFGKKYIPLIEELIKLAKGRKESYGVVISFRNGKMYIHLEVPLHLYLKHFSEPKQRGYNLVAGFDVNSDRVNVAVLDINASIVALRTFWYSEVTSHGFPAERAKWIRLNALSNALKWCRSIGVDFVVFEDLTKVKKRRFTGNSNANRKISKFAKKQIIRHGVLKALKIGFTVILVNPEKTTNSLTHKQIMKEKGLDRHMASAYITAYRGIKKIKEQKTATTPPT

SEQ ID NO: 25662 - protein, 448 aa, unknown
  TnpB Polypeptide
MNYSPRFRLFPNTEQREAMDWQRNTVRQLYNHALNEFNQIPEDEGTLRQRVWMVRDTLPALKDWWTDLNQIYSTVLQKAVERIRDNINNLGKLKAKGYDVGSLNWKSPREFRSFTYRQSGFELDKKSGPNGRGLLVLKKLKGETREIPIRLHRDLPDHEKVKEVTLKKEPTGAWYVSFCIETRTPEKPSVEDIDPDDTVGLDLGVLNFVHDSEGRSVGRLDLSDERERLEREQRSLSRKDYESNNWEKQRRSVAEVHARMSNKKRDFKHKLAHFYTTEYDAVFVENLNVKGMLENPQNARNKAEVGWRDFIIILEHHGKKNACHVVQVNPRGTTKECASCGVETQKPLWIREHSCLTCGFELDRDWNAALNVLSRGLSKLGVVHSEATSPEIEDFWCANESRSDSSTPVETATAVSTDGGEYSSIVVDASRVTEAGSLALKEAAPAAE

SEQ ID NO: 25663 - protein, 221 aa, Moorea sp.
IEKTFEPTLKERERVGVDFGIKTLAVLSSGVEFEGLKPYRNAQRKLSRVQRKLSKKVRGSQNYSKTQLEVQKLHHRVANLRKDYLQVRPVANLIRQRKAHLYKMTTYIAKNHGEVVIEDLNVSGMMANHKLAKAIGDLGLHEARRQLTYKCERYGTLLVVADRFFPSSQLCSNCGNQQPMPLSQRVYSCDCCGNKIDRVGHASVNLERYNEYGSTRKPVEG

SEQ ID NO: 25664 - protein, 360 aa, unknown
  TnpB Polypeptide
MSSKLSDKNNMCLTFKVVVPQNLTPVLNDLYNKSIIESQKMLLNRNESSTKYYKFIPSVVAKGLVSKYQKNKKCKSIKNLVIPICGDKGRVVKLVDSGVRIPCLFKKEVIPLTIHKDMVGFIRQVEFFRRDKIWYMSYSFNVLKTETINTKTCIGVDRNSVGNVVTVAYGDKIKLIGPSAADINQNFKNRRRKLQKKGAKNALVKIKRKQSNRTKDINHKVSKEVVAIAKQHCSAIVLEDLSKISKGKTKRYVQKSQWSFYQLETFIKYKAALSGVPVIYVSPRYTSQKCSKCGCLNKTSTKKYVCNACGHVAHRDANAAINIMRLGEETLSCNSVGHIGVPLNRTTNVVVESESSDGVR

SEQ ID NO: 25665 - protein, 450 aa, unknown
  TnpB Polypeptide
MRFRLYPSREQEPMLVNACGQARFLWNLCLEQWRLWQPGKTAPGYAELSRQLTELRAAEPWLAEGSVIVQQQALRDFDQAKRNFFGGTHRRPTWRKRDRDEGFRIVALQPSHVRRLNRRHTALFVPKIGWVRFRQTRPIPCVKSYRVTRDPAGRWHIAFAHIPAPLPGPGTGEIVGLDRGVAVSVMTSEGESLHAPVLRPKEAERLLRLQRRLARAQRGSNRRRRVKRAIARLRAHETARRKDWVEQTTTSLARRYDVLKVENLNVGAMTRSAHGTLQTPGRNVAQKAGLNRSILAQGWGLFLTRLEHKAHGRVRRVDPRYTSQQCSECGHVAAASRESQASFRCVVCGFHCHADTNAARNIAAGQAVPARGALVQHRRAVNREPQCRASFRVASVLESPDFNPVEDVKSRTLPASHLHTGPPASRATASPRPSETGIPARSTAPVCPRP

SEQ ID NO: 25666 - protein, 402 aa, Escherichia sp.
VKRLQAFKFQLRPGGQQECEMRRFAGACRFVFNRALARQNENHEAGNKYIPYGKMASWLVEWKNATETQWLKDAPSQPLQQSLKDLERAYKNFFQNRAAFPRFKKRGQNDAFRYPQGVKLDQENSRIFLPKLGWMRYRNSRQVTGVVKNVTVSQSCGKWYISIQTESEVSTPVHPSASMIGLDAGVAKLATLSDGTVFEPVNSFQKNQKTLARLQRQLSRKVKFSNNWQKQKRKIQRLHSCIANIRRDYLHKVTTTVSKNHAMIVIEDLKVSNMSKSAAGTVSLPGRNVRAKSGLNRSILDQGWYEIRRQLEYKQLWSGGQVLAVPPAYTSQRCAYCGHTAKENRLSQSKFRCQVCGYTANADVNGARNILAAGHAVLACGEMVQSGRPLKQEPTEMIQATA

SEQ ID NO: 25667 - protein, 477 aa, unknown
  TnpB Polypeptide
MVENKKKKVSHTVVKLNIKNDEFKSYLEKMAFASNNLTNAVIYHYRQWFFYTQNLYYIEKGIRDVKLYIYDSEKIDDLIHHMYIYNQQLLQRNKKPIDFVKYGLDAYFLHYYFKSINQDDYNCKELSSQTSQQIVKKVTQTFKDFKKALFDYYKHKNKYKAKPELPKYKKKKSMSGFYFTNQDCIIKNNQIKFPKTKLKLPFTYKYKGRHIRTEVIRKYNEFELNIVFEQESKLQFRKTNVVAAIDLGVNNLVAITTNKGQSLLVKDKSLKSINQFANKEIARIHSAQTILKPNSKVVSSRQLMKVYQKRDRRIEHFMYCTASIILKFCLENNVSKLMIGKNKDWKQKVKLKKKDKQNFIQIPFNSLISKIKEKLNCYGIEVLEQEESYTSKASALDFDKIPVYNEKSANATFSGKRAKRGLYKTKQGVLINADLNGALNIMRKAFPKIDFETNDLKYLQNPKIIKNIMNSQWVTMG

SEQ ID NO: 25668 - protein, 360 aa, Filamentous sp.
LLSKKIRVYPETQLAAKWRTWIAASRWCYNQAISILKDERIGKYDLRKKVMDSAPDWVSQQPYNPRQMAVFQAFEAHKAASKSKGVAKFRNRFDTSQTIRFQTSNWKSGTFYPTSTKGLSFKASEPIVEVMQHEPTLSLINRQWFICYAVDAPKTEPINSDLAIALDPGVRTFVTGFDGSDFIEIGENDIGRIYRLARHLDKLMSRIGISKGGQFKRLRYCLRKSAAKIRIKIKNLVNELHKKAAKHLAAKYKVIFLPTFETQQMVKKGKRRLATKTARAMVTLSHYRFKQTLKHQAIKHGGIVVDVTEEYTSKTCSKCGHIHTKLGGSKIFKCPECGHTLDRDKNGAFNIMLKALRDTS

SEQ ID NO: 25669 - protein, 383 aa, Planomonospora sp.
MQLRYNFRLYPTPGQRQALARAFGCARTVYNDGLRTRQEAHEQGLPYVSDADLSKRVITQAKTTSERAWLSEVSAVVLQQALADLNTAYRNFFASITGKRKGPQAAPPRFRSKRDDRQAIRFTKNARFAVTAGGRLRLPKIGDVPVKWSRDLPSEPSSVTVIKNAAGRYFASFVVETSEEPLPESASEVGIDLGLTHFAVLSDGRKIDNPRFLRRAERRLKKAQQALSRKAKGSSNRKKAAAKFAKAHARVADTRRDFAHKLSTQIIRENQAVYVEDLYVKGLARTKLAKSVHDAGWGRFTAMLAYKAAKYGRHLGKIDRWFPSSKRCAACGTLAGSMPLNVRSWACPCGAVHDRDVNAARNILAAGRAERLNACGGTVRPAV

SEQ ID NO: 25670 - protein, 316 aa, unknown
  TnpB Polypeptide
MEQLYEDPGTSIPTFHKKGYSKSYQTNCQYHTECVDIKKGTVRMPDRKHVQIPKLGSVKFKDSGMLQRIFTRTSETRIGSVKVAMDSCGDYWISTQVGSVCPFHNAMPAVGHGVGIDVNVKNLYTDSDCNEAENPKFYTKTEKKLAKAQRKLSRRMEHAKKDGRSLYDAKNYQKQRLKTAKISRSVSRRRKDYLNVQSKRLVESQDFIFTENLSSKAMMKDNDYAKYIADVAWSKFITMIKYKCGFYGRIFGRVPAKNTTQMCHVCGFVLTGDSRLSFNDRSWTCPNCGTFHMRDHNSAINIKNSGIRLYLPNPAL

SEQ ID NO: 25671 - protein, 423 aa, unknown
  TnpB Polypeptide
MVNLTIELHKLRFKVFTHAAKDAFQRPKMFVSEQGAPVLCDKDQMSVKLKNAMSTCSVWVVVFHRPIIIEVMKHIKTLKVRVRDKHRPLLNQMALSVNFVWNYVNELSHRSIKERGVFLSAYDIQKYTQGAHKELGLHSHTVQKVGAEYVTRRKQFKKARLNWRKSGGVRRSLGWVPINSGMAKWKNGQVYYNGHYFKVWDSYDLSLYTFKTASFSEDARGRWFFNVAVEVEADMPAGQDKIGIDLGLKETATCSDGTKLEAGRFYRDLEPKLAVAQRAGKKNRAKNIHAKIAHRRKDALHKFSRQLVNRAGEIYVGNVKSSSLAKTKMAKSVLDAGWAMLKTMLEYKCDSAGIVFKEVNESYTTQACSCCGAISANSPKGRAGLGIREWTCECGVTHDRDINAARNILAVGHGRPVEGIPVL

SEQ ID NO: 25672 - protein, 500 aa, unknown
  TnpB Polypeptide
MTSKVEEKASEDRIFGSYLFKNYANKGKIEKIKNTLKEYRRTAKDISKFLWDIFFKTGKLPHKKKINIKNIPSYLSERYKYVCLWQVHDVLSSYIANIQYQFANIVFNSNLSEEDKLILLALNNVEGWLKYDKDEIEIYERKGKKRKIKVLEFHKKLARKIFKHLLDKNRKPRFSKISMHLDGKVVELSKKEENGAKSFDYWLKVSTLEKGNPVYIPLKTNTYAEKVDGEFLNYCQIIEDDNGNIEFRIIKQLKKKEYIPATNEIAIDLGLRPLFATDKGDLFGRSFFDTLKAFDEKITKRMASLQKRGIRPRSDRKYRKYVDNLRDLLKNEINRLINVIIRIYKPRRIIIEKLDFRSPELSKRMNRMIQNFGKRYIKEKLQRLQELYGIEITEINPAYTSQECSCCGYVDKRNRRDTQEFECKACGNKTNAQVNGAKNILKRSSLGNLTKKQVLKMLIEKYLERLKGCKSPPLDVIKGNPYFKDYLDSILNPCQSLTPS

SEQ ID NO: 25673 - protein, 330 aa, Escherichia sp.
VAKKSRRYAWLKEFDSMALQQAVINLDVAFSNFFNPKRKARFPTFKRKHGKQSSHHCVGVKVLDNAIKIPKLSPIEARLHRELHGKLKSITITRSATGKYYASILCDDGLEAPVKPTLISTVTGLDMGLEHYAIRSDGAKIANPRHLINTSRNLRRKQKALSRKQKGSANRKISRIRLAALHERVANARADFQHKLSRTIVDENQAVIVETLKAANMMKNHNLARVIGDAGWHSFITRLEYKAAEKGAHLVKLDQWFASSKTCHCCGYKMSEMPLHKRIWRCPECGIEHDRDINAALNIRQKGILELKAAGLVVSAHGGQRKSVAQTVAA

SEQ ID NO: 25674 - protein, 473 aa, Ktedonobacteraceae sp.
MKQALWETAGAMTERAERAESAAEVEEEVEEEAGPGGPVLCKKIKLTVSARDAATLEFMQGKCRGLYNWWVMKLRAGERWPGWRKAKATLQESKRYDPELHFVYGKLLHEVYFRLHAAMQAFFRRVQNGEKPGFPRVRPRHCFFTLIYPAMYLKIEGKTLILPTGGKGEKHKLYPNVRARLTEEPPPGFRNVAISRDARGNYHASFVYVYRDEEHEEQPDEQAEQNERNEQSTQVSGKIKEPEQTPSGESATGAQVVAFDLGIKTLATGVNEHGRVYHIGGFKGHRWYNKQLDKIRSKRDKCKKKSRRYIRLSKVYRRVSEKKRHKQKDSLHKASHLITHKLVERTVVVGDLSQRQMVMAEHQKRNKTLNRMVYNDWGLYGFVQMLRYKCLKAGKALVVLDERDTSKRCSGCGHKQSMPLWKRTYRCENCGLIRDRDENSAVNILMRFLARPGPHMERISMRCADVFTATEYV

SEQ ID NO: 25675 - protein, 371 aa, unknown
  TnpB Polypeptide
MLIAYKYRLYPNKEQREYFAKCFGCVRFIYNRMLSDKIDYYKETKKKLNNTPAQYKKEFEWLKEVDSLALANAQINLQTAYNNFFKRPEVGFPKFKSKKNHYYSYTTNNQGGNIYISDRYIKLPKIGLIRIKKHRDFEGLIKSVTVSKTPSGNHYVSVLVNQEEKEKLPVVDTQIGIDLGIKEFAITSDGEMIENPKYLRKSEKKLRKLQKDLSRCQKGSKNREKCRIKVAKQHEKIANQRKDFLNKLSHRLIMENQQICLEDLKVKNMMSNHKLAKSIADVSWSEFVRQLEYKANWYGREIIKIDTWFPSSQICSNCGHKDGKKALSIREWTCPVCGTHHDRDINASINILNEGLRLYNENKTVGTTGIA

SEQ ID NO: 25676 - protein, 681 aa, Nonomuraea sp.
VKRFEPRPGFVVQAYRFALDPNAAQEAALRSHCGAARAAYNWAVAWVTASWWQRAAEQSYGVCEAGLTPWRPWSLPALRKAFNQVKHTDPRFAGWWTDNSKEAYNTGLANAAAAFDSYRASKQGKRRGKRVGMPRFKAKRKARMACRFTTGTIRVDADGRHVTLPRLGTIRVHERTDGLRDRIAAGTARILSATVRHERGRWHVSFQVEVAREITRAARPDVAVGVDLGVKALAVMADTTGRIRTVPNPQHHERARKRLRRASRIVSRRQGPDRRTGQAPSRRWEKANAARNTLHHRVTNLRADALHKLTTTITREYGTVVVENLNVAGMLTNRRLARRIADAGFGEIRRRLAYKTAWAGGTLVVADRWYPSSKTCSGCGAVKAKLPLHARTPPHRPSRHECGAGRWRNPAAAAAGGSERPSSGHRRATRAMVTPSRTFWAEMPGMLRAIKPLSNGRLIVMSHPKARAGRPPASQCPAPPELILAAALRMFADKGYEGASVAALNRKLGVSHNLVHQRFGSKEMLWYATVDWAFGDLAARLLPELDDVEGGPLEQMRRIIRRFVIVHAERPEVLRLITVEGIADSPRLDHLYEHHVAPLLAALTAPLQRLIDEGVIAPIPVRTLHFLVAHGAAAPFSMPALARRIGPGDPASAEAVAEHADVVADLILSGLRSRTEAAHRA

SEQ ID NO: 25677 - protein, 382 aa, Ruminococcus sp.
LTYGFVYAIVKKDKEVSKMNKAYKFRIYPNEKQKILIAKTFGCVRFIYNKMLGDKIEYYHQTQKKLNNTPAQYKTEFEWLKEVDSLALANAQMNLQDAYNNFFRDKKVGFPKFKSKKGSKRSYTTNCVNGNIVIGDSMIRLPKLGFVKMKQHRNIPDYYKLKSVTVSKNAGGKYFASILFEYEEEITMKELENFIGLDFSMHELYVDSNGNCPQFPRYYRLSEKKLKREQRKLSKMVKGSKNREKQRIRISKLHEKVANQRKDFLHKQSRQIANVYDCVCIENLNMQAMAQSLNFGKSVSDNGWGMFTVFLKYKLEELGKRLVKIDKFFASSQICSVCGYQNSETEDLSVREWICPCCQTNHNRDINAAINIRNEGMRIVLA

SEQ ID NO: 25678 - protein, 276 aa, Escherichia sp.
  misc_feature (3)..(3): Xaa can be any naturally occurring amino acid
  misc_feature (244)..(244): Xaa can be any naturally occurring amino acid
VEXLERAYKNFFRKRAAFPRFKKRGQNDAFRYPQGVKLDQENSRIFLPKLGWMRYRNSRQVTGVVKNVTASQSCGKWYISIQTENEVSTPVHPSALMVGLDAGVAKLATLSDGTVFGPVNSFQKNQKTLARLQRQLSRKVKFSNNWQKQKRKIQRLHSCIANIRRDYLHKVTTTVSKNHAMIVIEDLKVSNMSKSAAGTVSQPGRNVRAKSGLNRSILDQGWYEMRRQLEYKQLWRGGQGLAVXKYSDCIPVPQISAGTTFTKSQRPSAKPRNDSH

SEQ ID NO: 25679 - protein, 377 aa, Burkholderia sp.
MDIKRAYRFRFYPTLEQKAILARTFGCARFMYNHMLKMRTDAWQQHQVRVGYHETSAALTALKKTPEHSWLNEVSSVPLQQALRHLQTAFANFFAKRAKYPNFRRKDGTQSATYTASAFRWDGTSLKLAKMDTPLAIRWSRTIPKGTTVTTVTVSKDAVGRYHVSMLCDDVVSAKSESKNKVGIDFGLTDFVVLSTGEKIAAPNEFRKTEAKLAKLQRRLAKKQIGSANRRKARLKVARMHARIADRRRDFLHKLSTRLINENQVIAIESLSVSHMLKNRRLAKSISDAGWSEFVRQLTYKAKWHGRILIGIDRWHPSSKRCSGCGHIVAKLPLKMRAWVCPECGAPHDRDVNAARNVLAAGLAVSAHGESVSPMSL

SEQ ID NO: 25680 - protein, 374 aa, Halomonas sp.
MAKRAYKERFYPTPEQALLLAKSFGCARFVWNNTLAYRTEAYQQHGQSVSHSAAEKRLVVLKAEYPWLGDVSSVILQQTLRDQKAAFDNFFNPKLKARYPRFKRKDSRQSIRLTKAAFRYRDGEITIAKSKVPLPIRWSRPLPCAPSSITISQDHAGRYFISCLCEFTPKVLPVTPKMTGIDLGLTDLFITSEGVKSGNPRHLKRHEARLAHLQRQLAKKQKGSNNRNKLRRKVARLYAKIADCRRDAIHKATRTLVNENQVLCVESLNITGMVKNRSLAKAISDAGWGEFVRQLEYKAEWAGRQLVKVSQWLPSSKTCHGCGHKVEKLPLSQRRWHCEGCGQAIDRDINAAKNIRTAGLAGLACGATGAGAVA

SEQ ID NO: 25681 - protein, 420 aa, unknown
  TnpB Polypeptide
MQVKRTEQINLPPGDNLSYISHLSKNLFNEANYIVRQEFIGNGKWTRFNTLNDQLNKGVSENYTLLPSQTANRILYTLDKSWKAFFKAIKEYSKHPDKFLGRPSLPHYKPKNGEHILIFTTQQVKIKDGYLLFPKMTGIDPIKTRLGDDTRLKEVRIIPKSTGYVCEIVHEKEVEPFDLNPDNVAGIDLGVLNIVTMANNIGEQSIVIKGGFVKSMNQYYNKRCAEIQSVYDLQGIKHGSKMNVLTDKRNRKMKDAMHKISRFIIDYCIERNIGTLVIGHNDNWKQQVNLGKKNNQSFVSIPYYILTHDLNYKGEEVGIRVIEQEEAHTSKCSFLDGESIEHHDSYVGKRIKRGIFRSAKGIIINADVQGALNIAKKAIPKAFSKENVDEIEGVGLHPQRVNLSQRTLCDTNFTQKGVVA

SEQ ID NO: 25682 - protein, 443 aa, unknown
  TnpB Polypeptide
VATVIQAYRFALDPTPTQRRALASHCGAARVAYNWGLALVKAQLDQRRSDPSIRVPWTLPDLRREWNQAKDNAAPWWPENSKEAYSSGLEGLSTALKNWSDSRRGRRKGRSVGFPRFKKKGRSPDACRFTTGAIKVLPDRKHVQLPRIGVLKTHESTRKLARRLEQGTARILAATIGRQADRWYVSFTVEVDRAVSEGNGKANVVGVDVGIRHLAVLSTGVPPIPNPRALEGSLRTLRRVGREFARRKPGSRGRYRSQFRLARVHGRAANLRRDAMHKLTTSLATEHGIVVVEQLNMVGMVRNRRLSRALADAGLAELRRQLSYKTTWYGSRLVVAGRFYPSSKTCSACGWVRAKLTPAERSFTCEACGLRIDRDLNAARNLAKLAQHVAQSGWETRNARGADISPGTFGQAVTKREAGTGNSSRQDRHRRRASAGYPDLSPR

SEQ ID NO: 25683 - protein, 396 aa, unknown
  TnpB Polypeptide
MRVFEYKLVASRQQAERIDEAIKVTQFIRNKCLRLWMDTQANKNKLYTFCAVLAREYPFANALNSQARQAASERAAYGISRYLKPGKSGKRLKKPKFQKDNRSVEYKATGWKLLPGRRRITFTDNLGIGAMKMLGTQDLCAYDLALIKRVRIVKKADLYFVQFCIDADRSEPQEATGRTLGLDMGLASFYTDSEGQKVDCPKFLRKAEKQLKREQRRLSRKKKGSRNRRKARVKVARRHLKVQRQRKDFAIKSARCVVKSSDFVALEDLQVRNLVRNRRLAKSIHDAAWGLFGDWLLYYGQVFGKPVVKVPPAYTSQDCSCCGNRVKKSLSERTHVCPCGCVLDRDENAARNILRLGLATVSDALSETYPWATGNVEDTSSETLVESAPLLPAYAG

SEQ ID NO: 25684 - protein, 443 aa, unknown
  TnpB Polypeptide
MAAVKQAVVFRAYPTKEQQAMLRSWMGACRFVWNQFVAYNKDLYAARRRFAFHGELSAFLPEMKRIEGYEWLADVPAISLVDVARSYDLALRNALADHKAIRAGKKLGGKARGFPVFKRKREGEGRLYLSSQSITALEPTLDAPHKARGTVTVSKLGDLRVRGGRWPNGRILSATMALKAGQWFLSIRFEGEAPWTGAAPEVGAVGGDLGLASFLTWDDGAEVRSIGPPRHLRKAEKKLKRQQRRVSRCAKGSVRRKRRVRVLGRIHRQVANRRSDFLHQTSHMLTAKAGVIGLEDLGVQAMQRNRRLAKSVGDAGMAELVRQIRYKADWRGRVFVRIDRWKRSTGVCPDCGTVHERLDLSVRIWTCEGCGAVHDRDAAAARVIRLHAMELVGRGIPEPASVTRRKRGESGPLRRGRGLRRKSAQGTANVPSHEQPPNLVAAE

SEQ ID NO: 25685 - protein, 433 aa, Moorea sp.
VSAVKHKAVKVRIYPTQEQVEILAQHFGCARWWWNYALNQCIETYKETGKGLKQSALNSMLPKLKKEKETEWLKECYSQVLQSVSLNLSRAYQNFFEGRAKYPRFKSYHHRQSIQYPQKVKQVGDCLKFPGRLGVVKAVIHRPLDGEIKTATVSKDPSGKYYASVLMEYESGEPKPSTEVRPVANLIRQRKAHLGKVMVRKDPLKAIGIDLGIKDFAITYDGEKTSKFGNPKHLAKYEKKLAKKQRIAARKKKGSSGRRKARKIVAKVYERIGNVRQDYLHKLSRKIVDQNRVVVVENLNVKGMVRNHKLAKAISDLSWGTFVNFLSYKCEKEGKVLVEIDRWFPSSKTCSNCHYRIKELPLDVRTWTCPSCGTHHDRDGNAAKNIRAEGIRMLSSSGTGEVNASGEEVRPRRGRPSKLRHSSVKLEAPSSTK

SEQ ID NO: 25686 - protein, 397 aa, Nonomuraea sp.
MWDMARTVKRAYKYRFYPTCGQAAELARTFGCVRLVYNMALAERTRAHAAEGRPVPYGETSAMLTRWKRTEEPAFLKEVSSVPLQQALRHLQAAFANFFARRAGYPAFKSRKKSRASAEYTRSAFRWREGRLWLAKMDGPLDIRWSRPLPEGARPSTVTVSRDPAGRWFVSILLEEEIRPLDPSENMVGVDAGITALVTLSTGEQVTNPRHERAERRALARAQRNLARKAKGSANRVKARLKVAKVYARITDRRRDFLHKLSTRLVRENQTVVIEDLTVRNLVGNRRLARAISDASWRELRSMLEYKTAWYGRELLVVDRWFPSSKLCSVCGAQQDAMPLNVRRWSCACGAVHDRDVNAARNILAAGLAERRNACGAGVRPQRETSRTGRPAVKQEA

SEQ ID NO: 25687 - protein, 368 aa, Nonomuraea sp.
VAQIVKRAYKYRCHPTSEQADQLARTFGCVRLVYNKALEERTRAYALDGKRVSYVESSAALTQWKKTPELAFLGEVSSVPLQQALRHLQAAFANFFARRARYPTFKSRKNSRASAEYTRSAFRFRDGQLTLAKMDAPLAIVWSRPLPEGAEPSTVTVSRDAAGRWFVSILVEEKISPLPPVERSVGVDAGITALATLSTGEKIVNHRHERADRRRLARAQRALARKQKGSNNRAGARLRVAKVYARIADRRRDHLHKVTTRLVRENQVIAVEDLTVRNMVKNRSLARAVSDASWREFRSMLEYKAAWYGRTLVVVDRWFPSSKLCSACGTLRVEMPLNVRAWTCDCGQVHDRDVNAARNVLAAGLAES

SEQ ID NO: 25688 - protein, 393 aa, Nonomuraea sp.
MRRSFKFLLRPTAKQSAALTQCLEDHRQLYNAALEHRRTSYGKAGVTIRYGDQSAELKEIRKEDPDGQGRWSAGSQQQTLRRLDKAFAAFFRRAKARQKAGYPRFKGRGWFDTVQWPAVKNGARWDSRPHDPVTRLYLLGIGHVRVHQHRRVSGTVKTISVKREGARWFVVLSCDDVPAEPLPATGAVAGIDMGVASLATTSDGEHIDNRRRLAASADRLAAAQRDLARRKRGSKRRREAVARVAALHAKVRRQRLDSAHKAALALVRAYGVIVHEDLRITNMTRAASGTIEFPGRNVAQKAGLNRSILDAGWGVFLTILSHKAESAGRELVAVDPRNTSRTCSRCGHCAKENRVTQAAFRCAACGHAAHADVNAAKNILRAGLALRDAAQAA

SEQ ID NO: 25689 - protein, 400 aa, Nonomuraea sp.
VAVRRSFKFLLRPTRKQVAALTACLADHQQLYNAALEHRRTAYRKAGVTVRYGEQSAELKHIRADDPGGQGRWSFSSQQATLRRLDKAFAAFFARVKAGRAPGFPRFKGKGWFDTVEWPKDGDGCRWDSQPGHPAATYVRLQGIGQVRVHQHRRVLGTVKTISVKREGRRWYVILSCDDVPAQPLPATGVAVGIDMGVAWLVTTSDGEHVANQRHLAACADRLAAAQRDLSRKQRGSNRRRKAVARVAALHAKVRRQRLDGAHKAALALVGVYDVIVHEALQVANMTSRAAPKPDGEGGWLPNGAAAKSGLNKSILDAGWGVFLTILSHKAGSAGRELIAVNPADTSRTCSRCGHCVAENRVTQAGFRCWACGHTAHADANAAVNILRAGLALRDAARAA

SEQ ID NO: 25690 - protein, 411 aa, Nonomuraea sp.
VQLRYSYRIDPTPGQRIDLAKAFGCARVVFNDALALRNHAHEQGLPFLTDADLSRAVITEAKKTPRRAWLGEVSAVVLQQALADCTTAFRNFFASVSGGRKGPKLAPPRFRSRKDNRQAIRFTKNARFSITAQGRLRLPKIGDVAVRWSRELPAESSSVTVFKDAAGRYFASFVLQVTQTALPETGAETGTETGTETGAETGIDLGLGHFAVLADGTKVSSPRFLRRAEKKLRKLQRALSRKQKGSSNRARARLRVARQHARVADARREFHHQTSTRIIRDNQAVYVEDLAVKGLARTRLAKSVHDAGWSAFVGMLEYKAKLYGRYFAKVGRFFPSSKLCSACGVVAEAMPLSVREWTCPCGVTHDRDVNAAINILAAGRAERQNACGDQVRPGSVRAQISETGSRGSAAA

SEQ ID NO: 25691 - protein, 99 aa, Nonomuraea sp.
VVLGVDMHNRVKNRSLARAVSGTAWREFHSMLEYKAAWYGRTLVAVDRWFPSSKLCSACGTMRAEMPLNVRAWTCDCGQVHDRDVNAARNVLAAGLAES

SEQ ID NO: 25692 - protein, 411 aa, Kitasatospora sp.
MVVDVQLRYSFRVYPSTGQRVALARAFGCARVVFNDALRVRESARAAGLPFVPSGELSRQLTAAKKTPERAWLAEVSSVVLQQSLRDLDTAYRNFFDGLKGRRPRMGAPRFKSRKDGRQSIRFTANAGWKITAGGKLRLPRVGDLDVKWSRALPSAPSTVTVVRDSAGRYFASFVVETGPEVLPTTDAVVGIDLGLTHFAILSDGTKIDSPRFLRRAEKKLKKAQRDLSRKAEGSNNRAKARIKVARAHARVADARREFHHQLSTRIIRENQAVAVEDLAVKGLARTRMAKSVHDAGWSAFVTMLEYKAAKFGRVFHRIGRFEPTSQVCSVCGVKDGPKSLDVRVWTCGACGTVLDRDINAAVNVAKAAGLAASACGARVRPGIVPAQREETGTHPKPSRSTAGQAGISVL

SEQ ID NO: 25693 - protein, 390 aa, unknown
  TnpB Polypeptide
VLETVILSVEFGYNENEQIRRLMVDFRDMTNFCIQKAIQNKITSFCKLWHIIKDEIRRRWNYSTQYYVQACRIACSILKSWRKRVKKGEADPDDVPKVKRLFVKLHSSLFKFTGDRVRITIRKGCRIWLDLKFGDYQKKFIEEWENGRLKIGEILITPDKVIVPFKKEVQLIEPKQWLAIDINETNVTGVSSDGNFFVIDTSEVKRVRHVYFEKRRRIQSGIKCGKRRRELLAKYGRRESNRVKDILHKVSKTIVEFAKVRGCGIILEDLKGIRKRIDYNNVLNRRLHNGWSFHKLQYYIEYKAKLEGLPVVYVNPKNSSSLCPGCGRKLSPKGQRLMFCSKCNLIMNRDFVACLNLLKTKDVPVCVAGERLPMNLREELICRNRKRKST

SEQ ID NO: 25694 - protein, 413 aa, unknown
  TnpB Polypeptide
MNDFRLLVNLCVREALSTRVSSRRALSRFARDRALEARVTGSIGLAAADIARSLARGHRRRLRKNLVSRLPYVRVPFVRVPAASFHFDPDSGKLRLSLRRGEWCSLVVPVSDYHRRVLANPDHRVTQVHVGLWKVILLYARRPPVPYAPTSLVALDTNESSLDGVEVDPKGAGYVRVPFPEIRAIQARHVGRRRHLSRKKAHDRRVSCRFLGKEGQRECNRIRSRLHALTRSLIDELAAQHAVLALEDLTEVPRPRRRRSGSRNAPRFRSRSLRRRLSSWPQGELHRQLAYKAVDRGVPVVWLSPFRTSRTCPRCGELSEHRRRVGTRFDCAKCGWSLDRQLNAGLNLGLTVLRKTAGLGGLRLDPDALSEDAVRPLYGSGNDRFARVERRETEGLGGNGQPVGNSPLGDLSQ

SEQ ID NO: 25695 - protein, 404 aa, Streptomyces sp.
MIRAYKFLMRPTVGQAIMLGEMLRDHCSLYNGALQERRDAYRHVSKTSVKYGTQSAQLKDIRAFDPERQGRWSFSSQQATLRRLDKAFAAFFRRVKSGETPGYPRFRGANWFDTVEFPKDGDGCRWDSTPHGSVTRVRFQGVGHVKVNQHRAVVGKIKTVSVKREGGKWFVVLTAEQDQPEPLPPAGSMVGIDLGIASFLTDSNGVHVPNPRHARKAAARLEAAQQALSRFPRVRRDQRTGNHRRAVEKVAALHGKVRRQRLDHAHKTALTLVREHDVIAHEDLKIRNMSRAPAPKPDPDRPGAFLPNGASAKAGLNRSIADAGWGVFLTILHAKAESAGREVIAVDPRNTSRTCPECGHVAKENRPTQEKFHCVSCGHQAHADTVGALNVLRAGLVRRNAQPA

SEQ ID NO: 25696 - protein, 367 aa, unknown
  TnpB Polypeptide
MANKAYKFRIYPNREQKTLFAKTFGCVRFIYNKMLDDKIKYYEKTKKKRNNTPAQYKKEFPWLKEVDSLALANAQMNLQKAYNNFFRDPKVGFPKFKSRHKTRASYTTNNQKGTVALENGHLKLPKAGYVKVKQHRAIPEDYRIKSVTISQNPGGDYYASVLFEYENQVQKQPMHQFLGLDFSMQELYRDSEGREPEYPGYYRKAEQKLKREQRKLSKMQKGSKNRGKQRIRVARMHEKVAAQRRDFLHKQSRKIADAYDCVCIEDLDMKAMSQALHFGKSVLDNGWGIFMNFLKYKMEERGKQLVKVGRFFASSQLCSVCGYKNSETKDLRIRAWICPECGTHHDRDVNAAVNIRNEGMRLMYSLQ

SEQ ID NO: 25697 - protein, 428 aa, unknown
  TnpB Polypeptide
MLRMANKVVPRTFKASLRNHSQVEGDLDALGFSGSKLWNVGRWTVQRVWDEIEHIPEHDELTAYLKNHERYDDLHSQSSQRILQELAEAFHSWYGKRTNGDTRANPPGYRKHGDEHPRSTITFKNKGFKLDTENNRVRLSKGKNTKDYWSDFALCEYETRPDVDLPTVESVQQVRAVWTGDKWELHFVCRVEIEVADAPGESTVGIDLGICTFAALAYEDETAELYPLGCLKEDGYYFGKHIANCGDSSSERTEQLHRKWSNRRTHYFHALAKHIVERCVEKRVGSITIGDLSGVREDEDDEVKNWGTHGNLDLHGWAFDRFTNILTYKAEMQGVEVNPVSERDTSKTCSCCGRERDSNRVERGLYVCDSCELVANADVNGAENIRQVPLSPSAVSAADRSNGWLAQPSIVLFDKETGAFVPQEQVRS

SEQ ID NO: 25698 - protein, 466 aa, Thermus sp.
MRFALKIRLEVDEHTAAVLDGQSRIANWLYNHLLEEANALRQRYRETQDPDAARVLYTERGLRDRIPALKQEFPFLRAVHSSVLKNAALRLSRAIREYQKGRRGERAGEVHWPRFRSWKRKWFSLLYDEPWKGYALRGRVLELSLGQSLDPDVGQRRQVHVAVRLAEPLPDWFRHEIVRQLRITKEGRVFYAVFTVERELPATRAVGRIIAIDPNHKNLGYGVDTDGVATEIANPWFLKALDRRIDEVKSLRDRCRRKSVRMVRPDGSVSWRPSRRWQKLNAVLDELWRVRREQTKVYLRTVANRLYREYDAVFVGDYTPHGGGISTRMRRAMNNQSLIGRFKETLKWTAARSGKVYGEWEERGTTRTCSACGSMAPGGIPPEEREWTCPSCGRRHIRDENAALNGLARVLEKLEVPCSGRLGGPVAVRTRRAWRFDGLGIREMPGTAGGRVQRHAASRQEIKCGA

SEQ ID NO: 25699 - protein, 403 aa, unknown
  TnpB Polypeptide
VRTAYKCRAYPDLEQASVLNRTFGCVRVVWNRTLAWRHARYHGEQVRTNFAQANAYLTGMKASESLGWLNEVSSVPLQQAIRHQQVAFGNFFAGRARYPRYKSRNGRQSAEYTRSGFRYRDGRLFLAKISTPLEFVWSWPEIDPASIDPTTVTVSRDPCGRWYVSFAVDVAYPEQLPATGAVVGVDLGIKDFAVTSDGENIPNPRRLARRERNLARYQRRMARCQKGSANRAKAKAKVARAHRKVGASRQDFLHRASARLVREHDVIVIEDLNVTGMVRNRSLAKAISDCGWGEFRRMIEYKAVRAGRHLIVIDRWYPSSKTCSACGHLLAALRLSTRTWQCPSCGTRHDRDINAAKNILAAGLAVSACGADVRHPGSPRMRSAVKQESRPVTAGIPVLQGGE

SEQ ID NO: 25700 - protein, 379 aa, unknown
  TnpB Polypeptide
MMTYTYKLYRSKRTAKLDAMLREACFVWNHALALQKRYYTLFGKYISCPKMKAHFAKRISRRLLHSQTAQEVLERLDAAYRRFFDHLSRRPPKFRKARDFSSIVYKQGGFKLNGNVLVVNSIKQHFQFSFSRPYEGKVHQIRIRRSRLGEYYLNVVTDAVARSCSHGKSLEGASVGMDFGLKTYLTLSDGTKIENPLFLKSGLNELRRKSRALSRCEKGSNHRKACRMDLERCHERIRNRRDDWQWKTCHELCRWYSTICIEDLNLRGMTRIWGRKVNDLAFGLFIRKLKHVASKYGTKVVKVDRFYPSSKTCSVCQYVNEHLSLRDRRWTCPSCGTNLDRDLNASVNILRQGIASSGSIRKTQLAAQGALVTGESPVL

SEQ ID NO: 25701 - protein, 522 aa, unknown
  TnpB Polypeptide
VADNTLFLYVLTPKFTPFLEETVQSHSRDFSRELDGTKIAAVNCRLYQRTEDTVKILTSYSVRLSPDCNMSGVFLDTVGKYRRVVDWFIAVIDAEWNAYVDCTNNQMAVNVTERLCVRSVRNPSPRYDFSVDFYKFPCYLRRAAIAEAFGLVSSYRSNLNNWQRLSSCDRKKRPSPPKAGYVCPAMYRDNCFVRTGTYSARIKVWIRNTWDWIDVKLRKTDVDYILRRCSTRKECVPVLRRRGKVWSLDFTFEEKISLSEQNDIENTRILSVDLGINNACTCSVMQSDGAVVGRRFLRLPAEYDRLKHALDKIKRAQRVGARRMPKLWARARGVNDGIAVKTAQFIVDVAMEYSVDVIVMEALELQGRKCGSKRQRLHHWRAQYVQSVVGNKAHRAGIRISRVCAWNTSRLAFDGSGKVLRGRELAEIIRSEHQANDSPLQSCKRAHKAKVSYSICRFTTGKIYNCDLNASYNIGARYFIREILRSQSAKTRSALEAKVPSVSHRSTCTLSDLKDLRAALVA

SEQ ID NO: 25702 - protein, 380 aa, unknown
  TnpB Polypeptide
MLRAIKYELRPNATQRSLINRTCGCCRFVYNRALAFAKENRVSNYDLVKRLPGLKSEFDWLKEVPSQALQQAVIDLGKAFKNKWNGHNDWPVFHKKGRKDSYRIPAGCEIDYTHYKVKLAKLGWVKFYKDKPIDQAKIHSYTVSRSSTGRYYISLLYEAPDRLPLANGKSVGIDVGVKEFAVCSDGVVFENQKHYRRQMRRLRVLQRTMARRYDKGRDIYDANGRKIGENGPQSRNWYKAKAAVAKCHEKIRNQRNDYLNKVSSLIASQYSIVCVEDLNVKGMVKNRHLSKAISDCGWTAFKTMLKYKCDTLIEVDRFFASSQTCHCCGYKNVRVKNLSVRDWVCPECGTHHDRDENAAQNILREGLSRYSISASVEALG

SEQ ID NO: 25703 - protein, 375 aa, unknown
  TnpB Polypeptide
MISNKYKLCHSKKLIALEHMMSEAAFVWNHALALQKRYYSLAKTFGWEVKYISCKRIQHHFKMHVARTRLGAQTVQEILQRQDNAFHLFFNHTNKRPPKFRKAKDFTSFVFKQDGYKLYGNEFIINKISKRFKFFKSRDWEGKVKIVRVFRSHGDWFILVVTDAKPKPCGKSHTGASAGIDFGLKTFMTFSDGREIEAPQFYKKLLRKVQKWQRLLSKSEKGSAHYWAYRRQLNHVYAELANKRTDWFYKTAHMLCREYDYLFIEDLGISGMAKMKHWGRKVNDLGWTGFVKVLGYIASKYGTTVHKIDRWYPSSKLCDCGYKNTGLQLSDRDWTCPVCGQHHLRDAHAAMNIYRRGVAELESICKTCTSVATAG

SEQ ID NO: 25704 - protein, 388 aa, unknown
  TnpB Polypeptide
VLRAYKYRIYPTKQQIELINKHIGACRFVYNLALETKQMAYIGNRVNLSCFDLMRQLPDLKKECIWLKEINSQSLQQSVIHLDEAFTKFFRKQGNFPKFKKKSSRGSFNVPQYVTVDFGEGKLHIGKFGKKGIDVILDRIFSGVIRQATISKTPTNKYFASILVDTGEKIPEKPKIKEENTIGIDLGINSFLVSSNGLKFDNPRFFKESMSKLKYIQRKYSKHKGKRIKHRLSILHEKVANQRKDFLHKISTQMIKSHDSLAIEDLNINGMLKNHYLAQSISDVGWGMFVSMLKYKAEWYGKNILEIGRFEPSSKTCSVCGKINENLTLKDREWICEKCGSILDRDINAAFNIKNFALKKIISVERRFKNQDELPTLVGVMTPEAHLE

SEQ ID NO: 25705 - protein, 413 aa, Prevotellaceae sp.
MRLVYKFYIRHTEELDRLFRISNSLYNQALYLFRQQLDADGTWIWYNDMDKLMKKTLNLEGQCNYRLLKSQCSQQVLRVLDKNIKAYCKSIKDWKKHPEKYKGAPKMPNYRKRGGMFNMYYTNYACSIKDGRIRLAKDLFVSVPQWEKYGGNLKSVHQVRLIPNSRNIKVEIVYEKEIEQADVDKAKYASIDLGLDNLATMVTSEGCTIYSGKYLKSYNNRFNKTLSHLQSIKDLQGIKRTTRRITRMYDKRDRYFEDAFQKVSRQIVDTLVRNRIGTLVVGYNAGWKQNSDMGKKNNQKFVQMPFARLADYLRYKCEMIGIKFIVHEESYTSKCDALALEPIGKHETYLGRRVKRGLFHSSTGKMINADQNGALNILRKVVGDSEFSRIVGSGHSLCPIRYRNPFQTVAGSM

SEQ ID NO: 25706 - protein, 314 aa, Salmonella sp.
VPLQQALRHQQAGLSNFFAGRARYPTFKSKRHKQAATLTDAAFKYRDGRLYMAKSKAPLDVRWSRPLPSVPSTVTVSKDAAGRYFVSCLCESEPASLPLTSSMVGIDVGLKDVFVTDSGFRSGNPRHTAKYAARLALLQRRLSKKAKGSKNRARARLKVARLHAKIADCRMDALHKATRKLINENQVVCVESLKVKNMLRNPSLSKAIADAGWSEFVRQLRYKGEWAGRSVVAIEQFFPSSKRCSRCGFTMKKMPLDVRKWHCPECGADHDRDINAARNIKAAGLAVLACGEPVIPEPLNAAQVRLRETRILAL

SEQ ID NO: 25707 - protein, 419 aa, unknown
  TnpB Polypeptide
MLKTYSLKHDKREEVEGLLRAYNEILNAIIEDIWSNIRWKQVKIRGKNQFRLLPIYRKDNQFKKCLRDKNLKGWIYAAHWVDSALKTAFSIMDSWKKNYVKGDRKRVCPKARRLFIRVKQTLCKLEGDNLRVTTAPKSFVYFDLSKRYFKIPREISSSGIGEPIITLNRIYLPIHAPDKRPEPAIGKIAWDSNMLSLDGYSPKIGWVKIDTKALATVHISSFEKRRSVQREAKSKKAKRVLNKYSRREMNKARKHQLEIARVINSLAEVNGFERLRKERMYRRSRVWNRRVMRTDWRAIMRRVDGSTELPPQHTSKGCSRCGCINRDLNGCMFRCGSCGLTIDRQLNAAINLYLRMEGVPHQMKWWDKHILPSLVGGYFLTGAELKAPYELVRGLYEAVKPKLLYAYDRHADAYLPVPT

SEQ ID NO: 25708 - protein, 226 aa, Euryarchaeota sp.
MASSRPAPWQGPWRSLLDGVRQVQANHFRRRRRLARQKAHNRRVRGILLDREGRRERNRVRQRLYRVSKGLVRFAKARGAAIVLENLMLHGAGGRSRRMNRRLSSWPRGEIHGQIEYKAALEGVPVIQVNPRYTSKTCPACGARRRDRVGRDFVCLLCDWEMDRQINAGMNILKTALASNEALARAVRFQPGALRDDVMSPLYDLLRGEGGAREEPSGVESLAGAA

SEQ ID NO: 25709 - protein, 421 aa, Desulfurococcaceae sp.
VRMYSVPIRDERVEELVTWHTRMLQKAVDIIWENLTWEYRFPELPKRRGKISVKVGCKVKVPRIPVDRKFKKMLRNILLAECSYAKHWVDAVIRTAYSIIKSWRKRYLKGEARKVKPRIKKRFARCKITLMKVDYESRSVRITLKPSEYLEVSWKGKWFSRRVEGWMVGEMILKDDRVLIPFKKTELYSIERVVAWDSNELSLDGYSPETGFIRVDLRYLQSLKITYEKKKATVQSIGKRELFEKYAKRERNREMDFINKLVNQITTLLSNTIHVVENLEKEEMVARGRTNKERRKRNARTPWETIHRKLSEKALVVKVSPHNTSRACPRCGYVVKTRVGRVFKCPRCGLEMGRQKLASINIYLKYTRMWGFPHSNEPELDEGELWVGVTLNGWRPMTWAPMKGAPRSMKPRVDNKQHQPT

SEQ ID NO: 25710 - protein, 397 aa, unknown
  TnpB Polypeptide
MDHWTEVAAIPKELERKTYVESMIHRTKDNPVVPYGFDDRFYKFPSYLRRSAIANAIGKVSSYKSSLAAWESSDTKNRGLTPGLPKAGFSFPCMYRKVMYEQTGDYTAQIKVWIHNTWDWLAVSIRKSDVDYEQHHCQYRKECAPVLMKRGKQWSLDFAYEESVDLNETDIHEQVIVAVDLGINSACTCSVMRADGTVVGRRFLKLPAEYDSLQHKIDHIKRAQHHGSRRVPNLWAYADGVNKDIAVKTAQFIADTAVLYNADTVVFEHLDLDGRKRGSKKQRLALWRANAVQSMTADKAHRLGIRISRICAWGTSRLAFDGSGRVLRGKESEKTAGNYSVCEFRNGKIYNCDLNASYNIGGTIFYKRIVKDCSGDGTAGHPGKSSRVFEEKYLHTV

SEQ ID NO: 25711 - protein, 379 aa, unknown
  TnpB Polypeptide
MDIKRAYKFRFYPTPEQVTILAQTFGCARFVYNRMLRVRTDAWYQRQESIGYHQTSALLTKLKQEPEYAWLRGVSSVPVQQSLQHLQTSFNNFFAKRTKYPSFKSKHDKQSATYVASAFKWDKRTLTLAKMKEPLAIRFSRAIPDNARVTTVTVSKDKAKRYFISMLCDDSVELLPQVTGRIGIDLGLTHFAILSTGEKIAAPNILRKNEKNLTKLQRRLAKKKKGSNRRAKARLKVAKLHAKIADTRRDFLHKLSTRLIRENQTIAVESLAVKNMQKNHCLAKSISDAGWSEFVRQLEYKSLWYGRTLVGIDKWYPSSKRCSDCGFIMSNLPLSVRQWTCPECGTIHDRDINAAKNILAVGMAVSAQGESVSPVQAYA

SEQ ID NO: 25712 - protein, 430 aa, unknown
  TnpB Polypeptide
MRHVERHWIKENHELYSICDELTFKAKNLYNAGLYQIRQSFFERERSDNKEHHAISSWVNIESNFRKERQDDMLALPSKVSSAVLKSLGNIMSSYYQLLKRFYDKSNTSVTRKPSLPRYLHKVDGRYVVEFNNQTISKKRGEYGEIILCPKDLNLMIPTKVDKPKCVRIVPKLRAFIIEVIYEVEETPLKHTNNYAAIDLGINNLASVTFSNGINPLLVNGQKIKSINQGYNRLIAKAQSRLPKKQRTSKHIHRLWRNREMKLQSELHRITSFLSQYFDEMCIEKVFVGKNTGWKNNVSLGKKTNQKFVQIPFNTFISQLRYKCLIRGIEVIEQEESYTSKASFVDGDEIPVYGKIDYEPQFSGKRIQRGLYKTKDGFRLNADINGSYNILVKGLHSLGKNIDRRNVSYHTRTFKSSNHKSIEDLILDYM

SEQ ID NO: 25713 - protein, 410 aa, unknown
  TnpB Polypeptide
  misc_feature (19)..(19): Xaa can be any naturally occurring amino acid
MKEQMAYKFRIYPDEPQAXLFRKTVGCCRFVYNLFLEQKKLERHRSNPRRLSQVDQIKQLPQAKRDFPFLAEVPNHCLQQVVVDLHKAYANFFAKRAAFPKPRRKFENESFRFPDPKQIKVRSGEVFLPKAGWMKMIDHREIIGTVKNVTVSISGDHWYVAIQVEREVDEPAVREGLELGGDLGIVHALALSDGTVYDVPRMTEKEKRKEENLQRIISRRKKGSRNRTRAQRDLRRFKARMVRRRRDAKHKMTTDVVRRCAVLHLEDLKVKNLTASARGTVDEPGSNVAQKAGLNRSFADVSPGETRIQIVYKMRRSGGSINFHNPAYSSQRCAECGHIDAANRPDRDTFQCVNCGHAACPDINAGQNLLYMGVKARTGGPPGLACESNRVAGRKQEEDGSSQAATKVAA

SEQ ID NO: 25714 - protein, 492 aa, unknown
  TnpB Polypeptide
MGAISVKKNVRQHSCEIDNIEELKEIAIRYAKVKDYVFSRYSGINSLPILNKYKSEIRDKWTDKAAKKFNEANPNCPQKVGFAKQWKLPSRYWKLALDEAISNIKTEWSNIKNRVKEAVMKNENLTQDEKAFMCYILKTESIFNSIILRKGYVRPKSVAKLEIREKYVHNLIRRYVRKYKGAIPFSKKKRSFEIDANLYEYKLTDKGLFIEISGLTPRKRISIKLRDNKIHKGNLRVVVVDDSRVEINRCKDVKVNVRYDADTETILAIDKGYTSLFATNTDKEYGVNLGTMLTTETERLFEYNKKRTAIWQLIDKYEKAQNFEKAERIRRNNFGRIKYNRLKNKFDERTKSYINHSIYEMLDKENPSIIVLESLTFQSWHKKLTKGVKRKLSRWTKGYIQERLEYIASTRGIKVVNINPAYTSQICYKCGSFGKRDGKKFECQNCGVIDADINAAHNIEHRYLDSEITLYTPYVKVKEILLKRQNQKQLVI

SEQ ID NO: 25715 - protein, 438 aa, unknown
  TnpB Polypeptide
LIDQRKNLERRQRFVKLENAVQMSRSNEKSLLTYEQLSLSISLSVPVSPTSASFRELPLIRTLHFKLMHSKKNRKLHCEIEQFCRVYNHFIAVIERYYRLFKKHPSANRLKMLLPKLKRTRRFGWMKLLPSQALQDVVERIDRAYKRFFERRKEGKKAGRPYFKQSANYKSFTLKQAGWELVGEHSLRIGDFVFKFHKSREIPAEKVKTVTVKRDKLGDIYVFFVVKSTEFVPKRCATGKSVGIDFGFDQFLTLSDGTSVDAPMFFKRDLLHIKQLSRSMSRRVHDSKSWNATRLDLNRAYRTIQHKRDDWHWRLAHELCQKYDLICFETLNFKFFQRKHGKKVQDFGFVNFVKKLKYLAKRYGTQVVFVDRFFPSSQLCNDCGYQNPELKDLKIREWVCPACGKHHERDFNASKNIHDEGGRVLAGATEFKNFEIIS

SEQ ID NO: 25716 - protein, 379 aa, unknown
  TnpB Polypeptide
MNLTLKVKLCTTPEQYSALVRTMEHFNLACDYIAGVAFELKLASKVKIQPTVYRAVREKFGLSSQMAVRAISKAIEAYKLDRTIRPHFKSHGAMVYDQRILSWKALDRVSILTLDGRTLVHVAIYDHFKAKLDNRIRGQADLVLIDDVFYLCAVVDVPDAEPIEVKGVLGVDLGIVNIAVDSDGETHSGTGVEKVRGKTAKLRTELQSCGTKPAKRHLKRLSGYEQRFRRDTNHCISKKLVAKAKDTASAIALEDLNGIRERTTVRRAQRSRRSSWAFDQLRQFIAYKAQLSGVPVVLVDPRNTSRTCPSCGHIDKANRPTRGEFKCVRCGNAGPADRIAAVNIAARARVNAPIVSDGVFSGHFVQPPGTSPHSLEVGS

SEQ ID NO: 25717 - protein, 278 aa, unknown
  TnpB Polypeptide
LGATGFHVIKIGWVGYRKSQDIIGTIKNVTIIRRGDKWDVCIQTEYEDNPPAPTPSEIGIDMGVKYFATLSDGKVFEPLSPFKREREKLAILQKELARQKKGSRNSRKTKRKIARLHRHIADSRRDFLHKTSTQIAQNHSTVYVEDLKVSNMSASAAGTIENPGKKVKQKSSLNRSILDQGWYGFFRMLSNKLERRGGKLIKVDPKNTSRTCPLCGLVSAENRKTQASFACVACGYRANADLVGAINVLRAGRARLACGMSGGVRPLSAGTQRDLLQH

SEQ ID NO: 25718 - protein, 242 aa, Lihuaxuella sp.
LEKRIGVPVVARPYQQAWLSKIVAGKVKQGAAKLYKKKQKWYIALSITWEVESSQGERIMGVDLGLRYLAVVAVGTKSLFFKGNQCAYIRRRFAARRSKLGKAKKLDAIRKSKDKESRWMKDHNHKISRQIVNHALVNGVGVIRMEDLTDIRNRAKSKKEAGRNLHSWAFCQLKEMIKYKAEMVGIRFEEVKVEYTSQTCKCGHREKANRKGLVFKCKKCGYTTHADLNGAINIGKAISGLA

SEQ ID NO: 25719 - protein, 512 aa, Moorella sp.
  misc_feature (397)..(397): Xaa can be any naturally occurring amino acid
  misc_feature (485)..(500): Xaa can be any naturally occurring amino acid
PLTTEMRLFCALIRWAFNRLLEGSTREELKKQGQAIFGLNSRYCDDAILKAQEIINSQQELLSIEIKETETKLARAQKKLHQATKDLARAVDTGEATKIARAKLTVHGRKMRVKKLRDKLAELQAHQEGGTIPKVVFGGRTLWQQVCKGKASREEWRNARQNRLYARGDASKGGNPNLKITYHEGQFTLSAAISHLSTQTGADKLGRPVMRNAPRVTGKLWLPEKHRLKVWELLLSGAPYTVELIRAKDGRYHAHITFTVTQPRTVTNPNRGYLGIDTNPDGVALASAGYTGQPEPWPQGFTVLYPKALHKFQGEFQVTVHPNGFLYIKIPELAYSRGYRRTYLIGVLAKVVVDIAKTLSKPIAIENLDFGQDRLDTNKKFNRMAANFPFKKITEAXIGYYKYMERYGITIHHAAAYAIARRAIGFKEKITKELKQKVLALKAKLNQKANSLPGEGKGMTRKAKRLVLRLDEKVPVYNGLTRFKXXXXXXXXXXXXXXXXDGQRKMGTLCSP

SEQ ID NO: 25720 - protein, 409 aa, Nostoc sp.
LRGARDNTRHRLNQLDGQNEQYQALDEAIRTARFVRNACLRYWMDNKGIGRYDLSKFCAVLAANTEFPWVSKLNSMARQASAERAWSAIARFFDNCKKSKPGKKGFPKFKKEQTHSSVEYKTCGWRLDDDRRYITFTDGFKAGTFKLWGTRDLHFYQLKQFKRVRVVRRADGYYAQFCIDQKRIEKREPTGKTIGIDVGITLFYTDSNGETVANPRHLRKSEKSLKRLQRRLSKTKKSSNNRVKFRNKLARLHLKVSRQRKDFAVKTARCVVKSNDLVVYEDLQVRNMVKNHHLAKSISDVSWSLFREWVEYFGKVFGVVTVAVPPHYTSQNCSYCGQVVKKTLSTRTHICPHCGHTQDRDWNAARNILEKGLSTAGHVGTNASGDIDLCMGGETPPSKSSRGKRKPKE

SEQ ID NO: 25721 - protein, 418 aa, unknown
  TnpB Polypeptide
MVDLVTTRTITASLTNDREGVVRDLDSLSRSGSKIWNVARWTSSRIWDHTGKIPDEGPLKSYMKNQACWKDLNSQSSQAIVEELAGAFQSWFDQDDPDANPPGYRKDGDERLRSTVTFKEDGFKLDTKHQQVRLSKGTNLKDGWSDFILCEYDTGPDDNLTDVEAVQQVRAVWNGEQWKLHFVCKVAIDADDQSGEKTAGVDLGICNTAAVSVGDETLLYPGNALKEDAHYFRRKEYDTEGENGPSIRAEWVRQKKSRRQDHFLHAVSKDIVEQCATRGVGTIAVGHPKNIRSDEDWGRHGNKRLHDWAFETLLSHIEYKAEERGIEVERVDEYELATSITCCECGMKADSNRIERGLYVCDDCELVANSDLNAAENMRATVTPNPEVDRSNGCLAQPSVRLFDKSTGRVAPQEQVRP

SEQ ID NO: 25722 - protein, 299 aa, Moorea sp.
MAKTKNKMGVQQILLHPDKETKAILTYLCEQSGKLYNMAVYFARQTFFKTGKILTGKFDLIYEESVGKTQIAKSLPSTPAQQTLLSVTEAFKSYKKLKESWFKGKLEDKPRPPKYLKGSKLFKVAYPNSGGQKPKRINNQVHFSLGLTVRRWFGVKSFFLTFPSNLEGIKIKEWTILPKNGAFYLEVSYEIPAQEPLPSEENEALSIDLGTSDNLAACIDTLGNSFLIDSRAMKAFNQYWNKQVSTRKEGKPQKYWDSWLDRVTRQRNHRIRDGINKAAQIIIKHCLRNGIKTIVLGWV

SEQ ID NO: 25723 - protein, 382 aa, Escherichia sp.
MRRFAGVCRFVFNRALALQNENHEAGNKYIPYGKMASWLVEWKNATETQWLKDSPSQPLQQSLKDLERAYKNFFQNRAAFPRFKKRGQNDAFRYPQGVKLDQENSRIFLPKLGWMRYRNSRQVTGVVKNVTVSQSCGKWYISIQTESEVSTPVHPSASMVGLDAGVAKLATLSDGTVFEPVNSFQKNQKKLARLQRQLSRRVKFSNNWQKQKRKIQRLHSRIANIRRDYLHKVTTTVSKNHAMIVIEDLKVSNMSKSAAGTLSQPGRNVRAKSGLNRSILDQGWYEMRRQLEYKQLWSGGQLLAVPPAYTSQRCACCGHTAKENRLSQSQFRCQVCGYTANADVNGARNILAAGHAVLACGEMVQSGRSLKQEPTEMIQATA

SEQ ID NO: 25724 - protein, 408 aa, unknown
  TnpB Polypeptide
MKKTLRYNYRLNPTPEQEAKLIEFCATARGIWNLLLSENMRRYEYDKTFLFYKEMASLLKELKPFEEFAWIKSFDSAAAQQVARDLETAVKNAFSKVRLQRFPKHKVSYKNKKLHNDSFRAVNNANCIRIENGAISIPKVGKVPIVLHRELVSKIKTVTVQYRHGKWECSITQEVECKTAKQVLEKITGFDINSKQTVVGSNGFVADNPKFLKQSKEKLNQLQRQLARRTKGSNRWHKTKQRINKLHGKISRQRLDFAHKISRQIINETDIACFEDLNVKAMQKFNGSMVADNVMGLITQLSKYKAELEGKLYHEIGRFEKSTGICSECGQRHVLTLNDRRFTCTACGAYQSRDLAAAKSIASTGELDIIAAGIVARVTPASQQKQSVKTKVFELSKLDFGSEKKEAA

SEQ ID NO: 25725 - protein, 387 aa, unknown
  TnpB Polypeptide
MKTLKAYKFRLLPRKDQESQLWRTFGCVRFYYNQALSDARKSFENTGKTEIKTPASYKTEETSWLKEVDSVALCFAQIALRNAFVNFFKNPKHFKAPKFKSKKAVRKSYTTTGPSVKLKGNFIYLPKVGNVRLVLHRSLPVTAKIKHVTVSADPAGRYFVSITFEYDNQVPEVKQINNALGLDFSCVSLYVTSEGNSLDFPGFIAKSSAKLARAQRKLSHMKRGSNNYCKQRLRIARVYSKISNQRKDWLHKETYRLAENYDAVCLETLDLQEMASRYGNAVGDEGAGMFTRFLVYKMGERGKSAVFADKYFPSSQLCSNCGTRNVKVKDLSVRSWECDSCGASHDRDVNAARNILAEGLRLLEKEGVLVNVTNRGTHGGSSLILTA

SEQ ID NO: 25726 - protein, 474 aa, Blastocatellia sp.
MLVTQAFRFELDPNGRVRAALAKHVGAARFAYNWGLARCLEAIKRREPIPSALRLHKAWNVWKRENAPWWVEVSKCAPQEALRDLERAFRNWRQGRAGRPRFKRKKGLDDNAARLTGAIRMFPRHVQLPRIGKVRTKERTDRLLELLQAKRARILSATISREADRWFVSLTCEVERPDPAARVLQDDDVVGVDLGLVSFLVLSDGTRIEAPKPMAKGMRLLKRRSRRLSRKQEGSKNHRKATLCLARLHRRIRNIRRDFLHKVTTVLAKTKSVIVVEDLSVKALARGRLSRSVADVGWGMFRRMLKYKSSWYGVRLVIAPRDFPSTRSCSRCGVLGPKLSLSRRVFRCEACGLEMDRDWNAAMNLRNYGLAVLNSPTGSSPGSHACGDPSGGGTGRSPVYESWVGEAGSGRSLVSPGRVKSMMMRHRTVITFGGVCEVGPASRSVGNSHIAATCDRASCARSSRRRPFGLDVPP

SEQ ID NO: 25727 - protein, 448 aa, unknown
  TnpB Polypeptide
MLRQKYTTVTQLHKINNKDIIEYFENASVYFCKLQRKAFHIFKNENIKGNKVEYSKFRQVFMKEHNISKRTADSILKDVQGKVKALTELKKYEVSQKEQKIKKIKEEIEKLDIKILEFQEKMKNKIKVNHFNYWNLKKSRAFKKMKLNKLQMRLEQLKWEIETGHYKLCFGTKKLLNSDKEKFILQRDSQMGYIGCQEEKGRNSVFQLSYNSINNQFLIKLRKDFGFDTEEKYVFGKCYFNNHKNKLIYALENKNSTPLTYSISRKNRRYYLHCTFEYRIESKDLFSTRKDYGTIGVDFNKGFLTVSEIDRNGNLAKTDTLNYRFGKGNKTQSDLENCISKILRKALEVGKDVCLEDLNFNNTKAKTVKGKTDKGKKYNDMLHSLAYSLYNKLITNIAFRNKIGIIKVNPAWTSWIAKNKFCERMKLNIHTGASFVIARRGLGIRDII

SEQ ID NO: 25728 - protein, 268 aa, unknown
  TnpB Polypeptide
MYKEAENGEDVAHLKLFDGRDWKWFPVKLLHTDMEYLRKKWSGEKASAPTLEKKHHKYFLRFSYTEETILSKTVVKEQVVCSVDLGMNTDAVCSIMCADGTILGRKFINFSSDKDQLYHVLGRIRRFQREHCSRQVQSRWAYAKRLNMELSRKIAVEITKYARENQANVIVFEYLEMQGKISGKKKQKLHLWRKQDIQKLCEHQAHRCGIHISRVSARNTSRLAYDGSGKVDRSTGNHSLCRFTTGKCYHCDLSASYISVPDILSGNY

SEQ ID NO: 25729 - protein, 387 aa, Deinococcus sp.
VTQIQTTTHLKTFRYRLRPTKAQEVALLEQLRLCRGLYNAALQERRDAYRKAGKTVTGYDQMKYLTEIKAALPEYAGIYSQVLQDVLKRLEKAFKAFFRRVKAGQTPGYPRFKGAGWYDSICYPQSGFSVSDKTAFFSKIGNIRIRLHRPLEGKLKTATIRRECGEWYVSYVCEVEAAPLPATSSQVGVDVGTTWFCITSDGEFVENPRHFQRGMKRLRVAQRTLSRRKRGSNRRKKAKAAVAKLHRKVARQRLDFHHKTAAKLIRENDLVAHEALNVLGMGKGNLARSIHDVGWGQFFSLLSLKAASAGRTVIAVDPRYTSQTCHECGHACRENRIGQAKFRCVNCGHTANADHNAAKNILARALPSVQNVEVMRGLRSPGLQSGE

SEQ ID NO: 25730 - protein, 382 aa, unknown
  TnpB Polypeptide
MTEQVLTVQCKLSPTDSQAEEIGDTLEAFADACNWINQNTPTKLRNKVRIQGIVYQDVRVKFGLSANLAIRAINRVASNRKTAMKGRSSVKIFEPTSIDYDARIFAFREKEEEVSVTLLRSRQRIKLDLGDYQRGRLKGSKPTSATLCKKESKYYINIQVKSEAPEEIHVDTVLGVDLGITDIAVTSEGQKFGGKTIKLIKDHYASMRAVLQQKAVKGTRSSRRRCRELQQRLSGKEARYQRQINHEISKAIVTRAQEIPAKIALEDLTGIRDYINQTAGKNQRRRVNGWAFYQLKEFLTYKALAVGIPLVLVDPAYTSKTCHVCGNPGVRNGKSFKCPACGWAGDADFNGAKNIAFLGRYVDRPGGSDWLPSIKASPFQGY

SEQ ID NO: 25731 - protein, 135 aa, Clostridioides sp.
VRLQEHIANQRNNFLQKLSTKLIKENDIICIEDLQVKNMIKNRKLSRLISDVSWSEFIRQLKYKANWYGRKIVKVGKFFASSQICNKCGYKNEEVKNLNIREWICPSCNETHDRDINASINILKEGLRLITIQNK

SEQ ID NO: 25732 - protein, 366 aa, unknown
  TnpB Polypeptide
MNKAFKFRIYPNESQKTLIHMTLGHNRFLWNKMLEDKQKHFELTKKILHPTPAQYKDAYPFLKDIDSLSLANTQLNQEKAFKQFFNHKQDFPKFHSKKQDYGYTTNRVNNNIVLLKGYIKLPKLGEVKIKQHRSIPSDMTLKNVTVSKSSTGKYYVSILYEYQKEIKKKDVKESIGLDFSMTHFYVDHEGFKLDYPKDIQTDFNKLKVLQRSLSRRIQGSSNYHKKVLEIALLHERIRHKRDDFLHKQSNVIAKRYDLVSVEGLNLIDMSQTSPYYAKQISRFGWTRFISFLKYKLEIQGKTLMVMDEWYPSSKTCSTCGEIHSELKLNNRVFECKQCELHLDRDHNAAININKEGFRKYKLAFQL

SEQ ID NO: 25733 - protein, 458 aa, unknown
  TnpB Polypeptide
VSYSDTGTWNDTVWKGGNARVAVVQSIHGKPIPWPQAETRRSSSAYFPLDPKLWRLQGRPRERRNGSGICRGAQGSVRKTYEYRLRPTPAQERRLVATLDACRFVYNWGIEDRRNLWNYCRVSANFYDQSDYLKSLKSANPWLQEVHAHPLQEALRRVERSFDGFFLRVKKGEKPGYPRFKGKGWYDSFTFKEWENGASLDGKRLFLSKIGRVRIHLHRPLEGEIKTCTVKRKVDGWYALFSALLPDPKPSGITNPVGIDVGLESFATLSTGEKIENPRPLRKNERELRIAQRRVSRRRKGSNRRRKAVRHLRLAHLRVQRSRRSFHFTQAHRLVKRFNPIFVEALKIRGMVRNHSLAKSISDASWGQFLGILSHSAESAGGASIAVEARGSSQECAVCGVEVRKSLGERVHRCWNCGSLEDRDVNAARVILRRGLGRPVGEGACRKALPMIREAARL

SEQ ID NO: 25734 - protein, 382 aa, unknown
  TnpB Polypeptide
MLKAHKIRLNPTAEQCAYFMRAAGIARFVYNWALNDYKATKERGEKMDWTALKTRFNKIKKQDFPFVAEVTKCASEQALADLRQSINTYYKIKKETPKSKTRFPGFRSRSKKIGGFGLNNDKFSVASHTARIPRLGDVNMAEPLRFSGKIMTGRIKEKAGNWYLTIVVEMNSQPVASPSRSVGIDFGLSRFATLSTGEVRETQAYFRRSERKLKLLSRGLARKKKGSCNRERWKLRVTRLHERISNQRSDFLHKFTSETVSDFAWICIEDLNLKGLCQTRLAKSFGDAGIGEAVRQLNYKTEWAGTTLQKVGRFFPSSKLCHVCGWKNEILKLSDRVWTCAQCGTLHDRDFNASLNIELEGMRLLAGDGYLGVTPAELAASG

SEQ ID NO: 25735 - protein, 373 aa, unknown
  TnpB Polypeptide
VKITIKRGLKYRIYPNKEQRILINKTLGCGRFVYNHFLRIRMDEWKYNHKSIFYKDTTTMLKDLKKYPEYSWLKEVDSTALQQSLRDLQKAYDNFFAKRAKFPRFKSKHNHTQSYRSQLTNDNIRVVGNQIQLPKIGRVKTKFSREVVGKISNATVTRTASGKYFVSLCIEYETDLQPSAGGQVGIDVGIKSFYSDSNGNVVENPKFLAKYTKKLIREQRKLSRKKKGSGQWDKQRVRVARVYEKISNTRNDFQHKLSYSLASENSFVAVEKLNIKGMVKNKKLAKAISDAAWGMFFTKLDYKTKERGGELIKIPTFYPSSQTCHVCGFQNPIVKDLSVRDWVCPQCGESLDRDKNAAINILKKALSMKMEVA

SEQ ID NO: 25736 - protein, 394 aa, unknown
  TnpB Polypeptide
MDVVKTYKFKLYNSHRNKKLYTQIDAAGLTYNHCVALHKRYYRLYHKHLNQARLQKHLAKLKKLSKFSYLTDYGSQAVQNVAERIEFGYKKFFAKQNKRPPKFRKVWKTKSFLLKQAGWKLDEKNHAIIINGQKYRYHKSREIEGTIKTITVKRDKVGDIYIFITCRVEVNQVIPRLGKSIGFDFGFKKYILVAPTPEDDVDMPMFFQQNRQKLKAVKRSVSRKLLANTDHYVKKGKGLAPVYKRPLNECKNLQKAFKEQARMYRRITNKREDYHWRLAYELCGKYAIICLESLNMRWMSKKHGKKVGDYGFSNFKRILKYVAFRCGTTIVEIDKWYPSSQLCHDCGFQNKAIKDLRIREWDCPQCGHHLDRDRNAARNILKEGLRQFEAEAAS

SEQ ID NO: 25737 - protein, 370 aa, Enterobacter sp.
MKRAYKFRFYPTAEHVELLARTFGCVRFVYNSILRWRTDAYAERQEKNGYTQASARLTALKKEPEFSWLNDVSSVPLQQSLRHQQTAFKNYFEGRTAYPTFKSKRCKQAAEFTARAFKYRNGQLFVAKSKTPLNVRWSRKLPSVPSTITISRDAAGRYFVSCLCDFEPALLPISLKVVGIDVGLKDLFVTDSGFTCANPRYTTKYAARLALLQRRLSRKMRGSKNRAKARLKVARLYAKMADCRLDVLHKATRKIINENQVVCVESLKVKNMIRNPVLSKAIADACWNELVRQLKYKGEWAGRSVVSIDPFFPSSKRCSECGFTMQKMSLDVRKWSCPECGVDHDRDINAARNIKAAGLAVLACGVTVNP

SEQ ID NO: 25738 - protein, 469 aa, Chromatiaceae sp.
VASKSVQTLAKIARRLAIASPSKTLRRYFATKTKLTCIAKTQCRPCRMSLSLLIDQYTMDMQRLQAFKFELMPDGDQARDMRRFAGSCRFVFNRALAIQQALHEQGAKKLGYPALCKCLTEWRNSPETAWLAEAPVHPLQQTLKDLERAYTNFFAKRADFPRFKKKGRSRDSFRYPDPKQIKLDQANGRLFLPKLGWLRYRNSRDVLGTVKNITVSQSGGKWFASIQTEREAEIPVHQGTAVGIDLGIVRFATLSDGAVFEPLSSFKRQEQALAKAQRAMSRKTKFGKNWKKAKAQVQRIHTKIANARRDYLHKTTTTISQNHAMVCIEDLKVRNMSASAAGTIEAPGTNVRAKSGLNKAILDQGWFEFRRQLDYKTAWSGGHLVAVPPQNTSRTCPCCGHLAKENRQTQARFACVECGFEENADLVGAINVLRAGHARLACGETSLIGASAQEPAEATIREQALRVAP

SEQ ID NO: 25739 - protein, 601 aa, Rhodococcus sp.
MTGPGTTAPRQFAFTTRPYGAVDDATGEPIGLDDVDTRVGWLLDLITAAGAELVSRLWLPATFDVLAAGRDRHDRRLPVQGHAAAARLGWNPIFPDGVYVPSRVTRVVTAQVMATLRTLAYRDAAITALSARFDPATGVVAPPVGSADDVPSGFARGVQRQLVARSRRGGGAPAGRLRITEVQGPPQTSAMARLSAADRQLAQLAVTGDELVLTVKLPTCPTPAGRAQWRRVRLTAAVPAHLHGRAVSDWHLPTLVLDRRGLLWRCAATELVPEADLMDGAAAVGVDWSPSTLGAAAIAAEGPDGLSSDYLGWTYDDRGLGIQLARLQAEGQMLHRKAARLTRLAATAPPEVRARLETKIAVLNDHRTAVGVKRGKINRELAFHFARQVTDYAEAAGAQVIAVEDLTTLETRGHGRVNNNRAAQSARRQAVAALAHTATGVGVTVVSVPARGSSALCPGCDEPLARPGGYHDAWCPRCRVGGNRDHMAGVNLAKRALLGRNKATRRRGQLSAVRVAEHAPVRRCRDKHGPTPSRPRHRRVRRSLPTTTRRLGVNSKQHVPASQASVWDTVKPIPPHGDAGSRDTRTSLSPATSVADSMKST

SEQ ID NO: 25740 - protein, 323 aa, unknown
  TnpB Polypeptide
MSKVNLPGYMKKGNRRELWAVLRKDQYRVEGDRIILKGLGAIGWIELRYKGLIHLRGEQGRLEIHYDKARRRWYAHIAFEASEKAVRGEWTPTPAKPKGDMTAGIDIGVNNLIAVYVENGLAKLVNGRPLKAISHYWRAKISGYQSTLNKCGSKTSKKLKAMYSRWRSQVKSYVDSEVRQTIEWLHKAGVSVVKVGYPKYIAQENGNFNNTHVWTYRYLLKRIKEVAEEYGMTTVYVGEEYSSTTCPVHRDGRCVKRVKRGLLKCTRLNKVFNSDLVGAYNILATPITPSPPRGRGNGPKTRPGATSPVAPNLPALTGGTLAP

SEQ ID NO: 25741 - protein, 367 aa, Escherichia sp.
MRRFAGACRFVFNRALALQNENHEAGNKYIPYGKMASWLVEWKNATETQWLKDSPSQPLQQSLKDLERAYKNFFQNRAAFPRFKKRGQNDVFRYPQGVKLDQENSRIFLPKLGWMRYRNSRQVTGVVKNVTVSQSCGKWYISIQTESEVSTPVHPSASMVGLDAGVAKLATLSDGTVFEPVNSFQKNQKTLARLQRQLSRKVKFSNNWQKQKRKIQRLHSCIANIRRDYLHKVTTTVSKNHAMIVIEDLKVSNMSKSAAGTVSQPGRNVRAKSGLNRSILDQGWYEMRRQLEYKQLWRGGQVLAVPPAYTSQRCACCGHTAKENRLSQSKFRCQVCGYTANADVNGARNILAAGHAVLACGGCQQTG

SEQ ID NO: 25742 - protein, 658 aa, Rhodococcus sp.
VSSSDRKADPECQGGACGDRMRTAWSECAEDGHRDRFRPEAGNTPHFAGRWLIRVCRRSPIEHRDRLAGFRFGFGFWCIGAVVSVHCRTLLVLTDDGVADGLGVRDDRGDDLDVGSPVRAVWCTPPCRSCRDRCGGPGVTPTAVLADPVDQVTAPTRDPAPYRAAGLCRTVIRAFVYVLDPTPEQVSVLRSHCGAQRFAYNWALARVKANLDQRTAERSYEIPDAELTPPVSWSAYGLRKHWNTVKNDVAVNTDTGQVWWPQNSKEAYSSGIANCAAALSNWSDSRSGKRRGAMGFPRFKGKRALLSCRFTTGSFGLVTDGGDRRHIQLPRIGVVRSAESTRKLARKMVAGTARIRSATLSYRRGRWQVSFSVEITLPARALPPTATGTPAAVGDSGGGRSVVGVDVGVKHLAVLSTGEMIENPKHARKQAKQLRRLGRRASRRVGPDRRTGQEASRRWLRTQEQIRAVHTRIAAGRRDHLHKLTTRLVRDFDTVVVEDLNIAGMTRSGGVYKRGLNRALHDAGLAEIRRQLTYKTEWTGTGLHVADRWYPSSKTCSNCQAVKAKLPLKVRVFTCDACGFRADRDHNAALNLAALAAVVDGGASSASCGRDVKEARQKPTIRPAARRADGIATGTPPSGERDRGNPATHAECTKRHSA

SEQ ID NO: 25743 - protein, 371 aa, unknown
  TnpB Polypeptide
MTLTAASASPVLQGGDSEPFEKKMLLTYKFRLKDKHAAELNRQARAVNFVWNYCNETQQKAARAHRKWLTAFDLQKLTNGAAGELNIHAHTIQRVCVEYDKARKTHKKAWLRWRGRKSLGWVPFNTGHVSFDGAAFKFRGVRYSTMHMRDLASGVKIGAGSFNQDARGHWFLNVPVEVECATSAPASSVGIDLGLHTLATLSTGEKIEAPRLYRASEEKLGTAQRARKTPQRVRNIHAKVANRRRDFLHKASAKIAKEFGLIVIGDVSPSKIAKTNMAKSVLDAGWSDFKRFLSYKSIRNGGRTLEVSERFSSQVCSACGAMPPSRPKGIADLGKRAWRCDDCGTDHCRDTNAARNIRRVGLDTLRLGAAP

SEQ ID NO: 25744 - protein, 350 aa, Cupriavidus sp.
MIVVYRYRVKSLNGLLNKQSRAVNYVWNFCNDTQKHALKWGKKWPTGFDLNVLTTGSSKELGIHSGTVNATCEQYAKSRSQHRRPFLRYRGRKSLGWVPLKGRDLKREGQAFRFAGNTFRVFNSRPLPEGKIKDGTNFAQDARGNWFLNIVIEVADVPARPIRTGVGVDLGLKDFATLSTGEKLPNDRFGRCAAEKLAKAQRARKHKRHIAKLHAKVANARADFQHKLALDLVRRFDYIAVGNVSAAKLAKTRMAKSVYDASWSSFRDRLRYKAIAHGATFEEVNESGTTQSCSACGSKDCTTRPRGISGLRIREWTCSRCGVVLDRDTNAALNILRCGRASPAVGISCL

SEQ ID NO: 25745 - protein, 301 aa, Actinobacteria sp.
LGSRGHPVVPHAARAAPRARASCRNSARAAGTEGTLFQYGESDLLERDSMWFLNATCEVPEAPLNSDLVDFLGIDLGIANIATTSDGEIMAGRELNRTRLRERGLRTKLQRKNSPSVKRRLKKRRRKEARRARDINHKIAKHVVAEAERTGRGIALEDLTGIRERVRLRKPQRATHSSWAFAQLGAFIAYKARRGRGWRWCTSIRRTPRAPAPSAGTSTGRTGSPRPGSRAGTADSLITQTGTAPATSVPEHKSCGDAGPGQRPLPHPEHLGVGLDANAASHPVMPVVQARRFSAALAPGS

SEQ ID NO: 25746 - protein, 396 aa, unknown
  TnpB Polypeptide
MIRTYKCRVKLSKSGHETLSQIFGMSAELYNAGLESRIDCYRKTGESRSLYDQYKELVQVRAELPEFEAVSSIVFRGVLSRLDKAYKSFFRRVKAKEKAGFPRFQNRRRWRTQQINQQRWRMLKREGNKLVLKVKGLPRIEVKPSRELPSNSMLKAIRITRKSLRTEVCLSYDLPTPETKPVTNPVGIDMGISKRLTLSDGETVEKREIDRKKIIRLQRSVSRKMKGSNNWRKAVSLLAKEWQRVSDKERDYLHRLTSEIARMYDFIAVEKLKTKDMLRNTNLAKNIQEQTWGKFITLLDEKAESAGGKMVEVDPRGTSQECSSCGATVKKSLSVRVHRCSCGYEADRDVNAAINILHRGLASIAGGNVTRMVGRMREKQADVEPVRPRTVYRCVN

SEQ ID NO: 25747 - protein, 416 aa, unknown
  TnpB Polypeptide
MTELTKTMKLHIRTNRQEAQALTVLTEQYSSACNFVSEYVFSHDFKPMSSVSLSKLLYQTIRAEFGLKSQLTQSAIRTVTARYESVSTQMKQQPYKFKDKYTNKWHKVYRDLTWLQRPVFFSRPQADLVRNRDYSFVKNKKTKETLLSLNTLNGRIKVRFDVPACFEQYFNGEWSFGTGKVVSLHNEWYIHIPMTKKMEDAFSKENVKHVVGIDRGLRYLMTTYDEKGETVFYSGKDVQKKRETSNKIRAELQSKGTKSAKRALKRISGRENRWMSDVNHCLSKTLVDKYGPNTLFVIEDLTDVSFAEQLDNRSSKQKNELRSWSFYQLEQFLTYKAKADSSAVLKVAPEYTSQRCPKCGRIHKENRNHNKHEYVCNCCGYTANDDQVGAMNIQLLGTLWVSGKEKPAFKLADKAE

SEQ ID NO: 25748 - protein, 321 aa, unknown
  TnpB Polypeptide
MLKRRNESSTKHYPEIPSVLAKSLIAKYQRNAKCRKISNLVLPICGDQGRVIKLTPEGVRVHAVFGKAVIPVAFLRPVVGHLRQIEFIRRNGQWFGVICHNTPKAAPVTVDGCVGVDRNSVGNVAVMADPQTGTVRKFGISPAPTKKAMRGRRKNLQKAGKFRLLFKLRRKQRRRMTHENHCASKSVIDYAAKHCRAVAIENLEGVHAPKSKIRRYSEKNQWAFAQLENFIRYKGALRGVPVIVVDPAYTSQTCSRCGSIHKPSGKLFSCGTCGRTAHRDVNASFVIAERGLACIGGGSGGLNVSPLRPIGGSQAGKVGAQ

SEQ ID NO: 25749 - protein, 396 aa, Escherichia sp.
VKRLQAFKFQLRPGDQQECEMRRFAGACRFVFNRALALQNENHEAGNKYIPYGKMASWLVEWKNATETQWLKDSPSQPLQQSLKDLERAYKNFFRKRAAFPRFKKRGQNDAFRYPQGVKLDQENSRIFLPKLGWMRYRNSRQVTGVVKNVTVSQSCGKWYISIQTESEVSTPVHPSASMVGLDAGVAKLATLSDGTVFEPVNSFQKNQKTLARLQRQLSRKVKFSNNWQKQKRKIQRLHSCIANIRRDYLHKVTTTVSKNHAMIVIEDLKVSNMSKSAAGTVSLPGRNVRAKSGLNRSILDQGWYEIRRQLAYKQLWRGGQVLAVPPAYTSQRCVCCGHTAKENRLSQSKFRCQVCGYTANADVNGARNILAAGHAVLACGEMVQSGRPLKQEPTA

SEQ ID NO: 25750 - protein, 203 aa, Bacillus sp.
  misc_feature (118)..(180): Xaa can be any naturally occurring amino acid
VKRKFRSERKTLGKRKKLNAIRNSKDKEQRWMKDQDHKVSRAIIDFAKENKISVIRLEKLANIRQTASTSRKNEKNLHNWSFYRLAKFIEYKANLEGMKVEYVNPAYTSQTCPKCFEXXXXXXXXXXXXXXXXXXXXXXXXXXXXXXXXXXXXXXXXXXXXXXXXXXXXXXXXXXXXXXXHRDLVGAMNIRYAPVIDGNSHSA

SEQ ID NO: 25751 - protein, 279 aa, Bacillus sp.
MLRFAYKFRLNPTDIQATLINKTIGCCRFVCNQALAKQNEKIGFWFVVQEMVQNGQLTENRWKSDFFHASNAQKELTSMLNEVDSTALKSTLQDLGKAFKEFYHKSKGKPRFKSKKNKTQSYKAKCNYNKGIGTVRMKRIEKKDFLLLPNIGWVKVAKSREVRGKILSATVRKSATGKYFVSILTEQEIETVQDSMFEIGIDLGLKEFATFSDGATISNPKWFRSLEEKLVKAQRILSRRKMGSSMERALGCRIKCPVDIERDSLLSANYRSPHQNRCW

SEQ ID NO: 25752 - protein, 397 aa, unknown
  TnpB Polypeptide
VIVCRVYRFRLELAAEQERAFGRLAGARRWVWNWALARRQEHYKATGKSLSRGVLSAELTALKDKSETAWLKDADSQALQQALIDLFRAFDAFFAKRARFPRFKSRKRDVARFRIPQRVTLADGYLTVPKIGRVKVRQSQPVDGATKSATFKRDACGHWFVSLVVEMEMPDVPLPLPAPERAVGVDLGLKDAVVTSDGARVAAPRFYRAAQRHLKRAQRSFSRKALGSANRVKARAKVARVHQKIAARRTDFCHKLTTTLIANHDAVCIEDLNVTGLARTKLGKSMMDASMGTIRRQLEYKGVWYRTHVVAVDQFYPSSKLCYACGHKNDRLTLSDRAWACPSCGSVLDRDLNAARNIREEGLRMLAVGLTDNANVCGAGVRRPMAATGDEARILAL

SEQ ID NO: 25753 - protein, 390 aa, Chloroflexi sp.
VSQTKRAYKYRFSPTDDQKRLLAQTFGCCRFVYNWGLHMRSTAYKGGVKLFYNDLAALLPDLKNQYPWLADVSSVPLQQSLRHLDKGFKNFFERRAKYPTFKKKHHAQSATYAANALKWNGATLTLAKMEAPLNIHWHRPLPKNAQPSSVTITKDCANRYFVSILVEEDMKPLPVVNNMVGLDLGIKSMVALSTGESVGNPRYFAKDEKRLAKAQRRHAKKKKGSKNRNKARLKIARVHARIQDRRRDYQQKLSTRIVHENQVICIESLAVKNMVKNHKLAKAISDVGWSELIRQLEYKSKWYGRTLIKIDRWYPSSKTCHACKHVVDALTLDIREWVCPACGVVHDRDTNAARNILAEGLSASACGGSVRPVRAQARRATPSEAGNAHS

SEQ ID NO: 25754 - protein, 395 aa, unknown
  TnpB Polypeptide
LLNCPKCDSVKSITSFYRVCKNCREVYFKGKECPKCGSENFWFDENRKVCKQCHAFFFVSERVKKVFPSDDVKEILKKADEWRSKAIYEQLKGKVMQSDREFLSQMVERSLLVFRLHSGYLDLRDDKVYFVGRVQIGEDKRVDIEMPTDISLEEYKLYLASDPERKKQIKLTPHNPYNLYVSFLREYKPYKINHVVEVGADVNFYELVAEIRIDGKDSFPIRYPFPKKDIVKLQRRENKYRSMGELEKREHVKRIAMEKTKRTYARFIEEVHKQAREKLKQKTNKGIKYVWRIENPRILRNIHSQWTMQGWRPTLLKNTLREKAKNIYLEIEIVKPQYTSVSCNKCGKIHNREGEILKCECGEVIDWQRNAAKNILNKYTPKRSEVGCLLTSYMR

SEQ ID NO: 25755 - protein, 390 aa, unknown
  TnpB Polypeptide
VREIYKTIIVPLKCNDIDFEYLKELNKVSANVWNYCVKIDKEYKESIGKSMGLSLLESSTKQKFPIHAKGIHHIVFKYYYARAAMWNSRKAKHSNSYKVELPHKEKKYLPTGWDNQAIFPNYKKRIIKLTTTKGRKQVICHVKSMPKNIVEIELVYKDKYYLSIKYKEENNINLIQSDNVASIDLGEIHAIVGIDNNKNAIIITNRKVRSLIRLKDKRQGELKSLQSRCVKYSKKYKKYAKAIWKIKFEFDRKINDAIHKQTKSYIDYCLRNNINKVFYGDLDTTTRGSKGKLNNNINHKLNMWRFGQIMLQLENKLSRYGIKLLKVKEYYTSQKCPCCGEIKKQSNRNYMCDKCGYTQHRDIVGSMNILNDNTEYHVEKYDSKVYLQIC

SEQ ID NO: 25756 - protein, 374 aa, Aulosira sp.
MKTLKFKLYQHKRNKHLKRMINAAGVIYNHCIALHKRYYRMWGKHLNCTKLQSHIAKLRKQNPFWQSVGSQAVQDICQRIEKAYQLFFKHNHKGVRPPGFKKVKKYKSFTLKQAGYKFLNGNKVKIGHRVYQFWKSREIEGTIKTLTIKRTPLGELFMVVVVDNCVESETKSTTGRIAGFDFGLKTFLTCSDGTKIESPQFFKQSLNAIKNASRQHSKKLKGSSNRERARKNLVRKHEDISHRRRDWFWKLAHELTDKFDVLCFETLNLKGMQRLWGRKISDLAFGEFVLILVWIAKKKNKLLVFINQWYPSTKTCSCCGYVLQELDLSIREWRCPSCQSVNARDENASRNICAVGASTVGLGDVSRVMPAIAV

SEQ ID NO: 25757 - protein, 299 aa, Frankia sp.
VRRARLAGRRVEDRTGPCSPVRRGSPDALPVVDRQPVRLQGIGHVKVHQHRRVLGRVKTISVTREGRRWSVILSCDVPAEPLPPTGVAVGVDVGVAAFLTTSAGEHDPNPTCLDRSAGRLGGAQRDLSRGRRGSARRRKAAARVGMISRRVARQRLDHAHKTALGLARDHDLIAVEKLTVTGMTRRAKPRPDPDTPRAFLPNGQAAKSGLNRSIHDAGWGVFLGVLRAKAERAGRVVVEVNARHTSQRCATCDHVTEDNRPTQAEFACVRCGHTADADENAAVTLLRAGRARQADAQAA

SEQ ID NO: 25758 - protein, 393 aa, Sulfolobus sp.
MFKYFFVKISLMARRGNKAIRATVSMKIALSEPLLVLVNNYVKALRFTLYWLKENITNPEEKGVLGKVHEALYEKLREEYNLPSKVAEDCYRDALATYKGWYNNPKKGRFPRVYKPTVWLTPRASYNVDFERMTVRIAGVGELLILGYPRNLKDYLSWKMKEARLVIRNDKAFLKVVFEKEEEKVKPKESIAVDINMAEVVVGNDDEHYVRIPTRLHEVYHWKSLAERLQKKYPRRWRGNKRILYRVRSFHQKARRIMEDFARKVGKWVVEIAEDFGANVIKLENLRDLIKNVDKLPREFRDKLYLMQYRRLQYWISWQARKHGMVIEFVNPSYSSVSCPKCGRKMEEVGYRWFKCSCGYENDRDVIAVVNLNGRGSLTLSSAPQMRDVNPNR

SEQ ID NO: 25759 - protein, 400 aa, unknown
  TnpB Polypeptide
LVKANKTCYNVIINKKRKCKMLLSHKIELYPTSKQSDYLFHCVANRRYMYNVLVAHYRNTSKLTKSIAVELVKEHRAKFEWLQDVSTRVIRNTVDDIDKAIKRGWTPEAKVKRAKALKEAVTPKQKAKAIYHGLPSFAKRGVNESFSIREKEKIKINGRKFRFEKLPKELREIKMRELIRFDGTVKQVTISLRAGKWFASFLIETEDIKKQEPSFENVGVDLGVKELATLSDGKVFPAHKSYAKREKKLRQLNKKLARQVKDSNGWKVTKAKIQKLHYYVSESRKQALHELTSWLSKNYKRIVIEDLAPSNMVKNRRLAKSIIDVGFGIFKEQMVYKCLIYGSELVLADRFFPSSKTCSNCGNVKKELKLSERIYICKECNFKIDRDSNASLNLAKWRPV

SEQ ID NO: 25760 - protein, 401 aa, unknown
  TnpB Polypeptide
MYNKAYKYRIYPTKEQEVLLSKHFGHCRFIYNHFLQVKIDYYKKTKKTINWQDMAIQLPKLKDEYEWLSEIGSQSLQQSILNLDRAYTAFFRSNAGFPKFKSRKYARKSFIVPITNNNIKLKYDTKRLIIPKFREGIKCIFDRKAEGTLKQAIVSQDRDKKYYVSILVEVNKDFPTKPEPMKNKAIGMDFGIKTFLTLNNGTKIENPKMLKQSANKLAKHQQELETLTKGSTAHISKQAQITKLHSKIARQRKDFLDKLSYKLTHDNQAGTICIEDLSIKNMQTDNYKTINNRIADYAWSKFVDMLQYKSDWYGKNFRKIGRFDPSSKMCSQCGYVNHSLTLDDREWKCQQCNTNHDRDVNSAKNIVDFAFPKTEFNKGRNYPIETHTLIKRGNLLALVGE

SEQ ID NO: 25761 - protein, 393 aa, unknown
  TnpB Polypeptide
MQLTKTVILKIQGGDDELGKLLSAFSEGMNYASGIVFENGKPMGSGRIQKATYRYLRNDLNLKSQMCCNVARQVAGAYKTLQDQVLSGQAEWQKLSFNPKSATFSFERDFGFGKDSLSITTLAGRKRYKIQIYKHAERYFDGSWRYSASKLCLHKNGSYFFHLCCEKEIPDKPLTDASTFMGIDVGMNCLAVASTTDKKCKFFAGGDIKNHRNVYWKERRRLQKAGGRYLGTRSSMRVLRNLAGRETRFMTAINHNVSKRLIEFAIENNVSAIGMEDLTGIRNRTKISKEFRYEHSSWAFRQLQTFIEYKAREAGISVVYVDPAHTSQTCPRCNHISRNNRQGLEFRCEVCGYESHADRVGAMNIEHRTRDLRYILESQGGKVSPPDATRLFT

SEQ ID NO: 25762 - protein, 419 aa, unknown
  TnpB Polypeptide
LNHKSYKFRIYPTEEQEDYLARAFGTKRFIYNHFLWLNNQRYQNKEGFLNAFGCNYQITDMKKTDEFGWLKEIDDWVLKNTTNDLGIAFKNFFNSIKKKTKQTSKKPIFKKKDNYQSFRTTCKLSDKGLKIPKLKSLIKVVQHQEVQGIIKSVTISKCPSGKYFAAILTEQDIIPKGYTGNEVGLDLGIKDLIITSDGVKFVHPDKITQKTNELLKQQQKILARKTKGSNNYELQRIKVAKLYKVTTNIKRNYYHEISNYLITNYDAIYMEDLNVFGMIKNRKLSRAIHSASWSTLATMIQYKCEWNHRTFHKINRWFPSSKTCSCCGHKLDSMILNVREWQCPVCETIHDRDLNAAVNIKQEGQRDLYDQIIPKQQGNWTSIDVPLVLQKLTNKIERSIVDTIVGQGSEQVINLVYCS

SEQ ID NO: 25763 - protein, 409 aa, Streptomyces sp.
MVMQLRYAFRLYPNAGQRTALARAFGCARMVFNDAVRAREDARKAGQPFPAAGELSRKLITEAKRTAARSWLGEVSAVVLQQSLRDAEAAYRNFFASLKHTRKGPRTGPPRFKSRKDARQSVRFTANARWTITDSGRLSLPKIGAVKVKWSRTLPATPSSDTVVKDAADRYFASFVIDTDPATDQARMPHTDQTVGIDLGLTHFAVLSDGTKIDSPRFLRRAEKKLKKAQQKLSRKQKGSKNRAKARLKVARAHAKIADARREFHHQLSTKLISENQGIAVEDLSVAGLARTRLAKSVHDAGWASFLSMLEYKASRYGRVLVKTGRFEPTSQTCSTCGIKDGPKPLSVREWTCTACGTVHDRDTNAAINVKTAAGLAASACGAPVRPGAIPAQREETGSHGFPTGNRAA

SEQ ID NO: 25764 - protein, 379 aa, Lachnospiraceae sp.
MNKAYVYRLYPTADQKILFAKTFGCCRKIWNLMLGDRIDAYNDYGITLLPTPAWYKSDDRYSYLKEVDSLALANVQLALQKAYKAFFDGIVEFPKFKSKRRAKLSYTTNNQGGTISVADKSVRLPKVGMVKAKIHRNAPSYMVLKSATILCDKCGRYYVSILYEYDRADTGIADTVSEPEKILGLDYKSDGLYVDSEGRCADMPHFYRKAQNKLKHLQRGLSRKTGSKKGEMPSHNFEKQLARVRKQHRHVADQRRDYLQKQSTALADEYDLIGVEDLSLKGISSSKGLGLGKATNDNGFGMFVQMLAYKMADRNKSFIKVGRTFPSSQLCQCGYKNPITKDLSVRRIICPMCGRTYDRDINAAINIRNEAYRIFRCGE

SEQ ID NO: 25765 - protein, 362 aa, Bacillus sp.
MLKAYKYRIYPNTEQQIFFSKTFGCVRFVYNKMLADRMNSYRESLDKIDKSVKYPTPAQYKSKFPFLKEVDSLALANAQMNLNKAYANFFRDKSVGFPKFKNKKDVHRSYTTNNQKGTVYIENGYIKLPKLKTQVRMKQHRQFFGMIKSVTISQTPTGKYFVSILVEEKEQLLPKIDTKVGIDIGLKDFVILSNGKKYKNPQWLRRAEKRLAFLQRSLSRKKKGSNNRAKARLQVAKLHETITDRCNDFLHQISTEITNENQVIVIEDLKVKNLQKNHTLAKAISEVSWAKFREYLTYKAIWKGRDLIIAPKNYASSQLCSNCGYQNKDVKNLALREWDCPSCRTHHDRDRNASMNLLKLAK

SEQ ID NO: 25766 - protein, 355 aa, Bacillus sp.
MSQTITVQVKLLPTKKQASILSFMGKEYISTINTLISEMVEERRVTKKTTKDIPAHLPSVVKNQAIVDAKSVFTKVKKRKYTIIPVLKKPVCIWNNQNYSFDFTNIYMPLMIDGKAKKVPVRALLVDKNNRNFELLKHKLGTLRITKKSNKWIAQISVTISTGEKRGSKIMGVDIGLKVPAVAVTDDGSTRFFGNGRQNKYFKRIYKSRRKELRRFKKRNAIRSLDDKEQRYMKDQDHKVSRAIVQFAIEHNISVIRLEQLTNTRLATRKSRKNEKNLHIWSFFRLYQFIKYKANLVDIQVQCVNPAYTSQTCPKCSKRNKVQDRKYKCSCGFETHRDRVGAMNIRYAPVIDGNS

SEQ ID NO: 25767 - protein, 425 aa, Halorubrum sp.
MTDTQALVKTLDFQLDVQSNNESLLKDATRRARSAYNETIRLAKEGVDWDTIPGRVAADVDLVRNTTQRVVAKALDAMENYYEYDDFGRPSHTKDGTYPLRANYEEGYNLTLTEDGDVAFRISAKPYKHVKGVLCGDSAHYDILKTALTSDDWKIGTAEVLFQNENPELHVTVTNTEQTVRDKLDSRTVIGVDVNEDNVALTALFEDDVEDTLVIDFPEIKFERHRYFTMRKRVQNAGKDSIHATLEGREKRFVRDRLHKVSRYIVEWSRQFDKPCIVFEDLKEMRDSIDYGTRMNRRLHHLPFRTLQYYTSYKASFEGIPTGWIDPYKTSQRCPMCGHAERVNRNKKRFKCRSCGHQDHSDRSASVNIAVKGIMKHQDWNVPGLNSLPQVRKVRRQASGAVDAPTVTHDAMRGHQTDGIVGVSN

SEQ ID NO: 25768 - protein, 402 aa, unknown
  TnpB Polypeptide
MICEVNLNRTEQIWLKPNKWLSYLCHISKNLYNEAIYIIRQEFIKTGKWISYSSLCHLLKTSENFKILPSGTAQQILILVEKAWKSFFKAMKEFKKHPEKFRGKPSIPGYKPKDGEFMLLFTNQQIKIKNRNIQLPKKINLIVGTRLSDDTVIGTSTIIPKGVGFILNVVYKKTIKPLHTITARVLGIDIGLNNIVTIVDNIGSVPIIVKGGVVKAVNQFFNKRKAELQSLYDLSRIKGTTKKLSRLLIKRDLKIKDFFHKTSKKIVEICKTNNIDTIVIGHNEGWKQNCKMGKRNNQNFVSVPFDKLIKMIKYKGEEEGINTMLVNESHTSKCSFLDGEEIKHLDSYAGKRTSRGMFVSRAGIKINADVNGAYNIIKKAIPNAYANGIEGVGLHPVRLGIY

SEQ ID NO: 25769 - protein, 321 aa, unknown
  TnpB Polypeptide
MQQIITTPDQFQALRTTQLAYRDALNAVSSYAFEQGKTSSTVALHRGMYSQLRTRYHLPSQLACSVERQVAATYKGLWTKLKKNAEHRRKKITRKRFQGLDKPPKYSSPTVQYTYERDYTFGRNQQISLGTLNGRTSIPYQGYDEHIRLIGRGASIGDAKLWYDKPKKAFYLLVSLEIDVPEPTDEQLSEVVGVDVGIRYLAVTSTSTGKATFHSGKRVRHKANHYARLRKRLQKKGTRGAKRRLKRIEQRERRLKAQANHQISKQIIKEHPHALIGLEGMTGSGRGACQSPLIHRTRKPKRHACKGMPSCGGVLMQASGF

SEQ ID NO: 25770 - protein, 408 aa, unknown
  TnpB Polypeptide
MVSNGVVRGVVFYIKDHAHNQLPEEVFWLMKEFRLMVNKTIRTGNRCGLTSRNALCKAVYKGLREEHDLYSQYIPSVCEVAGAILKNYRKRLRKGMKTKAPYATRLNLKCENQTYQLDRKTGVIRLPIRAGKHVMLELEVSDYHRRYLGDEKLALGAMTITPKKIVIAFRKTDIKPFVPETVISLDTNERSLDGVLVANDDEPVAIRLDTSDMPVLQERHHERRRRLQKKKAHDRRMKKRLCGREGKREHDRIEDRLYKVAKRIVSIAKARKSAIVLEDLTGLRHKGWSKTLNRRLSSWPRRRLHEIILHMARWEGVPVIFVDPWNTSNDCPICRRHNANSRMDSMFRCECGWECDEHLNASLNIFLKAVASSEAVARAVQGRPDASWHDLMMSPYDLFGGARTEQSI

SEQ ID NO: 25771 - protein, 432 aa, unknown
  TnpB Polypeptide
MVIISQRTRIYPTDEDIENFKKYIGYSRYLYNKAIDVQKELWLEYKEKKSRIENFDLLDKKVKKEFYKAYYPNASNVRNRMTRMKSEWEYDYASRMVSTAAENVCQAVKNAFNPKMPNHKLPKYKTKKNQKKLSFSLDRIRIKNNKVIIPKASTSRLTCIKPKNPIIFSEISLASELRYTGKIAGYPTISLGKNNKWYISIPIKLNEESEKRYVAKYHKDRDGKPECGIDTNIRGFRYNKVEGGYEDWLTLDNRLKEQYKLIKYYNRVLAKKRLGNKNWKNSKTYAKMRTKLNKSYTKAYNIQEDNLNQFIKYLNENYSSVTIEDLDVNSMKMNKRLCKSLHRSLFGRFKQKIEMKFNQINIEFIKADRFYPSTQRCSSCGHVKTGDEKLGLSGDKYGNAHNEYKCYSCGEILERDDNAVENLKQYKYLITQ

SEQ ID NO: 25772 - protein, 397 aa, unknown
  TnpB Polypeptide
VKLKTIHKTYRFRLKPSDAQKRQFAQVAGVCRLVWNLCLEQRVTIYSSRRKSLNSYNQLSEVTQLRHEYDWIGAVPSQVLQQKVRDLDVAYKNFFAGRANFPERKKKGKSADSFRFPQGFQIDNRRIFLPKIGWVGFFKSQSIRGKLRHVTISRNGNLWFASVCCEVAIADVTPKKTAVGIDMGIAKLCAMSDGQIIANPRSFDRHKGKLAKLQRKLARKKKFSRNFSKLKARIAALHTKIANTRRDHIHKTTTSIAKNHGLIVIEDLRVKAMSKLAKDAIDNPGRNVRPKTGLNRGILDAGWGEFRRQLEYKVGWANGVVVAVDPKNTSRRCPVCGHTAKENRMTQTDFMCVNCGHTDDADVNAAINILRAGHARLACGEIGAIRPLDEAGTLKAA

SEQ ID NO: 25773 - protein, 395 aa, Mycolicibacterium sp.
VRRSYVFRLCPTARQHVALAHCVDSHRELYNAALQERRDAWSHSKTRINYADQSAQLSEIRAMRPDQSVWSFSSQQATLRRLNKAFGGFFRRVKTAKPGVKAGYPRFKGKARFDSVEWPKDGDGARWLPEAKRVYLQGIGQVKVALHRRVQGRVKTIQVKRQGRRWMLVLSCDEVPTNPLPVTGRQAGVDVGIASFATTSDGMHIDNPRWGRAAEEKVTAAQQRLQRAERGSGNRQRRRETVAARHRKIANQRKDFHHKQARALVESYDLLVVEDLKIVNMVRRAKPVPDPDDPGQFLKNGARSKSGLNRNISDAGWGGFVSKLRAKAEEAGRVWIEVDPRHTSDGCEECGYAARENRVTQAEFVCQRCSHRAQADEHAARNVLRAGLALHAQAA

SEQ ID NO: 25774 - protein, 296 aa, unknown
  TnpB Polypeptide
MSSFIWRKHIKTFFRDPKVGFPRFKSKHHSKNSYTTNVVNGNILVEGSRIRLPKVKWITMKKHREPAENCRLKSVTVRMEPSGKYFASLLYEGYSCENQAADKDYSNAKILGIDYAMQGMAVFSEEIEMEEAGFFRKNEKRLAREQRKLSRCVKGSHNYVRQKKKVARCHEKIRNQRRDYLHKLSRRITERYDIVAVEDIDMKAMSRCLHFGKSVQDNGYGMFRDMLDYKFAWKGKELVKVNRFFPSSKKCSKCGKIKKELKLSERVYRCTCGNEMDRDRNAAINIREEARRMLAA

SEQ ID NO: 25775 - protein, 415 aa, unknown
  TnpB Polypeptide
VKLSFKFKPKLTELQLNIIEELSFHTTKLYNIVNYDCRENGFKSYIEAEKEYKDNWHNQFLHSHTYQQCLKVLEKNWKSYFASIKDYKKNPNKYKGEPKPPKFKNHTNKKNEVIFTEAGIRVKNNILMLSLSKAMQKKFQVKSLNFSIDTEKLPVNFEALQQIKIKWDNSIKQWHLILIYNKEEENKVTGSNIMSIDLGRDNLATLTFLEDTESYLIDGKVLKSKISYYNKEIARLNSIAMKQVGDSKKFKNTKQINKLYAKRDNFVNNYIHKASRKIIDLALQHNCNTIVIGDIEGIKQENNVKSFVNMPHQKLVDKIEYKAKLVGLKVVYVKENYTSGCSALDLENINKANYDKSRRIVRGLFRSNKGILINSDVNGSLNILRRYVKDKCIPKLIQSVMDNGGLSTPLRIRVA

SEQ ID NO: 25776 - protein, 407 aa, unknown
  TnpB Polypeptide
MKKMKVNRVERHIIYPKNPYYKMLDEYCFKSKNLYNFANYQIRQKFCSENKYITYNQMDKLLKQEGMDYDYRNMPTAQSAQQTLRLLDKNWKSFFKVIKDWSKHKEKYTGRPKLPNYLPKNGRYLLILTNMNCKLKDNQIHFPKCFNGFVLNTKVTNLQQVRILPRNNHIIIEVVYQIEIPETREDNGRYIGIDIGLDNFATIGNNVGAVPIILNGKGLKSINQYYNKKISHYREIAKRMNNLDYTKRMNKLTVKRNNKINDFIHKASKWVVDYALALDANTMIIGNNKDWKRESKMSKKVNQSFIGIPHQDFINKIIYKAENVGIKVILIEENYTSGTSFLDGELPIKENYNKSRRIHRGLFKSNNGTLINADLNGAYQIMKKVFPEAFAEGIEGVGLHPVRVNIA

SEQ ID NO: 25777 - protein, 416 aa, unknown
  TnpB Polypeptide
MLYNITSTKDKMLSYKFRLYPTKTQELRLYDTIDSCRILYNDFIFESRLAYKEGYKINFDELQRMIPSMIPKDKVYSKVAQMVLWQFYNNIKTLHSMTKNGRMIGKLRFKPKSRFHSINYNQSGFKFLPDDNLKLSKIGKIRCVLHRKIQGKIKEVIIKRESSGIWYAIAVCENESKSTCSIFRKKIVGIDVGINHFSYDSDNHIIEHPHILRNSEKKLKRAQRKLSRKIKGSSNRWKEKQYLAKIHQKIKYQRNDFLHKVSRYYVNKYDTIFVEDLQITNMQKNHHLAKSIHDSSWNSFFQKLEYKAANAGILFAKVAPHGTSQSCSNCGKTVKKTLAIRTHCCPFCGIAIDRDYNASLNIRQKGIDRLPVGCREVTPLERIPLAMVNNHSHVISRNEEASGLRYRQFTSGMPTS

SEQ ID NO: 25778 - protein, 478 aa, Acidimicrobiaceae sp.
  misc_feature (413)..(437): Xaa can be any naturally occurring amino acid
VVLPPRPRLRGHPAGRRRRGRARVDRLVGDLRRLPGRVRPRGRARRGADGRPRDRAKDQAALRPSPGRRRRVRGAVGSVGGPPLAPRLSTTRHQGRSPRTVVLAHLPSQHLGTVRVMSGFRTYRFLLQPTSRQRTGLERLRLNQCELYNAALEERRGAWAWERRSVSYVDQCRTLTETREVRPELFECGLTVCRGTLMRLDRAFSAFYRRCRSGETPGYPRFKAASRFDSMQWEDTKGWALDTENKRLRLLGIGHVKLRMHRPLRGTPKAITVSREGQRWWVSIRCAEVPAQPLPATGQSVGIDLGVCALVATSEGELVCDGRFAKKAQDRLAGAQRALTTKHRGSMHRRRACEAVGRAHRKVANQRKDLAHQVSRRLVNDHDLIVVEALRVPQMSRRPKPRPNGKGGFDPNXXXXXXXXXXXXXXXXXXXXXXXXXCWSRADCSGPPPHLDPVRLLWPYRVGEPGQPGRLSMSGLWP

SEQ ID NO: 25779 - protein, 390 aa, unknown
  TnpB Polypeptide
MIIHKAFKYRIYPNKEQREYLANEFGCSRFVYNYFLGQRIDFYAANKDGAKKGLNYFDNARALTQLKPEFEWLKEVNSQSLQQALRNLDVAYNNFFNKRAAFPKFKKKRNKQSFSVPQRWSLDKGKLNIPKCKGIKIIPHRPIEGIMKSVTISQAPSGKYYASILCELDIPEPVYTGGEVGLDYGIKSFITTSDAEVVESPKFLRESEKKIKQLQRRVSRKQKGSANRRKAVKRLARQHEKISNQRQDFLHKTSVQLVRDNQTIHIESLAIGNMIKNHCLAKSISDSGWNIFVNMLKYKGSWYGCHINEIDRWFPSSKRCHVCGYINDSLTLSIRDWQCLECETNHARDLNAAINILTFGRAGTARINACGEAVQQDPSAKQEAPSFRTE

SEQ ID NO: 25780 - protein, 482 aa, Moorea sp.
MYKTIPIKSTFSEEEKAFWQFQCQQANNLINCAIYYAKRKHYEWLREQTEAYTTYWRDDVLKFGWKTYKCAVKYPELDKALKSSPHYKAMAAQSAQQTLKSVGESLTSYNQLVEKYYKGEVDRPRLPRYRKKGGLAAVTFPKQALTYKKGLFYPSVSKESKPELLCKITLEPPAFIDPDWVKEVTVRPYLGQLWIDWVIDDGKQAVKDNPNLNYSQAWSFDHGGDNWLTGVSTHGKSLIIDGRKLKSMNQGYARLVAKYKTGKPESYWDSNLDRVQRKRNNQMRDAINKAARFIINRCLSDRIGNIIIGWNERQKDSINIGRRGNQNFVVIPTKRLIERLKQLCPEYGIKLTVTEEAYSSKASFLDEDSLPRHGEKTSGWKPSGKRVRRGLYKTSFGYLVNADCNGAANIAKKVATQLGLDLTKVGSGSLTLPHRYDLFNSLKKSYRTRLRNSTGLPVLFRNLVESPVLQPGEMSTQRSTNI

SEQ ID NO: 25781 - protein, 322 aa, Moorea sp.
LFASIDNCKKKVSGKKGFPKFQKRARSLEYKKSGWKLSPDKKSITFTDKKGIGKLKLKGTWDLWRFDKKQINRVRIVKRADGYYIQFCVAVSAKEEIGSTGKTIGLDVGLKEFYTDSDGHSQPNPRFYRKGEKQLKFHQRRVSRKKKGSSNRKKAVNRLGRQHLKISRQREEHAKRLARCVIRSRSVGFAESNDLVAYEDLRVKNLVKNHCLAKSINDAGWYQFRKWLEHFGTKFGRITVAVNPAYTSQNCSDCGEVVKKSLSTRTHTCKCGCELDRDHNAAINIRNRAISTTGHVGTWVVNPNASGDLASTLSGSGLKEPR

SEQ ID NO: 25782 - protein, 396 aa, Microcoleus sp.
MFAVKRRLKLNNQEKAKLVAHAGFSRFVYNYGLSLFCQSIKADVRASDAKRVSAIKKCFTNVTKKREGFEWTQELSSKVYQSAFQALASAINRWRKGLGEKPVYKSRKDRQSFTVYDGNGLVLVKQGKAIKIPTLGIFRLQESLTQSYVSQTFTLSCEADEWYVSFCVNAQRIPPTLHEVAEPVGIDLGVKTFATISDGTELEAPKPLKNAITKLRKLQYHNRNKKLGDRRTGEKASSNAKKYFKKVARLHRDIANQRKDFLNKPTTGICRKYAHIRIEDLNVSGMIANRKLSKAISDLGFYEFRRQLTYKAESFGCWLDIVDRWFPSSRMCRKCGEKHSSLKLSDRLFVCPSCGHTEERDLQASQNLANAPDELCNRVGSPRIYACGQVVADCLG

SEQ ID NO: 25783 - protein, 393 aa, unknown
  TnpB Polypeptide
MEDFRRMTNDSIRIGLEFERDSGLTPSMKKMSLLAYGKLRQYVGFSQYRLCAMSKAAGILSSRRKSLRRGFPTKVPYLSRPILVSCYGFRIEAGNLVIHLGSSTFESIPLNSHTFKVISDSALKVSSFTLTERSLSLCVSKQVQEPESGKVSGAIGIDRNLRNLTVGNDEVVTFYDITKIVAIGERTRSIIKSFTRNDARARRALSSKYGRRRRERVQRILHLVSREVVEKAKAERQVIVFEDLGGIRRLYRKGNGQGPSYRSRMNSWPFYEVKRQIEYKATWEGVPVVTLTRRETRGTTIDCPRCGERLQVPVRGDDGHYRQLWCKVCRRWMDRDVCAVLNISRRGWLRFDHSSKEGEAGEAVKRNAEHEGEPLILRVDASKLRGVEQGCST

SEQ ID NO: 25784 - protein, 402 aa, unknown
  TnpB Polypeptide
MKTIFKSFKFRIYPNKEQEILLAKHFGACRFVFNHYLNKRKESYLEDKKSLNYYDNANDLTQFKKDENFNWLKEINSQSLQSSLRNLDTAYGKFFRKQTKFPRFKSKYDRQSFKIPQFAKLENNELIIPKFKGGIKINLHSEINGEILFATISKSTTGKYYVSITCEVNYKPFDKTCSEVGIDTGIKELAILSDGTTYENIRSLKNNLKKLKYNQRQLSKKVKGSSSRNKQKQKLAIVHEKITNIRKDYLHKVSTEIVKNHDIICIEDLAVKNIMKNHKLAQAMSDVSLGTFYSMLEYKSGWNDKQFVKIDRFFPSSKMCSNCGWINQDLTLNIREWDCTSCGEKHDRDFNASKNILKQGLKIVAESDISKEILSGSGIESDIKQKQVEALSLGESMKPETH

SEQ ID NO: 25785 - protein, 362 aa, Microcoleus sp.
VFNLTYAYKLKPTKNQVVIFEDWLEQNRRVYNYALAERKDWFKSRSCQVNACSLAGEYIIPANVPRPTYNKQAVALTAYRKTSENLKRVHSQVLQQTLKKLEKAFVSMWEQGHGFPRFKKAGRMRSFVFPQLGKDPIQGDAVKLPMIGLVKFRQSRPIPDGATIKQARVVKRVSGWYVMLTLQWDIDVPQPMPHGEAIGIDVGISHFVAVSNGKLFPNPKPFRELESKLRLLQKRVSRKRLGSNNLKKAQAKVNRLHERIANVRKNYHWELAHNLCDWAGMIFAEDLNLKRLAKGMLGKHCLDAGWGQFFQILEQCCFKRGAFFLKVDANKTSQICPKCLTETGKKLLSNRVPVCQVAIAFE

SEQ ID NO: 25786 - protein, 361 aa, unknown
  TnpB Polypeptide
MVNESIRIGMEQNLSSLKSLNLNLYHYLSDNTEFLKLYVARAIVLAKSKLRDFRKERKKNPHVSIPRYKKPHVIIDKQSYRIIGTTLLIGVRPGRPYVGIPLNHYTIQQLSDPHIKAGTITITPNSISFSIIKETKSIKLVEYVGIDINLNNITAVHSDGTVDVFPEVSKITKFKEKYRIVKSHFKRNNVRIRRKIFQKYGIKQQRKTRQILHTISKKLVDTKKQLILEDLKGIRKMYQKGNGQGRKYRSRLNSWPFYEFRRQSEYKSEWYNGIPAITPKPNKTSSKCSICGAKTIPEEGRQIRCPVCGHKEDRDINAARNILYKGVQLRGPWLRPDAPQGEAMKQLKDVEQIVVTQIHQP

SEQ ID NO: 25787 - protein, 486 aa, Thermanaeromonas sp.
MGELFGRLERKLYVDTHIRKVSVSELKKRYTRKYGITARQFNSIYNSLSGKLKSVQESLRYLERDLLGRIESVERAIKRKERERESILKSLEKLEPRTEKWQKKIDRLKKVKFTLHQKKRRLRNLRQRLENLRRDIEEGIIRLCFGSRKLFKAQHNLGANGYRDHGEWLKAWRQARSGSFLVVGSKDETCGNQTCTYTKRNTLRIRVADQFEGRFGKYIVLKGVAFPYGQEHLDKAKEPVRLKKGKKEYRAIIYRFMRRKGYWYLHATVERDDPAPATSPWNGAVGIDLNDGFLQVGDVDRFGNPVREFRLPVPMRDRSRGQVAAALGEAVKKAVLYAKAQGKPVAIENLDFAAKKRALRELAPRQRRVLSGLLYKKFRSMVEPCAAREGVGILKPDGKNVDPFATSVIGQLKFMARYGLSPHGAAACVIARRGLGFGLERAGRAPALRLPERKRTARRSYWQRVCTVLKRIDYRDRIGLLYAGGF

SEQ ID NO: 25788 - protein, 419 aa, Thermanaeromonas sp.
MSWLKNSTLAKKGITKPEGDVLVEKIPLRLKPEEEVLAREIQRESARVWNTVMTIHRLFWLRYGIWIDEAMMKEFLKGRFEVHSQDVQAIVETYYECWERTKKLHKEGHTEWRYPWRLKRYFTPTWKVTGITAEDGYLRLSNGWKKPPLKVKLPERLKGLKIKQVQLVWRRNGYWLHIAVVKPALEKVQGDIVAAADPGEVHALTLTDGKEALVISGGHLRSLHRLRNKTLRKFQKALSRCKKGSNRWRKLLEAKYRFLNWVEAQISHVEHAITKMAVDWCVERGMKKVYIGDPQGVRKQDCGRYHNQRMHQWDFGRLRDFLGYKLNRHGIALEQIKEGSTSGTCPVCGHYTKQSGRVFRCGNCGFSGVHRDVVGASGILDLAVNGRFTEGRDLPRKVVYLRPSVLAPVAKKCRKAAAA

SEQ ID NO: 25789 - protein, 451 aa, Thermanaeromonas sp.
LSKGNYTGRKGGAALAWSSKSHPHRLLLTKQFPLGLEMLALFQPVMLAANKIWNSCVWHSRETYKTEGRWPSETELKAKFRAFAAWKELHSQSAQATVEEYFEAVSSYRKHRNNGHGEMNPPGFKPKNCLRTVTWKRQGFAVENNTLILKLSRTREPIILPVPENWDVITLPDGTRVKGAPVEAKVKAVVRRRRVENLVLHVTFDLGVIPVRTEGLVSAYDYNSALVARTVSNGTQDLFVCRELLALMQYRNKITAEFQAKMSRCREGSRRWKKLLAAKLRALRKLDRRIKQMEHALTKHLAELDAAEGVARAVAGDLKDLRRSSRTGMKNKEASQKINQMPYHRMQAGHKYKSIMRRVHLDARTEKGTSVTCGVCGARNPAWRRKRGLWVCGSCKTTMQADLNGSTSFLKRVLLGDCIGRQLPFALKPPRVWRWDRRLNRFVQVSPRAAA

SEQ ID NO: 25790 - protein, 419 aa, Thermanaeromonas sp.
MSRLKNSVLAKRGVTGAEGDVLVEKIPLRLRPEEEALARDIQRESARVWNTVMTIHRLFWFKYGIWIDEAMMKDFVKGRFEVHSQDVQAIVETYYECWERTKKLHEEGHTEWRYPWRLKRFFTSTWKVTGITVEGGYLRLSNGWKRPPLRIKLPSRLKGLEIKQVQLVWHRNGYWLHVAVVKPALERVQGDTVAAADPGEVHALTLTDGKEALVISGRHLRSLHRLRNKTLRKFQKALSRCKKGSNRWRKLLEAKYRFLNWVEAQILHVEHAITKLAVEWCVQRGVKKVYYGDPQGVREQDCGRYHNQRMGQWSFGRLRDLLEYKLKRHSITLEKIGEGGTSGTCPKCGHYTRQSGRIFRCGNCGFSGVHRDVVGASGILDVAVNGHFTKDRDLPGKVVYLRPRVLAPVGQKHRGPAAA

SEQ ID NO: 25791 - protein, 476 aa, Thermanaeromonas sp.
VQRTVRQKSLPLNSGKWAKLVETAEAYARQKDAFLVEYAHIKYLHYLGDKRSLRDELVSRGFTSPFGLQARMWKLALEDALYTLERQWEAAIEAVKDLVARHEGLTGEEKHYAFWLLYKPPKGGRDWRRIQAIFTGEDVTGENIDLDASGRSRVRKYLRRVFRRVLGRRPRVRKARSFAVDQQMYRVFSTEDRQYIAVATLTPGERVVVPLAGIHAVDGNLRIVLLPDERAVEVHISRDPRVYPPGEEEVGIDLGITEVFTDDAGRKYRPEYGVALQEMSDCILDKGRKRQKLWALYRRYLEEDPARARRIRKNNLGFAKQRRKHGKYRRRCENEINRAFNELFKVRRPKVIAYEDLSHLRGKAKSKGLSRKVSLWMRRITKEHLEYKSYVNSVADPGPVNAAYASQECPVCHWVDPLNRDGDVFKCRKCGFTADADQVNAINVKGRLHDEEITRYTPYREVKEILLRRYYEKNAV

SEQ ID NO: 25792 - protein, 412 aa, Thermanaeromonas sp.
MTKAEKIKNTIRETKERRKTLVPTVCQLKLQNLSRKKEELLKRAFLEAKWLYNWLVADLGRLDLPTNEVNEVEVKVGEVFEKRELNVLGSQVKQEIADRLKDNLRALARLKESGHRVGRLKFKKFVNSIPLKQYGVTYSLDFGRNRVRIQKLGDFRVLGLHQIPSDGEIANAVLVWKPSGYYVHVTCYLPEEYFCYPYKLGRAVGVDSGVNPKLTLSNGIRIDFEVSETPRLKKLQKRLARAEKGSRNREKIRRLLRREYEKLNNRRRDAQNKVLAFLRLYGVVVFQEDCVKGWEALFGRQVHSSGIGGLMTRLRDSLATPVSVGRFEPTSQECFACGKRHRLSLSDRTIECDCGWKCDRNLNAALVILRKGLGLGPDRAVGLDRPELTPLERKAAARILGSNPYIRVSFLL

SEQ ID NO: 25793 - protein, 504 aa, Thermanaeromonas sp.
MKVKRTLRIRISAKRRPRVKRFVLDLAQFRNLFLIFQDRYHKLFGQFILNESVIYSLLADKTKNKSPEQEEALREVSVRVMEDPELKALVGRMKEQKAKLDNNYVLQTAIRQVIKDYRGFLNSITEYRTSPAKFKEQPRPPRPKKLKTIAQVTAEFNSNAFEATSRALVLRLRVKGDEKIKIKLPAGIENVSSVRLTYHLSDAWVDVVYERELEAPEGELCYLAGIDLGLDNLVSLISTNPRVRSLIVSGKEIKSFNRWFNKKAAELRSAIDTLNNKVAEEKDEARKKSMLEELSELRLYFHNLCNYRRRWIETQFHRIARILADFLYETGHKKVYIGSGATTSKDGINLGRVTNQNLMGIPFRRFISILKYKLEELGVQAEEKDEPYTSKASSLSDDILEIQKKYAEAKEKQENVTIKCSGKRIERGLYRDDALNKVFNADLNGALNILKVGAQLREVPLNFKVLLYKLSTPLKFTLYEFIYGFKSKAESLLGIGNSRLATAG

SEQ ID NO: 25794 - protein, 505 aa, unknown
  TnpB Polypeptide
MPVVARTYPRRPYAAFSKTGEPLDLDEVLDGVRADAELVAEYAARELTEQNLALVTYFEGIKPAEAGRQMNLKLPSEVKKRFKSGASRLEMLFRERVVSTLRSWAARVNAANRACDGYVSAGWRRTVRDSKPESLDLRLSLSATNNQYRRIHVQEDKIILDLVVQGEWVTLHFPTPPQLLETGCEPGVPDIWVDKDDRVMFGFHGKTNPGRPEFSERYVVGVDVGVTNPAAYVVWDTEKKEVVERSLLGQRARSLSNKIKRAQVQVASLKRKGKGEEAVSHRQHLSNRRKELSILIAQEVADAAWRYGNALVVFEDLSHIKNTMRFGRWFRGEVYRRTRDMVEADGGRVLKVNAAHTSRRCHVCQSNLDMSDYSSPVCHSCNITHHRDINAAANITQRANHRKACQTRKRHATKTKRIRRSKCHSKPLKHPGTKNRPTPKAPQNRPKTIACSPLSKREVSKRMCPADNRGSAVDHTEGVQTTSGTTNPVENLFIANAVDVVYTKE

SEQ ID NO: 25795 - protein, 183 aa, Bacillus sp.
  misc_feature (175)..(179): Xaa can be any naturally occurring amino acid
LPKLGLVRFAKSREVKGRILNATVRRNPSGRYFVSLLVETEVQELPKAQSYIGMDVGLKDFAILSDGTTYQNSKFFRSLEEKLAKAQRVFSRRTKGSFRWNKQRVKVARIHEYMANARKDYLDKISTQIIKNHDVIGIEDLQVLNMLKNRKLAKAISEVSWSQFQTMLEYKAKWXXXXXTLKI

SEQ ID NO: 25796 - protein, 225 aa, Bacillus sp.
  misc_feature (217)..(221): Xaa can be any naturally occurring amino acid
IQSFVRNLAEAYTRFKSKKNNVQSYTTKQTNENISVVGNKIKLPKLGLVRFAKSREVKGRILNATVRRNPSGRYFVSLLVETEVQELPKAQSYIGMDVGLKDFAILSDGTTYQNSKFFRSLEEKLAKAQRVFSRRTKGSFRWNKQRVKVARIHEYMANARKDYLDKISTQIIKNHDVIGIEDLQVLNMLKNRKLAKAISEVSWSQFQTMLEYKAKWXXXXXTLKI

SEQ ID NO: 25797 - protein, 284 aa, Clostridium sp.
VILAKKVRIIPNIEQEQKLWQSVGTARFIYNWTLARQEENYKNSGKFINDRDLRKELTILKKSELNWLNEVSNNVAKQAVKDPCNAYKKFFNGLADKPRFKSRKKSKPSFYNDTDKLKVKDNTVLIEKVGWVKTVEQLPMDVKYTNPRVSFDGKFWYISVGIEKEEPVVKNTDISIGVDLGLKKLAIVSNIEKPFKNINKTKESKRLRKKLKRKQKQVSRKYEKGKIQIGKEGENRYKFTKTNNIKKLERGIKLIQRRLSNIRLNHIHQTTTAIVKTKPVRHVA

SEQ ID NO: 25798 - protein, 477 aa, unknown
  TnpB Polypeptide
MQIQNYMMSVSLHGKNTQNNNKNSLTFPCHWNKNKLYTYNRMKEVLKSYKYRIEPNAEQKILLNKHFGSVRYVYNYFLNERKTQYLETKKSDNYVAQAGVLTKLKKEEATVWLKEINSQTLQQALKNLEAAYLNFFRGNAEFPSFKSRKSKNSFRVPQHITVEEGRIRVPKFNGGIKLIKHREFRGEIRQCTFSRDCRNQYFVSILVATTHEQLPQTGKSVGIDLGIKDFAITSDGKKYKNNRYTKRYERDLKVAQQHLSRKQKGSHQSEKQRLKVARIHGKISNSRKDTLHKISTKLIASYDLICLEDLNVKGMVKNHKLAKHISDCGWSMFVSMLEYKANWNDKQIVRINRFFPSSKTCNECGWIKTDLTLKDREWVCESCGCEHDRDVNAAKNILTEGISLLSPGTDEYTDGDDVSRSNTLLSAKSEAPESLAQGQFTNNIRTIGITAEELDEDKKKYDVCLAAWSKYAKQQLK

SEQ ID NO: 25799 - protein, 335 aa, Acidimicrobiaceae sp.
VDAARALENFAASRNGERRGTPVGFPRLHEKGKVTPSFRLRNRTTAGRSPLSHRIRFSNPSHLRLPKFGPVKVFGPTRKVRRLIDAGRFHIYSATLRQRAGRWTVSLTRVAAELHQAERSRSDRHAVPVGVDRGIISLCVAADANGVPFEIFEGVKTLKQAQTVLKKSNQALARTKPGSKGHQRARSRLARRHRKVVNTRQHLVHQVSKTLVDRAQVLVIENLNVADMLRNSHLARSISDAAMGELSRQILYKAKWHGVEVRVADRFFPSSKTCSGCGAVKSDLNLSTRTYTCDACDLVIDRDLNAAINLARWQPKEPTAEEPLASTRIVLLSTA

SEQ ID NO: 25800 - protein, 382 aa, Escherichia sp.
MRRFAGACRFVFNRALARQNENHEAGNKYIPYGKMASWLVEWKNATETQWLKDSPSQPLQQSLKDLERAYKNFFQKRAAFPRFKKRGQNDAFRYPQGVKLDQENSRIFLPKLGWMRYRNSRQVTGVVKNVTVSQSSGKWYISIQTENEVSTPVHPSASMVGLDAGVAKLATLSDGTVFEPVNSLQKNQKKLARLQRQLSRKVKFSNNWQKQKCKIQRLHSRIANIRRDYLHKVTTTVSKNHAMIVIEDLKVSNMSKSAAGTVSQPGRNVRAKSGLNRPILDQGWYEIRRQLEYKQLWSGGQVLAVPPAYTSQRCAYCGHTAKENRLSQSKFRCQVCGYTANADVNGARNILAAGHAVLACGEMVQSGRPLKQEPTEMIQATA

SEQ ID NO: 25801 - protein, 428 aa, Anabaena sp.
MYRAVKVRIYPTDEQESYLAQCFGNTRWLWNYMLNATTTAYKESGKGLSKAAMDKLLPGLKKEYEWLGLAYSQVLQRVTFNLSSAFVNFFEGRTKYPNFKSKHGKQSIQYPQNVKLLPQDSVIKFPGNLGRVKTVFHQELPDAKFTTVTISRNADGRYYASILFNQEDNPVGAGSQISPFINKDPSKPARTAINEAIGIDLGLKNFAITSEGSKYDLPKKQLAKLEKNRRRKQRKLAKKTDKTSNKRRKAKRLVAKISSKIARVREDFLHKLSRKIAYENQVICVEDLAVKNMVKNPNLAKSISDQGWGMFQTMLKYKAEKFGHTYLEIGRFFPSSQLCSETLLPIPMLQHGYDSLGIRFIDCPHCHKQHDRDINAAINIKNEGLRLWALGTSASALGGDVRPKSSGRKKSTKVEAVSHELGSPHRNR

SEQ ID NO: 25802 - protein, 389 aa, Anabaena sp.
MLLGFKTELKLNNKQRTQLLKHCGVARHAWNWGLALTKQVIDHNKANPGEKIKFPSAIDLHKWLVALVKPENPWYFEVSKCAPQYALRDLRIAWDRCFKKVSGVPRFKKKGEGDSFELDGKIWIGCTRKIQLPRLGVLKTYENLPQVQPKSVTISRTADRWYISFRIEVEPTNTPKASDVVGVDFGVKSLARLSTGRVFEGANSYRKLEAKLSRIQWLNRHKQIGSTNWRKAQIKIARLHQRIANIRKDTLHKLTTYLAKNHGVIVIEDLNVSGMMANRKLAKAIADMGFYEFRRQLEYKTKLYGGELVIVDRFYPSSKTCSNCGTRKESLSLQERVFQCEHCSFECDRDLNASINLKNAVSHTVSACGSGEADFSEMKQENFSLERKR

SEQ ID NO: 25803 - protein, 540 aa, unknown
  TnpB Polypeptide
MEEKETTHCFVVKLKLRVDSAGRRVLARDFLFALQLRNATLSTVLKRDRKMKQSAEWKEICELPKGPERNQRFQKIRKDYGLSSANDFEKILKAHAEKSGRKKQLNSNLGQIIADDLYRSYADWLFHKKGRPRFRGRNRGLHSLRGKNNATGVVWKHQERSVRYGKKLYKAVIDPKDRYVQEALADPKDPSKPRRVRYCALVRKQIRGKEVFYVHLVLDGVPPTRTVPAPKEECIGIDPSLRTMTCVHSNGAVAKINISAPEEDAKEMRRLQREMERSRRATNPDNYNEDGTVKKGAHKWVRSKHYLALKAQFADLKRRNVETRKNIHGRLIRILMGLAGTFRVEENNWKAFQRGRYGKSVLSGAPSEFIERLRRTAESAGSKVILVNPRELKPSQHDPMSGTFIKHELWERRCRLGDTAFFVDRDVMAALNLLHADVTTNTYDSEALARALQTSKQHWLDAGVVVELKTANRTSEREQRRFLRGGLKPLSVERLHPHSFLRGVGPHSLANGVIVSDACPEEASSDADDGQERPPTSETL

SEQ ID NO: 25804 - protein, 370 aa, unknown
  TnpB Polypeptide
MANKAYKFRLYPTQEQEQLLAKTFGCVRFVYNKMLAERKETYEQFKDDKEALKKQKFPTPAKYKDEFPFLKEVDSLALANAQINLQNAYKNFFEGRAEFPKFKSRKHKQSYTTNMVNGNIALKDSHIKLPKLKLVKIKQHREIPSDYKIKSCTITKTKSGKYYISILTEYEKEIKPVIIQNVVGLDFAMDGLYVESEQGEKANYPRFYRQTLDKLSKEQRVLSKRKKDSARWKKQCLKVAKLHERIANQRKNFLHHKSKELASNYDAVIIEDLNMKAISKALHFGKSVHDNGWGMFTQFLKYKLEEQGKRLIKIDKWFPSSKTCSCCGQTKKSLSLSVRTFHCDCGFVADRDWNASINIKNEGLRLLALA

SEQ ID NO: 25805 - protein, 397 aa, Olsenella sp.
MAKKPVTMGYRFRLYPTPVQARQIDRTLGCARWVYNKALESRIAAREAGAKTPGYSALCKMLTSWKGDPATCWLREADSMALQQALRDLVRAYDNFFASCRGERRTGFPRFKSKRAGLQSYRTNCNGGAVRVEDARHVVLPKLGRVKARVSRDVRGRILSATVVRTPTGKYFCSLLADGAPIEQRPASGGPIGVDLGIAHEVVTSNGEAYQSPKALKRSLKRLKRAQRSLSRKKRGSANYGKQRKRVARMHERVADQRRDFINKLTTRLVRENQAVCAESLNVRGMMKNRRLARCLGDAGLGEVLRQLEYKSAWYGRAFVQVDRFYPSSKTCSKCGHVQEMPLSVRTYECPVCGMSIDRDLNAAINIRDEVIRKLGWDTPEVKACGEVYPLMTVKAV

SEQ ID NO: 25806 - protein, 374 aa, unknown
  TnpB Polypeptide
MKTYKYRLHPSKSQRTQLIHTLEVCRWVYNETLATRKKAWEQEGKPLSLYDTNKLLTVWKQEHPELKDAFSQVLQNVQGRVDLAFRAFFPRVKAGEKPGYPRFRGYGWYDSFTFKQSGFELGDNGLRLSKIGTVKILQHRPAAGRIKTLTLQREAFGNWYACFACEVESESLPVNGLAVGVDMGLESYATLSSGEKVPNPRFFRRDEKELAKAQRKLSKAKQGTPERMLHRRAVQHIHQRIANRRKDFAHKLSREWVDSFGKIVFEKLAEKNMLRNHCLAKSISDAAWNQLIAYTTYKAENAGRVVVVVDPRNTSRQCSCCGTMVEKSLSVRVHPCPECGLILDRDQNAAINLLGLGLQSLGITREAPASWRGE

SEQ ID NO: 25807 - protein, 249 aa, Xylella sp.
MLMAHRIALDPNNVQATHLSRVAGVARFAYNWALAEWRHQYEACTLDSALPKPSQHSLRRQLNAIKREQFPWMGEVTKNAPQMAIIQLGQAFQNFFTGRAKYPKFRKKGAHDRFTLTNDQFDLNASRIRIPRLGWVRMRETLRFAGRIMSATVSRVAARWFVSITVDVPDPSHLPQAENQGAVGVDLGVLALATLSTGETICGPGPTGHCWVACAGFHAVCRVKSKILPIVTKPKPHWRIYMHGLQQFA

SEQ ID NO: 25808 - protein, 507 aa, unknown
  TnpB Polypeptide
MVLSIASGKNFSKGKAHKHYITLECMLEFEKDEEKEKVLTLMRRFSSAMRYAYKRLLEGISEKEIEKAIKEKHKLNTRYVKDAVLIAKGVLKSCTQRGQNPKKLVFGSRELFEKLKKNHLTGESREKLHQRWEERRYYYLYSRGEKSKSGNLNLRFVNLNNQWYLRINLGNGEYVLAKVIRNAKRHKDKWIDFTWRLLEAERLGEWFAYNVMLKVRNGKFYTQVSYEENIIKPVITKAYGVIGIDINAERQRRISMLGNRHSHSKDLRTAQGTLYPFHLALTYVSTDGNLEKFERIDLREMDGKTKNQREYIAWHIARQVVEKALESGKAIVVEDLRKLPKGRRGDGLAKLRRKLHRWVYKSILEKIEIYARRLGVQFIKVNPAYTSIIGKLKYSPMLGIDKDVAGAYVIGRRGLGFEEKLPKNYKELLKNEEFLVYAIAKVEERINNLKRNLKKETNEYKKNAFKKRVKRLRVFLKLLLSYTQDSGKSEPVAQQSVNRETKPMRVG

SEQ ID NO: 25809 - protein, 413 aa, Halorubrum sp.
MEHSHRYRAYLTDEVAERLEHHLDVHRQLYNHVRWDYENSPEDDKPPEYDQNNKLPEWKRRWPIFGELHSKAAQATVARFHRNLSNLRKKKEKGYNVGRLKRQAPTEYRSVTYNQSGFDLDEKRGRDRFAYVRFSKIGWVKIRYHRPIPDHATIKEVTFKKETTGEWFISFGLETDDADLPEKPDVGTLDASNSVGIDLGILNYIHTSDGKTVDWLDLEDEYERLRREQRKLSRKEKGSKSYEKLRKNVAKVKRRIRRKVLDYQHKITTWLVKTYDAVFVENLDVAGMLQGDGNARNKQDAAWRQFITLLEYKADLHGTHVVQVEARGTTKECASCGVETAKPIWVREHSCPSCGFVTDRDPNAVMNVLQRGFSELGLGWPEETPVETVAATDTANFQRVSASHVVETGSLGA

SEQ ID NO: 25810 - protein, 462 aa, Lachnospiraceae sp.
MGYIFTTETRLSNKDASGIIEYAKQYAPDFGLIERYVWHYITSHQGIPDKAKLNTDIQNRFGVTKRTANSAIYDMSGRYRALKELKCTECSQYRQKISALQGKINKLALTVNTMKAKAASNQLPEKQLVTYRKLKKKLFYKKQRMQKYKDRLARLESDIAAGRYTLGFGGKKLFDAQYRLEENGFHSHQGWLNAYRSARDANIYYLGSKDETSGNQMFQLSANPDGTYRIQIRKDGQFVSGKDKYVTATCSFRYMNAEIRNSIKDHSRPVSYRLKIRGSKVYLQAIVQLDMSIRPIVTNMCDGAIGLDFNDGHIDMAETDRYGNLVNTTVYPLEYHGTGTKAVNEMRTVIAQIGRYALSVGKSIAKEDLSFIRKKARTNKSTRTTDKKYNKMIHTLDYSRFEDCVSNMAVRNGIDLVEVNPAYTSQIAKQKYAGTRKIPVHNAAAYVIARRGQGFKDKLILT

SEQ ID NO: 25811 - protein, 401 aa, Tolypothrix sp.
MLKVVKVRLYPDAQQQQSLAQAFGSCRWLWNYCLNLMNQTYKETGKGLSGYEVKKLIPQLKKEHDWLALTYSQCLQQVCLNLGVAFNNFFEKRAKYPNFKSKHNKQSIQYPQNVKVADNHLTFPKIGDVSAIIHRPVEGKLKTVTISKNYSNQYFAAILFDDGKDNIAANIDGKAIGIDLGLTHFAITSDGSKFDNPRILNKHEKNLKLKQQQLSRKQKGSNNRLKSRKKVARVHRKITNCREDFLHKLSRRIVNENQVIVVENLNVKGIMQNHCLAKAIQNVGWGMFCTMLKYKAEVEGKIYQEVDRFFPSSKTCHVCLSQVGSLPLDIRFWTCEKCQTNHDRDINASINLRDEGLRILTSGTGDKACCPDVSRSKGGRKKSTTALSVGQEAYGVRKASP

SEQ ID NO: 25812 - protein, 374 aa, unknown
  TnpB Polypeptide
MNKAYKFRLCPNKEQEILLNKTFGCVRFVYNKMLAERKEIYEQYKDNKEELKKHKLPTPAKYKSEFEWLKEVDSLALANAQMNLQTAYSNFFRDKKIGFPKFKSKKKDKNSYTTNNVNNNIKIVDNKIKLPKVGFINVKLHRQIPINQLIKSCTISKTPTGKYYISILVEFEQQIEQKQINKDKILGLDYSQHELYVDSLGMTANYPKYYYIMLDKLKREQRKLSKCQKGSNNRNKQRLKVVKLHEKVVNQRKDFLHKKSKKLTDNYDAIIIEDLNMKVISQSLHLGKGVSDNSWGMFTVFLKYKLEDQGKKLIKIDKWFPSSKKCNECDEINHDLKLSDRQWICKECGCLIDRDFNAAKNIRDEGIRILGLIS

SEQ ID NO: 25813 - protein, 286 aa, Bacterium sp.
MKKTMIKTIRVMLIPNNKQKTKLFQYANTARFAYNWALGREQENYKNGGKFISDGDLRKEFTQLKKTEEYSWLNNISNNVTKQAIKDACEAYRDFIKGYTKFPRFKSKKHSVPKFYQDNVKIQFTDTHVKVEGFAASKKKNKQKINWIRLAEHGRIATENVKYSNPRIKYDGLNWYITVGIEYEDSATLPSKEGIGIDLGIKDFAICSDEHKYQNINKTQKIKKLEKRKRRLQRSISRKYEKNKKGVSYCKTSNIIKSEKELLKLNHRLTNQALNYVVVVEVLRKI

SEQ ID NO: 25814 - protein, 392 aa, Bacillus sp.
VLVNKAFKFRIYPNKKQMELINKTVGCSRFVFNFFLGKQKDKDAYWYMVEEMVQNGQLPANNWKGKCLNKHETVKAIPELKKQYSFLKEVDSIALQKSVENLADSYERYYKKQNKYPKFKSKKNPVQSYTTKQTNGNIAVVDNYIKLPKLGLVRFAKSRQVEGRILNTTIRRNPSGKYFISIGTEAEVSELPKTNSAIGVDVGLKDFASLSNGKTYANPKFFRTLEERLAKAQRMMNRRTIGGANWYKAKRKVARIHEKMVNARKDYLDKISSEMVKNHDIIGMEDLSVSNMLKNHHLAKAISEVSWSQFKTMMEYKAKWYGKQVVTVAKNFPSSQLCSCCGYQNKDVKNLGLRKWECPTCHTHHQRDINARINLKNEALRLLTVGATGLAY

SEQ ID NO: 25815 - protein, 372 aa, Bacillus sp.
MDMTKQNKAFKFRLLPNKKQAVLLAKTFGCVRFVYNKMLSERKETYEKFKDDKETLKKQKFPTPAKYKGDFPFLKEVDSLALANAQLHLQNAYKNFFEGNAEFPKFKNRKARQSYTTNLVNGNIELKDGHIKLPKLKLVKIKQHREIPENYKLKSCTISKTNSGKYYVSVLTEYEKEIKLKLIENVVGLDFAMSELYVSSENEKANYPRYYRVMSEKLAKAQRILSKRKKGSARWNKQHTIVAKLHEKVANQRMNFLHHKSKELAFSFDAVVIEDLNMKGMSQAFHFGKSVHDNGWGIFTTFLAYKLKEQGKQLVKIDRWFPSTKKCSCCGEEKPMALSERTYHCSCGYVADRDYNSAINIKNEGLRLLALV

SEQ ID NO: 25816 - protein, 445 aa, unknown
  TnpB Polypeptide
MQVVKTVKIPVHYATTKRKLGVLNRLTARLTYGVHLWSQIIETNGIRTRSGLRKREFEREVREQTDLSAAFVQCCADTALWMWRSYWKLHREWRKKVGWAERKGDERWLRKLMKREPRPPFSNGCKHKIPIWFDYRIGSLECSGIKLSPRVIRISTLKRGERITVLLNPAKYHLDLLERGEIKSFQLIKRGKKFYIYVKIEYEVQDQPVRAVRGVDLGIRRSAATVLLRPNRPLRRGDFSVIRDGEKTHRLNELSRRVARLQQMKKWETLKKMRSKRRRVAEYYDRLTAKRIAEISSGCLVAIGYPKGIKYENYRGNGKRWLRCLMTRWAYGQIIRYVTEECAEQGIEVVASDERWSSVTCQRCGSRDTERLTQSVVHCYDCGLTYNADFNAAINIGSSILAGPRSRRAEVDPAPTSDELAEEVKEAGSPCLQAWERSLGPAFEP

SEQ ID NO: 25817 - protein, 356 aa, unknown
  TnpB Polypeptide
MIIVHRFHIEPTKEQEQKLFETVTLCRRLYNAAFEQREICYRQKGRSPSCTSQKNEFPELKKELPEYKQVNVQVLQDCLQRLDDAFQRFFNGLAGYPHYKGRDYYRFFTYPQADKQDHFKRPGYIYLPKIGYVKIKAHFEFDPSKVSRINVKYHNGKWYVNLTSEIQEAGAIEIVNKVGIDVGLLTFAAISDGTKIDNPKYFRKSEKKLARLQRRLSRKKKGSNNRGKAKTKATRLHDKIANQRKDFLHKASYSIVQKYNLIAVENLSVKNMVKNRYLSKSIADASWGKFVDYLEYKCLKFGKVFVKVPPGGTSQTCVCGAHVPKDLSMRMHKCTKCGLVADRDVVSAMVILQRAA

SEQ ID NO: 25818 - protein, 595 aa, Streptomyces sp.
MATAPCTAFRGVAEGSGEQVGRRLLFERVSFLTELCGDLTRQLVASRWDEDSLDVLAAGADGQGERLPSKGWMALRRLGWAQAATPPAGVYVSDRVRRAAQEYAARTLRLALHRRALLAAILATWPAEPSGRRGAAEWTALRAALPAGVGKAEIRNRTRQVSAYLREHGRLPAGLCELEDPPEVAAVVLLAAMDRQQVTLQRVDEVTARLRVKLPLCPAPASGRDWAWHVIDIRLPHTVSADAVLHTPTLRPAGDGRIAVDLPHSRPAPTTTTASGHRVAVGFDWGVNTLLTGTLGRLSGQGPESRVVTDGRPLVFDTTAVSAKLHRLRTHREHLAAKRDHYQHLADGLGAPHLAWAELLDKAAVLEVEHERVCARIRHLNQALAWSAARWAVDQTAALGASVIYLEDLATLEARGRRKGNARLSGQVRGTLAEAIRHLAAKAGIAVVTVPARGTSAHCPACLNPLGHHPAPDRLTERGWTWAHCSRCGLSMDRDHAAARRIVSRGLLAQSHTVTERATGTRTIRTTVEGTARPVRRPKKTTRRLRRARHALTAPAQPRGPKTTRARAAPPPAGRQSHPGVAPHAPPDNMPQPWL

SEQ ID NO: 25819 - protein, 496 aa, Saccharopolyspora sp.
MSGTASRAFRLRSSSHRIKDERVAEILPVWQAGLGRMQAEVARLIFTTGELPKWVDAKGWDGGLSQRQWDSVRAQSIAQHKSWLGNCERVFRRTVAASAITGQVRKDLFYVNKSRAWYLPVEGDGVAITSKRSIPAETMRLARRIMKHVRTRVGRPDMRRLRTMVMDGKVAKVETPNGHHGDYWVRIATLIAGKPVVIPLHAHRAFLDRLAQPGAKLANHCQVHVNTDGTVDYRLVIHTPKNPARTGGREVGIDWGMSTLFATSDGHLHGRGFLDRLRAYDARLQPLMAALQRNGIKLRDSRRYRALVQDVRGFITNEVNRCLNRIIADDSIDTLVIEKLNFQGMAREGRLSKRMRRLLSNTGRGAVNTKLASLAEDQGVATVEVNPAHTSRECTGCGYTSKTNRTTQTKFRCGFCGKTVHADIGGARTVLGRSQNSRHWTDRNRGQILTMLDEEFRSRWGLGFADVDQRRNTRGSRVAPTSATPATQANAFPRSA

SEQ ID NO: 25820 - protein, 375 aa, unknown
  TnpB Polypeptide
MVRKTFKYRLFPTKTQRMAMQQSLDACRWVYNETLATRKNAWEQEQRSVSRYDTIKMLPGWKAEHSFLNSAYSQSLQDVCTRVDLAFQAFFRRMKAGQKPGYPRFRGRTRYDSFTFPQGGFKLLDNGHLRLSKIGNVRIKLHRPIEGKIKTLTIRRDRLGNWYACFSCIIEPKPLPVTHRVVGVDVGLTHFATLSTGEHIPNPRFSRKDEKGLAKAQRRLSKAKKGTPEHRKRKRVVQHIHQRTANRRKDFAHKLSREFVNKYQIIAFEDLDIMGMQEGTWRSMNKGISDAAWHQFRQYTTYKAEWAGRTCIAVDPRNTTQMCSGCGQIVPKELSIRIHNCPHCGLVLDRDHNAALNILARGLACVGSIPGRSPL

SEQ ID NO: 25821 - protein, 351 aa, unknown
  TnpB Polypeptide
MLINKAYRYELDPNNIQRSSLAQHAGVARFVYNWGLEQRIARYKNNQGDDRFTDAMKQHKLLNSLKRDQFQWMYETSKCAPQEALRDLHSAFKNFYRGLKSGKNIGFPRFKKRGIRDSFRLTGIIRFHERAIQLPRIGKIRIKEKRKIYCSGRILSATVRRRANRWFVSVTVEDELPDPQPVRGSPMGADLGVKTLATLSDGTTIANPRALGRRLRKLKKLSKSLSRRQKGSKNREKAKLRLAKMYLKVFNIRQDTLHKVTTYLAKSHSTVVIEDLLVSGMMKNRRLARVIADVGFYEFRRQLEYKCQWYGSKLVVVSRTFPSSKMCSRCGHRKKELSLYQRGSIIVNSVG

SEQ ID NO: 25822 - protein, 627 aa, unknown
  TnpB Polypeptide
MTKVDYPDEFPVVDTNFIIIACKVGCSYDPNAGTGYMGKNKVIFDELTNFYNEHYAPLHYIDEKVPYLNLLQIFQYEAKTIETNIKNNIIAQFRIRFCQLLNHHYNVKAELKAAKQAGVKSELVNTANNVKYHFFNHGMDKKKDKPLPDDIRDVVLNYRAYYLPDQKPTKGSVDYDLRKNTLRYLRYLFLINRELEAETGKTFNVFPLKRSFIHGQVTFDTTALGKLFGDLKTATQATSTKHAGTIKKIFWNKYFIFNLKPVANEFNYDNDADYINGLKQHPAIREPYDYYFSGMIKTDGVSVGLLYKRYDVVADDNYGNRKKEINVDTTTGEDIDSDELHITDIVPESAEFQELASKKIVAIDPNKDDIIYCTDGQQNFRYTLNQRDVETKNRRYKKLIEQDKSFRYKIDGESFSVNDMQTAMTKFNSKSSDLETFTNFVATKNSFSSALTGHYNFIKDDSNPDEADRINYRRLRFNVYNNRRRSEDRMVNRFKAKFGHSDQTFIAFGNAGSNHVKGKAVVKHKGMRKLFRRHGYDVLLVDEFRTSKVCYECHKELSNVYVDWNNRQGEVESVYVHGLKRCTTETCKAYKNRDTNASMNILTIAECHFQGRPRPVALCRQKKSSQE

SEQ ID NO: 25823 - protein, 428 aa, unknown
  TnpB Polypeptide
MAVPVLLPTNLRDETFGGVRYHIEGELVPVLQIELAQMPIYRNGRKAPAWMRGDIRPSKRRSRFALHFAGGMIPYVNTICLKVRLCPTKAQETMLETSLETCRILYNRLLEWRKTAYEETGKSPSRYEQQAVFPAWKAENEYLGRIHSQVLQEVGTRVDRSYQNFFRRCKEGKEKAGFPRFKGRGHYDSFTFPQTGFSLEQNAVKLSKIGSVKAIVHRTVEGKIKTCTIRRQDGKWFACFAVEVETVSLEPNGEMAGIDVGLSSFATLSTGEQIPNPRFGRKDEKALAKAQRRMAKFEKASKERRKARKVVARIHERIRNRRHNFVHQEARKIVNRFEVIAVEKLNVKGMAKNHCLAKSIGDASWVMFRTVLAHKAASAGRAEVSPAYTSQDCSGCGLRAKKKLSERWHFCPVCGTSSIETITPQKTY

SEQ ID NO: 25824 - protein, 251 aa, Salmonella sp.
MAKNKIPLDVRWSRPLPSVPSTVTISKDAAGRYFVSCLCEFEPASLPITSSMVGIDVGLKDLFVTDTGFRSGNPRHTAKYAARLALLQRRLSKKAKGSKNRAKARLKVARLHAKIADCRLDALHKASRKLINDNQVVCVESLKVKNMLRNPSLSKAIADASWGEFVRQLQYKGEWAGRSVVAIDQFFPSSKRCSCCGFTMKKMPLDVRKWQCPECGTDHDRDVNAARNIKAAGLAVLAHGEPVNPESLKAA

SEQ ID NO: 25825 - protein, 462 aa, unknown
  TnpB Polypeptide
LETLSLATLGNCINISHLLTSEQATFFAKIIGCANVIRNQKILDFKDDVKNNNTSSQGYAHVKKREGLDFLKDVPVQILRNAAASVFNDLVSCQKGLRQFPKIKNKSRKRSAIFTKELFNLIENNNKTVLTIFNSKNKNRRAVFSITLPHSIENLGKQFRISRQGKNFYLSYAFNNQIDLIDNNQLLKDLSHLDENELLEKSIGVDRGVNITAYCSNGDTFQYNIETKKRLKEKMNKKAYYQRILSRKKRLNKNTSKKCESNNQRKLQEKISKIDKDIKNIRYNACHHWSKEIVKITPLLAIFENLKINNMTKRAKPKKDDNGRKYIRNNANAKSGLNRAILNVNMGMLGNFTKYKLNLEGKAYYDTHPAYTSKTHYVCKGKNTIRPTQDTLICLDCNKKENADYNASRVIQLNGINDIKEEKFSTKKPRKKISIRKKKVEVLSVEGESTLRKKSPCLDVRE

SEQ ID NO: 25826 - protein, 399 aa, unknown
  TnpB Polypeptide
MLRGIKIRLYPNRAQTEEFNKILGCYRFVYNRMLSLKQRAYEESKTNLSMCDLSKYFHNELLKDPEYDWLAEQNTKVMKQSIRQMLTAYDNFFHRRTKFPKFKSKKDYQTALFPCEAISKRNTFETRHIMLTKSLGRIAFRCSDLYLDRLRRLKDNIKSATLSKTKSGNWFLSVLVDIPDHELVRFNHTGGHIGIDLGVKDFAVTSNGEVFSNPKWFRESEKRIAKLQKQVARKTKGSHNRDKARVKLAKVYEKLTRQREAYIHMVVDSLLRDNDIVFTEDLNVQGMLRNHKLAKDIADVGFHKFMNVLEDKARMNYKKVVKVDRWYASSKMCHECGYVYKSLTLSEREWRCPVCGTHHDRDLNAARNILSEGERIIGSRTAEYTLAEKPTVDDRTLCS

SEQ ID NO: 25827 - protein, 406 aa, unknown
  TnpB Polypeptide
MLQHKAYRFQLQPSAAQAGSLSAWSHALRFVWNWMLAQRRDAYRASEGRVRIGYGEQAGQLVPMKAIFPWLEELPSQVLQQALIDLDQAFTNFFEGRAGYPAFKRHEGPSPGLRWPQGVEVNGRCVWLPKLGWVKARFSRRIEGAIKNATVRFDGLRWYVSMQGEKEVGQPPRHGGPDIGVDLGVAESLALSDGNRIRLPVATEDEERRHKMLTRRVSRCQAGSHRHALAKSRLLRFRRTVTNRVNDARHKLTTRLAQSHGRVFAEDWALRSLTRSARGTLEAPGKNVAAKARLNRALLEQGHAETARQLGYKLEWLGGELLKVPAAFTSQRCPECGHTCAGNRPSRDRFRCVACGHTGHADNVAARNILAAGQAVSVRGGSREPAKRKPTHSRRFRRRPAGIPAL

SEQ ID NO: 25828 - protein, 446 aa, unknown
  TnpB Polypeptide
MKIFSTYSVKIKHYSSIFKETVSVYREAVDFLIGVCMNEWEDISAISGSLLRQQHVERLTHETADNLSPQYPEFDRKFYKFPSYLRRGAINEAIGKVSSYKSNLANWESADIKTRGRKPSFPKAGYVYPCMYRTVMYEQTDIYEAKLKVFVRNTWDWVTVQLRKSDVDYITRWCTSRKKCAPTLQKRGREWSLDFPFEEKVALTDTDIFEQTIIAVDLGINCAATVSVMRSDGTVLGRHFCRLPKEYDSLTHSVNRIRKAQQHGNRKTPRLWARAKGISDDIAVKTAGFIMDMAVLYNADAIVFEHLDRSGKLHGSKKQKLHMWRSQYVQSMVSDRAHRLGMRISHICAWGTSRLAFDGSGTVERGKEADLGSYSICRFQSGKIYNCDLSASYNIGSRYFVREILKSLPARERLALEAKVPQAAKRSTCTLSTLISLNAELISLAV

SEQ ID NO: 25829 - protein, 372 aa, unknown
  TnpB Polypeptide
VKIILKAYKYRIYPNKQQMELINKTLGCTRFVFNHYLAKRIELYKKENKSLTYNQCANDLTNLKKEFNWLKEVDSISLQQTLKDLDQAYQNFFRRVKQSGTPGFPKFKSKKNIKQSYRTQNVNNNISIQDNKVKIPKLGLIKFKNSKQFEGQIKSTTISKTFTNKVYISILVETEVNQLPKVNKSVGVDLGLKDFAITSDGIIYKNPKFLRSLEYKLKFQQRKLSKMKLGSGKWKKQKLRVARIHEKIKNKRNDFLQKLSSKLINENQVICLEDLQVSNMLKNHNLAKAISEVSWSEFRRMLEYKANWYGRIISIIDKFFPSSQLCSDCGFKNKDVKNLGLREWVCPNCGEKHNRDINAAINIKNEGLRLLG

SEQ ID NO: 25830 - protein, 545 aa, Streptomyces sp.
VGTVGGLREVAAPFVVTGPSGVAVRTRLKCLTAGDEEVLRLVGAHLGALASRDLKARCTDGLEHDSESWAVRKRALTGVSSSRWAGSITKATHDQWALARRGQLAHIQGLEAGVRTIAHRLSLPVGAKGTRRVPGGYRSAHEWFHKTRRLRVLEDRLGRVRADRDAGRVRVVRGGRRLARTRHHLADAGLTAAQWRQRWEAERWFLQADGESGKRFGNETIRITPEGDVSIKLPAPLAHLANAAHGRYALAGRVRFAHRGSEWADRVAANRAVAYRIHHDTGRDRWYLTASWQIPPTPTVPLEAALAHGVIGVDTNADHLAAWRLDTHGNPCGEPRRFAYDLTGSAPHRDAQVRHALTRLLHWAKACGVKAIAVEDLDFQAEKTREKHGRRRRFRQLISGMPTGKLRARLTSMADRTGMTIIAVDPAYTSKWGAQHWQKPMAGPTRKMSRHDAASIAIGRRAQGHPIRRRTTPPPHDQSDRAGHRTVQADPGTLGREETRPRIPGPRTRCAPPDAARTRATRAPNTVRGARSDQEWVQDSLLLTE

SEQ ID NO: 25831 - protein, 333 aa, unknown
  TnpB Polypeptide
MKRKPYKFKDIFTSKWYRVYRTLDWLQKPVLFSRPQADLVRNRDYSFVTDKKSDTTYLSLNTLDGRIKATFDVPPCFKDYFDGTWSFGTGKIVSLKNEWYFHIPMTKKDDVVFDKESIKHVVGIDRGLRYLMTTYDEKDETSFYSGEAVRKKRESFNKVRTELQSKGTKSAKRALKRLSGRENRWMSNVNHCLSKTLVDKYGSNTLFVMEDLSDVSFDENLERRSDQQRNELRSWSFYQLEQYLTYKAEAIGSQILKISPEYTSQRCPKCGRIHKANRDHDKHLYTCDCCGYQANDDQVGAMNIQLLGTLWISGNENPKFKLSEQEKPLALTN

SEQ ID NO: 25832 - protein, 537 aa, Holdemania sp.
MINNEESKKLLKQFHKVSDRHILAAETDMSSSDIQKVLTLSDKIRKSGNELICLMRKNYSQLIRTKKYRKLLELYGSAEDKKHRKNFAVQLNEMQKRYKVTWDYCRTSMIPIGKKYGIGAIFALTKAADIWRGIEKCLYGNGKTIHFSKYGELPCIRAKQINRGIPMMIEDNKLKFKLNGNVFGIQVKDKFQTDEVNAILNYLNEPEMTDNKAIQILADEAYCISTYKPCYATLVPKMIRGKYRVYLHLTLEGKAKPKYDRFGDLRHKFGKGIIGADIGTQTVAYTSQTEVGLKNLSERGNSIQKSERMERLYYRAMDRSRRATNPQNYNTNGTVKEGHKTWKYSNHYKRIKNRHSELCRINAINRQLAINEDANHLRSLGDVFITEPKNASKLMKRAKETIFNSKGKLNRKKRFGKSIKNRCPSGFQTSIEKKFRVSGGAYIEVPNHYRASQYDHTADAYIKKKLSDRMYKLADGTWVQRDWYSSFLLYCYDDQTKNIDKKKCVSEFNNYYEKEKTFIEWIKVNKIKVLNSGIKIA

SEQ ID NO: 25833 - protein, 331 aa, Holdemania sp.
MAKAYQNEVNNLLQLYIKNKHPVYVSYGDFCTFIPFWSRAMVVQDAKQIFKHVQKFNNLKLRLKTSQCCWHQPNFKIVDNELEIQVGGRFGIGDTLKLPIMAEPYQQRFLSMELGKLTIHPYKQWWAAELNVKVPEKPQSISTKRMGIDLGIKVPAVAFTEDGKIHFFGNGRESRFRRNAFYAKLTELQKKEDYSKIKELNHGLYRWMITQCHLISSQIVQFAVDQNVGVLCVEQLHGIGKREMKQSRDKRELNQWSYYRLIDNVRYKAQREGLRLVFVDPRYTSKRCPRCGRLNTPDKRFYRCVCGFHCHRDIVGAMNIVHAPESSPVTG

SEQ ID NO: 25834 - protein, 486 aa, Firmicutes sp.
  misc_feature (395)..(472): Xaa can be any naturally occurring amino acid
MTIIIEHRDLHRSVHGSMGGVLPVTRRKKRWRLSNMLINRAYRYELDPNTHERILLAKHAGTARFAYNWGLARRIALWESEKKSTNAIEQHRELNVLKKVDLPWMYEVSKCAPQEALRDLDRAFQNFFRGLKTGRKVGFPKFKKKGRHDSFRLTGAIHVFERHIQMPRFGKIRVKEATEVQGRILSATVRREADRWFVSLAVEMEICDPIQVQGPAAGIDVGLSHFATIVSGSESVKIADPKPLNRYFKLLRRRQRRHSRKQKGSRNRKKSALQLARLHRRVRNIRQDFLHKLTTELAKTKSVIVVEDLNVSGMLQNACLARHIADVGWGEFRRQLEYKTKWYGSRLVVANRFYPSSKTCSACGAVQEKMPLSIREWTCPACGTHHDRDINAAKXXXXXXXXXXXXXXXXXXXXXXXXXXXXXXXXXXXXXXXXXXXXXXXXXXXXXXXXXXXXXXXXXXXXXXXXXXXXXXVQPYGGADGRSRNL

SEQ ID NO: 25835 - protein, 404 aa, unknown
  TnpB Polypeptide
MAETVGAYRNITYRLLPGSRGKAKKLAGLAGACRFVWNAMLAQQNEAYEKAKEAGEQPPSVSFFSLGKRFTKLRRSVDWLPEYSYRVVRYTLKYQADAWKAFFKEGKGRPRFHFKHGSIPSFTIPEDVRIRDNKLYIPKVGYMEIRRKGGNPYPDGEPVKAVIQKRAGKWYAVISYKVDVPEIADNGVAAGIDRNCRQVATVSTAGERALFSHPNMNRLDAKLRRHQRRLARHKKGSGRRNKRKYRIARMQRKRANILRNTNHQISRRIARHSSAVVLEDLKVQSMTRSATGTIESPGTNVKQKSGLNREIRRTGWGQLDQMLGYKCREVIKVNPAYTSQRGYACGHTEASNRKEQSKFTCMACGHADHADLNAAANILASGIGATARRGAFGFPTPMTREMDT

SEQ ID NO: 25836 - protein, 558 aa, unknown
  TnpB Polypeptide
MARKKHVKTEYEKSLQRFRKNAARHVLILEADMPEDMKRRAFGLSDGLRICGNQLTARLSKAMGQLFRTKAYRGLQKDYRELSERLKRNPDDKDAAAAMKLVASKMSSMQKAYRVTWDDARLYMIYLKEQAGLNSIFALSRAEDIWSGAKKVLFGMAKKIHFKRRGEFPEIRAKQITRGIILYVKDNRLYFKWSELGSGKFTVKEPDKFQRDEIARVLSYLAGPEIKDALAVNTMLESGKITDTFRPCYASLVCKEIRCKLRVYIHLTIEGKAVPKFKSDSVTPRHSYGKGRVGADIGAQTVAFTSDREVGLKNLSERGMSISHAERQERRLLRKMDRSRRAMNPDKYNADGTIKKGSKKWVKSNRYKKLQKKHADLCRKNADNRRYAINEDVNHIRSLGDELVTEAPNFKALQKRAKPKEAKQEGVAASPKKQRRKRFGKSLRSRCPGAFQAALKAKFELTGGSYHEVDKMFRASQYDHTSDSYVKKKLSQRMFTLEQGERVQRDWYSSFLLYNADTDYAAPDRDACSRTFKRLYAAHLEMIENIKRAGVRVLNSGI

SEQ ID NO: 25837 - protein, 441 aa, unknown
  TnpB Polypeptide
MKIFSTYSVKIKHYNHIFKDTVSIYRHAVDFLINVCLNEWNNISDIQNNLLKQKYIEHLCHKTANNQNPKYNDFDKQFYKFPSYLRRGAINEAIGKVSSYKSNLANWETSPQGKQPSLPNAGFIYPCMYRTVMYKQTDEYEAKIKVFIRNTWDWITIKLRKSDINYINKHCLEKKHCVPILRKRGKEWFLDFSFEENVKLNDIDAKNQTIIAVDLGINTSATISAMRSDGTILGKHFCKHSKEIDSLTHCLNRVKKAQQHGNRKTPKLWSKVKGINHDIAVKTASYIMDIAIFYNADVIVFEHLDTKGKKNGSKKQKLHMWRKTEVQSIVTNKAHRLGMRVSHICAWGTSKFAYDGSGVVSRGKNGGFTTYELCKFKNGKIYNCDLSASYNIGARYFIRELLKSLNANLRLLIEAKVPQCSKRSTCTLSTLISLNAELVSL

SEQ ID NO: 25838 - protein, 446 aa, Thermococcus sp.
VKLTRTVVLESLPLTKRKFKAIKEVYDEYSEILKFLTNYAVENRVKSHLKLRKIFYKKLKEEHDLPTHYYYTVCQDATTRAKSFLELKKKGKAKTKKPVIRNVSLWLDDVLWDYKRFPRFNILKNGRKILIIGFTTKRGRIKLSLKPHKLFFRYLDEGWKIKPGIKLRLLEKERKVLAYFVFEKEFTELEPTGRFLSVDYNADNVSFGTHEFLIQVKTGFGRMTRFYSDVRKQVQKTHSISWKRKVPSKRGRRLLRKFGRRKTNRRVDLQRKLAMRLVELAGRLNATIVLEAVPKNFNQKMVNRRRKSEKRLRDTPHNIGMSGFQRFVFEKAVECGVPIIFVNPAYSSQVCPHCGAFKVKPDDDALRRRVFKCPVCGFSLDRDFVAVLNLSGLFPFSLKANEPLVEGSVSSVMLVVEANLLHCKNSLVVVSRIETKVGAGGNGHIR

SEQ ID NO: 25839 - protein, 436 aa, Thermococcus sp.
MKRTVTVKLQPSKEQEKALFELAHATAVIWNKINYQRLKQFKEFGKIDFLGTQREAYYEFKDWIGGSTIQTLSRKNAESWRSFFTLLKKKKDGELPEEFKPKPPGFIRKENGRKLFIIPLRNDQYRVDGNVIELRRLGKFERLRIQFKGRIHLEGKQGRLEITYDDVKRKWYAHVSFTVEEKLIGDEWVRVPRNPLGNLSAGIDLGVNNLMAVYVENGESFLVNGGPLKSIAFYWQKKIAEYQSKLNKSGAKKSRKLRRMHERAKLQAGHYINTAVRQTVERLYHLGVSRIVVGYPKGIGRNSNKGKKQNFILSHVWRFNTLIQRLKEVAEEYGILVEVVNEAFTSQFCPLCGQRHKNARFVRGLFECRREGVVMNADLVGAFNILKKALKTITPNLPGLTAGRGNWGKAAPEGFREPLKGFLMETPQTFPGLARG

SEQ ID NO: 25840 - protein, 534 aa, unknown
  TnpB Polypeptide
MPKSANPKLFLGVHARLVFLKKEDERAVLDLMRRFSSATRFAYRRLLEGKTREELKRESGPLCRLFGLNTRYADGAIEKAQATPDSARELGQDPRKVVFGGRKLFEGLKRRHLSGKTLLALRREWKEKRQGLLYSRGDAAKKGNANLRLESKDGALWLRVNLGNGACVQALVQTSHPQLKTLLQRAYASLPYNVTLQLKEGKVYARFTWSEELPPPVHTRANGVLGIDANGDPYHLALAVVSPDGNLARYLALSLEEVDPTPNKGAKELALWKVAQQVVALAEEHGVAIATEKLKHLRKSRRGDGSGRHFRCKQHRFAYRSLLEKIHSLAQRRGVEVLEVSPQDTSTIGMLKYAPQLHLSKDVAAALVTGRRALGFEEKLPKGYRALLQNKSFFAYTEGFYGSRLQELQKLKEAEKNPYLKRKLSREIGKARRALSLLLSFPGPQRGRKASFQGSLGSQKGSTDGRNPSGANPWRVLRVGLFLPLLGLGAPRDLSPLKPVLNLAPLTQGPWKGWKVGLGPPPGGGPECTNVRFC

SEQ ID NO: 25841 - protein, 236 aa, Haemophilus sp.
VRSFFVSIQTEFEYEIPTHKGGEIGIDMGIARFVTLSNSEYFKPLNAFKTHKGKLAKLQRRLKNKIKFSQNWQKLKAKIAKLHHKIANCRKDFLHQTSSKISKNHAMIYVEDLPVLAMSKLAKAAEEHGKNVKQKSGLNRAILDQSWFEFRRQLDYKTQWLGGFLVAVPPQNTSRTCPCCGYTAKENRQTQADFECVECGYTENADVVGASNVLARGELSSKRKISGWDTAVELVK

SEQ ID NO: 25842 - protein, 236 aa, unknown
  TnpB Polypeptide
METSCVKYDGKDLSVTCIDGTTTVFHDFKLPRYNEAFQNNFTCKPEDRQSICYNFTVKRDRKNRQYIIVSVTMKLQAYENSYYGNGAISMDINYDHFALAEIDEIGKLLDQKMIRFDLVKKSTGQITNILGAAVKEVFNWCAEKDKRLIVEDIDLTIKLASRKYGNRKGNHHMTLFAYQRIASSIENQSLRREIAFCKIDPAYTSQMGKFCSCEDMGIFHPSGRSLYDWLGRNGFV

SEQ ID NO: 25843 - protein, 406 aa, unknown
  TnpB Polypeptide
MIVYEFKLKGNDWQFKAIDEAIRTSQFIRNKCLRYWMDNKGVDGYDLNKYTARLAKEFPFADKLNSTARQSSAERCWAGIARFFDNCKKKTKGRKGFPKFKKNQRSVEYKKSGWKLSEDRSRICFSDKNKIGSLKLIGTYDLHFYSIEQIQRVRLVKRSDGYYCQFCIGTEVKESQQPTGKIVGLDVGLNYFYTDSNGGKVDNPRYLRKSEKALKRFQRRVSKKVKGSKNKKKAINRLGRKHLKVQRQRKDFAVKLARCVVRSNDIVAYENLKVRNMVKNRHLAKSISDAAWSQFRDWLQYFALKYGKVAVPVPPQYTSQNCSGCGNIVKKSLSVRTHVCQCGVLLDRDENAALNILMKALQLLGYISNTVGHTEINACGETTLYLNLETVFKQGHSMKQESPATA

SEQ ID NO: 25844 - protein, 402 aa, Escherichia sp.
VKRLQAFKFQLRPSGQQECEMRRFAGACRFVFNRALALQNENHEAGNKYIPYGKMASWLVEWKNATETQWLKDAPSQPLQQSLKDLERAYKNFFQKRAAFPRFKKRGQNDAFRYPQGVKLDQENSRIFLPKLGWMRYRNSRQVTGVVKNVTVSQSCGKWYISIQTENEVSTPVHPSASMVGLDAGVAKLATLSDGTVFGPVNSFQKNQKTLARLQRQLSRKVKFSNNWQKQKCKIQRLHSRIANIRRDYLHKVTTTVSKNHAMIVIEDLKVSNMSKSAAGTVSQPGRNVRAKSGLNRTILDQGWYEMRRQLEYKQLWSGGQVLAVPPAYTSQRCACCGHTAKENRLSQSKFRCQVCGYTANADVNGARNILAAGHAVLACGEMVQSGRSLKQESTEIIQATA

SEQ ID NO: 25845 - protein, 433 aa, unknown
  TnpB Polypeptide
MTAVIQAYRFALDPTPRQRRVLASHCGAARYAYNWGLRLVQQRMEQGRAGEDVEVPWTLSKLRREWNQTKTQIAPWWAENSKEAYSSGLDGLARALKNWTDHRSGRRRGRRMGFPRPKRKGHCRDACRFTTGQIKVFPDRRHIQLPRIGVLKTHESTRKLARRLEQGTARIIAATISRQADRWFVSFTVEVQRHIPTGNGKAGVVGVDVGVRHLAVLSTGVVVPNPHAVQRSLRKMRRLNRELHRRKLGSRRRGQTRRRLARVHARAGMVRNRHLARALADAGLAGLRRQLCYKTDWYGSRLVVADPFYPSSKTCSACGWVKAKLTLAERTFTCEACGLRLDRDLNAARNLAMLAEHVAQSGWETQNARGADRKPQLAGQVAMKREAGGPGGREAGNAAFRKDAATRRSAAAGCPSASPWSASAGRDQAATVW

SEQ ID NO: 25846 - protein, 434 aa, Lactobacillus sp.
MWTPSFHNSLFFTTIYAIIRGSEEVIIILLNQVIKLRLTNVAPPVTTALIQVQTQYMQACQFVSDYVFNHDFELNSNKLSHVLYHDIRQRFALKAQLASSVFKTVTARYKTVQSQLRQKPYRVNDGEKWLSIPKDLPWLWQPVQFKRPQADLVRNRDYSFVADKQQLSLQTLGKRIKTTFTASGFKQYLDGTWKLGTAKLLRADHKWYLHIAVSKTVPDVDAQTQSTNVIGIDRGLRFLATTYDTQGKTRFFSGRQILRKHAYYQKRRAALQAIGTKSSKHKLKRLSGKENRWLSDVNHQLSKTLITRYGVNSLFVIEDLTNVTFDTDNLPKSLRNSNRSWAFYQLEHYLTYKAHANQSNVLKVSAAYTSQRCPKCGLIRKSNRNHNSHEYRCQNCGYRSNDDRLGAMNIQQLGTQFVSGTVKPKFVFNTNLDA

SEQ ID NO: 25847 - protein, 395 aa, unknown
  TnpB Polypeptide
VRAYKTELAPNNVQRTLLLKSAGTARFAYNWGLARRQEQFKQTGKSSNAIALHRELNRIKKTDYPWMYEVSKCAPQEALRDLEDAFQRFFKGRARYPKYKSKKNGVGSFTLTGAVKICVDRVRLPRIGTIRLKEDNYLPTDQHILSTTVSEHAGRWFISVLVDTESEIMENIGPVVGVDLGVNRLATCSDKTMYANPRAFKRNERKLRKLQRSLSRKKKGSNNRFKAGLRVGRTHVRIENIRRDAIHKITTVLAKTKSVIVIEDLNVSGMMGNHRLSKSIADASFGEFRRQLQYKANWYGSRLVVADRWFPSSKMCSVCGHVKEITLSERVYTCEVCGAELDRDLNAARNLEFAASSAETLNACGEVTSVEEEISVMQATSMNQESNAIRSVLDG

SEQ ID NO: 25848 - protein, 375 aa, unknown
  TnpB Polypeptide
MNIESQFSQIAGCCRFVYNFFLAQRIQEYRTDFVTPNYYDQAVQLPLLKEEYPWLKEVPSQALQQTLKDLDQAYKNFFRRINSGGAPGFPKFKKKGKHNSFRYPQGVKVEGNRIFLPKVGWVSFRKSRDVQGTIKNVTISRSASGWYVAIQTEQDIPDTTHPSDTYVGIDVGVNVFAALSDGTTYEPVNSLKKLEKQLHKAQRDLSRKKKGSNNRKKQVRKLALLHEKIANNRNDYLHKSSTEISKNHAVVVLEDLRISNMSRSAKGTIENPGRNVKAKAGLNKSILDQGWGMFRNMLEYKLKYSGGSMLLVDPRFTSQTCHNCGHVSKENRKSQSSFQCTVCGHEQNADINAAMNILAVGLTVSACGAATSVAQ

SEQ ID NO: 25849 - protein, 413 aa, unknown
  TnpB Polypeptide
MELVEQHVIDRHDPRFEVIDPVCFASKNLYNAALYELRQAFFADKSAPGYAKLAHAMKANVDYKAMPAKVAQWVLRQVCSDWANFWKAHEAYQQNPAKFTGRPKLPHYKDKQKGRNVLVYTAQAISRVALAEGKIAPSNLPIVVTTKQTEVQQVRIVPKASHYVVEVIYKVKPTPRCANRLNSQWAAGVDLGVDVLAAVTTNKRGVSPLLVNGRPLKSVNAFYNKQRARLHAALPKGKYSSRQLVAITDRRNRRIQHFMHTASRRIIDWLVAERIGTLVIGQNKGWKHEVEMGTRNNQNFVAIPHSTFIHMLAYKAKLVGIHVILKSESYTSKCSFLDLEPIGKHAQYAGQRVRRAQFVASDGRMIHADVNGSYNILRQGLPSAFARGIRGVVVRPVRLTPPKLANGHCPKWL

SEQ ID NO: 25850 - protein, 155 aa, unknown
  TnpB Polypeptide
MVENPKFLRIGEKVLKRSQRRVSRKVKGSKNRGKARQVLGKRHLKISRKRKDHAIKLARCVVQSNDLIAYEDLRIKNLVKNHCLAKSINDASWYQFRVWLEYFGKVFKRVTVAVNPQYTSQECSRCGEVIKKSLSTRTHICKCGCVMDRDGAIRC

SEQ ID NO: 25851 - protein, 433 aa, unknown
  TnpB Polypeptide
LEKTFYSEQSVRLMSTKAGGERTPPNPKTPTFLLELPLVAEACQAARLGAHLEVGRQFYNAMLSKGQLRLRRMQADPAWQAARAIPRTRKQERRAAFSALRERYGFSEYAFHELAKGLRVSWLAEHLDAVLAQTLASRAYRALNRVCLGKARRVRFKSKSRGLDSIENKRNDTGMRFVLDSRAEGRPQGFLLWHDDRIPARIEWDDPVVAHGLSQRIKYARLVRRRASSPRAQGADRQGERYFVQLALQGLPHRKQKHPVGSDTIGLDLGPQSLAIVPREAEARLENLGAELQPDARAIRRLQRKMDRQRRAANPEHYDDKGRPRKRGKRSAPWKQSRGYQASRRRKAARERKLAAHRKSLHGRLVHQIVAVGHTIITEKISYKGWQKRYGITAAVGSSTSRSRSDCTSARAASGPSSATCTLPFWQPISIQQ

SEQ ID NO: 25852 - protein, 410 aa, Nocardia sp.
MKEVQELLRSNKIRLEPNNVQATGLARAAGCARFAWNWGLAWWQSEYEKYKAGDRDTAPGQLEARRVLNAVKRDEFPWMLESTKCAPQEALINLGRAFGNFFEHRAKYPKFKKKGVRDSFKLSRGQFAVAGNRLRVPNVGWITMSEPPRFDGSIKAITVSHRAGEWFAALTIEVQELTRLPTTGRTIGVDVGVREFATQDGSLCATPQALRKVERRLRRAQQALSRKRRGSSNRAKARRKVAKIHAAVADTRADWLHKFTTSLVANYDSIAIEDLNVRGMAHNHRLAKSVSDAGFYEFRRQLKYKAARTGRILVVADRWFASSKTCSSCRVKTKQRMTLNVREWNCENCGIGHHRDINAATNLDRLNAPGVPRCQPAESSPPLPGSGVAAGGQAASAKQEPDSDPVLRIA

SEQ ID NO: 25853 - protein, 373 aa, unknown
  TnpB Polypeptide
MTKIRQKSYKFRLYPTEEQKVIFAKTFGCSRAIWNMMLADKIQYYKETGKSLNNTPAQYKREFPWLKEVDSLALCNVQLNLQKAYKGFFQSNFGFPKFKSKRHHQSYQTNNQKGTIVIESGKVKLPKIGWVKVKAHRKMTGLIKSATISMTKTGKYYISILCEMDIRPFKKTNSNIGIDLGLEHFAILSSGKKIENPRFLVHSSKKLRREQKILSRRALIAKQSGKKLSESMNYQKQRLKVARLHEKVSNQRRDFLSKLSTTLIKNHDRICMEDLASKNLMKNRSLARAIGDASWSEFVRMLEYKADWYGKQVSKVSRWFPSSQICSNCKMNSGKKPLHVREWTCEKCGAHHDRDLNASLNILEEGLRTINLI

SEQ ID NO: 25854 - protein, 440 aa, unknown
  TnpB Polypeptide
VLEYTCMLLTYQYRIQPSQEQQSTMDWWCELLRRHYNYSLGQRLDWLNRTRCQLDRCSLVSEPIGEIPGVFPNYNLQAGLLKQTKELFPEYKNLYHDVQQQNLKRLEKAWERWTKPDKSGRRGGRPRFKKVGDLRSFTFPRVNSEKAGANIKDGILTLSKIGSIPIILHRPLPDSFTPKTCTVIKKADGWYACINLQDDTVPSPIPLETIKTFIGVDVGLKVFLAASSGLMVAVQQIYRQAQSHLARQQRFLARKQKGSKNAHSSANRIARIHQRIARQRQDFHYKTAHKLVKENDFIAVEDLNIKGLARTNLAKSILDVAWGKFITILEAVAAKCGVWFVKVNPYGTTQDCSGCGVEVPKDLSIRTHECPKCGLEIDRDINASINILERGLKAVGHIATACGGLQSWATRHVDVDSLVMSDEAGSPKTRVGEAPPIPQG

SEQ ID NO: 25855 - protein, 463 aa, Tolypothrix sp.
LLLNYQYRVYPNTNQKLELNTWLRICRYWYNRQLGDRFDWWENNRTSVNACPLICSLPELRDNPNYYSQKKQLPVIKEDLTKVVSSGELLDFTRVPSQTLQDVSKRVELAFSRFIQGDGSGNRSGKPRFKNAARYRTMKIEDQAITVERVEKNWLFLSFSKLDGWVKVRLHRPLPNGFVVKNALLTLKADGWYLTICLKDPNVPIFTPDDVVPSWDNTLGLDAVLHEDEYLATSENAKLPALKSFRKSEFRLAKVSKRKSINKKGSKSRRKLAKREAREHQRIARARKDHAFKTAHAVVRTNKKVFVHEDLNLKALSKRNKAKQDEDGKYLPNGQSSKTGLNKSWNDAAFGQFFTILEYIAGKAGARTIAVKPAYTSQLLAYRDEFVFTDCGIREYWDEKESLWVDRDINAAINIKRVGLGLFPTIKRRKGNPVVDGSTTNSTSKEVLVVLKRQKPTPTRRAV

SEQ ID NO: 25856 - protein, 226 aa, unknown
  TnpB Polypeptide
VASIDPGVDNLVTLVTEDESLVINGRIIKSKNQWFNKRASQLNSHLDKMYKTSKHEDSKQLTTLWKKRSLWMLDYLHKVSRYIINYCVEHEIGTLVLGSNNGWKQECNIGKTNTQNFVQIPHNRLYNMIQYKAEAEGIQVILQEESYTSKASYLDKDAIPTYNPEEENKKYSFSGKRIHRGLYNSADGTLLNADVNGAANIYRKHFDETPFSAKSLQNVHKITIAA

SEQ ID NO: 25857 - protein, 375 aa, unknown
  TnpB Polypeptide
MDHWTEVAAIPKELERKTYVESMIHRTKDNPVVPYGFDDRFYKFPSYLRRSAIANAIGKVSSYKSSLAAWESSDTKNRGLTPGLPKAGFSFPCMYRKVMYEQTGDYTAQIKVWIHNTWDWLAVSIRKSDVDYEQHHCQYRKECAPVLMKRGKRWSLDFAYEESVDLNKTDIHEQVIVAVDLGINSACTCSVMRADGTVVGRRFLKLPAEYDSLQHKIDHIKRAQHHGSRRVPNLWAYADGVNKDIAIKTAQFIADTAVLYNADTVVFEHLDLDGRKRGSKKQRLALWRANAVQSMTADKAHLAVPAAAHTTVTPPAMRPAFFQSTLRTTCSTARWSSFLPRSGAGAALSARTGRMWMVSSIFIGSSSLIHVIFRL

SEQ ID NO: 25858 - protein, 359 aa, Oscillatoriales sp.
MQLTERHIIKSTEHRFAEIDELAFKSKNLYNAANYVIRHNFIYGWGYVNYNEMNRLMNYKADSSKFTGRPKLPKYKDKTKGRNLLVYTIQAISSKQLKKGIVKLSGTELLIKTKVDPDRICQVRLVPKCDSYVIEVIYDACTEHSRSEPESTASYNDFAAGVDLGLNNLVALTSNQPGFIPLLINGRTLKSINQFYNKRSSRLQSQLKGRRKTSPRIQRLTRCRNQKVDNYLHHTSRRIVDILVAQRIGTLVIGKNAQWKTDINLGKQTNQNFVSIQEESFTSKANFLGLDPIPVYGKTKTEPVFTGKRIKRGLYKTSTGQLINSDVNGSFNILRKAIPNAFGDGIRRGRSSAEAGQSA

SEQ ID NO: 25859 - protein, 387 aa, unknown
  TnpB Polypeptide
MLTYKTKLNFESEEVRTFWVRRMCLVRECYNFASEVVFNEKVNLGMMPFHKRLYREERTRFNSLPAQMCIKVNQLVLANYRTAKENKVELEKPLEMKRPSIGLDKRLYSGMTRESFRLSTGDRNRRTEVKFVHYPKFDEMAAKYRMCDPVLQYDERNNTFYACIPFLALDTTPLAESYLGIDLGMRRIATLSDGTAIVDKEYLARRRRIRHNKSALRRHKRKSHSARRKLKVLRRRESNMCKDFSHRVANEILRHDGATIVMEDLSKIKRRTAKTEEGHKRTRHNNAMSQVPFFQLRQILTYKAPLVGKRVATVPPQYTSQEDCRTQSKEGCVRKGCRFYTADGKVFDADWNAAINICNRHHPTPFRLPIDGGLNFVGRQCQEANCE

SEQ ID NO: 25860 - protein, 414 aa, Bosea sp.
VINRGLRYKLSPSSEQEALFRQFAGVCRLVYNLALEQRRDWWRQYNSETGRHFNYASQCRELTRLRAEYDWIAAVTQTCQQQALRDLDKAFSNFLRGRSRYPTPRKKGINDAFRFQGREVEVEKVSAKWSAVRLPKIGWVKFRDTRPLRGAVKNVTVSLDALGWHASFACEIEHFAPANTCPPVGIDRGVANTLALSTGERMSVPASLQAIERRQRVAQRTLARRKKGSARRLRQLQRCARLAARRARIRRDWQHKAALDISRSFGCVVLEDLNIRNMTASARGTIEEPGRMVRQKSGLNRSILNQGWFGFETILAYKLDERGGRLLKVSPAFTSQTCSECGAVESQSRESQAAFVCQHCGFRAHADHNAAINILRRNTASMRMEEGHKPPGEVRTGREFPLPENPQAEAGGGC

SEQ ID NO: 25861 - protein, 248 aa, Clostridium sp.
FNYDKVQKCWYLIVIYNKDEVENSNDNVMSIDIGLDNLATITFKNGINQYVYCSKKLKSVNSYANKRIAYLEAIEMKKYGSDKFKNTKEINRLRKYRNNYINDYLHKVSKNIIDKAIKNNVGKIVIGKLKDIKQDMNYNKSFVQIPMQRLVELITYKAKLIGIEIKLQEESYTSGCSAIDLEPVTKKYYNKSRRITRGLFKSGYGILNADINGSLNILRKSEKCIPDLVNAMRDKGNWTHLQRIRIAC

SEQ ID NO: 25862 - protein, 285 aa, Okeania sp.
MYAIKLELKLNNKERLLMAQCAGYARFVYNYGLNMVNQTKGITKVNKQGKEVNFSYNQRINEAKKVFTNYVKKQPEYAWTNNYSSRIYQNAFINLGKAFKRYKEGTSKQPKFKRKKERQSFAVDYSNGKITVKAGNKVKIPTLGTFRLFEPVPYTTATQTFTISKTGERWFVSFAIEAEKLPAHPLLDERPQEFFGIDVGIKQFGTIASSAENMAIALPESIKKEQLKLANFQWHNRNKQLGGQGKPASKNAIKYCKKLAKYHAHIANIRKDFTLKNYHEFSRQY

SEQ ID NO: 25863 - protein, 242 aa, Okeania sp.
MYAIKLELKLNNKERLLMAQCAGYARFVYNYGLNMVNQTKGITKVNKQGKEVNFSYNQRINEAKKVFTNYVKKQPEYAWTNNYSSRIYQNAFINLGKAFKRYKEGTSKQPKFKRKKERQSFAVDYSNGKITVKAGNKVKIPTLGTFRLFEPVPYTTATQTFTISKTGERWFVSFAIEAEKLPAHPLLDERPQEFFGIDVGIKQFGTIASSAENMAIALPESIKKEQLKLANFQWHNRNKQLG

SEQ ID NO: 25864 - protein, 427 aa, Escherichia sp.
MHQENTMLPRRISVSLFIDQSIIWPVKRLQAFKFQLRPGGQQEREMRRFAGACRFVFNRALALQNENHEAGNKYIPYGKMASWLVEWKNATETQWLKDSPSQPLQQSLKGLERAYKNFFQKRAAFPRFKKRGQNDAFRYPQGVKLDQENSRIFLPKLGWMRYRNSRQVTGVVKNVTVSQSCGKWYISIQTESEVSTPVHPSASMVGLDAGVAKLATLSDGTVFEPVNSFQKNQKTLARLQRQLSRRVKFSNNWQKQKRKIQRLHSRIANIRRDYLHKVTTTVSKNHAMIVIEDLKVSNMSKSAAGTVSQPGRNVRAKSGLNRSILDQGWYEMRRQLEYKQLWRGGQVLAVPPAYTSQRCACCGHTAKENRLSQSKFRCQVCGYTANADVNGARNILAAGHAVLACGEMVQSGRSLKQEPTEMIQATA

SEQ ID NO: 25865 - protein, 349 aa, Streptomyces sp.
LKEIRAFDPERRGRWSFAFQQAALRRLDKAFTAFFQRVKARQTPGYPRFTGSGHFDTVVFPRDGDGCRWDSTPHDTQTRLRLQGVGHVRVHQHRPVQGRVKTIAVKREGRRWYVILACDEVPAEELPPTDAVIGIDMGTTHFLTASEGEHEPNPRFLGTVAQELAEAQRHLATFPQRTRRRTKAHRAAARKVANVYAKARRKRLDFHHKTARALIRDHDVIAHERLNTAGMTKTAAPKPDPDQDGAFRPNGAAAKAGLNKSILDAGWGQFLVILADKAESAGRRVIPVDPRNTSRTCPPSLGGCGHVAKENRVTQARFQCTACGFTANADHVGASNVLDRAGPALCAAA

SEQ ID NO: 25866 - protein, 253 aa, unknown
  TnpB Polypeptide
MQRLQAYKFAVIPSGGQQRQMRAFAGSCRFVLNKALALQKQLHEDGEKRLGYAGLCKLLTDWRNGADTPWLKDAPTHPLQQALKDLDRAYANFFAKRAEFPRFKKKGQKDSFRYPDTKQIKLDQANSRIFLPKLGWMRYRNSRMVLGAVKNATVSWHNGKCFVAIQTEREVEVPTPQGEAIGIDMGIVRFATLSDGSSVEPLNCFRRHEIALRKAQQTMSRKTKFSSNWRKAKKKESAAHSCAHSKCPQRLFA

SEQ ID NO: 25867 - protein, 253 aa, unknown; identical to SEQ ID NO: 25866
  TnpB Polypeptide

SEQ ID NO: 25868 - protein, 420 aa, unknown
  TnpB Polypeptide
MIVTKGIEIRLYPNKKQANMINKNIGAALFAYNTMLSVKKELYQKYGISFTPRWQLLKEDYPWLAEVDSRALSSAHQDILTAYNNWFKSLKGKNKGNWGAPKFKKKSKSGSYKNTSMPTDPTRLFRDGKIFIPMLKLVNYRNNSFDLSKIKKIRNLTIKRTNTNKYFCSICCDYEINEPEHTGECIGLDLGVKDLIITSNGQKFDNKKFLKPFEKKIKHLQRQFSKKKKGSKNREKARVKLAIAHEKLSNKRNNYLQQLTTKLVKENDIICIEDLNVKGMLKNHSQAKSIADCSFSMIRNMLDYKCRWYNKKLVVIDRWYPSSQTCNCCGYKYDPMHYNNVKWNQGIRNWVCHSCNVHLDRDINAAKNILNKGLQDLDNLLNLNRAGTAQIQACGEDSSVSVMKHRSSMKQENHTSSVSD

SEQ ID NO: 25869 - protein, 575 aa, unknown
  TnpB Polypeptide
MASSKKVKQKGDETDAQSFTAHTFLTDISYPEQNHTLYDALNDMGALYGRIKRSLYKDCIRFGLKAISFKNQYLVKHGITARQFNAIRYDLDGNISSAVEVLKLRVADLEDKIKSVKKWLKSREARIRGIQEDREVSSSDRGRQIHNIRFSIHHKKRKLYALELKLASLKDDLKQGRVRLCFGSRSLFRKQFSLNENDYVFHDEWLSDWRKARSSQLFCLGSKDETAGNQTCTLFADGSLRIRVPNYLQSRYGKHIIIPRVRYAYGQDAIDQALANDQALTHRLVRKGKGWYLHTMVDMAKPAQTTFKPRETGCIGVDVNEKEIAVSETDRFGNLVWSMTYSACVKDRNADQTMAAYGDICVQIVDRAVKTGKPIGHETLDFKKKKASLKERGVGYARMLSGFSYSAFLTMLDRRAFKSGVQVFPVNPAYTTVIGKINHLSRYGITSHEAAAHVIARRVQRYSESPAPARTASPLPARNRGEHVWKFWHRLKDSGACGSKHRLPERRPLQGSPGCAELQKKSTSLSTAQFSRPPASRSIIEKAPEGIPITKKRGLGESGRESLTLTGSSTVRLPS

SEQ ID NO: 25870 - protein, 493 aa, Moorea sp.
MSKRKKKSGTTKKLSTQVVPVIGMSMAVETELFAIMQRLGIVRSESYNKLGSVSHWGLDWRKAYPEIRAFRTPESLELPSKLMEWTVSDVAKAITAQQAACIEALGKILHKRFPGQENKKRRNECYKQLSSPSFLDNPFLHRIVRKQFQRGHSSTRNQIIYQQGGYSCKRISRHTYQLELAGLRRGKRNRILVRSNRKLTGQIRLIYNLQLQRFEVHFIVDYGTVNLPAEHRSIGVDKGYTEAFYDSDGRAHGLGLGQLATAKSNRITLKNRNRGKLWALHRKLEKIDPVKSARILENNLSRKTENRRYRKDQAGIIAIIGAASRSLFNGESLKVFAEDLTEPIKGKRQSLAMSRKLNSWMKGAIRDSLQKWANWTGSVVLEIQPSYTSQVDSVTGTLLGVRKGDTFTRFNGVVLQADHNAARNILGRGTDHEISRYTKREEVQAVLLRRTARFLEGMDLSLADAVKLGWLDSKHSRTQAFRDLLAGMPGTLR

SEQ ID NO: 25871 - protein, 386 aa, Salmonella sp.
MKRATKVRLYPDPEQAAFLNAQFGAVRFAYNKALHISRHSYQRHGISLKPKRDLKPLLAVAKKSRRYGWLKDYDSQALQQAVINLDRAFANFFQKRAKFPAFKSKHGKQSSYHPNGKVLTDAIQLPKMTPVKAVIHREIVGNISSITISRNAAGKYYASILCDDGQEAPVKPDLITRVTGLDMGLSHYAISSEGGKVANPRHLINVSRNLRRKQKALSRKQRGSASHRKARLQLAAVHERVANARADFQHKLSRHIIDENQAVIVETLKAANMMKNHSLARAIGDAGWHGFIMKLEYKAAAAGVHLVKLDQWFASSKTCHCCGYKMSEMPLHKRSWQCPECGCEHDRDINAALNIRHKGITELQAAGLVVSAHRGQRKSVTPTVAA

SEQ ID NO: 25872 - protein, 342 aa, unknown
  TnpB Polypeptide
MTTTEVTKIVQDINLARITNKCEELENFKELNSIYKEIVSLSEKGLERSTILGMIESYCFTPKVTQETTEIPAPVIELKDSSVERATVVQDGSSGQHNVTRIEHLGKVSITQSVTVKAPVPQLVLVPENCDDNLQKEVEEIDFAGIDLGFSFTDENLISIAFSDFSTPVKMTNAPLQKKLKQLRSVSKLLNSGNITKLENDELSNLKSSIGNLTKSTIKLLKIKRVKKVYLGDVSGNSKTVMSLISESLTSRLKKENIDYELVEEYQTSLISSLDNESFDKLNSDLLGKRTNHYFKTATNTVDADINAAYNIIRRGSSLSFKVDKNFVPACYNFKYCNGCNL

SEQ ID NO: 25873 - protein, 924 aa, unknown
  TnpB Polypeptide
MPPKEKSNHLSIGNLVPAHKFAPALHGGKQLDAFIEELQRPRSDWRVLPAPLEEDDQAPLAAPAFTCVVGMPTAVGVLKIASGAGGASDCTLFVRLKRSVLDAWCRVHGKDNWSRRAFSRKLDAKQATILLGAMQPHCLKEGQVHHPQALSVLCLMSLGGWLTLPNGTTRPPTECGSFTLVGLPPADPNFEQCLTLLGHRSTFKAQAAASVADSDDENTPIAHRVDPNVWGKTHGTTLCPQWVPKFQEAARVFSNQARTVHSNCTFPCTSVHFCSPRTPTTQLRQNDARDGAINGPTSRLVRHPKPVQTVADVTTRWVGVDALLPDMAQPVANPPRRFYHADLKWVYDACPVQVRSTMPVAARKPHHFVHTDCVKRDDTRSGFTQRDLRPRSDGPDPVFVEVVAREFRDRVVAEWAPPPPAGDNADGPAAAKKRRTRARVGAYRAYRVRMIPTTEQKRQLKQCFAASRHAYNHFVDRVKNHGDAPNEYARTKDYRASARPGWVTEVANQITAGGIADAANAYRSNFAKRRLRPGEHGAFDVRFRSHRKTRTESIHIEGDGDYAGKHSSLLAFRPLPFANNPALRSECAVFFGNNLSGLGEKYWDEESVEERAERLARGREEGRKIQARKPQWRARKGADGIRLQDKPHVIARLLAEGRVGDGMGVVNGCKIHWDKRRDTFHLIYTYELPPLADPDPSFETKRIAATDPGVREFMTWYAPFTGNHGELFKDGQGQIVERCTRIDRLTSQVALRGQNYATAAPHRTRWQRRQRFRQMKRTRARERCRLHDYVAAGHYASANYLLRHHDLVVAPKLATSRMVPRDGRVFGSRTARAMLTWSHGLFTQRLHAAAYRHAGRHVISDSGEPGTSKTCGDCGHWNAQLGGDKTHNCSRCGTVISRDLNGARNNFFAAFGDAVGMGWDGVHR

SEQ ID NO: 25874 - protein, 352 aa, Candidate divison MSBL1 archaeon
VKKVRKTVQCGIVNLTDVKESLLGREFENLQRFLHGEEGVELYSANKQQAERYYKKIKDGKKYPISIRKDLIDIRECDSDVGDYFVRIPVAGRRGGVNVPVNTHMGIEEDWEICESKLFRKDGSFYLNVTVEIEVGEVEEYEGVLGIDLGLRNPVVSVALPSRESEFRGLGVKQVQSKYFYLRRQSETGKGWHRRERDKVRDQLHKTTTKIANYAEENKVVVAVGDLSGVQNQDKGREMNRKLHRFPHYSFRQMLEYKCRERGIEYIEVNEAYTSQRCSRCGEEGNRNGGEFKCPNCGLEIDADVNGARNIVSRALDKSEIRPLVNAGAPVAAPGTLSVEATSGASPEAISC

SEQ ID NO: 25875 - protein, 375 aa, Halorubrum sp.
MEVRRTVPVKLDVADSDAALLRETISEFLWAANYVVDHAWQGEYKTTSKAQLQRETYDDVRAETRLQANLVQNARNKAADAVQSVVARWKQGDYAGKPRFSAPTLVYDKRCATFNDDHATLSTVEGRITARYILPDEDRETPHSEYLFNDDYDVTGAELHYRDGEFYLHVRTKADMEFETADEGNAEHSTVLGVDLGIENVAVTSTGTFWNGSELNHWHREFEKRRGSLQQRGTRAAHETIQSVGRTETGRYDHFLHTVSKELVAEAVEHDCDVIVFENLTGIRDRMPNAKKFHAWAFRRLFEYVEYKAEVVGISVEQVSPAYTSQRCSKCGFTHEDNRPTSNGQDVFACLKCGYSPHADYNAVAGLRPAGSKVA

SEQ ID NO: 25876 - protein, 418 aa, Halorubrum sp.
VADDYVRRTAITRLEVTDEQRDLLEETISEWKRGCQLATDMAWGKCNAKSDVQPLAYDDVREHTDLGSQHAVLATHQAAQAITGCLERRSKGKNVSKPTFTAPTVTYDTRTLTLFDDETVSLSTTESRVRCELALPDADDGYQRQYLDSDTWSVTESTLTARNGDYFLHLGFRRPKTDMERNTAEDGTVLGVDLGIENLAVTSTASFVSGRELTHNLREFEKVRAGLQQTGTRSAHRTLEQSSRRELRYIRDVLHKASNAIVAEALRYECDVIAFEDLTDIRDRTGASWGHKWAFRTLYEQVEYKAEAEGITVKQVGSAYTSQRCAECGFTADENRPARTEFSCQKCESEANADYNAAKNIGMRYVRRGQQSSRRTGNSQLALKSGTVTPSGGFTAHPDGFEAELTDKPLPQRAKSVD

SEQ ID NO: 25877 - protein, 418 aa, Halorubrum sp.
MPAVTKTLELQLVDPTTNKRRKLRETRVAYQQALQAAFDAHCPTQSAANDVVVEYDLSGYAKNALKQFVPQLHTSYDADEISEDHSVKFTNEGIRLDHKPQNAIEWYVKIPHHEDYSLWIPVRANPDQREWLEALHADDATMGESRLFERDGTWYLHVTATREVEKHSAVSADERTPIGVDIGEASLVTVCHRDKRGSPVRPELWADDGKAVRRLRKTYFTAKQRLQKRGSERIAASYGDTVWNQIDDVFHRVTREVVEYAESVENPVLVLEDLTDIRENMDYGEYMNRRLHGWGFAKLHAQIRYKAAEQGIPVETVNPRNTSKACHACGEHGSRPRQAMFRCSTDDCWVGEYQADVNGAINIADRYRSGESHRQSDRNSRQKAGADDSTTDGASLTGPQDSHADADTQQRRRGTHAS

SEQ ID NO: 25878 - protein, 316 aa, unknown
  TnpB Polypeptide
MNSQVNQNAIRKTVKSWVGYFESMKEYAVCLEKFLGRPKLPGYIRTQQATAWWTKQTARLTFQAGKAYLQFVNLKEALCIGKESQYRGLKYIKTEIKPFHGQFRILITLNDPAKEPGLPEDPKRILGIDPGLDNLLTVAGNFGKAPFVIRGGVVKSINQRFNKRRAKLIASLTRGYDSSHSRKDSHALDALSRKREDTLRDIFYKCAWYLVRYAKVHKVEVIVIGYNPLQKQEISMGKQNNQSFVSIPFQKLREIIRMVANREGIPVVMQDESYTSKASCLDQDPVPDYKEGETSVETKYIIDVALEVFVFLCSQE

SEQ ID NO: 25879 - protein, 267 aa, Lactobacillus sp.
MKSMAKMKCHYGLKVRIYPSDRQKKIIKINSDASRFIYNEMVAINNELWRLKQVKLPIDTIQNRIEQLELRQSAKQMSNHFQFLEDKRIDSLTKANAIQNYHKAWNAFRKVHTAGVPKFHRKSYVWRYQTNCQYLKQKAAYLTNGTVHFEDSKHVIVPKLGRLRVKGSHQRVLARSAETRIGTVTIVKDASGRFFLSMQLASDTPFVNWPQNTGKQIGIDLNTENFLTTSNGDTVANPRYYRIIKGRLAKAQRILSRRARRTSTITD

SEQ ID NO: 25880 - protein, 237 aa, Calothrix sp.
VSSLVTLSTGEKIANPKAFDKHYQKLRKAQKSLSRKQKASRNRDKARLKVARIQAKISDSRKDHSHKLTTRLIRENQTIVVEDLAVKNMVSQRVGRVSRLEATGEPVRVKNPKLARAISDAAWGELVRQLEYKALWYGRTLVKIDRWFPSSKRCGHCGHVVEKLPLNIREWDCPNCGTHHDRDINAAKNILAVGHTVAVCGANIRPDRHKSKGQLRKTRKASAVSVSRTGKKQKPKS

SEQ ID NO: 25881 - protein, 402 aa, Escherichia sp.
VKRLQAFKFQLRPGGQQECEMRRFAGACRFVFNRALARQNENHEAGNKYIPYGKMASWLVEWKNATETQWLKDSPSQPLQQSLKDLERAYKNFFRKRAAFPRFKKRGQNDAFRYPQGVKLDQENSRIFLPKLGWMRYRNSRQVTGVVKNVTVSQSCGKWYISIQTESEVSTPVHPSASMVGLDAGVAKLATLSDGTVFEPVNSFQKNQKTLARLQRQLSRKVKFSNNWQKQKRKIQRLHSRIANIRRDYLHKVTTTVSKNHAMIVIEDLKVSNMSKSAAGTVSQPGRNVRAKSGLNRSILDQGWYEMRRQLEYKQLWRGGQVLAVPPAYTSQRCACCGHTAKENRLSQSQFRCQVCGYTANADVNGARNILAAGHAVLACGEMVQSGCSLKQEPTEMIQATA

SEQ ID NO: 25882 - protein, 283 aa, Exiguobacterium sp.
MLKGYKYRLYPTAAQADFLVRTIGCARFVYNKLLEDRIKIREETKAGTGQKRKPPTQASYKPLFPFLCEADSLALANAKLHLDTAVAKFFAGTAGFPVFKSKRKARASYTTNDALVTEKIPNPRNLREAEARLKRAQRALSRKKPGSRNREKARLLLAKKHEQVKNRRHDFLHKLSRRIVDENQVVVVETLKPREMMQDRRLSKSIGDAGWGEFVRQLEYKARFYGRTLIKADPWFASTQVCSACGENGGRKELDVREWTCAACGALHDRDVNASLNLLSLAD

SEQ ID NO: 25883 - protein, 444 aa, unknown
  TnpB Polypeptide
MYKRKYTVITQLHEQNNKELIGYVEVAHHTYAKAVRETFYVIKNSKEFNKSSFNTYLQQTYGITKRTANSIISDAQGHINKLKELKIYEKTQLERKIKHLETNVIPKLEQKREDNSTMLRLGLSVSLVSQRNLRRKIVAKKQKLNRLKQKLANLTYQIETYSFKLCFGTKHLLQREYTEFVEHRDSQMSFVGGKDETCCNHQLQLRYNSKDNQFVLKMRRDFGGFKELKGSDRFVVGKVYFRHHKDKLVRILKEKNSPLSFKIIKRNNRYYLYCTFEVKLDSDDFLTRSTYGTIGLDFNKGFITLTETNQYGNLVQTQFLPYRFKSGNKTRTDLEQVISQVVKLSVSTGKDLCIENLNFNTKKAKTETKQGKKYNEMIHSLAYSQFVDLVESIAYRNKVFIRKVNPAWTSWIAKQKYCPQMKLNVHVGASFVIARRGQGYKDVV

SEQ ID NO: 25884 - protein, 416 aa, Vulcanisaeta sp.
VFFLPLLLCRAVAVELEVTKELNSLLYSVESAYLNIVREVAMYAVANNVTSATQLQSLLYRKYRLEYQDLNSQLVIQAIRQAAQIAKSFVERRRKGLVHKSYPEIKTVSIRFTEFTWNYEEFVKSVAPVRLELSLPSGRTEVWLRPHKHFWQYWWRVLTGEAELASTLMIKRRLNRWYAVFIFKLKPRQEVPQRVVAFDINENTVAVSRIDIIATIDKIADWNRRYLMPELYSIRTDFGRLARRYEAIRNAIIEKLKPGFALPNGKYMNITNTREYRKRVKHLRESGRKVGRVRHVASELTKNPSIIITEELGEKPQDEMISDLESGGLRHRIKQIPFKALEKTVEDKALERGSKLFHVSSYRNSRVCPIHFTRLESTDDWHTLQCPLGHYVDRDHASVMNMAWKTTPEAWTKGVW

SEQ ID NO: 25885 - protein, 385 aa, Vulcanisaeta sp.
MSDVVGASTVVDYVTIIGKLYPVSSEDYMRLVRLAWDFKNAVRITTRMIAKGVDKNSILRELRGMLNKAYADSAYKVARAIVEGCLFNGCNPLHIEVRRPFIVSEGESSRLGNRNVRLENTGLVKVKYPYDGSWITLRTEFGERYLPLLRELVDLARQREVSYGARIVFRGGSIYLHLSIPIKLYLKHFRKGEAEGGFVGGFDLNSDRVNLVIIDEHGRIVDTRTAWFTETTSHGFPRNRARALRLRALAKLLKYCYTHNVGVVVFENLPLIKRRRFTRSRVGNRKITRFAKRQLIQYGIVMALKYGFKTLLTNPRGTTNSKEHEEVMRKYGLDRHTASAYLTALRGLKALINMYTTNNHKNQNSPRVNWPSHIYPQQNQTLNRN

SEQ ID NO: 25886 - protein, 380 aa, unknown
  TnpB Polypeptide
MSTEKFAKKQYIKGFKIRLKPTKEQEILTKKSIGVSRFVYNWCLSVQSTSDKFIRDNELRKELTQLKKTKEYYWLAEVGSNVIKQSAKDLCNAYRRYFNHISNRPTFKKKGYSNSFYVNYESMKRTETGVRCEKLGNIKTSERLPKLAKDKHYLNPHIIFDGKYYYITFCEEMEMIVKETISKVVGIDLGIKDFAVCSIGVVYKNINKTLTMKKLNKRLKHLQRQLSRKYLMNKIGNKFVKTKNIIKLEHEIELVYRRIKDIRENYIHQITSCLVKTKPCKIVIEDLNIKGMMKNRHLSKAISQQNFYRFSHILKYKCDWNNITLVKADRFYPSSKKCSCCGAVKDSLMLRDRIYKCNVCGLIIDRDFNASLNLANYKLT

SEQ ID NO: 25887 - protein, 404 aa, unknown
  TnpB Polypeptide
MIKARHTTIHPSPAQVLLLRAAQQEAARCWNDIVTIAKAHYDATHTWISRGDLQKQLKRTYKLHSQTVQALADKFCENRLSAAAHRKNGNLKMKYPWRIKKFLTIPFKQMAITTSRRGTILLTLSSRIHFDTGVIPPSPVRTCEILWRKGRYVLVWTSDYLEPAPIKGIIGGIDIGEIHPVALCGEHGHGLVVSGREIRSIKQLRNKSLAWFSVALSRCTKRSRRYKKLMRAKWSLISKTDDQFLNLYHQATRKAINYCIEKGIAELIIGDPAGVEKNTKKEKRLSRKSRQKVSQMETGTIKKHLEYKAKEAGIATCFVGERNTSKQCPACGELNHPRGRVYRCSACGFEGHRDGKAAFMMIRKKYPDTAAPVRFKFEHKQPIPKYRKAWDMTGVTFGWSPVLA

SEQ ID NO: 25888 - protein, 466 aa, Natronolimnobius sp.
VSDRPQRTNEYIAEPTSDRYRQCLFEWLAAHAPLWNQINYRRRQQYFDEDGDVWDAEYTNLYDDYAPILGKATCQQVARKNSEAWRSHFRLLNNYHDGSNNTVTEKPSPPGYWGNRDDGYELHGLVRNDLYTLDWDEKRSTLEFGVGDALEEKYDFEYQERVTLEVRGNPQWDGDDSRLELVYDEAADKLRVKHPVRIRPDRLQQQRLDAVTHTLHPENTTHTASIDVGANNTLAIVTTTGETTVYHARPEFDRFRALSTRIAELQSQLPDDRYTSRRIQRIYDERGEKRDHSRDAAVKHAAEWLLSRNVDTVYVGNLTDVLGTHWKASVNEKTHAFWSHRRLADRIELTFGDVGIGVKAVSERDSSSECPECGSDDVVRDGDEFRCHDCRLDAHSDVTGAWNLLQSEVGPMARPAALSAGRDRDSPVNGAYWEWDGHDWIPRSFGEQSSPTDQTSIGEPASSQPG

SEQ ID NO: 25889 - protein, 446 aa, Natronolimnobius sp.
MQSSELTHTLSFGLHIDTGSPDDLRNGCLEARRIRNEVNRLDRHGWDWDDLKSVVVDNADHVKNTSQQLVDKALGEIETYLDNKDDGWGRPYPYIDELYPLVMNHGEGYRLFVEDEDTVRFRISAAPRNHVKGELRGSADHFDRVRTALENDEWRVGTAEVVHKHGEWRLHVTVTHESHQVASKDDADTVVGVDLNEDCIALVAMNRDGAVLDSVIIGYLEIKEQRHEFFTKRKRMQKDGQTAFESVVQTEERDYVHDCLHKVSRQVVEWVSQFTDPVIVFEDLKDMRDSIDYGTQMNRRLHSLPFAALREMVSYKATWKGIPSDDVDPEYTSQQCPRTECQHTERANRQKKRFKCCECGFQDHADRKAAVCVVQKWFKKQNETVPSLETLPRVRTVRRAASGRGGATGSHGHDLCSGVHRHGTSAQDSPSQAREELTSVASPSWD

SEQ ID NO: 25890 - protein, 376 aa, unknown
  TnpB Polypeptide
MRKSFRYRIYPTPKQEATLDEQLRLCRWLYNAGLEQRIWAWKKRKLSISKYDQMRELSESKLEHPEFKLVNSQVLQGVLQRLDQAYQRFFSGAGFPRFKSRDRFKSMTFTQTGYKLGERKLKLANVGEVRIKLSRPTEGEIKTLTITRDSSGHWYASFSCDLGSSQAPRRQVEVEAGIDLGLEKFLTCSDGSMVPNPRHFRESEAKLTSRHRKLASKPKQKRTRNREKAKLLVAKAYEKVRNQRRDFHFKLANYLIRTYDRIAHEDLNIRGMSASASGTVEAPGSNVAQKAGVNKSILDAGWRQFLEILRFKAESAGVEVIGVDPRNTSQVCSSCGSLTRKGLNERVHACDCGLRIDRDWNAALNILRLGQSLSAS

SEQ ID NO: 25891 - protein, 359 aa, Pantoea sp.
MHHTKTLQLRIKDKHAKVLSAMAREANTVWNFCNETSHRAIREKCTWLSAYDLQKLTAGYSKCDGVQIGSATAQCVCEQYALRRRQFKKAKLRWRVSDPKSSKYSLGWIPFKVGCVKYKAGQVCFAGHKFSLWDSYGLADYVLRSGSFTQDTRGRWYLNVAVKVLIKISTGKGSVGIDLGLKEAATASTGERIEGRFYRKLESELGIAQRAHKKHRVKAIHAKIANQRKDMLHKFSTQLVASNAAIFVGDVASAKLVKTKMAKSTLDAGWAMFKTMLEYKSQQAGVVFEVVNESYSTQTCSCCWGIPASSPRGRAGLRIREWVCSDCGTVHDRDINAAQNILAAGHRRLAGGITAPSRR

SEQ ID NO: 25892 - protein, 485 aa, Chloroflexi sp.
MSRSKTLSFITEIPLRVAPGDERAMRKRLEAARQVYNACLGESLKRLELLRQSKLYQVAGKLPKGPHGSPQAKERATAFREADVALGFREYDLHAYATQFNHCWIGDHLDANTIQTVASRAFGAVKEHALGKRGKPRFKGEDQFDSVEGKTNKQGIRWRDDRVEWLGLTLPAIIDANDPVIAHGLNSPIKYVRLVRRNIKGRNRFYVQLVNEGFPYQKPKNKLGQGDVGLDIGPSTIAVVSEDVAFLTRFCDELERLQGEIRRLQRKVDRQRRANNPENYNPDGTIKAGPKRWRKSNRQKQTEAKLAELCRREAAYRKSLHGALLNIILRMGDHFNLEKLSYRAFQRAYGKSVSVRAPGMFVERLRRKSESAGGVTNEFPTSLRLSQLCHGCGTVDKKSLSERWHHCDCGVAAQRDLYSAFLAVCVEGDRLDIAKAEELWPRVEPLLVQAMSSLEQQLASGREFPASFGFSRRQSQSPANQRECS

SEQ ID NO: 25893 - protein, 493 aa, unknown
  TnpB Polypeptide
VFFLLLLLRRAVAVELEATRELNKLLYSVEAMYLSIVREVVAYAVEHNITNPTQLHRLFYSKYRLEYQGLNSQLVIQAIRQASEIAKSFIERRKEGLVGKPYPEVRGVSIRFTEKAWSYGEFVKSIAPVRLSLSLFSGRREVWLRPHKRFWLYWWKVLNGEAELASTLIIRRRLNKWYAVFIFELKPREEEPKSIVTFDINENTVAVSRIDLPSTVGKVIDWNRQYLTPQLYEIRTDFGRLARRYGRIRSAIIERLKPLYALPNGKYVSITGTREFRKQVRRLREMNRKLGRVRHVANELTKTPGIIVTEELGDNPQESMINGIGKNELRHRIKQTPFKSIEKAVEDKALEHGSKIFRVSSYRNSRVCPIHFTRLEETDDWHTLQCPLGHYVDRDYASVVNMMWKATPESWTKGVWWGLKREKVNWNVHEGDSNPIIPYLIVQYLWYVLTIFTASEESPAMLARGNPMNRHRMQNEGGGEETTHAPSGRGGGQ

SEQ ID NO: 25894 - protein, 380 aa, unknown
  TnpB Polypeptide
MDVEFKNAVPSCSDSLFGFHRPSIFEAMKQTKTLKVRVKDKHAAELNRMARSVNFVWNYLNELSSRAIREKGLFLSAYDMHPYTKGAGKDLGLHSQTLQCIAAEYVARRKQFKKPRLNWRKSGGVRRSLGWIPVNTGAAKWKNGQVFHNGTYFKVWDSYGLSTYKFRAGSFNEDSRGRWYFNVAVEVDVQPTLGQGAVGIDLGLKDVATCSDGGRLENSRFYRRMEDQLATAQRARNKRRVKAIHAKIKNRRQDAQHKFSRKLVNQYGEIVVGDVSSTRLAKTRMAKSVYDAGWSQLKTMLEYKCAHAGIVFKVVRETNTTRACSSCGSLSGPPGVNGLRVRGWECVECGVLHDRDVNAARNILSLGAGRCPQEVGIPVL

SEQ ID NO: 25895 - protein, 411 aa, Butyricicoccus sp.
MPYHIGFKVKIYPSNEQKRLIAVNDGVNRSVYNHLVACNNEKYRLLKMVSFVPAYRDKLDSLSNMTGPVRNIKNALPYLYGKDVDEQAIANAMKNYSTAWKNQCESHTGVPTFKRKSYELSYQTNAHYRKTPDGLKCNVRFEDMRHVTLPKLGRIRIGASPKILKALRERTCDTRIGSICISRDSVGEYWASFSIASEEPFYEALPKTGKMHGIDLNLLELVNASDGSSSENRRYRRQMKKKLSKSQRKQSRMYEHAKKDGRSLKTSTNYQEQRRKTAYIHRKAERRRTDYLHALSKREVENQDFIAAEDLKVRNMMKNHNLAGAIADAAWRKLLTMLQYKSVLYGKTFILVPPRNTTQTCSNCGYIMKGDEHLTLKDRSWVCPQCNTMHERDTNAAINILNRGLQIAHAV

SEQ ID NO: 25896 - protein, 263 aa, Methanosarcina sp.
MYDGKYFKIKYCYEEKKQTVDIDYSKYLSIDLGVSNFATFVDTNGTATIIDGKYVKSLNQWYNKENARLQSIKDKQGIKQITNRQIKLLSKRTTKITEFMNRTVDYLIKHCLKNKIGNILIGELTGIKQGINHGRRNNQNFVQIPFGKFKGKLESKCNFYGIKYTLVDESYTSQVDSLALDPIEKPEYGRTRRVKRGLYKSSTGQLINADINGALNILRKVVGDSVVKPITDRGLVNRPTRLRLAYELNCQPEESKPHCFSVR

SEQ ID NO: 25897 - protein, 316 aa, unknown
  TnpB Polypeptide
MKSLKAKLNLSWYQKLVLNTLSNEHRLLYNHLLEHVKNTGTIVELSKECNKFRHENSLTIHYRPAYETCKMLTNSIKSYFALKKKDKTARFPYRFKSWKYFTTILYRSNNFNLHNNKLVLHIQDCRCKNAKTLEITLPDYCKTIIGTIKILQIKREANDYFAIFTYSELKKVRTFVQERLISIDPGVTNIATIYNPNKKEIIEIPNDQFHKKLEKRIEVIQSLCDKKKKYSRRYKRLAAIYKRCKKKLANKNKDFQHKVSKKIVDYCVENEVSKVVYGDIKTKKLVKDSKLAKDRGLNKSTQSRGTLSRFKTFVEY

SEQ ID NO: 25898 - protein, 412 aa, unknown
  TnpB Polypeptide
MRSQKIRLKLTKEQERLAWWYSKVSRNFWNLLVDIDKRNNQGEFDEILSQKGNKFYRSNFYDREIYHLTQSDYLNLAKIVVTKNIEEDKELWSWYYQPNQSFIYNFLSRELVKIRRQNKGKLNFRSIDKVQPNFNVICCLSSNKKRPSRIYLKDSGKLQIPTIGDVRFGSVRTDFNLSCKKQVANISFDGKYWYLSYTEDVESQVADLPDYTDGVGIDLGIKTLATVSDGTTVPNIKTFRRVRILNKRLKRLQRKVSRKYCINKCDKHNKTKNIIKLERQIKLIHRSLRNIRINHIRKFVSELVKKQPQFIAIEDLNVKGMMRNKHLAKDIANCSFYTIKEHLIRKAKERLIAIRLVDRFYPSSKTCSACGNYNKDLKLSQRVYHCSNCQETLDRDFNASLNIAKTDNYVLA

SEQ ID NO: 25899 - protein, 275 aa, unknown
  TnpB Polypeptide
MYSDLTDRSICLKLWNGEKWIWTDCNLKGRPLPQDGQLMSPTLVKEGRRYLLNIPVKQENSDARTAKERMAEGTNLCSVRFTNTDTFAVCCILDEQGNQLAVHTCRGGDAYRHRCKLLETRIQKSRPNTVGDNSPQPNRKYYMHLKNLSEHYAHQVSREILNFCKENQAGIIVLPDYDRNFTRMAMVKSGNFSPLHLSSKIRTNLQYKAWAEGILVLETRTDGLKDKCAICGGKVRRKGNEFLCENGHQGNRFLNDARNLGRKCQDSFFRGSRTK

SEQ ID NO: 25900 - protein, 373 aa, unknown
  TnpB Polypeptide
MKLALQAKLVVTGEEKAILLQTMEKFNAAASFAAKVAFEAKVFSQPSVHRRCYADIRAKYGLSAQLTVRAIGKAVETFKRDKKVCPAFKPHSAVIYDERILSFKGPDRVSIYAISGRLLLPCIFSKYHQERRGHIKGQSDLVYRRESGQFFLYVTIDLPDGSPIKPEDAIGVDLGVVRLAADSDGRSYTGDGIEARRKRFSALRSGLQSCGSRSAKRHLKRMSRDEAFFRRDVNHRISKSIVASAKGTRRAIALEDLKGIRERTTVRRNQRARRNEWAFSQLRLFIEYKAKLAGVAVVVVDARNTSRTCPECGHCEKGNRKSQSEFVCRHCGYSNNADYVGALNIRAKGREKLFVWADVNRPLVSAHGLQAVG

SEQ ID NO: 25901 - protein, 236 aa, unknown
  TnpB Polypeptide
MIKTKNKLVPQGRILNATVSQEPSGKYYISLCCTDVDIKPLKRTGNSVGLDLGIKEFCITSDGKMIKNPKYLKKSLAKLVKLQRKLSRKPKGSSNRNKARIKIARQHEKIANQRKDFLQKLSTELIKENDIICIEDLQIKNMIKNHKLAKSIADVSWSEFVRQLEYKANWYDKQIVKVDKFFASSQICNVCGYINKETKNLGVREWDCPCCNIHHNRDINAAINILNEGLRILDVA

SEQ ID NO: 25902 - protein, 290 aa, unknown
  TnpB Polypeptide
MKAPITMNQAQVYGISKQNSKEIFQFFQKNFGCTRKVYNLCVDSCYKQLEQAGYTNGDDLPEFSFPKVSALKKDYPYLKEADGLGLANSVLDFQKAYKTFRNQKDCSAYRKSALRRDRSGKEPLSFRGLKGIPRFHAKSAGYFSYRTACQYPKEGNALKRPTIRLEGSILYLPKLKQGVKLIIHRKLPEDAHILNVTVFMDTDGTYQVSICYSYTFLMEMDYREAAAQEQPLPKETRFLGLDYSQKDFYVDSEGRKANYPKYYRRSGQKLARLQKSICRKEKDGKNYQKT

SEQ ID NO: 25903 - protein, 374 aa, unknown
  TnpB Polypeptide
MNVLRAFRTELDLNNTQRTACIRHAGAARFAYNWALARKIEAYQNGQKLPSAIDLHRELNVLKKTEFPWMYEVSKCAPQEALRNLDHAYAHFFRRLKQKKSGKNLKAGFPRFKSRKNGLGSFRLTGAIHVYEKAIKLPRLGILRLKEQGYLPGGEAHILSATVSEKAGRWFVSLQVEIEISDPKPAEKPAAGVDLGIHCMAQVSDGTRFENPRALKSALAKLKRLQRVVSRRQKGSANRTKAVKLLAKAHYRVANIRKDALHQATTYLAKTKSVIVLEDLNVSGMLKNHHLAQAIADVSMSEFRRQLSYKAAWYGCEILIADRFYPSTKRCSRCGEVKPVMSLGEREYRCECCGFVMDRDLNAAINLEQLIYSS

SEQ ID NO: 25904 - protein, 131 aa, Spirochaetales sp.
IANRRRDWFWKLSHELCSRYGVIAIEDLNIKGMARMWGRKVHDYAFSEFVEILEWCARKYGTRVIMIGRYYPSSQTCSVCGHVWPSTKDLSVREWTCPECGVYHDRDVNAAVNILAEAKRIMNRMEQAKDA

SEQ ID NO: 25905 - protein, 607 aa, Scytonema sp.
MDNHEWKKMNGSIPPKQQTLSDAMPNQSGVGKRKGKSKPIALQEGKDGLNAPKWNSLQGLQLELFNLEQSVMGESQLAVSETISIDRLNSLAQDTQKQKLFQKLAADSILGGASLLPYSNELCREIFNALLLPIQTGFVDSGSTLFNGSVQNLTANSWFRVTANSAPNRNSLQTCSPSSIVSVQGFTDLESTESQSSKNYGLNPFKKSQNIPPNKSVKIPVFPCKELHLIWKQWLAAYRWVYNQCVAFFNSGEKLPDNVSLDQHIQNLQIQEGNEWTQCLGKTRQEAVCEAQSAFRQAKRAMIGKPKVERSKVFIKFRSGRDNSQVIQFKNDAFKNGTWFPTKVKGLLFCTAYGYEFPTECIYGTELAYQRTQNGYQWFAIFPKYENPEISSSDKIIGFDPGNRTFLTGFDGQTILEFGKKDIGRVIRLCLHLDKLIGRKIKASGKVGKKYRYKLGQAIKRLRVRIKNLINDMHRKVSSLLVRNYKVIFLPTYETSQMVLKAKRKINRKSVRSMLTWSFGRFAKHLKQSCNRHGVLLVRTNEAYTSKSCPKCGKVHTRLGSNKSFTCPHCNFTLPRDWVGAINNLIKPLANLAFEIQGNKLVITCAG

SEQ ID NO: 25906 - protein, 545 aa, Streptomyces sp.
MAERKQLRQVARPFVADGPSGVSIRDRLKGLTPKDEKVLRAVGEHMGQLASADLARRCRDGPDHSTDTWAARKRELTADSSSRWAGSVTSHTHDQCGLSRRAQHQHLASLDAGIRTLRHRLSLPLGQKGSRGTPGGYRSQHEWFAKTRRLAILEERYEQVHAEREAGRVSVVRGGRRLLNQRHNLNAAGKTTEQWRAEWEAARWFLTADGESGKRYGNETIRVTPDGEVSIRLPAPLAGLANARHSRYVLAAKVSFPHRGEEWRDRVAHNRAVAYRIDLDTTCARWYLDASWTRKDLPVIPLDTLRAGGVIGVDTNADHLAAWRLDQYGNPTGAPRRFDYDLSGSAGHRDAQLRHALTRLLHWAQACAVQAIAIEDLDFTDSTTREKHGRKKKFRQLISGIPTGKLRARLLSLCAEAGIGVIAVDPAYTSRWGAEHWQKPLTSKKRQTSRHAAASVAIGRRALGHAIRRRTTPPRQHQSDAGGHRTAQAGPRDQRREEPRPHVPGPRTRCVQPDAAGTRATSASKTVRNAPVGQVRVQDPLLLTD

SEQ ID NO: 25907 - protein, 553 aa, Streptomyces sp.
VPAAVPVAKPFRPIRASFVVREASGCAVRTRLKDLTATDVEVLRQVGAHLGSLASRDLRLYASAGFERSSVSWAVRKQALTSECSSRWAGAITKGTHDQYALARRAQGAHLHGLESAVRAIRERLAKPVGSRGSKREPGGYRSAFEWRHKAQRLRVLEARHAQVKADRDAGRVRVVRGGKRLANTRHHLDEAGLSETRWRARWEAARLFLSADGESGKRYGNETIRVTPDGQVSIKLPTPLEHLANAPHGRYALTGRILFRHRGEEWADRVTGHRAVAYDIRHDPLRDRWYLTASWKRPSLHTVPLETACADGVIGVDMNADHLAAYRLDAHGNPAGEPRRFAYDLTGAASHRDAQLRHALTRLMHWAVATGVGAVAIEDLDFADSTTREKHGRRTRFRQTISGIPTGRLKARIVNMAAEHGLTVVAVDPAYTSQWGAQHWKTPLTTPARAVTRHDAAAIAIGRRALGRPVRRRTATPPHDRSDRAGHRAVQAGPGDRRREETRPSIPGQRTRSATPDTRAKAGDQRAQHRSGHAAEHEKTWTWTQGSLPLSL

SEQ ID NO: 25908 - protein, 269 aa, Rhodococcus sp.
VLPNGRLRLPGVGDVPVRWSRDLPSAPSSVTVTMDAAGRYHASFVVDVPDQPLPLVPHEVGIDLGLTHFAVLSDGTKVDAPRLARKAQAKLRTAQKELARRQKGSARRERARRKVARCHARVGNTRRDWLHKLSSTIVRENQAVYVEDLAVSGLARTKLARSVHDAGWSTFTAMLEYKARRHGRTFARVDRWFPSTRACSVCGAIGEAKPLHVRSWTCPCGAVHDRDVNAAKNILAAGRADSPTLVEPVSAGTPVPHPAVKREPAGSTA

SEQ ID NO: 25909 - protein, 204 aa, unknown
  TnpB Polypeptide
LTFEKRCKYEFQPKPTPKKRSFIGVDVGINALATCSDGTIFANVKAYKQAKKRLTRYQRRIKKKEPGSKNRAKAVKKLAKAHKKVADIRADALHKLTTWLAKNHSTIVIEDLNVSGMLKNHKLASAIADCGFYEFKRQLSYKCDWYGSKLVIVDRFYPSSQLCSHCGQKQKMPLQKRTYECSNCGFTADRDFKAAINLENYARQ

SEQ ID NO: 25910 - protein, 492 aa, Oceanobacillus sp.
MGAMATTEKQYKTDQILVKKGHRMFNYFEQATSNAKKMYNTTNFYIRQAYTALKSDKELQPLQHEVLENIQKHLPKMNDVQLAAYLRKAEKEKVKPKEKRKELKCNLFEGPTQEKPFVDYNFLDALFKSMVQNDYRSLPTQSAQAVMKNVFQNWKSFFSSLKDYKKNPSKYKGRPRIPNYSRAKQKEVVFSNQDCVVKDQRFLKFPKTKERLNIGKLGLTEGKLKQVRVIPRHGQYVVEVIKETQPKNEPKADNNKYMAIDLGIDNLATIITNTGYRPVLLKGKNIKSINQLYNKKRAHLYGVLRQGKGAKEGSFSSNALTGLYQKRQRKIKDLFHKASRNIVNLALREDVSTIVIGLNKQWKQETNMSKRNNQSFTSIPHGMLLNMVEYKAAEHGIKVEIREESYTSKASFLDNDVIPTYGKKTKDKPVFSGKRIKRGLYRSSNGTLLNADVNGACNILRKAFPNALANGIEGLDGSQSINVSTPLSLIVH

SEQ ID NO: 25911 - protein, 370 aa, Oceanobacillus sp.
MAKQHKAYKFRLYPTKEQEFVIRKTFGCVRFVYNKMLAERKETYETLKENKEEWKKVKHPTPAKYKKEYEWLKEVDSLALANAQLNLDKAYKAFFKGNARFPRFKSKRHKQSYTTNVVNGNIQLLDGHIKLPKLKSIKMKQHRKIPSEYKIKSCTVSMTASGKYYISILTEYEKEIESKEIEKVVGLDFAMDGLFVDSEGEKANYPKFYRLMLEKLAKEQRKLSRKKKGSSNWNKQRIRVAKIQEKVANQRKNFLHHKSKALVSKYDAVVMEDLDMKGMAQALKFGKSVADNGWGMFTSFLQYKLKEQGKQLIKIDKWFPSTKTCSSCGKTQPMPLEVRMYTCSCGLNLDRDYNAARNIKKEGIRLLATT

SEQ ID NO: 25912 - protein, 362 aa, unknown
  TnpB Polypeptide
VSQYQTSSVVDVSSIVNYVTIIGRVYPASSEDYMRLVRLAWDFRRAVHVATRMIARGLEENSVLKELRRVLNKAYADSAYKTAKAMVDGCVFNGGNPLHIEVKKLFIISEGESSRLGNRNVRLEDTCLVKVKYLYDNSWITLQVEFGEKYLPLLRELVDLAKQKKVSYAARMVFREGNIYLHLSIPTQLYLKYFKKGGGKGRFIAGFDLNSDRVNLVIVDKYGRIVDARTAWFPGATSHGFPREKAKMLRLSALARLLEYCYRHGVSVVVFENLLSVKRKRFTRSKKANRKITRFAKKQLIQHGVVMALKYGFRVLLVDPKGTTNSRKHCELMKRYGLDRHTTSAYLIALKGSNTNEYECHK

SEQ ID NO: 25913 - protein, 385 aa, Herpetosiphonaceae sp.
MLKAYQYRLYPSKAQERKLDATRETCRRWYNDLLAERKTAYEERGETIGKYEQLRRVKDHKAASPWAKVVHSHVLQVVVSDLDQAFQAFFRRVKTGGVLGAKAGYPRFKGCNRFDSFGFKEYGNGFKLDGRRLRVSGIGRIAVRWHRQIEGTIKTLRLIRKASGWYACFTAEYEPTALPATGKDVGVDVGIASLLTTSDGDTTPKQGWYRREQAKLRILQRRVARRSKGGSNRRKAVVALQRQHEHIGNQRKDFLNKQSHRLIVQYDRIAVEDLKITNMVKNRHLAKSILDAGWGSFVARLHAKAEEAGRVVVEVNPAYTSKDCSGCGYRFEQLTLKDRWIDCPRCLLSLDRDHNAALNILKRGGQLRWNISSSMDGLFQEAAGL

SEQ ID NO: 25914 - protein, 418 aa, Halobacterium sp.
VADDYVRRTAITRLEVSDEQRNLLEDTISEWKRGCQLATDKAWNVCNAKSDVQPLAYDDVREHTDLGSQHAVLATHQAAQAITGCIERQSDGKKVSKPTFTAPTVKYDTRTMTLFDDDTVSLSTTENRVRCGLALPDADDGYQRQYLDSDEWRVTESTLTARDSDYFLHIGFRRPKTDAERDTAEDGTVLGVDLGIENLAVTSTAHFISGRELSHNLREFEKVRSGLQETGTRSSHRTLEQASGRELRYVRDVLHRASNAIVGEAFRFECDVIAFEDLTHIRERTGASWGHTWAFRELYEQVEYKAEAEGIAVKQVGSAYTSKRCAECGFTADENRLSRNDFRCVKCESEANADYNAAKNIGMRYVRRGQQSSRRTGDSQLALKSGTVTLSGGFTAHPDGFEAEFMDKPHPPRANPSG

SEQ ID NO: 25915 - protein, 253 aa, Halobacterium sp.
VTVSDETRDTPLANETAALDIGANNLVACTTTAGEQYLYDGRELFDRFRETTREIARLQSKLREGQYSSKRIRRLYRKRTRRRDHAQEALCRDLLDRLYEDGVDTVYIGELTDVLETHWSVETNAKTHNFWAFKQFTERLACTAEEYGISVEVRSEAWTSQECPQCGSTDRTTRHQDTLTCPCGFEGHADLTASETFLRRQTEQAVRPMARPVRFEWDDHEWSESPRSHRPKEQRTDPSTVHRDGNVASGESA

SEQ ID NO: 25916 - protein, 358 aa, Nostocales sp.
LAACRYCYNQAIAIQRQSHKKLSKLNLRNLVMQSDLPAWVKETPCHIRQNATFDAHQAYTASRDAKFKSVRDAKQTIKFNSSNFTQGKWYSQLTKKLGFESSEPIPESCDYGTQLVYRRGKWFAIFPEPLVKLSHQAQKIIAIDPGVRSFLTGYDGDKVIEIGGGDIGKITRLCHHLDNLMSRSTQVNAQRRRGMRKAANRMRERIQNLIDDVHKKSANYLTSNYRLIFLPRFETSQMVAKTRRKIKSKTVRSMLTWAHYRFKLIVKHQGLKRGCVVLDVSEAHTSKTCGVCGHQHSKLGGSKVHKCPNCGAQTPRDANGARNIMLRALRDSSFTVSNDGIAIVTVRALSINAQKCSA

SEQ ID NO: 25917 - protein, 172 aa, Ruminococcus sp.
MQRVRRLKKQLRRLQHQVSRKYEQNRSGNKYFKTNNILKLERKIKLLHIKLSDIRLNYLHQVTIAIAKTKPYRIVMEDLNVSGMMKNKHLSKAISEQGFAKFIELMKYKAERFGIEFIQADKFFPSSKTCSHCGSIKKDLKLSERTYHCPCCGFTIDRDKNASINLANYKLA

SEQ ID NO: 25918 - protein, 417 aa, unknown
  TnpB Polypeptide
MQLVKKFKIFPTKEQLDVLWTLSENCRLIYNFALTERMETYANTGKSIGYIKQQNDLPKIKKHYPRYQQVHSKLLQMTLRTLDADYCSFIALKKNGDVNVRPPKYKGKKHLITLKYNQSGFRLDDGVILLSHFINDIPLEFDMPLKFHHILQVEIFKHNGQFWIAVIYDKEVPEYIDNKLYQAWDLGIKKQTGVNIEGKFIEVKNPRPDKYWRKSITGIQSRRDHCIKGSRKWIYLNFLKRKCEKKQANQLKDFQHKFTTKAVNNTKANTIVFGDLSVKKMAQSEKATPWMNRATQGTGFLGRIASFLTYKCEKVGKKGIENDEYQTTKRCCCCGELHDMPVWKRVMKCDCGNILDRDRNSTVNIMLDFLSQNALWTSYRQFVGNLRNTGLNIVSAHSQKVQRISGGQFTNGASRGM

SEQ ID NO: 25919 - protein, 292 aa, unknown
  TnpB Polypeptide
VCTIRDVEGSTLATLFIGGGQRVSGFRKKHLGRIARNRSRTGLIAQNELDNADLWKKIRNVDEHMAHLVSIRIVQFAQKHKASILVFEHLGNLKPEKGKYSKRGNSKRAFWMKGRIFNDAKYKAYHAGILTSRVSPRNTSRECACCGAMVARYAEGQEAKGYTYGAPLVSCEKCGMKGNADRNASLMIGNRLFARFGIFFQEKPQTLPATEREERSSGGAALQEPKAETVGHPSLSAGHESSNGHGTAQNGHPRMVGPVRDITNPLRPQSSRIYDPTARGSDYVGVSEAAGL

SEQ ID NO: 25920 - protein, 388 aa, unknown
  TnpB Polypeptide
VALIKTFQYRLYPTASQRKTMDSTIETCRHFYNDCLAERKTAYEERKENIGKFAQLRKVKVLKETNPYAKNIHSHVLQVAVADLDKAFQAFFRRVKAGEKPGYPRFKGQNRFDSFGYKEYGNGFKVDGRRLKLSGIGRIATRWHRPLESEIKTLRITRKAGKWYASFACEVEEKPLPTTGHAIGIDVGIISLIATSDGELVENPKWYRDGQTKLRILQRTISRRKKGGSNRKKAVHALQVQHEHITNRRKDFLNKLANELVVNNDLIAIENLKIQNMVKNHNLSKSILDGGWGYFAQRLSYKAVEAGREVVRVNPAYTSKSCSGCGTIFEDLELSVRWINCDCGLSMNRDVNAAINILKRALQNRDGQSRWEITWAVAPCVSQEATAL

SEQ ID NO: 25921 - protein, 403 aa, unknown
  TnpB Polypeptide
MRNTKYKPFFDPILALLHQQMDICGIVRNHFIALSRRYYRMYGEGLSYKQMSAHLTKLKKLEQYKHWNIPYAWSLQQVIRDLARSYREIKTLGRGRPRFKKAKNHRGIRFDGSQIELRHVLPKQKGQRKYSVYELIAGGMTYRFSMHRPIVGEIKQVAFTRDAIGEIYLTLTEDFVESVPEPKTGKAEGFDIGIKDFLTGSNGKKYKSPMFYKQQEKKLAKEQRCLSRKVKGSNNYERQRKVVGRIHIKTANQRSEHHWKLAVKLCRSFDVMIFENLNIAAMKALWGKQVSDLSFTSFLNKLKHQTNKRNRIFHKIGRWIPTTKPCSVCGYKNNHLTLSDRHWMCPDCETLLDRDHNAAVNILREGLASLGLGDVRPTIVDKTLVGCTVESSSLALNSTSAFA

SEQ ID NO: 25922 - protein, 364 aa, unknown
  TnpB Polypeptide
MTLRTQKIELNPNNEQSTLMSQHAGYARVAFNFGLSSFKVGLDNDEWRSFVDIKREFNAVKYDKFEWCKDLSQNASKNAIHNLGDAVTRWKKGQNSFPVYKNRSGKCSYQADNGEGTIEVHKKRINLPKIGWVRIREELRYSGEITKVVISKYNDKWYASITVRRLDSSNYQHQPALFDDKAPIGIDVGINTLATCSNGDTYDNPRPLKRYERKLARANRRLSRRQKGSQDWFKAKFMLTAVHARIANIREDAHHQATIRIVRKASAIGIETLKVTNMLKNRKIAKALSDSALGGFLTKLKYKANRRGIPITEAPQFFASSKTCSNCGYKKADLTLSDRTYQCSECGFECDRDLNAAINLCPET

SEQ ID NO: 25923 - protein, 387 aa, unknown
  TnpB Polypeptide
VAKWHWRFVDRQDYWLSKNQAQKLYCKGLSGLHSNSAQAVTDSFYDALKAWRKKRKSGDYEGLRPPYKQKRYFKIQWKSSAIKLRDDGVLRLSNGRGADPVLIDWPSEAVASGRKPKRVEIGWDGDQYELRAQYKVDEKDEPKGQRKAGVDLGERHLATVYVEDGENVSVHGGRLRSLRRQHNRTYSSLQSKIDRKKKGSRRWKRLVRAKERQLTKIRNRIKDFLHKVTTRLANVLHERRAGTVVVGDLTGIRERISCGSRMNQRLHQWAYSKFEHMLRYKAQLRGMTVERASEAYTSQTCPNCEHRHKPSSRDFDCPACSFSGHRDVVGARNILSERYPGEVSTGTTQVVGEMASPAGIRYRPDMQCNPASSRRTSFERQECRPVG

SEQ ID NO: 25924 - protein, 546 aa, unknown
  TnpB Polypeptide
MIIQSKYTKVFHSNNLTRQKYDELYIFAVLIRNHKNDVSQYVNDNLLHFLEYNKFQFHKEMREHFKNAISSSFDTLLYTQVFISYQNKFDAIQRKLRFETKIFNGFDFYKRDTKKHKKGDLKKVIIDKKQTLLSNCLTYLARYGNENTIDYINDNINKVDSKKREFYNNILRCCDKFTFERLYNLALSKRECTVKHYSEYPIEFKSLSFDGRSRKKYIVDFNKKFGSKINSFISLSGFNRKTLDIPVTFHKGWHGNMREYIKKTNDYVYTLTFDENKRQVNIHLCKDGERYIPKPNGKTVGIDVNCKHNLFSLSDETTYDYNRKLVNDFCKLSLEIDSLKEDKSYTVGKRKHRKLSVMKSKMVKSEQHLIANMCKTLQSQGIGHIVMEDLNNSFGRCYIKDKDNEDINYNRKVRFLGLSSLKQEVEHIARKYNIAVSTVQASYTSKMCPVCGCIEDENRPTQETFDCIECGHKDNADFNAAKNIKNRVLVTVLRESLLKQLDNGAFEPRNLKREKVKDVLLSFRRNLQETARSECIESGLSTFGYV

SEQ ID NO: 25925 - protein, 421 aa, unknown
  TnpB Polypeptide
MIMTFQYRLKPTAEHVAIMETWSELLRRHWNYALGQRLDWLNRTRCQIDRCSMVSCPIGEIPDRIDYYTQQSALKETKELFPAYKDIYSEVQQMNLQRLDKAWQRWLIPDKTGKRAGRPKFKARGEKPSFSFSRVNHPKAACFLEGSNLRIPRIGEIPIIVHRAIPDGFVLKTATICYRADGWYVSITAADETVPEPKPMDTVKSAVGVDVGLKVFLATSSGAFVPVPQIYRKAQAHLARAQRTLARRQNKSKNQEKQKTRVAKIHQRIARQREKFHYQTAHNLCRKYDLIAVEDLNIRGLARTKMAKSIYDVAWGKFLTIMESVAVKCGVHFVKVSPHNTTQDCSQCGTKVPKTLSIRTHECYKCGLSMDRDENAATNILMKGLQAVGLTVSACGALVDGQALRQELLGATPEAHITASA

SEQ ID NO: 25926 - protein, 526 aa, Nonomuraea sp.
VLAQSRRLPAPTGSGTGLDRTGDGGSRSKGRVSWWTYDGPLMVVFTGGATSSAPDLVLPVRLPQGAGRLPYLVHYLADPTRWHKIDLVRRADPGVRGGWRYEAHLMILGAGYACPRARERRAHAAGLERRGGMDGNVSNLAVVSAPATWPEPAATEPGGLTAKGRGPDGPTMGRTARTSDSAKPATSVEPRGVTGTRLRLTDTERAAAARARAKAKGRKKALDRSRRAANPTRYQPSPRQAERARRRAERGLPAKTISLPGGPRQASAGGIPRQAYRTDTLSRGYRKVRARLSAEAAGQSEARRARAAHLAANIVATHGAHLVVEDCDISTWHRLWGRACAAFTPGMLITALARECAAAGGALLRASTTHTAMSQHCLCGARVAKSLADRVHTCPACGLSGDRDLVSAALASCVTLADPADPQTARVDYQRARALTTVFPQGLQEALTESTVISPAPTPPVGTGQTAAFSEPCRPRRYRTGTASARRSSGMGDTPTPDETTTASSGRGPRRTDVITNRTIPIRDGS

SEQ ID NO: 25927 - protein, 193 aa, Tychonema sp.
LKGSRKISPRIQRLTRCRHQKVDNYLHHTSRLIVDHLVAKQIGTLVIGKNAQWKTEIDLGKQTNQNFVSIPHARLIEMLEYKTRLVGIKVIVQEESYTSRANFLNLDPIPVYGKTDKDLVFQGKRIKRGLYKTSGGQLINSDVNAAYNILRKAIPNAFSNGIESCLVQPRRVNPLKVKVKGEGLDASHVMCNK

SEQ ID NO: 25928 - protein, 485 aa, Tychonema sp.
MKGRLNQSKMEQGNAFTTLTPTKKMEASALDLTSKEKDCKPYWSDLCAQISSRLLLPVETDYVDLDLNFSSLWLIKTVQKSWFSQILFTAQNPNSQQIFLPSFMSYLAECTPWGATARKSKKIRLFLNPEQKAILKQWFGVSRYVYNTTIKYLQQPGTKANWMSIKTEILNGLPDWAKPVPFQIKSIAIKDACGAVKKAKADFKKTGKICSCKFRSRKDTKQSLYIPKSAIGTKGIYPTKLGQSKLKEALPKGFSDGRLTLAYGEYYIVVSEELQPRQTDNQGRVVALDPGVRTFMTFFSESSYGWLGNDSNLLIQKLCFRLDKLISRMSKTNSPQRKRLKKAADRLKSKIQHLVKELHHKTAKFLVDNFDVILIPSFESSQMVSKSRRKIRSKTVRQMLTLSHYQFKKHLEWKAWEQGKVALTSINEAYTSKTVSWTGEVKKIGGSRTIKDSDGNQMNRDLNGARGIFLRALVDTPWLKSCLAI

SEQ ID NO: 25929 - protein, 392 aa, unknown
  TnpB Polypeptide
MKTTFKFRLYPNREQKKKLNFTLDRCRFTYNQLLDFLNNSKKIDKNKTQHHILKLKKEYENLDDVYSKVLQYENYRLFSNLKGLSQSKKNGRKVGRLRFKGKGWFKTFSYNQSGFSISDEGKRYTTLHLSKIGDIRMRIGKKQNRPKGKVKQITIKKTNTNKWFAFVISDEKFKKEKRIYKKVGIDLGLENYVYDSDGNHFDSPKYLREGEDRLKWYHKELSRTKKGSNNRQKTKLRLSKVYEHIENQRLDFCHKLSHYYVKNYDFIAVEDLQIPNMVQNHHLSKSILDNSWSCFTRFLSYKVERTDKKLVWVNPNYTSQICSSCGRLVKKSLATRTHKCECGLKIHRDYNSAKVILSIGIGKELPKYTPVKIRSLLENEQVMVGEAGSHLR

SEQ ID NO: 25930 - protein, 411 aa, unknown
  TnpB Polypeptide
MYFTAKAKVPERSELKEVGNVCTKIWNKANYYCREQWEKTGKIPDYYELQRVFKDDFWCRKVHSHTAQAVLHKLAEAYRSWFQLRKIDATANPPMFRKKNSISTITFTRYAVKIEKCQMQLTLKRGVYLHLDFQLQPKIELTHENIVRVEVKSGFAYIVYRVEDPPWKQDGQVMGVDLGVIHTATTVKEDGEARIYTGRGLLSIQRYFNKEIGRAQSIVKKQSHGKKEWSKRLSQLARKRARQIKHVLHAQTKAIVDDCVRSNVNVVVAGDLHNIRKLRSDTKKPEKLVRARSWGRVNNQKNHAWSFSQFTATLEYKLRREGILLVQVNEKATSKTCCRCGEIRKRNRKTRGLYVCSKCGLHINADVNGAVNILRKYLRPLGRSSANVSLAKVIKWKESRLSLEALSFRVG

SEQ ID NO: 25931 - protein, 294 aa, unknown
  TnpB Polypeptide
MSRYRLLPSPVQEAILQAHCAHARFVWNLAVEQHSHWRPVPQGAKSYRVTLDQAGRWHIAFANIPDPIPAPGNGKVAGIDRGVVVSAALSNGELAHAPGLTTRERRRMRRLERRLARARSGSNRRGRVRLAIGRLRARETDRRKDWAEKTSTNIAERFDVIRIENLKIRNMTRSAKGTVRSPGRNVRGKAGLNREILRSGWGLLVRRLEEKAPSRVEKVNSAYTSQRCSACGHVDARSRESQARFVCTACGFVGHADVNAARHIVAGHAVTARGGDGAARPVNREPQLLLQSAW

SEQ ID NO: 25932 - protein, 403 aa, unknown
  TnpB Polypeptide
MKLCVKYKLKPTKEQAEALGRLAFYATKLYNTDNWTRREQWTKTGKIPNWYAQKKLLNTNHWYLLLPSQTAQAVIKNLQDNYRSWFKLRKIDPLAKPPGFRKKSALSPLTFYQQFTLEGDQLTLVMSRKFRTETSVNKLVFHVDLWRKVEGTPKMCTVLCNDEKWMAHVVYEVPEPPKTDDQNIMAVDVGIVNLAATVDLNGRSKLYSGRQALAVQHYFNKEIARVQSLTAKQGKKGSRAVSRMHRKKRRQVNQILHSVSKALVEDAKRNGVGTIVVGDLKNIRRDDGKAKNWGRNNQKLHAWGFRKLLTQIRYKAILSGIRVVEVSERNTSKTCSACGVVRKANRVHRGLYVCSKCGAVLNADVNGAVNLLKKYLHQTRVEGSIGSVAEPLIWRINQEAHIL

SEQ ID NO: 25933 - protein, 303 aa, unknown
  TnpB Polypeptide
MVHMTKKNTARFDFDLRFPKMPSYLRRSAVQHALGSVSSYETRLGQWKETGVLSGRPKLTCRNHAMPVFYRDVMYREGAEGKDEAYLKLYDGHDWKWFRVYLKRTDMEYLRRNWKGKKASAPALEKRHRRYFLRFSYTEEVTLTKTPVKEQIICSVDLGINTDAVCTIMRSDGTVLGRRFIDHPSEKDRMYRTLGRIRRFQREHGSAQTQGRWAYTKRLNTELGKKIAGAIVRYAEENHADVIVFEYLEMQGKISGKKNRNCTCGEKEISRSVVNIRHTGKGCGYPGSAHGIPADWLMMVPGR

SEQ ID NO: 25934 - protein, 373 aa, Nonomuraea sp.
VKFVVQVRLFPTPAQEAALAGTLALCNQAANQVSRLAWDTKMFRNYDLRKHTYGDLKDMGLSAQPAQHVIKKVADAYTTMCAQVKAKLRKSLTKPIGFRPDAAQPFDDRCLSWQIAGRTVSIWTSHGRMKGIRFGCSDEQARLLAAYRKGESDLVRRDGIWLLVATCDIPDTDLTEPDGFIGVDLGIANIATTSDAVRHSGKALNAVRRRNRDLRRRLQAKQTKSAKRLLKRRLRTEARFARDINHVISKSIVTEAARTGRGIALEDLSGIRGRVRLRKPQRVTLHSWSFHQLGSFIAYKAARAGVALLHVNPAYTSQGCSACGRVDRRNRPSQETFACTSCGFAEHADVNAARNIASRGVVGWAAVMQPDAA

SEQ ID NO: 25935 - protein, 368 aa, Nonomuraea sp.
VAQIVKRAYKYRFYPTPEQASELARTFGCVRLVYNKALHERTRAYTQEGRCVSYVESSAMLTAWKRSGEADFLSEVSSVPLQQALRHLQAAFANFFAQRAKYPTFKSRKKSRAAAEYTRSAFRLQDGRLTLAKMDAPLNIVWSRPLPEGAQPSTVTVSKDAAGRWFVSVLVQEKITPLAPAGRSVGVDAGITALATLSTGEKIINPKHERADRRNLAKAQRALARKEKGSNNRARARVKVARVHARIADRRRDHLHQVTTRLVRENQVIAVEDLTVRNMVKNRGLARAVSDASWRELRGMLEYKSAWYGRTLVVVDRWFPSSKLCSACGAQREKMPLNVRDWTCACGVVHDRDVNAAKNILAAGLAES

SEQ ID NO: 25936 - protein, 219 aa, Bacillus sp.
MATQHKAYKFRIYPTKEQKIVLHKTFGCVRFVYNKMLAERIDTFERLKDDKEKLKKIKHPTPAKYKKEFEWLKEVDSLALANAQLNLDKVYKALFKGNAKFPKFKSRRHKQSYTTNVVNGNIQLLDGHIKLPKLKQVKIKQHRQIPSESTIKSCTLSMSASGKYYVSILTVYEKDIAGKEIKKVEGLDFAMDGLFVDSEGKKANYPKFYRQMLDKLATA

SEQ ID NO: 25937 - protein, 209 aa, unknown
  TnpB Polypeptide
MLKATRIKSDYRFVNSHFKRNDSRIRKRVHGKYGRKQRNRVQPLIHNVSRRVVDEAKNRRYGIVMERLTGMRRLYRKGNGQSRSYRARMNSWSYGELQRQIEYKARWEGVRVIYVPARNTSKRCSVCGYKTLESTHRRLWCPHCGAIMDRDENAARNIAARGLRFSPNGPLGEAMVEEREPENATLILKVDGGKLSQRPTTTTIRSMKT

SEQ ID NO: 25938 - protein, 391 aa, Escherichia sp.
MAMLRATKVRIYPTPEQAEFLNAQFGAVRFAYNKALHIKKHAYQRHGVNLSPRNDLKPLLSVAKKSRRYAWLKEFDSMALQQAVINLDVAFSNFFNPKLKARLPTFKRKNGWQSSYHCVGIKVLDNAIKIPKLSPIEARLHRELHGKLKSITITRSATEKYYASLLCDDGMETPARPSMISRVTGIDMGLSHYAIKSDGVKVANPRHLINASRNLRRKQKALSRKQKGSANRKKARIRLAALHERVASARADFQHKLSRAIVDENQAVIVETLKTANMMKNHNLARAIGDASWHSFIAKLEYKAMEKGVHLVKLDQWFASSKTCHCCGYKMPEMPLHKRIWRCPECSIEHDRDINAALNIRQKGILELQAAGLVVSAHGGQRKSVVQTVAA

SEQ ID NO: 25939 - protein, 125 aa, Bacteroidetes sp.
VISVETLAVKNMQKNRSLAKAISDAAWSEFVRQLEYKAEWYGKTLVKLDRWFPSTKRCSDCGHVGERKPLHVRDWTCTECGCVHDRDVNAAKNLSVGSDRPEVKHLEISVRPVERLSFMAAVDER

SEQ ID NO: 25940 - protein, 273 aa, Bacteroidetes sp.
MKHMAYKYRVYPTKEQRRFLAQTFGCARYVWNWALEHRTDAYHDEGESLGFADMCKRLTQLKKDEDHNWLKDPSSVVLQQSLRNQEQAFTGFFEGRAGYPNFKRKHGKQTARHTKAAFSYDAEPRTLKLAKMPGTLKVNWGRGLSFRELRGEPTAVTTSKDPAHRYHVSIEFQAPVQNKPKTGKAAGVDVGLESYITLSTGEKVGNPRFLEDAYRRLRKEQKALSRKEKGSNNWGRQKKRVAKAYAKVADRRKDFLHKLSTRLVEAFLLKRSM

SEQ ID NO: 25941 - protein, 375 aa, Actinomadura sp.
MCAILDRVAQVVKRAYKYRFYPTPEQAGELARTFGCVRLVYNMALEERSRAYTAEGRKVSYAETSAMLTAWKRIDRLAFLSEVSSVPLQQALRHLQAGFVNFFAKRAGYPAFKSRKKSRASAEYTRSAFRWRDGRLTLAKMDGPLDIRWSRRLPEGAQPSTVTVSRDAAGRWFVSLLVEETISPLPPVEAKVGVDVGITALVALSTGEKVTNPRHERRDRRKLARAQQALSRKARGSKNRDKARCRVARVHARIADRRRDLLHKFTTRLVRENQTVVIEDLTVGNMLKNHSLARAICDASWREMRGMLEYKTAWYGRELVVVDRWFPSSKLCSGCGARQEAMPLGVRSWACACGAVHDRDVNAARNILAAGLAER

SEQ ID NO: 25942 - protein, 522 aa, unknown
  TnpB Polypeptide
MKRARTPTFLLELPLRLDWSQERQLRAHLEAARCLYNALLSEAMKRLNCMRNDPAWNKARSIPRSQKQERAQAFSELRTHYRFSEYEMHTYAKAARASWIADHIDSTMAQTLATRAYQAANRVCVGKAKRVRFRSKGRGIDSVEGKRNDVGMRFVLDPGVSDGGFLIWNEEVIPAIIDWRDPVVQHGLRHTIKYVRLVRRKASSPQAQGADHDGNRYFVQLVLEGHAFVKPKHEEVGKDTIGLDIGPSTLAIVPREGKADLVTFCEELAPDVRKKRRLQRQMERQRRANNPDNYDEKGRVKTGRLRWKESKRYKATRRRHATTERKLAAHRKSLHGHLAHRIVQVGTTITLEKTSFKAWQKQYGRSIGLRAPGMFVAHLTRLVAKTGGTLHEVSAYQTKLSQYCHQCGQYHKKPRSERWHTCPCGLGPVQRDLYSAFLLAYLEPQQIHPSITQQVWEGAEPRLRAVMEDLQQRANEGQSLPRSMGLSASRKAARAGARRLESPAYPHQEPLAPLAGASGNDG

SEQ ID NO: 25943 - protein, 329 aa, Brasilonema sp.
MVMQSDLPDWVKQVPCHIKQNAVFDAHQAYSASRDARFRSVRNPQQTIKFNNSNFANGKWYYNKTKKLNFVASEPIPTSCEHGTQLIYKRGAWFAVFPEPMQRNDSGSNKLIALDPGVRSFLTGYDGDKVIEIGSRDMGGISRLCQHLDNLISRSSKVNSKRRRVMRRAANRLRSKIQNLVNEVHKKTAYYLTSEYRVIFLPYFESSQMVAKSGRKIRSKTVRSMLSWAHYQFKLTIKHQASKRGSVVIDVSEAHTSKTCGVCGHRHAKLGGNKIHKCPNCGTQTLRDANGARNIMLRALRDTSFTVNQDGIAIVSFGSLLNNVQKCSA

SEQ ID NO: 25944 - protein, 396 aa, unknown
  TnpB Polypeptide
MEVKKMIKTIRVMLLPNNKQKTKLFQYANTARFAYNWALSREKENYKNGGKFIFDGDLRKEFTQLKKTDKYSWLNKISNNVTKQAIKDACNAYKRFFNGYSKVPKFKSRKKSTPSFYQDNVKIQFSDTHLKVEGFTTSKKKDKQKLNWIRLAEHNRIPTDCKYTNPRIKYDGLNWYLTVGIEYKDSTIVPSNEGIGIDLGIKDLAICSDGNKYQNINKTQRVKKLEKQKRRLQRSISRKYGKNKKGESYCKTKNVIKKEKLLLKLNHRLTNIRQNYIHHITSEIIKREPSFIVLEDLNVSGMMKNRHLSKAVQQQGFYEIRRQIEYKSVWNNILVIIVDRFFPSSKLCSCCGTIKKDLSLSDRIYRCECGNVIDRDYQASLNLKRYGENVLKQSVV

SEQ ID NO: 25945 - protein, 121 aa, unknown
  TnpB Polypeptide
MVKNHKLAQAISDASWGELIRQLVYKCEWYGRELIKVDRWFPSSKRCGNCGHIVEKLPLNIREWDCPMCSAHHDRDINAAKNILAAGLAVIVCRANVRPDRHESKRQLRKTSNGKKQKPKS

SEQ ID NO: 25946 - protein, 241 aa, unknown
  TnpB Polypeptide
MTQKALKYRFYPTPEQETLLRRTMGCARLVYNRALAARTQAWYERHERVGYAETSTLLTSWKKQEDLQFLSEVSCVPLQQGLRHLQKAFSNFFEGRARYPNFKKKHHGGNAEFTKSAFKWKGGKVFLAKCSQPLDIRWSRQLPERAEHSTITVKLSPSQRWTVSLLVDVEIEALPESLNSVGIDLGISSLVTLSTGEKVANPKVFKAKYRKLRQAQKALNRKKKGSNNRHKARRKVASLHQ

SEQ ID NO: 25947 - protein, 397 aa, Streptomyces sp.
VTTGVKRAFKYRFYPTGAQAAELSRTFGCVRKVYNLALAARRQAWAREQRVSYHQTSAMLTAWKKSEELAYLNEVSSVPLQQALRHLQTAFANFFGRRARYPRFKSRKKSRKSAEYTTSAFRFKDGRLTLAKMAEPLDIVWSRPLPEGASPSTVTVSNDAAGRWYVSLLCEDLSVRPLPPTHAAVGVDVGLDHLLTLSTGEKVSNPRHERRDRARLAKAQRQLARKAKGEGANRAKARRKAATVYARITDRRLDHLHKLTTRLVRENQTIVIEDLAVRNMMKNGSLARAISDAAWSELRSMLEYKAQWYGRAVIAIDRWFPSSKLCSACGSLQDTMPLNVRAWTCDCGTTHDRDVNAAKNILAVGLTATVCGADVRPQRSTPGGQSAMKQKTPRREP

SEQ ID NO: 25948 - protein, 466 aa, Streptomyces sp.
VGGKATNDQWALARRGQAAELAWLRREITRLQARLARPVGAKADRRHGLVRGCATRSEWHAKSRRFHALEGRVASLERDWTAGRVHVVRGGKRLAHQRHHLKEVALSHEAWRERWRAARAFLAADGETGKRYGNETIRVSDAGQLSIRLPAALSHLSNAPHCRYVLEAKVVFAHRHAEWQDRVAANRAVAYRIHFDARRGRWYLTASWQRLALPVLPTAVAVAGGLVALDMNDDHLAAWRLDAHGNPVGEPKRFSYDLSGSASHRDAQIRHALTRLLHHARRTGVRAVAIEDLDFTDSRTRESFGRNTSFRRVVSRFPTARLRARPVSMAAEQGITVVAVDPAYTSRWGARHWQRPLTTPTRRTTRHDAAAVATGRRALGHPIRRRTAPPPHDRRDRAGHRTVQAEPEARGREGPRPRAAGPRTRSVSPGRGEKAGDQRVQHHSGHAAEHASWWREPPPLGPQEYG

SEQ ID NO: 25949 - protein, 439 aa, Chroococcidiopsis sp.
VKQVITAKLKLELSTDQKQLVRQITLAYRDALNYASLTAFENNKMSSGVALQKKVYNQLRSTFGLPAQMSCNVPRQVGATYKSLWTKVKQNNEAIKSGKTKKRYKGLDQAPKFVSRTCTLNYKRDYSFAKDKVSLITLSGRIKVNYSGYSKHLELIKSGTEIGAAKIWYDKTKKNYYLLIGLSLEVPELKPEDIKQVKGVDVGQRYLAVATDTQDKTQFFSGKEIRHKSNKYHKARKTLQQKGTRSAKRRLISLSGRERRFTADVNHSISKEIVSPNTLIGLESLKHIRALTNRRSNKKASHKRKKANRNQSKWAYAELHSYCDYKAILSGSLAVKVPAQLTSQCCPKCGHVSKKNRPNKGLIFRCVVCNHELHSDLVGARNIALRTLLLRQDFESTGRISAVPNVSHEEAKAKYLPRYLELRWSVDAIPNFKRREELS

SEQ ID NO: 25950 - protein, 413 aa, Chroococcidiopsis sp.
MKQAFQYKLLPNTNQRQEIDRWLDMLRHQYNYLLADRFKWWKYNRSDCIIPQGEFCQIACSLGSQVLRDHPDWHSQSASLPQLKKERPWYKDIYSQVLQDCVKRVKLAFDRYIQGDCQGKRSGRPRFKSKNRYRTLSYPQAKNNWLIDNRIKLPKLGLIKYICHRPISQGFKIKTASITKKADGYYLTLIVEDKSVPEFEPDIIATENNSIAIDLGLEKLYVDSLGNQVLPQKYLRKSEDKLAKLQRKLADTYRSKKAKKLIRQAIAKLHQKIARQREQWHHEEAKKLCLRAKVIFIEDLKIANLRRKNKPNKIDGKYVENGQARKAGLNKSFSDCAISQFVEILQHQAKKIGTKIFEVNPRNTSQYCWNCLNKVSKSLSDRWHFCNKCNESCDRDFNSSLLLKKVGLGVVSL

SEQ ID NO: 25951 - protein, 683 aa, Streptomyces sp.
VWRRAKDAPVSVIRLPLVVGDADVRRRVEQLFSAMWTVKRALQRDARDVVDAYWAGDVRRERDVKAWRAELGLSRTGLEHRAYRHLERSGWLSDHVSKALVMHQADEVWAGVARHLHPDTSGRRAGRPKTGTWWEYTRIPGRARSHTTDRKWETFRLHGTLAGHLEAFRHPALAPSVTNPAQAAGLSPGMRVLAQPRRLPAPARPTGSVPTGLTDTRGRPRSRAATWFEHTGPLAVVFAGGPTGRGEMVLPVRLPQGVGRWPYLLHYLNDPSRWHKIDLVRRRDPAAPGGWAYEAHLMVLAPGHASTATRTRRRQAAALQRVGGVDGNVSNLAVVSLPTTGEPDDGPVRSSRITLTEQEQDALATARKKARGRQRALDRSRRATNPQQYQHSRRQKARDERRQAQGLPPKAHTAPAGPRHTTATGEPQQAYHRDTVSTGYRNLRARHSAAAVSAAEASHHRAKKTAAALVAAHGPNLTVEDCDIRTWFRLWGRACSATTPGRLITALAAECTAAGGRLLRASTFTTALSQHCLCGRRVTKSLRRRAHHCDPADGGCGLKGDRDLVSAALAAFTTLTDPDDPATARLDHARARAAQILFAQGLQEALTESTAPKSAPSGRTRAAADPRGNTLPRQRTASARRNAGPCTVATPDETRPAPQRPKAHAGTTRPHTGRPRTHIRDKS

SEQ ID NO: 25952 - protein, 403 aa, Methylobacterium sp.
MCEFNRGFRYRLVPTVEQDHQLRAHAGVCRFIYNIALEQRRDWWRNHKKNTGKSISLATQSIELTQIRKEFEWVADVTRTCLDQVLRDLDRAYTSFFAGKTQYPTMRRKGVNDSFRFKGDEVTIRPLNAKWSLIRLPKIGWVKFRASRQIEGIIRNVTVSNDALGWHVSLACRSERSVPAPSAEIVGIDRGVATTLALSTGELLTMPASLERIEVKKRKAQRILARRKRGSNRRRKAQARVAQLKAKQARIRRDFHHRAALSIANRFGVAVLENLNTRSMTASAKGSVSEPGINVQQKSGLNRGILNAGWHQFATILAYKCEERGGQVVTVPARFTSQTCAACGVIDARSRESQARFRCVGCGHDDHADVNAAINIKRRWSTPLLDVEGSRCGPVEASIGGVQ

SEQ ID NO: 25953 - protein, 374 aa, Methylobacterium sp.
VSIRSYKYRIRPNAQQQRLLGEMLSGFCALYNAGLQQRIEAYRRRGITLRASQQNAELTAIRAAEPDGIGRWSYSALGWVLRRLDQTYAAFFKRGRGFPRFRSAARYHSATYRFGDGLTIGKDHRLKVLGVPGGIKVVWHRKLPENGRRGTAILSRQQGKWYVIFSVEAEYAECCGTGTVGIDLGLNSLIATSDGETVKAPRLERKAHKAQRRRHRALARCQKGSKRRSKAKARLASGAAKIARQRRDHLHKLSRSLVSRYRSIAFEDLNMAGLRKGLFARSIHDAAWSTLVQFTTYKAESADASVVLVDPRGTSQNCPSCGTIKAKKLSERRHCCDCGCELDRDIAAAKIVHQRAFENGPRHGPQSPSQRNAA

SEQ ID NO: 25954 - protein, 392 aa, unknown
  TnpB Polypeptide
MLKGFKTEIRVTEKHITKIHQSIGVCRYLYNSYIAKNKELYELYKEGKIDKKQVFMSANDFDKYINNEIKILDEFKWINNCGSKGRKKAIVNAEMAYKRFFKGQSKFPRFKKKKNQNVKIYFPKNNKTDWTVERHRIKIPSLGFVELKEKGYIPTNAKVVSGTVSMKAGRYYVSILCDIVDHNDYSDSKNEGIGIDLGIKDLVIVSNIDKPFKNINKTIDVRKLKRKLRRLQRQVSRKYEMNKDGKKFIKTKNIIKLEAKIRTIHQKLSNIRLNYAHQITNTLVKAKSEYIVIEDLNIRGMMKNRHLSKAIAEQSFHEFRRQLIYKCLWNNVELRIVDRYFPSSKMCSECGSIKSDLKLSDREYICVECGVILDRDKNASINLKNAKEYKVA

SEQ ID NO: 25955 - protein, 420 aa, unknown
  TnpB Polypeptide
MYGCQQDLIKTPECLPFLEYLCRTANKLINCGIYLARQRYFKCGHIPGKYELEKQLKQNQNFKFLFSQAAQQTLRGVAESFKSFKELSKKYKKGELKDRPRLPNYRKKGGMEVITYPRQALKLKEGKVRIPLGLKVKAAFKVDAFFLPFPTNLNFNSIREIRILPRNGCFYVEWVYKLETHQVEVDKEKVLGIDHGLDNWLTCVSNTGRSFIVDGKHLKSVNQWYNRQIATIKEGRPQGFWSRKLANITEKRNRQMRDAVNKAARLVINYCLENGIGRIVFGWNKGQKDGINIGAKNNQKFVQVPTAKLKERIKQLCEQYGVQFIETEESYTSQASFLDDDFLPTFGAKPESWRPSGKRIKLRLYRSANGSLINADANGAANILRKVATTLELSLKGVSSGALTTPARVHFWAACESPSL

SEQ ID NO: 25956 - protein, 306 aa, Actinobacteria sp.
VFANFSSKRAQYPRFKSKRKSCASAEYTSSAFSFCDCRLKLAKMAGPLDIVWSRPLSEGGVPTTVTVSRDAAGRWFVSMLCDDPTVKPLAATDAAVGMDVGLDHLLALSTGEKIANPRHERRDRARLARAQRNCARREKGSANREKARRKVARIHARITDRRRDGLHKLTTRLVRENQTLVIEDLTVRIMVRNRKLTRAISDAAWAEFWSLLEYKAAWYGDVVVVDRFFPSSRLCSHCAALQDRMPLQVRTWTCDCGTVHDRDVNAAKNLLAAGLAVSVCGAGVRPQRRTPGGQSATKQKIPRREP

SEQ ID NO: 25957 - protein, 403 aa, Xylanimicrobium sp.
VVVGRFRSVARHTTFQLTADPTAEQARVLARHVGVSRFAYNQGLRLHLDARKHAAREGSDSVAVPWTGFDLINAFNAWKRSEAAGRRIVVDRTGHADIEVTGLAWRAEVSAQVFEEAVVDLGKALQAWTNSRRGKRAGAAVGHPRFKRKQPERGSFRMRCRVLKSKSGERATIRIGEDGPRSVTLPGIGAIKVRDDTRKVRRMITNGRARILYATVSRVNGRWRISLNVEAADLHPATQHPTQDGGTHSGWVGVDRGLHAPVVAGTAGGAEALRVAAAPRALKTAQPVLRTLQKAVARKTKAPPIGAKRPAGWPGSTGGFVTVAIISCTRSPTCWSRPTTGWCWRTSTSKACSPTTRSRPRSRTQRGANSPARFATSRPGAADKSCSRTGGFPRPRPAQLAVV

SEQ ID NO: 25958 - protein, 174 aa, Xylanimicrobium sp.
LAREYGRVRDRRHHFLHQVSNVLVKTHDRLVLEDLNIEGMLANHKIAAAISDAAWGELARKVRYKQAWRGGQVLLADRWFPSSKTCSACGGVKTTLTLADREYECDRCGHTLDRDLNAAVNLAAWGERHSFQVPDLEARGRVNNAHRREGSGRCSRAGETGPDDVGTEAATPAD

SEQ ID NO: 25959 - protein, 414 aa, Streptomyces sp.
VIVKLVVQIRLLPTPLQAAALEATLHACNEAATWASGVAFEKDVKRNFALREHTYGEIRARWGLGAQAAQHIVKKTCDAYATLKANLKAGNLGRPGSKRYRRAAEKPIEFRPEGAQPYDDRMLSWQIDQRRISIWTTAGRVKGVAFTASPEQLATLALYRKGESDLLERDGMWFLNATCEVPEAPQNTDPVDFLGVDLGIVNIATTSDGEIMAGRELNRVRVRERGLRRKLQKKNTPSARRRLKKRRRKEARRAKDINHKIAKHVVAEAERTGRGIALEDLTGIRERVRLAKPQRATHSSWSFAQLGQFIIYKARRAGVPVVHVDPAYTSRTCAECGHTDKSNRVSQAWFACRNCGFVDHADRNGSRNIRARAWELWRRGAQSTTPDPPPEPGRGTGRKPSTTASGARCASPSP

SEQ ID NO: 25960 - protein, 479 aa, Chlamydiae sp.
VIQAPKAVKLELVAEVQSFRTLDGQSKICNWLYNHILGRANELKTEFKATGNPDIAKIIYTKCGLRNLVPSIKKEHVFLKSVHSSPLKNTALRLTSSIQAHQKSKKGKRKGVSEWPRFRSWNAGWFSLFYDEPTKGFRVVDDVLHLSLGQDESSKRLSLEFRLKESHLLKGHSIRNMRIVCENGTYFAIFTVLLTLPKPKPIHRMIALDPNHKNFAYGVDTSNTGIEIAAPTWLKPYDKRIDELKGKRDRCQKKAKKVVVKASDGTLTGKEYFIPSRRWRKRQKTLESALHKRREQTKTFMFTLAHSLCQKYDCIAIGDYAPNGNGITTAMRRSMNNRSLIGRFKETLLWTARKSGKVCIIFDEKGTTRTCHACGYVHEKGLSPSIRQWGCPVCQTEHIRDENAAINGLRKGVRDFLLEYGTDVPIVPCSGLVSVEERWVWRVLPRGVVIHSSRERTASDRSARKLIQERGCSWPKLAH

SEQ ID NO: 25961 - protein, 393 aa, Lentzea sp.
VKRAFRYRFYPSDAQAAELSRTFGCVRKVYNLALQTRAEAWTLRGERVGYGATSALLTAWKRTDELAFLAEVPSVPLQQALRHLQTGFTNFFAKRARHPRFKSRKKSRASAEYTQSAFRWRNGMLTLAKMAEPLDIRWSRPLPAGAVPSTVTVSRDAAGRWFVSLLCEDPGVTPLPTADAVVGIDVGLEHLLVLSTGEKIDNPRHERRDRECLVKAQRALSRKQKGSSNRDKARAEVARVHSRIADRRTDYLHKITTRLVRENQTLVIEDLAVSNMVGNRRLARAIGDAGWRQFRQMLEYKARWYGRDVIAIDRWFPSSKLCSACGALAAAMPLPMRAWTCTCGTTHDRDVNAARNILAAGLAVTVCGAGVRPQRNTPGGRSATKQKTLRREP

SEQ ID NO: 25962 - protein, 416 aa, Thermoplasma sp.
MKVRRTEQIYLKENDTISYMCHLSKNLYNQVNYILRQQFLKGEKLTGYRDLVKLFQEPSEIEDHNNYQRLPAQTAQWTVKKTVMAWYSFFKSMKAWKKHPDKFKGRPRLPGYKETDGEFLLVFTNQQCRIRDGILKFPKIMNMEVKTRLNENEIKLKEVRIVPQGTGYMIEIVYEKETADMPITKPKRAMGIDIGVRNLVTIGNNIHEIGIAVKAGLLKSINQYFNKELARYRSINDLQGNERKQTVKIRKLFMKRNRKVKDIMHKVSKSIVEYAKIMNIDTIVIGHNNRWKDSSNMGKKNNQNFVQLPFNMLIYQIKYKAEEIGITVIMQNEDYTSKCSFLDNESIEHHDTYMGKRIHRGIFRSATGKLIHADLQSSYNIIKKAIPEAFANGIEGIGLYPRSLSIRQMITSKGGC

SEQ ID NO: 25963 - protein, 434 aa, Thermoplasma sp.
VKRANAVKLIVGKETHEKLKELAIVAAKCWNEVNWLRMQQFKEGERVDFSKTEKEVYEKYKQILKVNTQQVARKNAESWRSFFSLIEEKKGKLPKWFKPRPPGYWKDKSGKYKMLIIIRNDRYEIDEEKRIIYLKDFKLSLSFNGKLKWRGKQGRLEIIYNEARRSWYAYIPVEVQNDVKAEDKLKASIDLGIINLATVYVEDGSWYIFKGGSVLSQYEYYSKRISVAQKTLARHKQGRSREMKLLHEKRKRFLKHALNSMVRKIMEEFKNKGVGEIAIGYPKEISKDHGNKLTVNFWNYGYIIRRFEGVGEELGVKVVKVDEAWTSKTCSLCGEAHDDGRIKRGLYRCLRIGKVINADLNGAINILHIPESLGAGSRGQLTVRDRGNGLKTQPAVYRWTNGAGWVSSPTSYEVMKMKAVNCKPMNRHKGTFTL

SEQ ID NO: 25964 - protein, 393 aa, Thermoplasma sp.
MIVVYVFVYAFKAVKQYFYPSDNLKVLMHKFTDMVNFTINIMIEKNLTSRNSVSNEVYHKLKEYEIPSYYYIEAINKAVALVKTYRKRLKKKQKATVPHVEKPMLSTYYGFKIVGGNIMIPIANREYESIPLNAYVRDATSMVKVHSFALSAYTLSLTIGRDVDAIECTTTVGVDRNLRNITVGNEFHHEIYDLSNIVEIKQRYRKKESHFHRNDRRIREKILSKYGKRERNRVKQIMHETSKAIVSNASTKKEMIVLENIIGINQITKKGDGKGKDYRFLLKNAFPYGMLASQVMYKASWEGLPVIELTRKETRNTSRMCSVCGSLTRIEHGRILKCDSCGLEIDRDVNACINIAFRYRTCLKRSHKGLPGEAVKQSKDVEQMAGSQISMDI

SEQ ID NO: 25965 - protein, 249 aa, Thermoplasma sp.
LKLTLSYYFRNDFEKINQVELGREFAYVSVTIRENPMIEPKAYLVVDRNTTGHIAVVGNPETGNVLKLRKSAEHIHRKYKNIRKHLQKKGKYRMVKKAKDRENRIEKDVNHKVSKKIVQEAKQNGMGIKLEYLNGIRNAKSSRNFRYPLNSWSFYQIEKMIEYKARLLGIPVVYVDPYNTSKECSRCGLKGNRSGKEFKCPGCGHVDNADANASFNIALRPVFEKGIDRLHADRDACKGSTDTHREATL

SEQ ID NO: 25966 - protein, 420 aa, unknown
  TnpB Polypeptide
MRIVRKSFRYRVYPTPEQAERLARWEGSLRFLWNCAHEHRRSGLSRVPKEYLSAFDQMKELTEVLKDPEFEWLADVPRNVLDQLLKELAKAWERGFKKISKPPHFKRKGRDNVSLIEPHPRYWRVTEEGDVRFPKLGVLKTKMHRPLEGKGKTCALVREADQWFVSISCEVEIEERLRKPGRVGLDRGVKHLVADSDRNVFDGPEGMRTSTQRLTRAQRALSKKKKGSNNHRKAQLRVARLHRKVRRQRNHLLHQIALHYAKSHGTVVIEDLQVKNMTKSASGTSELPGRNVRQKAGLNRSILNSGWGLLAWMIQYKLDWAGGTLIKVPPHYTSQTCSCCETVDAASRISQSEFICTACGHADNADVNAAKVILSRGDHGIAVCGGYPVGGPMKQKQRGVSPAQLSLGPEGHKAPPFREG

SEQ ID NO: 25967 - protein, 373 aa, unknown
  TnpB Polypeptide
MKLVAQVKLLPSAEQAAMLKATLRHTNAACDWLSEQAWTTKTWGQYALQKAAYTKCRAVFPVLSAQVVVRAIAKVADAYKLDRESKRIFRPLGSIAYDARILSWKKGETVSIWTVGGRQHIPFVCGDHQRELLQFDRGETDLVLRKEKFYLFVTVNVPDTEERKVLDWLGVDVGIVNIATTSDGTKFSGSHTNSLRRRANKLRAKLQRKGTKSAKQLLKKRRRKEANFSKHINHVISKRIVAAAERTGRGIALENLQGIRSRIRATRRQRRSLHSWAFADLQAKIVYKAKRAGVPVRHVDPRNTSRECRSCGHTEKKNRRTRDQFVCLSCGISVDADVNAACVIARRADVNRPYVGSVEMVVSHGANLQSPVL

SEQ ID NO: 25968 - protein, 366 aa, unknown
  TnpB Polypeptide
MRYTESFNRVCEAGWDAERINGVELHHATYYAEREETGLPAQLVCSARVKATEALVSTKALRAKGKSVRCPHSKNQAIRYDARSAMIDLRRGKVSLASLQGRQHLTFLVPRHHLDRIDWKVCSTDLIVDRKGRFWIHVVVETATPNVKPTGDVVGVDLGVRRPAVTSSAMFLGERRWREVDQRTFRLRRALQAKGTRSARRHLKKLSRRQTRFRLDCDHVLSKQLVASVSQGCTIALEDLTDIRLRIKARKKQRRRLHSWSFARLQFFLGYKALAAGVFVAYVDPRYTSQKCSQCGHTSKANRKNQSRFQCKSCGFALNADLNAARNIRANHLASQAMGQRSGPSVNRPIVAIQTLGNRDQVDTSS

SEQ ID NO: 25969 - protein, 256 aa, Bacterium sp.
MNLHRKIEGTIQFATISKSTTGKYYASITCEVDYKPFDKTGSIVGIDTGIKDLAILSDGKTYENIKTLKKNLKKVKYNQRQLSKKVKGSSSRNKQKQKLAIVHEKISNIRKDYLQKVSTEIVKNHDIISVENLAVKNIMKNHNLAQSMSDVGLGTFYSMLEYKCEWNDKQFVRIDRFFPSSKTCYNCGWINQDLTLKDREWTCPSCREKHNRDFNASKNILKQGLKILSGSGTDSDIKQKQVEALSLDESMKPETH

SEQ ID NO: 25970 - protein, 359 aa, unknown
  TnpB Polypeptide
MKSPRLLEQPTACQSQEKPARKHVPPTPSFILELPLCVDWSNEQPLRAHLEAARCLYNALLSEANHRLQAKTGRNTVGLDIGPQTLAIVPQQGDAALTTFCEELAPNTRKKRRLQRKMDRQRRANNPDNYDEQGRVKSGKKQWHHSKRYQATRRQYRNAERKLAAHRKSLHGKLVHDIVARGNIITIEKTSFKTWQKQYGRSIGLRAPGLFVAHLTRIVAKTGGTLTQVSTFQTKLSQYCHQCEQYHKKSRSQRWHQCSCGCGPVQRDLYSAFLLAHLEPGKTIPSITQSDWEGAEPRLRAVMESLQQRANAGEHFPQSMGVMASGKAVRARARRLKSPPYPRLEPADSSSEEPAGSVE

SEQ ID NO: 25971 - protein, 311 aa, unknown
  TnpB Polypeptide
VNENGVKPIKCYKYRLFPTRAQETALNATLDTLRLVYNSLLNERKFLYETTGKGVSQYAQEKHFAPWRKDFPELADVHSHLLQNAALRVNLAFTAFFRRVKAGDTPGFPRFKGGGQYGSLGFKEWGNGISFKSGNLYVSKVGHIKGKFHRPTEGTPKTAAIRRQAGKWFVCIACEIMSEGLPPSEEAVGIDVGLKTFAALSNGEFIENPRFFRRDEKALAKAGRRQAKTKKRSKERRKANKVLSGIHERIRNRRHDFCHQNARRLVNRFGVIAVEKLNVRGMVKSHSLAKSISDAAWSQFRECLTSKADTK

SEQ ID NO: 25972 - protein, 415 aa, unknown
  TnpB Polypeptide
MQLTEQIQLKSTPELSILCHETKNLYNEANFQYRQFHFNLDEFINYYDLQVILKEYDCYKSLPAQTAQQTLKLLIQNWKSYWSALKEYKIHPEKFLGCPRPPKYKEKNGESICIFTNQNTHLKDGFIHFPKSCNLQPIKTRLFNYQQIRIIPQGYGYICEIVYNYAETDLGLNHDHCIGIDLGLNNLATIVNNIGIKPIVIKGGIIKSDNQFYNKVNAFLQSNKDKQHYEFQTKKQQRLLKKRNNQIRDTFHQASRWIVNYCIQNDIGTIVIGYNPEWKQEIELGKRNNQQFVQIPFVKLIQQIEYKAKMVGIQVITHEESYTSKCSFLDNESIEKHDPYAGKRLRSITINHQKMKCNLFRRGNGQRINGDVNGALNILRKATSNECAEKWEGLVLSPLSVRFNRNFIRKPIKSA

SEQ ID NO: 25973 - protein, 432 aa, unknown
  TnpB Polypeptide
MQNRKATYALYESPKKAASLLMQLHSHKNLWNAALEERIDAWRKFRKSISYEDQCKSLTQIRAEMPEEWANVNCSSQQITLRRLDKAFKAFYARCAKGQTPGFPRFKSIDRMSGFGFKGHGDGWRFTPNLSNEGRPDDFGNILWSKHGVLRIAGVGHIKVRGQARAAGIIKSCELLHKNGQWSVSVTLECADTDLVRARTQDVAMAADWGVSRLLTIVRTDGAHGVVREDIENPRWYRTSVEQSQALGRSISTKKRYSQNWRDACATNSKFKAKLARKRHDHQHQLTAQLAARCAIFATENLTVKNMSASAAGTTEDPGKNVAQKSGLNREILDTAPGALFQKIAYKVLETGGQFEVAPTQRLKPSQTCPQCGIQVKKTLDERHHHCGECGYENDRDAASALVVLKWVLGTLPAPRKPKIKKTRGQELSEAA

SEQ ID NO: 25974 - protein, 418 aa, unknown
  TnpB Polypeptide
MIRTQTLPCILNRELADSLNRESGRIYTGVMVSHWRALRHSGHWTSPFRAMKWADWRDREVSALLHSHSIDAAQEGFYKACKTAKACKDIGGKYPRKRKMFRTTVWKNTGIRKRDGHLTLSLARGQEPVKLVLPSQFAALDAKAFVETRLVYDIAQAKYEWHLVIEDGKEPEAARGTSIAAIDLGEIHPAVATDGTEGMVFSCRELRSIVQGREKRLASITSKLSKLQKGSRRWKQLKARKAKFLAKQDKRRRDLEHKVSRSVVNWAKERNVGALGIGDVGNIADKTKVEKRLNAKTRQKVSSWSHGKMRQYIGYKAAAVGIEVNDKISEKYTSQTCPQCGTRKKPRGRNYSCSCCGFRGHRDIVGASNILSRFINIRNGEPEKEIGGMYPPSQKYRRPFQKWNQDGVVARHGASGLA

SEQ ID NO: 25975 - protein, 274 aa, unknown
  TnpB Polypeptide
MDKTFEYRIYPSAEQEALLQKTFGCCRWVYNRVLAMRRDEYARTGKSRHINSYITQIPAWKRADAPWLSEVDSMALQQSLRDLDKAFKNFFRAPGKVGFPKFKSKRAGRKSYRTNGVGIIDARHVRLPKLGTVRARVSRPVEGRVLSATVKQVPSGKYYVAICCADVPATDAPAPTVGFLGVDAGIHDIATCSTGERLPNPKNLQRSERRLAREQRRLSRKRKGSANRARQRVRVARAHEKVANRRKDALHKFTTHAVGESQNIAVEDLNVRGM

SEQ ID NO: 25976 - protein, 442 aa, unknown
  TnpB Polypeptide
MQIISSYGVELRKQNIPIRQTLEIYRSAVSYLIGIYVQVWEELAEIPDAKRRFNAAEHLVHTTKKNHACFDFDIRFPKMPSYLRRSAIQHALGTVSSYKTRLDLWEKTDGKSGKPKLVYENHAMPVFYRDVMYREGAEGKDEAYLKLYDGHDWKWSCVRLDHTDMEYLRKCWSGKKASAPILEKRHQKYFLRFSYKEEVTLTKTPVKEQIICSVDLGINTDAVCTIMRADGTVLGRRFIDHPSEKDRMYRTLGRIRRFQREHGSAQTQGRWAYTKRLNTELGKKTAGAIVRYAEENHADVIVFEYLEMQGKISGKKKQKLHLWRKRDIQRRCEHQAHRKEMRISRICAWNTSRLAYDGSGAVTRDWENHSLCTFQTGKRYNCDLSASYNIGARYFIRELLKPLPVTERSLLEAKVPPVKRRTSCVYADLRKLHSEMELLKAA

SEQ ID NO: 25977 - protein, 457 aa, unknown
  TnpB Polypeptide
MAYRVTQRIISSDDLLYPYFDDLCRKSKLLYNAALFRVRNIFTGYDKEHRTENEVEVFQEVALLQRSYPNMHVRRVISYTHLEKMMRVTENADFFSGLPRQTAQQMVKQSVTDFKNWLASLREYKKHPEKYLGKPKMPRYKKSDLTTVIITNQDAVLYRDDIGMSLKLPLQKQRLYFSNLSSDPVLKEVKIKPYYGRFLLCLTLEEPDVAFDTSGSHVCAIDLGTDNFAAIVCDDHSSAIYKGGAVLSKIQWFHKQRAKYVSIITKGHEKKHAVSKRLRDLSFHYANFVKDQCHKISRSIIDFCMEHQCGTLILGVNLLWKQRSNMNKINNQNFVSMPITFLRTMITYKALNAGIRIIEQEESYTSKADLIANDRIPTYGVDDKDASFSGKRIKRGLYRCSNGMILNADCHAAANIMRKAIPDIWKDTRDYTFLSAPDVYGFHKLNLKGIPVKGIAA

SEQ ID NO: 25978 - protein, 529 aa, unknown
  TnpB Polypeptide
VLSAFLFGGALAKNQTYKSFAARPSYILDMNGELQETAPIMGRLVSEVRDISAYATYVVRNDEDLGDELARATVISPADAGRQAGVTMPDFLASGKSGRSRKERLVRHNVVTSYRSYQERVKAANGESSKYVSQGWKRTVDSSAPSYGEDYVNLGAVDKWYAAIENNPFADGEIVLKMVIQGQWHRLIFDFDNERFTEGKVTLPIIKVQGGHPVFIFTVATDNPVVQFSGDYVVGVDVGINAYATAVVRDVKTGLIVYETTLSQRVHSLWNSVRASERQARYLRKKAASMLGDRQGRMSALDEAQLHREAASRKKRELAILAAQEIADLSHVWGNAVVAVEDLSWVVNTMQNGRWNRGALTQWLTHYVSQNGGWVVAVNPARTSQLCYKCGAQVTHPTHELSVCAEHGAMDRDVNAATNIAARAVPRVVKARATRAKNRKLQPQRTLKTPVARNSLRHPGRDRTKNSPTPRRKKRRLVSKEVILPVCPARAQAQRLEATVLADQGACDALGTNTAALKQGCVTYRCMLL

SEQ ID NO: 25979 - protein, 441 aa, unknown
  TnpB Polypeptide
MPGFLVSGRAGTSRKEKLVQHNVVAAYRSWQERMNAASGETSRYVSRGWKRTVNASAPSYGGDYINLGAVDKAYAVIENNPFADGEIILKMVIQGAWYRLIFSFDNTRFTEGKVTLPLVRVEDGRPVFIFTVVTDNPVVQFSGEYVIGVDVGIRNYATVVVRDSKTGRIAHETTLSQRVHSLWNSVHASEIQVRYLRKKAATLLHDRQARMSALDEAQFHREAASRKKRELAILAAQEITYLSHVWGNAVVAVEDLGWVRNTTQHGRWNRGEFVKWLTHYVTQNGGWVVSVNPANTSQLCHKCGSRVSHPVHEVSVCHTHGALDRDVNAAANIAARAVPRVEKARKTRAKNRKLRPQAALKTPVARNSLKYPGRDRTKSAPTPKRKNRPRVVREVILPFSPARVTVTRVLADCDAQGATGTCQAAIKQGNMTDEWRLCRLD

SEQ ID NO: 25980 - protein, 417 aa, unknown
  TnpB Polypeptide
MNYCRKIRIYPNKKQVELFNKCIGCSRYIYNKGIYKLKNEWNILKEKALNEGCLKCGKELHSTLYCKKHSNLKPKINFPLTLSKLRPMLMDSDKNLNEDEKWMEEIPYDTRQLVIKSLIGNIKSSISNLKNGNIKSFSMNYKKKKDLKQVFFVDKRAIQKLNIFKRRLKKKSKIRVRNRYKKYYNMKIKKDCIILKDFKYWYVLIPKDKDIKYKKAEYTSCSLDPGVRTFQTMYSPDGLIGKFGDEFALQLNKINQRIDLLKSLKTKKIYNSKTKQNINLRCFKLRTKIKNIVNDFQWKLSNHLTKNYNLIMLPKFETKDMSSSKKLNKKSTRMLLTLSHFKFQEKMKYLCKKYQRKLLIVNESYTSKTCTKCGNIDKKLGSSKTYNCKKCSLEIDRDINGARNIFIKNYIGQDEGL

SEQ ID NO: 25981 - protein, 246 aa, Escherichia sp.
MRRFAGACRFVFNRALARQNENHEAGNKYIPYGKMASWLVEWKNATETQWLKDSPSQPLQQSLKDLERAYKNFFRKRAAFPRFKKRGQNDAFRYPQGVKLDQENSRIFLPKLGWMRYRNSRQVTGVVKNVTVSQSCGKWYISIQTESEVSTPAHPSASMVGLDAGVAKLATLSDGTVFEPVNSFQKNQKTLARLQRQLSRKVKFSNNWQKQKRKIQRLHSCIANIRRDYLHKVTTAVSKKPRNDSH

SEQ ID NO: 25982 - protein, 309 aa, Variovorax sp.
VSFSYEGLALEHARPGQLEPRIERSAEELLYEVQGLADLEQRVWSGDRGVKVPLMGCDGKAWDFSDVQKERMARAEIRRRRYQRRMARSPNVKGTDGKMRASAGYRKLKKRAARQTAYCANVRQDFAHKTSHALVNSDARVFAFEDLQIKNMTAAPRPRQDAAALGPQRLRRQGRTQRRDTSQRLGLGPALHDVQGEEAQQARLHAAAGVHVTDVRQVRMLRCKQPFGPGNLPLRGMWSRGQRGCQCSAGAPVAGDRGDPQGRTAQKRNEQEEASGLRAETRNGSRAGTARSYVRVRRSSVASRGASLE

SEQ ID NO: 25983 - protein, 299 aa, Variovorax sp.
VNDQLRAYRFQLRPRGEQVNMLARYAGMARWIWNRALSKQRTLRENGEKYASYETMCKWLTSWRSAADTAWLREGPASTQQQVLKRLDAAFQAFFAKVREGRKSGYPRFKKRGAEPGLRFPDRKKISLDAENGRVQLPKLGWIRLRMSRDVEGELRNASVSREGERWYVAIQTLRPGVLPAGGLVPTLGVDLGVANFAGLSDGRLIEPLAALTAKLRRLKRYQRSVTRKVAGSCNRKKAVKKLRALHRRIAHQRKDFLHKLTSQLASEHPVIAIEDLRVGVMSASARGTVAKPGTRVRQ

SEQ ID NO: 25984 - protein, 387 aa, unknown
  TnpB Polypeptide
LIKTFQYRIYPTHSQRKTMESTIETCRRFYNDCLAERKEAYEARGETIGKYPQLKKVKVLKSSNPDAKSIHSHVLQVAVADLDRAFQAFFRRVKAGERPGYPRFKGKNRFDSFGFKEYGNGFKIDGRRLKLSGMGRVAVRWHRPIAGEIKTLRITRKVHHWYASFACEMETKASPETGKAIGIDVGIQSLLATSSGELVENPKWYRENQVKLRVLQRRVARRKKGGNNRRKAVQILQKQHEQIANQRKDYINKIVAGIINNNDLIAIEELQINNMVKNHNLAKSILDGGWGYFARQLSYKAVEAGRELVRVNPAYTSKTCSGCGKILEDVDLSVRWVDCDCGLSMNRDVNAAINILKRALETNRDGQSRWEITWANAPCVSQEAIAL

SEQ ID NO: 25985 - protein, 405 aa, unknown
  TnpB Polypeptide
MKLTMKCKLVSDTKSKANAINKTMHQYNNIAHAYFKILCKEHLGWSKKKLMLRLEKEKQVMKYHNGFPSALRQSARDKAIEGYKSWVKTKGRKPKIKSSVRLDKRTYTIIKTDNKRYPYFVSITTQDGRVKFPLGIGERRLKYFEDDDCRNKSAEIVEVDGDFFINIVFEVPVREIEKTNEFLGVDLGLTNIATTTTIGNRETEFFSGLPYKKRLMHLREQYRTARSRKIKRLIGRKINRLNNDIAHKVSKKIVNNAIENGVTAIAFEDLKKLMPKKKKMKKKTNFRLSMWMRKRIQEYTAYKAGLNGVPVVTVDPMHTSQRCPRCNHTERKNRRGILFSCLHCGYTNNADRVGSINIAQRYLGVFAEQKFSTNITHVNGWPAMTTSEGERAANFVSSEAKPIYS

SEQ ID NO: 25986 - protein, 407 aa, unknown
  TnpB Polypeptide
MNYNYRYRLRPSDALEEQLAWTVDTCRQLYNHFLHRLNRTDSTSAYSEQKLLPSLKKWWSDLKDVHSKVLQKVVQRLYDNLSRLADAKNAGRKVGQLKWKAPKEYRSFTYSQSGFKLKNTSSRTRLWLSKLGDISLTFHRDLPDDIEIKTITVKQEPTGKWYAILGVETPDDPPAKLENPEQCVGIDVGILKYAHDTDGTAVESLDLSDERERLERAQRDLSRKRHGSENWEKQRRVVAERHADLKNKRRDFLHKLSNYYAREYDLVAVEDLDTKGLIELPGNSRNRADAAWGTFLRMVKYKCEREGTHFVSVNPRGTTKECASCGVSTEKPLWVREHSCPACGFEADRDANAAWNILSRGIAKRLGVGRSESTPVETALPVDTSVSAKRVVETGSPTLKRAPKGER

SEQ ID NO: 25987 - protein, 209 aa, Natribacillus sp.
MDEKADLANIHQVVGVDMGINFVATSYDSNSDTTFFNGRPIKHKRAKYKQLRKELQQKQTPSARRKLKQIGQRENRWMQDVNHCISKALVKTYGQDTLFVVEDLTGVRAATEKVRVKGRYQMVSWSFYDLRQKIEYKALKAQAKVIAIDPTYTSQTCPKCEHTEKANRHKKTHTFCCKTCRYTSNDDRIGAMNLQRKGIEYLVEETART

SEQ ID NO: 25988 - protein, 245 aa, Vibrio sp.
MIRSGNEQLVPLPAQFLIQSSGYVHYLLVSSPKAVGLDWGVSHYFSTIDQDGNFEQVENPRYLRNSKERLTSLQRDLALAKKGTRTQRKLKHQIAKLHQKIARQRLDFTHKETAKLVEVAALIATEKLTVKNMTRSAKGTVEKNGNMVKQKAGLNREILNTAPAMTLNLLRYKAEEASSEFVEVPTKQVKPSQTCPDCGAKKKSLADRWHSCECGCEKPRDVASAQVNLNWALGIQAGNQPKKVA

SEQ ID NO: 25989 - protein, 452 aa, unknown
  TnpB Polypeptide
VYYRSVTHREKGKEGRVALEAVKVALDPSPTQERLLLSHAGGARFAFNAGLAHVKEAIEAGEKPEWSFYSLRKWWNANKDALAVNMDGASWWAENSKEAYSSGLEALAKGLSNWAKSRKGVRKGRRVGFPKFKSKDKAVPKFTYRTGSFGLVQGGRDPKALKLPRIGRVHCMEDVAERVGGARVLRMTVSKRAGRWYAALTVERDDKPMTKPPKGGAVGIDLGVKTLATLSDGTVIENPRCLAASERRLKQAQQALSRKTRGSKRRTKARAKVARLHAHVANQRLDAIHKATTWLTQTYSYISVEDLNVAGMVKNHRLAKAVSDAAFGELRRQLDYKTARTGARLHVVDRWFASSKTCSKCGAVKAKLSLSERVYRCDACGLSIDRDLNAAVNILVAGSAPETINAHGGTVRRGGQPGRATQVPVKCEPSCGTNRVRLGAGARKDTLQATVM

SEQ ID NO: 25990 - protein, 417 aa, Staphylococcus sp.
MSEEKYKRINIRLLPTKEQEELMWKSVNNVRFIKNYFIARCYEEKDKGTFINLSLEKDFKKELTYITKLNEYKWLTESDRHSKVVAIKDVLNGFVRYYKGIAGKPKFRKRGLTPNTFSVRNDVMPSGLCRFRRDGNTFKVSVIGYIKYSKRSFNNFKHIFDIIEDKDKFYSPVIRHDGKYWYISLLYKDNLVTNQKPRELTDEIIGIDLGLRTLMTCSNGIKVRNINLDRKVLILEKRERRLQKQVFRKYDMNKQGNKYVKTKNIIKLERKIRHIRRKLKSIRNNHIHTETKKIVEMLPKEIVIEDLHVKEMLKDKWRRHEIQYAKFFAIRQILSYKCKDRGILLTIANRWYPSSQLCSNCETRVTGKQKTTIKSGYHTFKCKNCNHNLDRDLNASINLKNYRYSNWYRNNIIEKQQ

SEQ ID NO: 25991 - protein, 368 aa, Staphylococcus sp.
MKSYKTEVKPNKQQIIEINKTINACRSVYNKFIEVNKFRYDNGLKFLNHRKFSVWYNNDFIPNNKDKKWTKEVNTKATKQAMANAEDAYKRFFNNISGFPKFKKTQSNGSYYLIGTIHVERHRIRLPNLKWVKLKEKGYIPENNIKSATIIKENDRYYVSVLVDEEPKTILKKPHTEGIGIDLGLKDTLFTPSGGKITDLRKNKKLVKLHKSLKRQQRKLSRKQKKSNNWSKQLLKVQRLYRKISNIKKDIKQKKILEIVQENPQSITIENLNIKGMMKNKRLSNSFQQIGLGYIIEWLKWKCYQYDIELRQVDRFYPSSQICNQCGNRQKMPLNKRIYECDNCDMIEDRDINASINLKQAKEYTILL

SEQ ID NO: 25992 - protein, 367 aa, Deltaproteobacteria sp.
MEHRVTCYNRQYPKSVFYFEQQNALPEIKKDPDFDWLRDVPSQSLQLALRNLDIAFGRFFKGIGKFPKRKKKGHGNVTFPQGDKLIPVPISNKKSVVQIPKLGKLKFIHHRKLIGKIKSATISLCAGKFYISFLTEEEKVIPLMPLDPKYAIGIDMGVKKSIALSNDKFENLDVENIIKIEKRIEKLQRKLSKQEKFSGRWKYFQKIISRLHSQIANIRREFLHRVSRELAESQSIVCMEDLRVKNMSKSAKGSLQNPGKNVAQKSGLNKSILRQGWGMFRTMLEYKCKKFGSTLVLVNPKNTSRECRKCHFVSKENRKTQENFLCVNCGHDENADLLASKNIKRRGLASLGLEEALEAPTIIALAI

SEQ ID NO: 25993 - protein, 362 aa, unknown
  TnpB Polypeptide
MKQTIAVKLEPSPKQSQQLYETMEAFNRGCDYVAEVAFKKRVANKIAIQPFVYGTLRSEYRLSSQMAIRSIAKAIEAYKRNKNIQPVFDPHGAMVLDNRLMSFRDLSHVSLLTLQGRILVPLRFGAYQAARMDRIKGQADLILRDGVFYLYLTVEMPSPPPIEPVDVLGVDLGITVLAMDSDGEAHTGEGVKKCRRRFQRLRQGLQSCGSKNAERHLKRNRRREARYQKHVNHCISKHLVQKALVGQKALAIEDLTHINSQTTVRKTQRYERLSWAFAQLRAFIAYKCEAAGVSLLVIDPRNTSRTCVACGHCAKENRRSQSEFLCVECGFQDNADHVGAVNIRRKGLEARAALSTPLSATA

SEQ ID NO: 25994 - protein, 440 aa, unknown
  TnpB Polypeptide
METGPIGLRPDAQEPFLALLAETGAGQAAFVALLQGAWVGARSTLGADIGVLWLEGVERICPPEAICQSIPRSSTSAHWKRHLKHAAGGTTPAWKSASPHGTSGRRVSASTRSCGRSRTIGRGNPFAAQLHSHILQVTTCDLDKAFRAFLRPLKGSEKPGYPRFRGRDRFDSFGLKEYGNGFRLDGRRLKVTGIGRVAVRWHRPVKGEVKTLRIRRQAGLWYACFSCDAQPEFLPSTGAEVGIDVGIASLLTMSDGEHTENPRWYRSEQGRLRIQQHQVARRKLGGANRRKAVRAVPRQHEHVANRRMDFLKKLVYDLISRYDRIAVEDLQIPNMARNPHLAKSILDAGWGTFRMHLYFKAAWAGKTVVAVAPAYTSRTCSGCGAVFEPLTLADRWVRCDCGLSKDRDENAALNLLALGRSAWGITWPVAASVPQEAAGL

SEQ ID NO: 25995 - protein, 406 aa, unknown
  TnpB Polypeptide
MKTIMKAYKYKLSPSFKQQELLNEYMGINRFVWNKLLRMNLDRLEHKHNLLWRDEASFWLKTWKLGKEYAFLKNAPSQTLQQTIANQATAFKDCFDKKQALKRLPRFKKAGRSDPGLTFPQGFTYCAKSKRVKLPKLGWINLRFDREALGEIRSMTITRKSGKYYVSVLTKQEVMANTGATTSIGIDVGIKNFVTLSNGEMITPFKDRKRIKRLNWRIKVLQRRLAKKKKSSNNWNKTKLQIAKKHSKVTNIRRDFLHKLSTTISKNHAMVAVEDLKVKNMSKSAKGTIDNPGSNVKAKSGLNKAILAQGWSMFVDMLEYKLDWNGGVLVKVDPKHTSQQCPECSHISKENRQTQAEFECVSCGYDNNADIVGAINILARGHWAVASGADALATAVNEEPSMRLVA

SEQ ID NO: 25996 - protein, 395 aa, Frankia sp.
MSRYRLDPAPEQVAGLDEHCGHARYVWNLAVEQQSWWTPYRGKTPNHLERCRQLTDARAESDWLRAGSQTVQQQALRDFDQAMRNFFNGSHRRPAYRKRGQSEGFQVVGKNARVEKVNRRWSQCWVPKVGWVKFRVSRKVPDFRSYRVTLDRAGRWHVAFAVVPEPIPAPGTGEVVGVDRGVAVSAALSTGEMLACPGLRPKEAERLHGLQRRFAHAKRGSARRGHLKARIARVKAREVDRRKDWAEKTSTDLARRYDLIRVEDLNIRGMTRSARGTVAEPGRNVAQKAGLNRGILAAGWGLLVQRLEQKAPGRIERVPAASTSRRCSTCGHTAPGNRESQAVFRCAACGHTANADVNAAMNIAAGRAVTARGGAGLPVPVNREPQHCAPPLVGV

SEQ ID NO: 25997 - protein, 396 aa, Arachidicoccus sp.
MTKPCLKAFKFRIYPNKVERTFFARQFGCNRFAFNYMLEHNNTLYKEEKKHLGYFEMTALLPALKKQEQTKWLAEVNAQSLQLAVKDLDTAFKRFFDKKSERPTFKTKHDRQCFKVAQDFKFENGKLWLPKLKTWIKVKVSREVIGKILYLHISKTVTGKYYVSFTVSGTNETFAPTGKSIGLDLGIKDAAILSDGTRYENIKTLSKFEKKLKYAQRQLSKKQKGSKAKERQRRKVAILHEKIKHLRHDHIEKLTTDIIKNNDKIFCEDLAVKNMVKNHKLAKSLSDVSLGSIGAKLEYKAEWHGRVFLKVGRFFPSSKTCSSCGWIKEDLTLKDRAWTCQLCDSHHDRDINAAKNILAEGLKKLKDLSVCGAHSDNKQKQGETPSLEEPMTPEKP

SEQ ID NO: 25998 - protein, 371 aa, unknown
  TnpB Polypeptide
MDPTLEQKRLINQNLGSVRFIHNHFLEEKIKTYETYKRVVSPYLQMKSLRKLKDEYPWLKEVDHCSLMTTIFNLDDTFKSMIKEGKYPNYKSKYNKESYTTNNELKTWGNIKYYSVRLNLKDRIVILPRLKSVTIRGYKKLSSINGKIKSATVSKVANKFYVSLLVEMSIEVPENKCEKILGIDLGIKNYIVTSDGKKYKNEININEQRLKGLHRALSRSTKGSRNREKVIIKIQKFYRSLKNKRKTQICEIVKRILQENDVVVTEDLDVKKMYQTKSIAVKLRDVPFTNFIETMSYKAKWQGKKVIKIDRYFPSSQVCSDCGYQNKTLKDLSVREWICPKCYAHHDRDINASINIKNEGIKILLKQLNLY

SEQ ID NO: 25999 - protein, 321 aa, Bacillus sp.
MLVNKVYKFRIYPNKGQEILIAKTIGCSRFVFNHFLAQWNDAYKETGKGLTYNTCSSQLTQLKKELVWLKEVDSTSLQLSLKNLADSYTRFFKKQNKAPRFKSKKNKVQSYTTKHTNGNIAIAGNKIKLPKLGLVKFAKSREVEGRILHATMRRNPSGKYFVSILAETEVQELPKTCSSVGMDVGLKDFAIRSTGEVFGNPKWLRKLEEKLAKAQRVLSRRQELALKRKCKLDEAKNYQKQKRKVACIHENITNARTDYLQKISTYIVKNQDIIGMEDLQVSNMLKNRKLAKAIREVSWSQFRTMLEYKAKVVWQTGSNCV

SEQ ID NO: 26000 - protein, 178 aa, Citrobacter sp.
MPVTSKAIGIDVGLKGSFVTVTGVKTDNPRHTAKYAKRLALLLRRLSKKAKGAQNRARASLKVARLHAKIARCRRDNLHKLSRKLINENQVVCVESFKVKNMSRYPSRSKAIADASWGECVRPHQNKSEWAGRSLGAIDQFFPSSKRCSCCGFSMLKMPLDNRDINAARNIKAAGLAV

SEQ ID NO: 26001 - protein, 385 aa, unknown
  TnpB Polypeptide
VVRLFRSSNSILKTKSTSEKVCEHRLAYVFRAYPTKAQETALTETLETCRQVYNSLLNWRKHDYDILGKSPSKVEQQAAFPKWKQEHAELSNVYSQVLQNVAVRVDLAFDAFFRRVKAGETPGFPRVKGDGYDSFTYPQSGFGFHQGKLRLSKIGDVSIRQHRLIDADIKTCTIRRVRHKWYVCLSCEVGPELLPPSAEEVGIDVGLKTFASLSNGENVANPRFFRCDEKALAKAQRKLAKQVRGSHKRRKAKKVVSRIHERVRNRRHDFVHQTARRIVNRFGVIAVEKLNVKGMVKNHCLAKSISDASWSMFRNVLSQKAARAARTYAEVNPAYTSQTCSGCGHIAKKSLSQRQHDCQMCGLSLDRDTNAAINILSVGQYRVAA

SEQ ID NO: 26002 - protein, 383 aa, Spirochaetales sp.
MCYNDVMRTLTVKLYNSDDFGYLSDMINIAGIIYNTALTIIQDYYDATGKLLDKYELQKQLRGLRNEDENHHWRYVGSQAVQEITDRIYRAYRLFFTNREKGVKCSPPRRRKVKKYKSVTYKQAGYRFLTGGRISINGHIYRYWDSYDGLLERIKIKTVTVKRNILGEFFVYVTTDSAVTMRETRDGRGDVGMDFGLKMFLSLSDGSVIRSPEFFRQGINEVRKANRALSRKVMGSNGYERALKALYRRHQDIANRRRDWFWKLSHELCSRYGVIAIEDLNIKVMARMWGRKVHDYAFSEFVEILEWCARKYGTRVIRIGRYYPSSQTCSVCGHVWPSTKDLSVREWTCPECGVYHDRDVNAAVNILAEAKRIMNRMEQAKDA

SEQ ID NO: 26003 - protein, 402 aa, Escherichia sp.
VKRLQAFKFQLRPGDQQECEMRRFAGACRFVFNRALALQNENHEAGNKYIPYGKMASWLVEWKNATETQWLKDSPSQPLQQSLKDLERAYKNFFRKRAAFPRFKKRGQNDAFRYPQGVKLDQENSRIFLPKLGWMRYRNSRQVTGVVKNVTVSQSCGKWYISIQTESEVSTPVHPSASMVGLDAGVAKLATLSDGTVFEPVNSFQKNQKTPARLQRQLSRKVKFSNNWQKQKRKIQRLHSCIANIRRDYLHKVTTTVSKNHAMIVIEDLKVSNMSKSAAGTVSQPGRNVRAKSGLNRSILDQGWYEMRRQLEYKQLWRGGQVLAVPPAYTSQRCACCGHTAKENRLSQSQFRCQVCGYTANADVNGARNILAAGHAVLACGEMVQSGRSLKQEPTEMIQATA

SEQ ID NO: 26004 - protein, 422 aa, Thermus sp.
MWVNQAFRFELSPNAAQRRALAQHIGAARFAYNWGLEMALKAREEGRKLPSAAELHKAWNAWKRENVPWWTEVSKCAPQEAFRDLEKALKNWKAKRARFPRFKRKKSLDGNKARLTGTIKVFSRQVQLPRIGLVKTKERTDKLVGLIQAKKARVLSATVSREADRFYVSLTCEVERPDPKPKEVRSEDDVVGVDLGLASFAALSDGTRIEAPKPLAKKLRLLKRRSKQLSRKEKGSNNGRKAALALARLHRKVKNLRRDFLHKQTTWLARTKPVIVVEDLNVKGLSRSPLSRSVADVGWGTFLRMLEYKAKWYGATLIVAPRSFPSTRLCSRCGHLNGKMPLSQRVFRCEACGLERDRDLNAAINLKKYGLAHLTGPTASSAGSHACGDPSGGGTALLGWSTSHGSVKQEVARHHRPLGRLK

SEQ ID NO: 26005 - protein, 527 aa, Thermus sp.
MHEAKAPKLYLGVHARLVFPDPRDEEAVLDLMRRFSSATRFAYQRLLEGKDRKELKREDGPLCALFGLNTRYADGAIAKAKAVLDSALELGNDPKKVVFGGRKLFEQLKRKHLSGKPLEALKRRWKEKRQGLLYTQGDRSKKGGNPHFKLQVEGRALWLLVHLGEEEGQKEGERKKFARALVRTSHPQLNALLERIHSGLAYNAELTLKEGKVYAHFTWSEELPPPVHTKANGVLGIDVNADPYHLALAVVSPDGNLKRHLTLSLEEVDRAPNKGAKELLLWKVAHQVVAVAEEHGVAIATEKLKYLRKSRRGDGSGRAFRHKQHRFAYRSLLEKIHSLARKRGVEVLEVSPQDTSTIGMLKYAPGLSLSKDVAAAYVIGRRALGFEEKLPKGYEALLKDESFLREARSFYEARMAQLQRERKEEKNPYLKRRWSRELRRIQSALASLSSPWGSPGSWKGVTEGRNPSGAYPWRVLRVSLFLPLLGLEVPRDLSPLKPILHGSWKGWKVGSGPHPGGGPGCANVHFY

SEQ ID NO: 26006 - protein, 404 aa, Nostoc sp.
MKARYRYRIYPTNAQQMLLSKLFGCVRVVWNDALAHCLAEYQAGNKKPSGADLQKLFITQAKKTSQREWLSEVSNIPLQQSLNDLERAYQNFFKSCKKERKGKLVRPPKLKKRRAAQSARFCKGGFKVCQTSVYLAKVGQVEIVWSRALPAEPSSVTVLKDAAGRYFVSFVVEIQSSPLPKIDNVVGVDLGITTFATLSTGEKVDAPKPLKKRIGRLRRLSKNLSRKTRGSKRYEVARKRKAKLQAKLKDTRTDFLHKLSTKLIRENQTIILEDLNISGMLKNRKLSRAISDLGWRQFRTFLEGKSEKYGREFRVISRWEPTSQVCSYCGFRGGKLDLSIREWICLNCESTHDRDVNAAVNIKVAGGHSETQNGRGGKCQTTVKVAASREASTRQEFIQLSLFD

SEQ ID NO: 26007 - protein, 453 aa, Nostoc sp.
MSLKRKKGFRIETKTQTSQLIRVGFDLSETNNRFSEVAMFFLSVVTSDPGGVDETDFKRYYEPKFFGQEANQVFPFDCPSEFRRAALAKAVGIYRSWRSKYQNWLSSEKKHKLKKSSKQLKHHKPPILPKSLKLNATFYKKMFKNDTGSTVVLKILVNNVWKWVKFHYSSAPNPGSEWVKSSPSLVLKQGKAFLNWTVERYQKATGGIKTLMQNEHRICSVDTDLDGELMKAVILDVDDDGSVRELARMTTTKHANHIHRRKSRLGKIAVAMKRTGIIAKGFAKQRWEKINRCEVDAGNQLSAQIVDFANRWGCAIIVFEALKRLTPCKGKYSRRSNQKRAYWLKSRVMKEVTRKARQNHNILTSHVNPKNTSRLCAYDQSEVWRGDTYNPSLRQMLEPYRYGGMCFVSMTGFRGNAGYNAARNIGLKFLARFYKSPTLVRVGSDKIASKGSG

SEQ ID NO: 26008 - protein, 374 aa, Caldilineaceae sp.
LHSQGLNAAKHDRLARLVVLYGKVRVDAWQRCSGVSAVLQSPYDIRDAWMAEGYDWHGLPARLGNATLADALGDIGAAREASKVPVKKAIRHRTRGNSAERERLYNLLKQNRWTEDSFLHRQMRKQWRGGRSHVTNQIVADAGSYTTQVWHDRAWVYLQGLERGQRIAIPLKGTHLPSGTLRILLRDNGQVEVHYAVDEAQVCSTRPCGKATVGVDKAGTIACEDLSVSMKSARYRHRDTNRRLNGWVKGVMADTLTSISRRRGSALALANPAYTSQVDSRTGLLQGRRRWDRFYCLDGVVLDADVNAACNILARLDDEEITLYIPYKEVRALLAERTRTAVGTAPRGLELRGRAMPFPSTESESPEPVLECTR

SEQ ID NO: 26009 - protein, 406 aa, Gloeobacter sp.
MLVLESKLVGHSTQFALIDEAIRTFQFVRNKALRYWVDNPPSQGAGRGANKYDLSKQCAILAKEFDWAGRLNSMARQSAAERAWSAICRFFDNCKKKIPGKKGYPKFQKDNRSVEYKTTGWKLCDDRKHITFTDGFSIGTLKLLGTRDLSFYSKDQIKRVRIVRRADGYYCQFCVDIDRTEDLPPTGRTVGLDMGLESFYTDSQGEKVENPRYLRQAERRLKRAQRRVSSKKKGSANRRKAVRKLARQHLKVSRQRKDFAIKRARCVVRSNDLIALEDLKVRNMVKNHHLAQSISDASWSLFRQWVEYFGRVFGRIVIAVPPQYTSQNCSACSTLVKKSLSTRTHTCKCGCVLDRDHNAAVNVLQLALKTTRGHWESQTLGESTTSIAEEQSEATSRLIEPRILRL

SEQ ID NO: 26010 - protein, 386 aa, Falsibacillus sp.
MKAMLVNKAYKFRIYPTKEQEGQIARTIGCCRFVFNRFLAQWNDTYKETGKGLTYHSCSAALTQMKKELGWLKEVDSIALQSSLKHLADAYTRFFKQQNKAPQFKSKKNHVQSYTTRYTNGNIAIVGKKIKLPKLGLIRFAKSREVEGRILHATVRRTSSGKYFVSILAEMDVHLYEKTGSSVGVDLGLKDFAILSTGEVFGNPKWFRHLEKKLADAQRVLSRRQQSALKRKCKWDEAKNLQKQKRKVARIHEKIANVRKDYLQKISTHIIKNHDVVGIEDLQVSKMQKNHRLAKAISEVAWSQFRTMLEYKAKWYGKRVIAVSKTFASSQLCSSCGYQNKDVKNLALRKWDCPSCRTPHDRDLNAGQNLQKEAIRLLTVGTTGLA

SEQ ID NO: 26011 - protein, 434 aa, unknown
  TnpB Polypeptide
MALQQASSVVENDWALAQQRAKEKIERTRWYANLDGNERHYVNLLLSTMGDDFFLLMRGRTATFGWHRDRAQLKKVKNPGSLCALVRRAIQKVKSKQSRRRACRSIWFDCECYSVQIVTEGKETIQVVSLMSLTPGKRVKIKLRGKKAIKGTVKLVKTPRGWQLHTLSTPKTKEKSSEGKLTCVAMDMGFSEVFTMHDGAQFGRKLGEAIGAQAETVDLKVRERNRLTAQAENTKDPKKRRNILRYNLGSDTFDRAVAKHRSRVYNIVNRSLNEILKQYPAQVYVVEDLSHRFYLKGFSKQTNRLLSSWVRGIIAERLSFKTALQGVKLVKVPAAYSSQRCPYCGCVCRESRKGDRFECVHCGAKGHADRVACLNLLCRAHNPRFRSRMSKERVLALELDEHGMECARRGTTPHKYEPRQRKKRSTPNEATKKA

SEQ ID NO: 26012 - protein, 369 aa, Lactobacillus sp.
MRKHLDKLCDYRRYCWNQGLALWNAMYDESLIMDDKKLYPNERKVRNTLVADKADWQYNLSARCLQLAISDLGKAWQNFFNKALPDWGMPHFKSKKEPRQGFKTDRAKVVNGKLRLDKPRGVKEWADIKMVGAKSLEGDLKVVSVFHENNKYWATLPFGVNVTKKPATNFKTAVDVNVGHMNYTEGKVNTYPKRLRKLYERIKHYQRQLARKRIVNGKEASQSNNYLVTKAKLQRDYRKATNIQHDLIQKFTTKLINENDTVVIEDLAVKNMQMSHVASKGLQRSMFGYFRQVLTYKCEWYGRKLILADRIYPSTQRCSDCGHIKTKEDKITLAGNQKHHTKHNEYICYECGAVMDRDENAVQNLLALA

SEQ ID NO: 26013 - protein, 319 aa, Cyanobacteria sp.
VRFEGNKVRLPGIGWCKFFQSRAFPDGFSTRTVTVRKKADGWYLSVQLSDETVPETPTPETAKTAIGVDLGIRKLASVSTGELIANPQYGKKRERRRQLLSRRASRKKKGSTRRRKASQAASRLEQKVERQRTDYHWRVAHQLVGSADCIIFENLNIKGMMARCKPKVDPETGKYLKNRQAQKRGLNRVIADVAWAELKQKVKVVAAKSGVLVHEINPKHTSQECSCCGYISPTNRDKEKFLCESCGWVADADIDAAVVIRQRGLFELGIKIPLPVVHGKVTLKEPVVRQELSVGLPTEPENPRIGWKQLSLFEWRGDG

SEQ ID NO: 26014 - protein, 221 aa, Ktedonobacterales sp.
VVCVNPTRHQERAPFQTLVTVVGIDVGIKHVAVVSDGRRLQNQRPLASHLKKLGKLQRRLSKKQKTKDPETKRTVFSKNYEKQRLKVARKHQQIANIRRDIQHKFTTEVARTCGVIGIEDLNLLGMMANRKLSRAVADAAMGQLLQFLKTKVANAGGDVFIASRWFPSTKRCCGCGHVKKRMPLKHRTYRCQNCELVIDRDVNAACNLACFATDMLRQLHA

SEQ ID NO: 26015 - protein, 369 aa, unknown
  TnpB Polypeptide
VSTICVKYRVLPTKAQETALNRTLEICREVYNSLVNERTAVYETHKETLSLYDQQAAMGKWKTAHPELSEVHSQVLQNVAVRVDLAFKAFFRRVKAGETPGYPRRKGAGVYDSITFPQAGKTGCKLAGDTLRVSKIGLVKCIVHRPLPGNVKTCTIRRQAGKWFACFTCEYEPEPLPLSEEAVGIDVGLNQFAALSDGTFVTNPRFFRRDEQALAKAQRKLSKQGKGTPKRRKARKVVSRIHERIRNRRHDFVHQFARRLVNRYALIAVEKLNVKGMVQNHCLAKSISDASWSLLRGVLSQKAESAARTIAEINPSYTSQTCSECGHVAKKTLKERWHHCPICGLSLDRDTNAAFNILKTAVGQHSVAG

SEQ ID NO: 26016 - protein, 510 aa, Clostridia sp.
MLKIKNPSKEFSSRLDNLMREFCSATRYAYNRLLEGVSPNDLNKSIPKTFKLNKRYAEDTVLLDKATISSQEELLPQGLEDVQAKIKKTNKKLNDYIKGKRKPKKGDLETCIKGLKSRIEKLERKEKELQNHLEEGTIPKVIFGGRKNFYKRMKGKITNKEWKDLRSNKLYSRGDKSKKGNLNTRLTYAKGRFFIEIADTINRTKSGRSPRIKAEVIVPDKFLHQVIDAIIPEKGYDINKQKEIDIYKPYTIQIKRKNSEYYINLIIEEETSGYELGYNEEIDADLIAGIDVNIDRIAVSIMSREGNFLKSKVFYCHEMEYVRTNKRDNIAGETAKEVIDWLLKENVGAVVFENLKFAQNHDTDRKFNRLTHCFAKTKLQSCLIRRALRNGFEVKKVNPAYTSIIGRFKYTKLYGLSVHEAASFVIGRRGLGYNEKVPKEFIDLLKNGVKKHLQKVLSSMEESKDSLESARYVKKMIKNIDNFKGNHSWTTWNVVNKTLLYKDFEYAIDF

SEQ ID NO: 26017 - protein, 382 aa, unknown
  TnpB Polypeptide
VLRTYKYRIFPSEEQQNLIANIFGQVRFVYNLGLETKISAYTGNKKNIDCFDLIKQIKELKDTECSWLKESPSQALQMALRNLDNAYTNFFRGRGFPKFKNKHEKQSFQLPQGVSLSENNKQIFLPKLKWIGIDLHRQFKGEIKTVTVSKTVTNKYFVSILVDNKQELPSKKPITEQTAVGVDLGIKDLVITSDGKKFENKDFFKSAQRQLRVAQRSLSRKTKGSNHYKKQKIIVALLHEKIRNQRQDCLHKISRFLVDNYDTICMEDLSVSSMLKNRSLARAISDMGWRKLRTMIEYKSEWYGKNISIIGRFDPSSKMCSCCGKLNKDLKLSDRSWICINCGVEHDRDINAANNIKTFGFRNKPSVTQSEPLGCACNVESN

SEQ ID NO: 26018 - protein, 268 aa, unknown
  TnpB Polypeptide
LAGKPSGQNRLASGRIMRVHAYCRQPEEPSAIVNNSLFKLRVGAYFGGDKKGILFLHIIFEKEVEDVQCSNDNVLGIDRGIVNIATLSDGTIFSGEHVLQVKKRYAILRSKLQSKGSKSAKRHLRTLSMKENRFVTDANHCISKDIVSMCAPGTTIVLEKLDGIRDRSSKLRKSERAKVHSWSFYQLEQFLTYKALAKGCSVQHVDARYTSQKCSRCGHTVKGNRTTQSHFKCKKCGFECNADVNAAINIANNFRASVNKPIVAGSNT

SEQ ID NO: 26019 - protein, 261 aa, unknown
  TnpB Polypeptide
MNPSGRYFASVLVETNITERSVSEIKEENTVGIDLGIKKLAVCSDGRIFDNPKNLARSLELLRRRQRQLSRKQKGSANRDKARIKLARIQERISNQRKDHIHKVTSILTHDSQVRTICIEDLNVRGMQQNKKLARSISDASFGMFRSILEYKCRWYGINLISIDRFAPSSKACSKCGYVYEGLRLNDRSWRCPQCGSLHDRDLNAACNIKNFGLKALPVERGEVKPVDCPIVDERRPRPKKQRQVEAGKTRSNLTPKPLNF

SEQ ID NO: 26020 - protein, 387 aa, Glycomyces sp.
VFLRYRFRVYPTAPQRVSLARAFGSARVVYNDAVAARRHAHAEGLAYPTTAALSKQLITEAKRTAERSWLGEVSAVVLQQALVDCDKAYKYFFASLKGRRPGPRMGPPRFKRRSGTQSIRFTSNARFSVLDNARLRLPKVGDLRIAWSRELPATPSSVTIIKTSTGKYYASFVVAVDSGEGLLEPLDDPDAETGIDLGLKDFAVLRGGKVIANPRFFRRLEKKLRKAQRGLSRKMKGSANRAKARIKVAKIHEKIKHTRADWIDKQVSAIVRENQAVYVEDLFVRGLGRGRVAKSVHDAAFGMFLARLESKAKRAGRTFAKVDRFFPSTRLCSACGALTGPRGLEGLQARKWECGCGANHDRDQNAEINIRREGQRLAALAAGLAER

SEQ ID NO: 26021 - protein, 379 aa, unknown
  TnpB Polypeptide
MRVVDYCTVPLSVSDSQVDALIQHKSSFSKLCNSLSGFVHELGEIDAETLINRHTAYFRLMNPSVPIEVLHRAIRVVADAYGVYVANTARNPWKSPVMRFSSREVTLTLGDDAGFADDGSLIIVTVAGRELVIPADWSLIPAKHHGATPVSLKLLVNDGSWFLIAGYVSHVKRNTPLQPLVGVDLGTRFLAVTYDGSSTAFYKGTLNGSWHRRSTHYKQTQRALSKRGTRSAMRKAGRLAAKSAAREMNSFHDIAREIVGKQDSLSLFVFEDLYARDKYVKQVATKNPYPRPTAYMYKLQQIIIAHALKNGHSVALVNAKRTSTTCPKCLWTHPSSRKKNKHLFRCVNCGYTTNDDRVGAMNIRSFGAENISGRSLDRL

SEQ ID NO: 26022 - protein, 381 aa, unknown
  TnpB Polypeptide
MILAHKTRLNPTPEQEAYFRKAVGTVRFAYNWGLARWKELYEAGERPSALALKKEFNSIKDDRFPWVREVSGRCTEYGFAHLSAAFSNFFRRIKAGEENIKPPRFRSRKYKRQTFYLVNQNIKHRHNELFVARLGWVNMAEPLRFKGKIMSAVISTDGLHWYVSITVETDIEQPPRPGVAVGLDLGIKELIVGHDENGRTFTHENPHHQKNELRKLRRLNRELARRQQGSNGWLRTKAKLKKLHGKIKNRRLDNLHKITTELTRNYKVICVEDLHVAGMVKNRRLARSISDAGWGELVRQLEYKVTLNGCVVVKVGRFFASSQTCSECGSKNTAVKDLKIREWVCPECGAIHDRDGNAAANILSEGLRLLEERRGISQVET

SEQ ID NO: 26023 - protein, 249 aa, unknown
  TnpB Polypeptide
MLLSHRTSVKIRPEYSNIIGHMCYAASKLWNVCNYERHHYKELGLEKYPDWYYQKKAHKGDLWYRQLPSQTAQETCKQLDKAWRSFYVLKKTGGIKDPNPPRFKQDNIPVTYMQMGIRHEKGSDQLRLSLPKNLKIYMEETYGIHERFLYLENKIFRDMDHIKQLRIYPPENGKCDLIVIYEIEGPEQLSQNGHYLSIDPGLHNLMTCYDSGNGRTFILGRKYLSLERYFHKKIARVQSVWYAQHRKEG

SEQ ID NO: 26024 - protein, 149 aa, unknown
  TnpB Polypeptide
VKDYLHKVTRWIAEYCRKEDIRCVVVGDIRNIRKEKDMGHKVNQKFHGLPYNRLYIMLGYKLKLYGIQLIKQEESYTSQCSPLSPEVSKRYAEATNRKERGMYITDRVSYNADAVGAFNILRKYLSVSGKQKELSVTGLKNPEVIKVAV

SEQ ID NO: 26025 - protein, 570 aa, unknown
  TnpB Polypeptide
MPNLERTLVRQFEMPGETDRVSLDRMCSSYGFVASKFLFAFQTRELRDEVRDFRAFRNKLVASLSKKPVEFNQRLADLRTIGKAAEASLLALLRELKEASGPHLQARHWKLALEETSKMAMTHWKSVIAEAKKKLAHTLKRFNDQDRHYACWLLCGVNRQFFELLDGRIPVPNPEVSFDRNYCLSYDRPLSSKTLRSIAGVVRRTVNKVRRDSVCYPRTKAFHNRIDFDASCYTVRSTEEAQFLELMSLQPGKRISLRLKGRSKIRGTLQLIRDTAGTYSLRVYVPQECEEEKRKTGTVIGIDLGYTEMMATSEQELLGTDLGQYFSAISDKRRKNSEGRNRMYSLFRNLLKKSGKDNLAKAERIRKHNLGRKKQRARYTRDIGVIKTIVNRELNLLFSRKKNPIKEIVVEDLSARMKVHFRKKWNRRLSGWMRGYLQERIRYKAKKFGIEVSEVNPAHSSRECPRCHCTDKKNRLGDSFKCSFCGYHGHADLVAALNILGRLGDKDIRIGMSPSRVKAVLDGRYVGWKSLNHTVSDRTSGAARVVNESPRSASSKSELRSNVQVCTASK

SEQ ID NO: 26026 - protein, 372 aa, unknown
  TnpB Polypeptide
MILAKKVRIFPTPEQEQQLWKSVGTKRWAYNWTLAKQEESHKNGGKFINDGNLRKELTQLKKTEEYQWLNEVSNNVTKQAIKDACNAYIRFFKGQCKFPKFKSRKNSTPSFYNDNVKLKIKKNYVLLEKVGWVKIKEKIPINCKYTKPTVNFDGKYWYLSVGIEQGNKNYELTDITIGIDVGIKDLAITSIDGLKFKNINKTKKVKKLEKKLRRLQRKVSNKYEKNKKGVIYQKTSNIKKLEKQIRLVHRRLNGICKNHLHQATNQIVKTKPSKVVMETLNISGMMKNRHLSKAIQKQNLYEFKRQMKYKCEFNGIEFVEADKWYPSSKTCSKCGHIKKNLSLSERTYICEECGCIIDRDYNAAVNLSRYLA

SEQ ID NO: 26027 - protein, 429 aa, unknown
  TnpB Polypeptide
MLFIIVDTIIKGYKFRIYPTKEQEILLEKHFGCCRFVYNLGLELKNKTYQETGKSITATKLMEMVKELKHSKYLFLREVNSQSVQQSLWDLDSAFSRFFKKIAKYPNFKSKHISKKSFQIPQGFDVDYSKSNISIPKIKEPIKCIFHRKVVGEVGSIFISKNSRGKYFASLRVETKIKKKDKSIPTLENSIGIDLGISTFVTDSNGNKYSNPKLLKKYEKLLSKKQRILSKKKLGSKKRELWKKRVSNIHAKISNSRKDFHHKLSSKLVRENQTICLEDLSIKNMMKNRKLSKSIGDVGWGQFISFLTYKSDWYGTNLLTIGRFEPSSKMCSCGKINQNLKLSDRTWKCSCGKVHDRDVLAAGNIKKFAFVNLLAKDKIGREPSESKSVEKLTSDDLRKMIVKPNSMKRKKSNDTIKSYVEADSSLEGR

SEQ ID NO: 26028 - protein, 388 aa, Moraxella sp.
MTVIRGHIIELKPNNAQATYFKKACGVARFAYNWALAEWKKQYEQDKNYRDDCLAKGITIDETKLHKPSQGKLRKQLNAIKREKYPFMLEVTKCSPQLAIMQLGDTFKRFFKGESKYPQFRKKGVNDRFSLSNDQFKLKSKNNKPHIQIPNLGLVRMTEHLRYNGKILSAKVFTKGSKWFVSIAVELSETTKPLPKTNKSVGIDLGITSLATLSDSTKIKAPKPLKNKLKKLQRLSKSLSRKQKGSKNREKVKTKPSRLHYKIACIRKDYLHKLTTNIVKQFDMICLENLNVKGMVKNRKLARSIHDLGFYEFKRQLIYKANQWGKSIKELDRFYPSSKTCHCCNHKVDELPLNIRNWQCPSCNTMHDRDINASVNILNHATKILTTI

SEQ ID NO: 26029 - protein, 420 aa, Cyanobacteria sp.
MKLTHIYRIKPSTEQVAVMDTWLEMMRRHFNYALGQRYDWLRRTRCQIDRCSLTREPIGDIPDKFPGYNLQAAELKTTKELFPAYKEIHAEVQQQNLKRLDKAWDRWIKPDKSGKRAGRPKFKKKGQMRSFTFPRINCPKAGINRIEAGVLTLSKIGSMPVTMHRPLPDGFELKTATIVKKPDGWYIAVSLEDDSVPTPKPVDVSEAGRSPIKSAVGVDLGLKSFLVTSNGESVDVQQHYRKTQKHLARQQKRLANKEPGSVNALKQKEKISRIHQRIGRKREIFHLQIAHQLVKKYDLIVVEDLNIKGLAKTRLAKSIYDVAWGKFLTVMEAVALRSGVHFVKVSPHNTTVNCSSCGTKVPKTLSVRVHECPRCNLEMDRDENAAINILYKGLTAVGLTVAAYRRLSGCTPDEVGMPKA

SEQ ID NO: 26030 - protein, 303 aa, Domibacillus sp.
MYKLTHKEVNVMVTNKAYKFRIYPNKEQEILIAKTIGCSRFVFNHFLAKWHEAYKETGKGLTYASCSAKLPSLKKELVWLKEVDSIAIQSSVKHLADAYERFFKKQNKAPRFKSKNNQVQSYTTKQTNGNITVFDKQMKLPKLGLVRFAKSKEVEGRILNATVRRNPSGKYFVSILVETDVQSLEKTGSSGGVDVGLKDFANLSNGTVYTNPKFFRSLEKKLAKEQRILSRRKEIAIRQTRKLSESKNYQKQRIKVARLHERIANARTDYLHKVSTDIIKNHDVIGMEDLQVTNMLKNHKLAK

SEQ ID NO: 26031 - protein, 382 aa, unknown
  TnpB Polypeptide
MTVIHKGIRVRLYPTEEQEVLINKTIGCCRFVYNQTLVDCKQSYEQTQHFPSGKERSVNLVPLKEEYRFLKEVSAVALVQSVRDLDSALNNFFKNRGHFGFPQFKSRHRGKQSYRTPYNGGKANVLDNKHIKLPKLGEVKTKRFDMPEVYKLCNITVERTSTGKYYASICIETEVQQLPKTGKQAGFDLGLIDLLIGSDGTRYARPRFAYEHKDKLAKEQRKLSKMRTKLERANANLDECRNYQKQKHKVAKLHEHIANCAKDFNHRLSRKLVEEYDFIAMEDLNVSGLIKNHFLAYSISDVRWSQLLTFIKYKCQWYGKDFRQVDRFYASSKICSECGAYHKDIVNSLSVREWTCPDCGMHHDRDVNAAKNILIQALSVGV

SEQ ID NO: 26032 - protein, 430 aa, unknown
  TnpB Polypeptide
MDSPLQKVLNTSFLSILLMPDVGFRFRAYTDEQTLRALKAQLKLACEIYNTLRWADIYFYQRDGKGLTKTELRQLALDLRKQDEQYQQIYSQVVQQIADRYYEARKRFFDGLARFPKEKKPHKYYSLVYPQSDRGWKILETREIRTRSKKNKKKLVVLRLENLGIFKLIVHRDFPLDKVKQVVVKLTRSERVYISFIVEDYEFPKLPSTGKVVALDVGIEKLLTTSDGHVFPNLKPYEKALKKLKMLYKRLSRKKFLSHNWFKAKIKLARAYEHLKNLRKDIYMKLGKWFAKHYDVVVMEDIQVKQLVGKSDKKLRMRLHDVAFHELKEIIRYQMEKYGKKLILVDPAYTSMTCARCGYVKNDLTLADRVFVCPKCGWVADRDYNASLNILRRSGWEPPLEPVELRPLPVAKGYGQGGAVKQEALPFKAG

SEQ ID NO: 26033 - protein, 366 aa, unknown
  TnpB Polypeptide
MIATRSIDEALNKTAIAFADACNQILAKAQELKTSNKIKLHHEAYRQTKYVTGLTANLVARAIARVCGAIKTAAKKKRMVKFFKPSSINYDARIFEYRERDETVSISAIDGRMHIPLVIGEYQRLALKGKKPTFATVLLSGKTWYINIVVYEERLDSKSDPGSCLGVDLGLNNIAVTSSGKFFDGTDVQTYKAKRARVRASLQSKRSAGAKKVLHRLSGKESRHIRNVNHVASKQIVDEADKGGYGMIRLEKLTNIRTRTKTFSKHLNRMVGGWSFGQLQTFIGYKADQKGIEVEFVDPAFTSQTCCICFSRGVRTGRSFVCSTCGETDADLNAAKVIAAGGVPVNAPKIAGIKPSYKLTALAVGG

SEQ ID NO: 26034 - protein, 377 aa, Lysinibacillus sp.
VQFVIVNKAYKFRIYPTKEQVILINKTFGCSRFVFNHFLARWNEAYRETGKGLSYQSCSADLTQLKKELVWLKEVDSISLQSALKNLSNAFHRFFKKQTNPPCFKSKKNQVQSYTTKYTNGNIEIIGNKIKMPKLGLVRFAKSREVEGRILNVTVRRNPSGKYFVSILVETKNKPLEKTGSSVGIDLGLKDFATLSNGEVFSNPKWFRTLDGKLAKAQRILSKRVKGSTNWNKQRVKVARIHEKITNARTDYLQKIFTHIIKNHDVVGIEDLHVSNMLKNHKLAKAISEVSWSQFRTMLEYKAKWYGKEVVVVSKTFASSQLCSTCGYQNKDVKNLNLREWECPSCGTFHQRDLNAGQNLRNEAIRLLTVGTAGIAY

SEQ ID NO: 26035 - protein, 233 aa, Methanosaeta sp.
MSHCLRSEVCEVGCLKSFVVDTGNNSVENPGFAEKVSTKVKNIHRRLSRAEKGSKNRQTLIDKLNKVNYKIKNQRNDFLHKLSRHYVNNYKIICVEDLDVKRMKENGHNKSMHRDIHDAFWSRFMFMLSYEAECAGRRLIEVNPMNTTQRCSACRSIVEKELSDRVHECPHCGFSCDIDCNASMHIAGMEQPVAPMESTSTSHFCDASVGYDVGSPALQGGAVHTTYEAYPVW

SEQ ID NO: 26036 - protein, 395 aa, Methanosaeta sp.
MIISYKYPIFPDEATQQKLAEALDACRWLYNRLLQELNEAKEKGIKLTTYDTQNMIPVLKLENPKLNLVYSKVLQMVNYTLWSNIKGLSASKKNGRKIGRLRFKGYGWYKTMYYNQSGFKLDQDHGCLHLSKIGDIKIKMHRKVQGCIKAILIKREGRQWFAIVQADQEPETLPATGKSVGIDVGLKSFAVDTDGNSVENPRFAEKVATKVKNIQRRLSRAMKGSNNREKFKEKLNKVHERINNQRLDFLHKLSRHYVNNYDIICVEDLDVKGLKEKGYNKGTHRNIHDASWSKFIFMLSYKAESAGRKLIKVDPRNTTQRCSTCGSIVRKELSDRIHECPYCGFSCDRDYNASMNILIAGMEQPVVPIESKPLHHISVMQVLAMKWEALPSRVG

SEQ ID NO: 26037 - protein, 544 aa, Scytonema sp.
MPKLLTSKPKKTAAQIKEAKNQTTRLLIIAGVYLDFWFVIKLESVLRVEQTVVNPVIECSDESTINGLIEKLFTVRANTYNVLGSAAFWGESWMKTQNIIAEKFGQPDTYKINSLPLPAKIFEWTVQDTAKNILAQQSAAKTAIISRIYKRFPLHQGENLTAEQKAKNQESQTNRDLAINALKSFETIKQIPWLHRYFREEYKRGHAKQNRQIVYQPQAYNCTRISRYLVRLEVQGLTRGKRISLIVKSNRIITGRIRLIRNASGSLEIHSFVTLYNRDYGKLINREKVKAVDRGYTEVFYTDDNQLLGKGFGQQLNKKTERITRSGRNKNKLWALAHVRYKENSQKSRSIRENNLGNQTELKRRQRDDAYVETVVNQACRSITFQAYTLGVESLVESIRSTKKLSKRAKNRLEKWEKGTVADRLTHWSARNRTHICWVSAAYTSQIDNRNGTLLGTRCRDQFFTFDGVVFHADHNAALNVRHRITDEVITQFMPYKQVQAVLLERTARFLNAKGLTLRDAVDLHWLDIKHTKCEAFQKLLHGL

SEQ ID NO: 26038 - protein, 482 aa, Scytonema sp.
LLTNYVYKLRPNVSQSEKMDNWVDMLRSHYNWCLNDRITQYNQQFIQGDYCDIRTKAEACPISCFVSKNGATGEPWKDGKLDKEGNLKNPRRSAGDIQITSLPMLKQARPWYADIDSTVLQQNVKRLDVAYKNFFEGRGFPQFKNRSNFTSFTYTVGIKVQGNKIYLPKIGWMRFHNSRLIPDGFTIKAVTVRKRQDGWYISVRIEDKSVPDYISKPLTEVEKVIGCDLGITKLVHLSDGHQIDNPKFATNKKTKHLLKVRQRRVSRKVKGSKNRKKVAKKVGRLHKRISDKRLAYQWYVANKIVSRNVDAIGLENLNVAGMLRRCKVKVDEKTGRFLKNGQSRKKGLNRSISDASWSELTSKIEYLAAKQGKVVIKVNPKHSSQECRNCKHIDAANREGEKFICVRCGHMDHADLGAAKTIRDRTLSLVREDFAKPSASTSKSSEGTVKRPKQRKETSARSMSKRVEPGNPSDRDIKAAMS

SEQ ID NO: 26039 - protein, 459 aa, Scytonema sp.
MALERKKGYSIESKTARFTLLRDGIDLDETKTAFNDLVSFYFAVVCTHPEGTSKTKEHYKVYEGLTVGHSAQYPIPMDAPCVFRRAAIKKAIGAYKSWKTHYDKWESRHTRHRKHRPPVQPRSFNFNPVFYAGMWKEDTGDSIMLKVRRNNTWVWIKFQYQSYDIGDLWEKASPTVTLKGGKVYLDFTIEKYVPATGGLKTVIQHSDLRICSVDLDLDGNIATCTILESKDNGSVTEISRMTVKGHAKHVRLRKRDLGKVARAMKKTVRVDKGFASHRFQKISRRERHEGLRVSNEIIEFANRHGCKVIVFEHLGSLLPKRGSYSRRSNQKRAYWLKGKIVENVRRIAYQRYAILTARVNPKDTSRLCAVNSVEVWRGNHYLPTLLEFCQPYQYGGKCFATVTGQRGSSGLNAARNIGLKFLARKFVQPKLVLERKAASRKSLLPVRVGFGNVASKVSG

SEQ ID NO: 26040 - protein, 645 aa, unknown
  TnpB Polypeptide
MVTQTATNQTFLHSSSEGVMRSYQVVLKCADQSQREEINKRIRTLEVMQNQLLTPQVIKQAVELYRNNPKERFFTRQLCKTIGKSPNIAQSAFHWLYIAIKGKLDKEKKVKGLVNFLLKNPQQLIEWIVFGRSPYTERSLGNYWKLKRRYIINLLTSTRSQTNSYWSKKYRTKYVSEFLQLNSSLPTRTQREVLQALDDTLFYQQHEFSLIPKLNKNQKAFLSKLQLLKKEQNSVVPFLTSWINSPQPSRWKSLKELAEQIAIIIGKPNRKLFSAVRQIVVFTLFDHYMQIVPHLVQGLPVAKVVPLPFKRKKKGKLPIKLLMKMDYVISRQGNAKDLTNQIKNQGWTVLGFPKKGKKLLSAQVLFPPKVLKYIQNGANIRVFQVSSGQAPNYKPRVIVVLEGAHGCFHSSILLHRYLSQIPGKKSSVLGVDINRLGRYMVVFNTPIPLPSDLLDLASQYDHLSTKVVDELNLGYLRKRKEYDIHGSCKLKGELNRVYTRRSRILREITRRLPNFLAAVLVKKKCKVLKIERLVADPTGTKGALAKAIYTMPDSLFIYKKAIWLASIELGYDIQLEIVPSYHTSTIHYGCGGSLIRQKGQYDIAPCKKCSQKVNTHINAAHNIASLSGTFLPPDSFPSMHVRGPT

SEQ ID NO: 26041 - protein, 311 aa, Escherichia sp.
  misc_feature (35)..(50): Xaa can be any naturally occurring amino acid
  misc_feature (251)..(299): Xaa can be any naturally occurring amino acid
VKRLQAFKFQLRPGGQQECEMRRFAGACRFVFNRXXXXXXXXXXXXXXXXPYGKMASWLVEWKNATETQWLKDSPSQPLQQSLKDLERAYKNFFRKRAAFPRFKKRGQNDAFRYPQGVKLDQENSRIFLPKLGWMRYRNSRQVTGVVKNVTVSQSCGKWYISIQTESEVSTPVHPSASMIGLDAGVAKLATLSDGTVFGPVNSFQKNQKTLARLQRQLSRKVKFSNNWQKQKRKIQRLHSRIANIRRDYLXXXXXXXXXXXXXXXXXXXXXXXXXXXXXXXXXXXXXXXXXXXXXXXXXIKSQRPSAKTTQ

SEQ ID NO: 26042 - protein, 379 aa, Lactobacillus sp.
MTLKAIKTRIYPTVGQQDKIVNNFGCCRFVWNQLLAMQSERHDNGGSYVNEFGMNYLIKQLKAEYPFLKKAESTSLLHVSRDLNHGFQKLFKEHHGYPRFKSRKFPKQSYQSNSVNHNIQVVKEGYLRLPKLGTVKFKCGQIMTGAIKNVTIRKSFAGKFYATILVDTEIEKLPETDNAVGIDMGVADLMITSNGVKYPTIRFDKIIANKKHHWEKRLARRRLHATKEIAWDKHNKVVEPREMSDFKNVEKARIMVAKYNEKIANQRNNYLHQLTKQLVTNYDVIKIEDLKTKNLLKNHKLARAIANQSWRELRSQLEYKCAWYGKQLVTVNPRKTSQICSTCGYDDGKHTLDIRQWTCPQCGTNHDRDINAAVNILKA

SEQ ID NO: 26043 - protein, 438 aa, unknown
  TnpB Polypeptide
MSLKIVKEEKLTVKKGKQPVRDKIYGTQTQQLKHLSSEEYEILKKLCSLAKNLYNVGCYNVRQYYFQEGEYLTYEANYPLCKENPNYKLLNSNVAQQILKDVDKSFKSFFALMNLVKKGKYDFRSIKLPTYLPKKGYFDLIIGQIRIKKDGTLDIPLSPAFKHLYGKISIKVPKNLLNKKIKRIRIVPKNKARFFVVHYTYEIEKYEGNLNKNNVLAIDLGVNNLCTCVSNKGDTLIVDGKKLKSYNKWANDEFIRLEKIKAKQNIKATTKKQAKIWSKRNRQINDYYNKAVKILINYCIDHHIGKIVVGYNKTTNKSNFQEKNYSEKFVNLPMKNFKNKLEHKCKIYNIDFIKQEESYTSKSDFLSDDILPTINVQNPKEYKFMGERISRGQYKSFTNKVINADINAALNIQKKVDLVDIIKLKSTKIKQPQRIKVS

SEQ ID NO: 26044 - protein, 421 aa, unknown
  TnpB Polypeptide
MYEERNRKIRENGKATRERRSHMDCRVISVKIQENRLSKTKLEKLVHLFLEAKWLYNAVLATENLILDNTKTVLVKVKDSFEEREINTLSAQMKQSVIESIKQNIFNLSKAKRKGLKVGKLQFKKECNEINLKQFRNTYDIKSKNKIRVQNIGVLVVNGLEQINLDEVEFANAKLVQKPSGFYIHLTVYSNKQPEVQAEKEVLGLDMGIKDQLTFSNRVKVNFYLEESEQLKGLARKLSRQVKGSNQYKQTLNRIKRIYEHYNNKKKDVANKLNLILSKNYIICFQDELLSQWKRKKSKRKFSFGRKVQHGILGRVKDKLKKNSSNHMLESSVPTTQTCPVCGCLTKHGLDKRKYHCNHCGYENPDRDVHSANMMVLLSGYGTYRSLNTDTVSTEKIVGLLDNLSELGVVVTTNSMEAHCI

SEQ ID NO: 26045 - protein, 446 aa, Butyrivibrio sp.
MKIMSTYSVKIKEYNHIFKDTIRLYRRAVDFYIDVILNEWDSFLLCPNHNKVVSLAESYSVTSKKRPVVKYDFGMDFYKFPSYLRRAAIAEGYGKVCSYKSNLKNWEILDPRQRGEAPSLPKSGYIYPAMYKGNTFNRLDDLHAKLKVFYNNTWDWITVALRKTDVDYIRKHCFLRKECVPTLQKRGKQWFLDFAFEEKVKLSDTDIFDQTILSVDLGINNACTCSVMRADGTVLGRRFLRLPREYDSLKRKTDRIKMAQRHGSQKVSKLWRLARGVNDDIAVKTAKFIVDTAVEYKADTIVFEHLDLNGRKRGTKKMRLHMWKVRYVQSMVTDKAHRLGMRISRVNAWGTSRLAFDGSGKVLRGKESSKTKGNYSLCEFSTGKIYNCDLNATYNIGARYFIREIIKTFSATKRQRLLAKVPEAVYRSTCTLSTLISLDAELHAEA

SEQ ID NO: 26046 - protein, 170 aa, Enterococcus sp.
MKKLKMILLKMTFPTPAKYKKEFPFLKEIDSLALANAQLNLDKAYKNFFRDKSVGFPRFKSKKNPVQSYTTNNQNGTVALIDSKFIKVPKLKSLVRIKLHRQPKGIIKSATISRHSSGKYYISLLCKEEIIELPKTNSTIGIDLGIMDFAILSDGQKLIIINSRPKWKRN

SEQ ID NO: 26047 - protein, 393 aa, Atopobiaceae sp.
MERAYEIRIYPNAAQRELIERTFGCARWVYNRCLETKRDEYERTGRSPSVRQLQRLVTTWKRTDASWLAEVDSHALQQAVVNLGRAFDGFFRRCRAGGRPGYPHFKSKRDARRSYRTNWGISVPDTRHVRLPKLGMVRARVSRPIEGRILNATVKRVPSGKYFCVLCCTDCPRPDVPEGRIEVLGVDVGIRYLMARSDGTTVANPRSLARSERRLARAQRRLSRKRKGSKRRAKQRVRVARVQERIANQRKDALHKATTEAVRESQAIAVEDLDVRGMEQSRRLAKSVADASMSEMARQLEYKCAWHGRRFVKVSRWYPSSKMCSCCGHVLEELPLSVRAWTCPVCGASHDRDLNAAVNIAREGARLLNEADGTAGLAGTGDAKASRTLVEQA

SEQ ID NO: 26048 - protein, 375 aa, unknown
  TnpB Polypeptide
MNYTALKVRLIPTKEQQRLLWMHAGARRYAYNFAKNYSENYYNKYNKTISAYDIRKLFISQYTQIPWIKDICKDVSCEAILDYGNARKKSFKDFNDGFHTSFKSKRDLYQGFAVDARKIKLDSKVYLPKIGWISVNQTPKRRKYRNSRVVFDGQFWYLSLILEISEKEVELTDEVFGIDLGLKSLAVISNGDIYKNINKTKKVKNLEKKKKSLQREMSRRYKKGSKVQSKNYIKSKKAHLRVCRKLKNIRQNHLHQVSKAIVKTKPKAIVLEDLKVSKLMKNKYLAKPISEVCWYTMREYITYKAERSGIEVVIADEWFPSSRLCSNCHEKFNEKEQGRTWGLDIREWTCTCCKCKHDRDLNAAYNLKWYYNNQV

SEQ ID NO: 26049 - protein, 413 aa, unknown
  TnpB Polypeptide
METVEISRTIKSRIIFQDSKDVSKMIDSQEAFRQGCNFVSEYMFDNNFPMNTTTLVKLLYNDLRSKFGLKSQMAQSCVRIVLTQYHGRQTQLRKQRVWDGYKKDNHGKQVKSYVNKDLDFLWKPIEFTRPQLSLVRNRDYSYKGDSTMSLNTIHGRVSVSVICKGFEQYFDGSWKLGTAKVLKSGKHWYLHIAVTKEVEELEFKPSHVVGIDRGLRQLLTLYDEKGQTTFVNGKAILQKRRHYKRLRSQLQSKNTKSAKRRLEAIGERESRWMSDVNHCLSKTLVNHYGSGTIFTLEDLTNVTFDMVSKRAKKDRYEHHSWAFYDFEQKLIYKAFENGSQVVSCDAHYTSQRCPKCGYIDAKNRNKDKHDFCCKACSYRTNDDRAAAMNIQFLGTLYNSGNPKPAFEKLEVIN

SEQ ID NO: 26050 - protein, 427 aa, unknown
  TnpB Polypeptide
LTTEERTSKNRRISETKRATISRHLEMDCKTFDVKVQENSLNKQQKEALERIFLEQKWYKNFIINWSNQSSENKLSKFDTRQTSITKKDKDMNDVEVQIQYLSAQSRQCLLSRMLSNAKTIKSLSNKGFQKGGHLKFSKEETIIDLKQYGVSHKIVSNKRVKIAGIKKALVINGLKQFMNIEGIEYANARLLKRPSGYYVQFVCYIPKETKQYTNQTIGVDFGCETSFTLSNGDKIHASVQESDRLKRLQRKLNRKTKGSKNWCKCKSQLNKEHEKLTNKKNDLANKVVSKLTEYETVVIQDEQIAKWHKGGHGKKVQHSVLGRVKSKLKTKSNVVVLDKYVPTTKVCIECGCYHDELKVSDRTFKCDCGVEMDRDAHAAQNMVWFYENNVGVGRTEVKRVEMREKILNAIRHPKQSASLNHEADTL

SEQ ID NO: 26051 - protein, 555 aa, Salipiger sp.
MVSVAMLLANITCMKRCDHLPLLEANPGKIRALREVLRAFRRAAPDVAADQWQRFFETGRFNKMVSAKEEAHSARLFRAKAIIGSQRMQMLRYQVVGQLESFIENRANDFRDAVMASSIDDGTRHHLLVVNKLHAWFRREPVVMKKTGEEIPDDVRHLARRIMHGVLARHRRPRFRRLNPWIDQRQATLGPADKATHAPLWVGIRGMAFEIGKNGRPKKSQVTIKVPLKSYAFFEERGGTVAKTVQIIERGADHGCPGEIVIGVITDMEEVFAKSQAAYQPLREELTLDLGLATMFATPDGDLLGRAWREQLERHDRRISGLARALQKQGIRPNQSKRYRARVAAFRGFLKTEIGRVLNRLILMKRPAHVVIERLDFTAPGLSRRLNRILARMGHGVIEAKLNDLAERYGITWEEVNPAYSSQTCSNEHCGYVAKNNRKAQADFVCGACGHKIHADVNAARNLESGRSAFDRAARLTKQESLRLTVHRHLERLKTRGWVASDRAAIVSNPNYRNALDRLKAETPLTAADKIQRPSAPDQAAVRPPQDLVADVSAG

SEQ ID NO: 26052 - protein, 230 aa, Desulfurobacterium sp.
VLVDREIEPLPKTDKIVAIDVGLTTFCTLSSGEKIEKPKHLIESEKKLKKLQRQLSRKQVRSNRFIKLKRKIAKLHERIRNQRDDFLHKLSKRIIGDNQAVIVEDLNVKGMLKNSRLAKHIADASWRKFVQFLEYKAKLYGRGLIKVDPFYPSSKLCSRCGHKNEELKLSDRKWTCPKCGAEHDRDINATLNLLKEGLTRLKRVVGVDCPELMPVEGAVAPCEAGSPSLK

SEQ ID NO: 26053 - protein, 415 aa, Hyellaceae sp.
MLVFEAKLEGLKEQYGKLDEAIRTARFVRNSCLRYWMDNRDIGRYDLSAYCAVLGKEFSFASQLNSQARQASAERAWSAIARFFDNCQKNKPGKKGYPRFKKHQTHGSVEYKTTGWKLSECCRYITFTDGFGAGSFKLWGTRDLHFYQLKQIKRVRIVRRADGYYTQFCLDQERLEKKEPTFKTIGLDVGLTHFYTDSDGQTVENPRHLRKSEKSLKRLSRRMSKTQKGSKNRAKFRNKLARKHLKVSRQRKDFAVKLARCVVQSNDLVAYEDLRVRNMVKNRRLAKSISDAAWTTFRTWVEYFGKVFGVVTVAVPPHYTSQNCSNCGKVVKKALSVRTHICPHCGHTQDRDWNAARNILEKGLSTVGHIGTYASAVLGVSPMSNWRYASGDIDLCFGGETPQSKSGRGKRKPKE

SEQ ID NO: 26054 - protein, 384 aa, unknown
  TnpB Polypeptide
MANKAIKYRIYPTTEQRVMFTKTFGCCRKVYNLMLADKIEGYKATGKFPTVTPAKYKEDYPYLKEVDSLALANKQMDLQAAFRNRFNKKRKKKSGFPKFKSAKHSRKSYTTNNQNGTVAIINNKYIKLPKIGKVKAVIHRIPNDNWTVKSATISLASDGKYYASVLFEFDEIENTYIADKTNAIGLDYASNGLYVDNNGNVGTNHKYYRESYDKLAKEQRKLSRMQGSKKNEDKSNNYIKQLHKVNKIHRHIANQRLDNLHKISTEIANQYDVVCVETLNMKAIANKKFGNGKATMDNGYGMLLSMLEYKLSDRNKYFVKVDKWFPSSQICHCCGTRHPEMKDLANHKMICDCGLIMNRDQNAAINILNEGLRLLTERLLSEAA

SEQ ID NO: 26055 - protein, 365 aa, unknown
  TnpB Polypeptide
MTANKAYKFRIYPNKAQQDLISKTFGCVRFVYNKMLGEKIAHYQEHGEFLQITPAKYKADFEWLKEVDSLALTSEWKHLETAYKNFFRNKSVGFPKFKSKRNDRKSYTTNCVKNNIRIEGKHIKLPKLGFVKIKQHRAIPTDYKLKSATISQSASGKYYAAILFEYASNVQPKPIKNTIGLDFSMAELYISSNGDNPQYPRFYRRALQKLARMQRTLSKMQKYSSNYYKQKRKIAKYHEYIANSRKDFLHKQSRQITNAYDLVAIEDLNMKAMAQALNFGKSIHDNGWGMFVIFLSYKLTEQGKQLIKIDKWFPSSKTCSGCGIIKNELSLSERIYICDCGCILDRDINAAINIKNEGLRMISVA

SEQ ID NO: 26056 - protein, 484 aa, Streptomyces sp.
VKKFQAQPGFVVQAFRFALDPNAAQEAALRSHCGAARAAYNWAVGWVSASWWQRRAEESYGIAEEQLTQWRPWSLPALRKAFNAAKHTDPRFAAWWEDNSKEAYNTGLANAAAAFDNYTKSKQGKRRGRRMGAPRFKSKRKAPLACRFTTGTLRVDADGRHVTLPRLGTIRTHEPTVKLLDRVRAGTARILSATVRHERGRWYVAFQTEVKRDLERVARPDTAVGIDLGVKTLAVMADSTGEIRTVPNPNHYDQARVQLRRASRVVSRRQGPDRRTGRKPSKRWEKANAQRNKVHHRVANLREDALQKLTTAVAAEYGTIVVEDLNVAGMLRNRRLARRIADAGFGEIRRQLTYKGRRNGARTVVADRWYPSSKTCSGCGAVKAKLPLHIRIYACDACHLVIDRDDNAALNLAALATACTTGTGVVGDQDTAPAVSKPRGADQKTRATRTRRTADAGRAGGAALPHQRQTETRDRTQAEPLTLW

SEQ ID NO: 26057 - protein, 328 aa, Campylobacter sp.
MAEILITKGFKYRIYPNKEQQKLLNHQCFIYNQAYNIILDLQKETYEQNKDKDKKDKTYLKASEIDLKVKLALKQRELHFKSVVAQQARINANRALEQAIKDKNKGFPKFKNSKMAKQSFNWNNQGYQIKDSDNSKFKIFHLMKMPLKMRYHRDLPNNYKINQITISKSHNKYFVSFSITYTKPNVSLISTSNLDIKKAVGVDLNINEYALSSGELIKTNSKLLAKAKYDKAFKRLQRKQSKRILKAKKEKIKLGVNFKKTQTRLNKIYEKASNIKKDLQHKISKEIVDKFDLIVVENLKTKNMTKRARLKDIKAKSGLNKSILDTSF

SEQ ID NO: 26058 - protein, 542 aa, Streptomyces sp.
MADVRPIAAPFVALGPSGVAVRDRLKHLTAQDEKVLQLVGSHLGSLASKDLKARCADGLEHSAGTWAARKRELTARSSSRWAGSITKATHDQWALARRGQAAHVQSLEAGIAAIRHRLSLPVGEKGTKRAPGGYRSAREWFSKSRRLHVLQDRLNQVRADRDSGIVHVVRGGKRLLGTRHHLHHAQLTETQWRTRWEAGRWFLAADGESGKRFGNETIRITPDGEVSIRLPAPLAALANSQHGRYVLAAQVRFPHRGQQWADRVEANRAVAYRIHHDTARGRWYVTASWQIPPVQSVPIEAALAHGVIGVDTNADHLAAWRLDTHGNPTGQPRRFFYDLSGSTSHRDAQVRHALTRLLNWAKACGVTAIAVEDLDFQAEKTREKHGRKRRFRQLVSGMPTGRLRARLTSMADATGISIIAVDPAYTSKWGAQHWQQPLSTPTRRTSRHDAASIAIGRRAQGHPIRRRAAPPRAHQSDVHGHRTVQARPDTPGREGPRPRIPGPRTRSVPPDAGRTRATRTSTTVRDVRSVQERVQHPLLLTE

SEQ ID NO: 26059 - protein, 560 aa, Acidimicrobiaceae sp.
MSVSRPLRTLTDPFVVAAPTGQRVRTRLHLTETEASVLSETGAFLGFLAAKDLAERCALGRGYKHLGRKERKQGLTATASSRLAGSITAATDNQWQLAFDNLFRDLFSLRDAIALLEKRCAIPTGTSVTVNERTTHGYPTPRVRYAKQQRLQQLTARLAEVEERIETGRVRIVRGGKGLLKKRHHLDEAGLSKEQWTDQWHARRLFLTADGEKDKTWGNETIRVNPDTGVLTLRLPTALSHLSNTEVITITAKKVPSFVFESAVAFSYHADDWAAQVASGAVSYTISFDPLRSRWYLDASWKTPTTPTPSLASLAASNTLGVDLNADHLAAWVIATDGNPVGNPIRIELDLTGSTERRDGLLRRAITQLLDVASTNNCASVTIENLNFADVRSSGRETMGHGKRGKTFRRTVSVMPTAKFRDRLAGMAANRGIALIAVDPAYTSKWGAEHWTRPLTAQSKDSNQPLTRHECAAVVIGRRGKQHRARTTTRHLPARHQRMTDGQQVLGADPTVETKSGNTGTGEGSGRAARKTHLRESDEPVTPGPTRPFGRPVVHRTIVH

SEQ ID NO: 26060 - protein, 444 aa, Okeania sp.
LKARYKYRIYPNHIQITKLNQLFGCCRYVWNSTLAYCNQLYSDGQKKPDYVDLTKQFITQAKRELIWLKEVASTPLQQSLKDLDQAYRNFFDSCTGKRKGIKVKPPKFKSKKSRQTARFVGKNYQVSQDKIYLPKVGKIKIVWSRPLASQPSSVTIIKDSAGRYFASFVVDTCVEYLPESENSIGIDLGISTFATLSDGQKIDAPKPLKKNLKKLGKFQRKLAQTELGSKRREKAQVRVAKLHAKVKDIRTDFLHKLSTDLVRKYDVIVLEDLNVSGMIKNRKLAKAISDLGWRQFRTLTETKCEKYGREFRVISRWEPTSQKCSHCGFQGGKKELNVSCGMLRKREWTCLNCGAFHDRDINAAVNILNTQSALETVNQPITKVETVKATVAKNPIQLSLFNKVAEGQTETIKRTRRKRQTGKLADSNDVSTRPESFLQLSLFD

SEQ ID NO: 26061 - protein, 437 aa, Symploca sp.
MLHPDQLEKEILVFICQQANKLVNCGTYLLRQAFFTFGQVEHDAYSLHAELKGNPHFKILRSAVAQQVLTGVAESFKSYKELTNKFFKGEISDQPKLPKYRKKGGLATISYPARWVSFDLETGYASLNLGKTFKEWFGIEHIQVPPPYGLGVKDIAEIRILPRNGCFYAEYTYKMQPQIVDLSDKALGIDPGLNNWLTCVSTDGDSFIVDGRKVKSLNQWYNQQVAKRKKNQPQDYWDEKLAQLSERRNRQMRDAVNKAARLVINYCLSHEIGTIVFGWNQGNKNRMEMGKKNNQEFVGVPTAKLKERIAQLCQQYGLKFIETEESYTSKSSFLDGDFLPKFGEKPERWKPSGRRVSRGMYRTKNGTEVNADINGAANILRKVEIQLSVSLAKVCRAFLTVPTRYKIWETLAKERHFNALRSNRLNPRRFNARRGQL

SEQ ID NO: 26062 - protein, 404 aa, unknown
  TnpB Polypeptide
MQRLQAFKYELMPTGEQKCRMRRFAGSCRFVFNKALALQKARYDCGDKKLGYAALCKLLTDWRNGPETPWLKDAPTHPLQQVLKDLERAYANFFAGRADFPRFKKKGQSDSFRYPDPKQVKLDQGNGRIFLPKLGWLRYRDSRDMLGAVKNVTVSQSCDKWFVSVQTEREVGQRLPNGGAVGIDMGVVRFATLSDGTFYAPVNSFRRHEDGLRKAQQAMGRKVKFSSNWKKAKLRVQRIHARIGNVRRDYLHKISTTISQNHAMVCIENLQVRNMSRTAKGSNEQPGKQVRAKSGLNKAILDQGWFEFRRQLDYKLAWKSGKLITVPPQYTSRTCPCCGSVSADNRQTQVQFACVGCGFAENADVVGAINVLRAGLARFACEVSGAVMSPAAGTHRSDLLGIDA

SEQ ID NO: 26063 - protein, 406 aa, unknown
  TnpB Polypeptide
MNELLTRTICIKLDVTGHEAALAETQRRFNEAASWIATVCWDEHITNTNTAHHRVYGQTRARFGLGAQLAICARAKAMEATRAVRTQEAEKVARWRKANARRQRKGEKLVPPPEPATCPQFGSRSSIRYDARTYRLLPLDRVSLNTIEGRVTARLLPGQRQREMLVDPDWKIGGAELVWCNGTSFLHLTQSKEAPDVTPAEETIGVDLGLVNIATDSTGEQFTGASVRAKRSHFVARRAALQRVGTRSAKRRLQKMSGRERRYMKHVNHKIAKTLVKKAVVSRKALALEDLTGIRDSTMVRREHRYERHSWAFFQLRLFLAYKAAWAGVEVRLVDSAYTSQTCSRCGYCAASNRQSQSSFLCQQCGFCCHADYNAAVNISLVARQAANGSSGTSLATSPRASAGGS

SEQ ID NO: 26064 - protein, 420 aa, Moorea sp.
MLIMNYRYRIYPNADQQAQMLEWLETCRGVYNYALRELKDWLASRKCAVDRCSLSKEYIIRCDTPFPSYHLQQNNLPKAKKVSPKLKSVHSQVLQTTIRRLHDTWENFRSRGFGFPRFKKFGQFKSFLYPQFKKNPIGNGMIDLPKIGKVAINLHRPIPDGFQVKQVRVISRARHTQWYVVVTIALDVEILNNPPSGRAIGIDLGLEKFLTTSDAFTVERPKFFKDLKGELKLLQRRVSRKKKRSKNWEKAQIKVARLHLKIANTRKDFHLKTAHVLCDQAETIFAEDLNTVGLNRGMLRTECIDASFGQFLDLLKWVCWKRGNYFERVDPKGTSQTCPECGATVQKNLSQREHICPECNYRTHRDHAAAMVIRLRGLEKVPVDGGERKPSANSVLPGERQLIGKCYAEMLNCEVKKPAP

SEQ ID NO: 26065 - protein, 416 aa, unknown
  TnpB Polypeptide
MLTGRRFRVEFTDAQAEFAERIGGACRVVWNTGLEQRRAYRRRGAWMNYQPQAKELAEAKNDHPWLKDVPGHCLQQTLMDLDRACREHGTWKVRWRSGRRWAPSFRFPEGNKMAVDKLNRGHARIKLPKLGWVRFRASRSLDSEMIRSATLTREGGHWFLSVLVDDGRQTPTTHTAPGSAVGVDRGVAAAIATSSGELIDQQFLTAGERRRVVALQRRLSRCAKRSANRNKVRAELAAVRARESARRRDFCAQSAHQLATANAVVVLEDLKTKQMTKSAKGTLEQPGRNVKAKSGLNRAILGKGWHQFASALASAARYSGTTVVTVPAAYTSQRCSACGQVDPKSRESQAVFRCTHCTHHEHADVNAAKNILAAGLAVTACQDQPRPAGRARSPKQEPAGNREELLLQPTTAAPAA

SEQ ID NO: 26066 - protein, 358 aa, Exiguobacterium sp.
VSQTLTVNIKLKPTKKQEVVLKKMMTTYIETTNRLVSDMVKAQATLKLTSKSVSSPLPSAVKNQAIKDVQSVFKKAKKSKYKVVPILKKPYCTWNNQNYSFDFESIFLPIMVDGKAKKTPIKAEMVDKHNRNFSLLNNKLGALRITKKSNKWIAQIAVTILTTEKTGSKVLGVDLGLKVPAVASTDRDKVRFFGNGRENKYMKRKFRAKRKELGQKKKLNAIKKLNNKEQRWMKDKDHKVSRDIVDFAKENNISVIRLEKLANIRQTARTSRKNNKNLHTWSFYRLALFIEYKAKLEGIKVEYVNPAYTSQTCPSCGSRNKAKDRTYVCKCGFKKHRDLVGAMNIRYAPVVDGNSQSA

SEQ ID NO: 26067 - protein, 413 aa, unknown
  TnpB Polypeptide
MKNLNSESEIILSERHLISSSHPYFSECDHLTFLGKNLYNATLFYQRASFFKKDFQNYYAVNRAFTHDNQEDYRALPAKVSKQVQMLVDKSFKSYFALVKKKVKGDYNSPVRIPRYLHKTKGRCTLPYPKDALSLKKEGIVKFSKTGIEIPTKIEKEKIQGARIVPKGNHFVIEILYKKVKKPLISGAIQKVAFIDPGLNNLMTVTSNVFAPLLYSGKNLKSMNRLANKKIAQVKSSLSKRGLYSSPLLVSIYNKRSRRITDALHKLSSHLVNQFVSYKIDTVVFGHNLGQKQDIKLGSVTNQNFVQLPFYQLISLLKYKCELQGIRFITTEESYTSKCSFLDLEPVSKQKEYLGRRIKRGLFQTKEGLQINADVNGSLNIGRKYLTKLGLYTEQLHHELASCMANPKRICLV

SEQ ID NO: 26068 - protein, 511 aa, unknown
  TnpB Polypeptide
MFVTLKFKVIPQSKEDYEELSKLMRLYGSTVRYAYNRFLDGYSKNEVYHLVRKTFKDLPSWYVESAIGEALEILKSVKSRGGNPRKVVFGSKELFAKLCIHHLQGWRLEEVKKKWDEKRKGRLLSIGHTENGGNPNIKLLLENDEICLSITSTRKRKLIKAKVKRKVKSQKDKWITLISMILEGKKFPYTIELRKENGEIYGYVTFQIPTPEVKITKDNGVIGIDINAKPFHLAIAEVGKDGNLISYTRIKLEYLRNFSKNRKDYEEWLVAHKVINIAKEKKKAIVIEDINNLPKGKRGDGNKKKRKILSRFSYNRILEKIERLCKLNGIEIIKISPAWTSVQGKLKYSPQLNIDKDIAGAYVIGRRGLGLEEKIPKNYKKLLNDKKFMEYLKESLKQRQKQLEEKLQKETNIYKQNPIKEDLNKLKKHLALLKSLQSEPEGLPGAYGRNSGNHQNLWQALEVALTTLLPEKRCFSPLKPVLVQGTWEKVVSRLGPLCLGGSGENPDWTRQ

SEQ ID NO: 26069 - protein, 238 aa, unknown
  TnpB Polypeptide
MSWRMREARLTVKDGKAFLKVVFEKEEESVEPKESIAVDINMAEIVVGKDDKHYVRIPTRLEEVHHWKSLAENLQRKYPRRWRENKRVLHRIHSFHLKARRIAEDFARKVGKWVVEIARDFGANVIKLESLKNLIKNVDKLPKEFHDKLYLMQYRRLQYWISWQARKHGMTVEFVNPSYSSVSCPKCGQKMREVSHRWFKCSCGYENDRDVIAIMNLNGRGSLTLSTAPQMRDVSPNR

SEQ ID NO: 26070 - protein, 444 aa, Clostridiales sp.
MKSVLSYAAEIRPLDFQIRDTVAIYREAVSFLIDIAEQEWESLSVLDGSKARLSAMELLIHSANGRKVKYPEFDSTFYKFPSYLRRGAINAAIGSVSNYHSNYQRWLDKGKNGNPPKLTLERDLCPCFYRDNMYVGDISSDEACIKVFVHNDWVWRPIRLKHTDMQFLRRYWTGVSCSAPVLERKNGKWFLRFTFTQKVKLSETPIEGQRILSVDLGLNTDAVCAIMESDGTILGRKFIDFPGDKDRLYHELNRLKKFQRMHGSHNSKSRWRRIRSLNEELARKIGHAIADYAAGACCDAIVFEYLDMKGKIRGKSKRQKLHLWRKNGIQHVAETRAHRFGLHVYHVNARNTSRLAYDGSGYLARDKNNHALSVFKNGKQYNCDLSASYNIGARYFVRELLKPLPETARSQIRANVPGTEHRTSCTYHTLLQTAEELCRLSVSA

SEQ ID NO: 26071 - protein, 242 aa, Gammaproteobacteria sp.
IHYTIDNTDDRACGNNKIGIDKGYTEAFVDSEGEFYGKGLGEVLSKESDSLKKKYQSRNKIKAVLDKVEQKNPKKAKRIRNRKKLNRRSRRHQAQVKTIVFTAVNRVVDKAKTIVCEDLTKTFKSKSYGKNTNRRLSGWVKGLIGNAIDIVAFRRGSRVVQINAAYTSQMCSKCGCLGKRTGETFHCAFGCGAVMIAPLNAAVNVKARLEDKELHRWLPFQKVKQILLERCRRPDETAHLGL

SEQ ID NO: 26072 - protein, 306 aa, Microcystis sp.
MQVKRRLAYPNFKKKHQGGSAEFTKSAFKFKDKQIYLAKCTEPLPIRWSRQIPEACDPSTVTVRLHPSGRWHISIRFDDPTIKPLPVTDKAIGIDLGISSLVITSDGDKVSNPKHFKKHYRRLRKAQKSLSRKQKGSKNREKARIKVARIHAQITDSRKDHLHKLTTQLVRENQTIVVENLAVKNMVKNPKLSQAISDVSWGEITRQLAYKCRWYGRNYIEIDRWFPSSKRCSNCGYIAEKMPLNVREWDCPDCGTHHDRDINASKNILAAGLAVSVCRATIRPEQSKSVKAGAEPRKGKKQKPKS

SEQ ID NO: 26073 - protein, 437 aa, unknown
  TnpB Polypeptide
MQTAVEVHMAQKYRISDKNDKEVFDFLKQNFGCNRKVYNLCVDSLYAQLEKAGYQTGDNIPGIKFPKITDLKKEFEYLKKADAQGLSNSIMDFKNAWEKYISKCDHTTYTKRAIRRSESGTEAMSFRGLKGMPKFHAKVRGYNSYRTVAQYPGESNNLKNATVRLADDILYIPKMKKGMKLVIHRKLPENAHICNVTLSLDTDGHFYASIAFSYVMEMEMNLRNLAVTGGTLPENLTFLGLDYSQNDFYVDSDGKKANYPHYYRKSEEKLGKLQARLAKKQKGSSNYKKLQTKIQKLHAKIKNQRNDFLQQESTKLVRKYDVIAVEDINLRAMGGALKLGKNLHDNGFGMFRTMLAYKLEQKGSCLVKVDRWFASTKTCSHCGHVQKINLDERTYVCEECGLTIDRDWNAAINIREEGKRIFLNYFKTLIEEKQAAA

SEQ ID NO: 26074 - protein, 400 aa, unknown
  TnpB Polypeptide
MLIAHKIALDPNNAQATYFARACGVARFAYNWALDEWKRQYDAWKADNSLPKPSQAALRRQLNAIKREQFPWMLEVTKCAPQMAIIQLGQAFQNFFAGRARYPQFRKKGVHDRFTLTNDQFDIDGCRIRIPNLGWVRMRESLRFAGKIMSATISRVADRWFVSIAVDTEDPPKCKAENQGIVGVDLGVSALATLSTGEPPIPGPKPHKALLDRLRRLSRSLSRKQKGSRNRRKAKAKLARLHARIANIRLDALHKLTTEITRRFHTVGIEDLNVRGMMANRHLARSIADMSFHEFRRQLEYKAERRGGRVVVADRWFPSSKTCSACGSVQEAMPLSVRQWICPDCGTRHDRDLNAARNLATYAASSAVSACGEEGSGCGRTTAAKPASVKQEASSRLSQK

SEQ ID NO: 26075 - protein, 402 aa, unknown
  TnpB Polypeptide
MKKDVQLTVVGKVFKPNEQKVLALNRCLSEFMRAVKFYIYLKDTSRRHNKPLYEEAKYRFRLPTALIQNARDKAGETLKSFEENRKEDSVLTLKRVGIRFDARCYSFSKTTNILTQYWLNLKLNHERRISLPMAFGKHQRQLIENAFQDKLQFTTVEMVKRRGVWYAHFTIKKTVSFTDKPETIIGIDIGEVNFATAIALIDKPHRGQFWRGSEIKRTRGLYNHLRRRLGEKKLLRRIKVLGEKEKRKTNQQLHILANQVVQYVKQFPKPIIAIEDLNGLRKHVKFSKKINKRVHSMPYRKLQTYIEYKANLEGVEVRHVKAKNTSKKCHRCGHVARKVNGREFRCSKCGSTYNRDLNAAVNIAQLVKSELRWRSCEPLKPADADEGEKPHLTLEATQPVGW

SEQ ID NO: 26076 - protein, 364 aa, Spirochaetes sp.
MTSSKLVKTLQVRVKDRHAKLLRKWAFEVNQIWNFTNAYTAAAGKPKDFKVDCAQGENWSVKPVFGDWPTGYDMEKVVNPYRKSRNFVMLSATMSAVAQEHATRRQQFKKSKLRWRVSSGSKRSLGWIPFKKGNAVLKGDAIKVNGVLFKAFDIDYLKGHVLRAGNFAEDARGRWYFNAAVEYAKVVGAGKGAVGIDLGLKDCATCSDGSKLEATKHYRKFEEKLAKAQQAGKKKLVKTIHAKIKNKRKHDLHVFSTRIAETNAVVAVGDVSSSKLAKTKMAKSVMDAGWYMLKTQLKYKVIARSGVFEEVNEKYTTQVCSSCGHIGDNSPKGRAGLGIREWVCDKCNTKHDRDVNAATNILRA

SEQ ID NO: 26077 - protein, 447 aa, Spirochaetes sp.
VLYSLILLHELFHVNKNNWYKLRGFLGLTLILFKFIGDILISIGYNFCHIKNNDMTSSKLVKTLQVRVKDRHAKLLRKWAFEVNQIWNFTNAYTAAAGKPKDFKVDCAQGENWSVKPVFGDWPTGYDMEKVVNPYRKSRNFVMLSATMSAVAQEHATRRQQFKKSKLRWRVSSGSKRSLGWIPFKKGNAVLKGDAIKVNGVLFKAFDIDYLKGHVLRAGNFAEDARGRWYFNAAVEYAKVVGAGKGAVGIDLGLKDCATCSDGSKLEATKHYRKFEEKLAKAQQAGKKKLVKTIHAKIKNKRKHDLHVFSTRIAETNAVVAVGDVSSSKLAKTKMAKSVMDAGWYMLKTQLKYKVIARSGVFEEVNEKYTTQVCSSCGHIGDNSPKGRAGLGIREWVCDKCNTKHDRDVNAATNILRAISRTRKETPKIKEKILKKPSIDAVLQKVG

SEQ ID NO: 26078 - protein, 365 aa, Clostridiaceae sp.
MEYAMRFRLYPNAEQRILIAKTFGCCRYVYNHYLSKRKSIYEQDGTTLSWAECMRDLTVMKKSITWLSEVDSIALQSSIRDLDTAYRNFFHGLKSGKKIGYPAFKSKKNPVKSYKTKRHVQLSDKAIRLPKLGWVKCRVSKQVRGRILNATVTQSASGKYFVSVCWTGVDIPKLTPSAETVGIDVGLKDFVVLSDGIRIANPRHYGRLLHKLKRAQRSLSRKQRGSNNYRKQKLAVAKIHEKIADSRRDFLQKLSTNIIRQYGRIAIEDLAIRNMMGNHRLARSIADVSWSEFRRMLEYKAKWYGREIRAIGRFCPSSQVCHVCGHQWPGTKDLSVREWVCPQCGSHHDRDINAAINIRNEAFAA

SEQ ID NO: 26079 - protein, 527 aa, unknown
  TnpB Polypeptide
MKKCLASRYIKKADLQSEENERILQDLFAFNSMKRTSFLWQRQRRKFLKEDGKELSHQLKLKEVFACNDYFANSARMTAAGMIKSGQELAKLYIEDAKEDIKAIRKVLRKKKKYRKKLLKIKTSIIKYSKDPKNSLKGSANIRYEKDGSVTVQFFQKVWTYETLYLFEHQWLDRKLRQLKTQIAKMKHKLKRLEIRQQRLKAHPLKVRFGGKKLTKNRTISERHRALEKRRNRRMMVSGRKDCKYGNWVFRYDTETKTLEYRSMTDWDGNRICFPNVTFPYGQTWIESWLKERKGAIAWEIVDCGNAWQIRCILTEEEENMNNYYGDGTIGIDINYDHIAMTETDQSGNLLHHEIFRYDMEGKRSGQIKHQISESLEKIFQYADQQHKPVTAENIKSIQRKKFYDKHRKRHRHISMFASACIRELLISKAVKHHIGVKFVHPAYTSKVGKMRYLRRYGLTVHEAAALCIARRGQGYKESIPSYLKPYLTNKKVRALIPQQWGSLTKLINKVTTQDLLTYQDPVLHRN

SEQ ID NO: 26080 - protein, 435 aa, unknown
  TnpB Polypeptide
MIRAYQFALEATDVQVEQFRSHCGAQRYAYNWCLAAVLANWSQRRAEQSYGLIGDELTPWINTSAYSLRKAWNATKADVAPWWSDNSKEAYASGCANLATALANRKAGRAKLPRFKSKHRARLTCRFTTGAFGLGPDRRHIQLPVIGFVRTHESTRKLARHVEAGTARVRSATLSYQRGRWHVSFSVELPDPTPPEHTGSRVVGVDLGIKSLAVLSTGEVMPNPRHLDDAQRRLRRVQRQASRRRGPDRRTRVEPSQRWRKSRTHADRVHTRVANLRRDAIHKLTTRLTAEHDTIVIEDLAVANMVRNRRLARRIVDASWAEIRRQLTYKTQQTGGELIVTDRWFASSKTCSGCGAAKAKLALSERTYVCLECGIVLNRDVNAAINLAALAAADTAQLVREQPEGTDVRRPLAGAVGLPREEPLAQPHPREKVSR

SEQ ID NO: 26081 - protein, 450 aa, unknown
  TnpB Polypeptide
LPTAQFPNHHRGTYIPTEGTRPVRLSYRAEIRPTPRQRRALLQHAGNARWAYNWGLAKHKEAYAKWVSEGKPKKWHGWPSAISLHRDLNVMKKLEPDAGGVPWMYEASKCAPQEALRNLDVAFKNFLSGRAKYPRFKSRNHGVGGFRLTGTIKADRSTIRLPTIGRVRFQPGERGYLPWGAQPQVTVTEKAGRWFVTVVGPEVEDAAPNGKPTEGLDLGVARLATLSNETVIENPKAQALGQRKIKKLQKEVSRKKKGSANRRKAKATLAKAHARVANVRRDALHKATTTIAKSHGKVVIEDLKVKNMTKGGRGKRGLNRVMLDAAFGEFRRLLEYKGKLYGCEVIAVPPHCTSQRCSACGHVEKGNRTSQAGFRCLSCGYEVNADLNAAINILEAASSSDSLNACGGDVRPNQLWLAGQTPVKQEPGIFQIFVGRFSPGVLLAKGGGQV

SEQ ID NO: 26082 - protein, 306 aa, Methanogenic sp.
MPYRTVKIQLFPKPEQEKRMLLTLHACRATYNDLNEYCRDFTKRYDEWRESMGVEEGEDASLYETDTNPRPRFPSEFELTALAGEFREINLWRREAYSAAVWDVGRRIHRAYQRWFDSLVDDSSAGKPRFRTDGRYDSFTYTEYNQYRLDTQGLFTGKKPRMFLGGVGWVRSSDNGIVKRVPTDCMKQAVVSRKKMGKSNKWYITIFCECLEIPDNRTWYMDAETPDPVGLDLGARRVATLNRVGRLGSCPSLPSHTTVRTVRYTAVQTPFLYLFHVVEKIVHSPFLQVFQRQRVLYRSIIGCSPV

SEQ ID NO: 26083 - protein, 411 aa, Methanogenic sp.
MYRSLKMRIEPDSEQRKVIEASFRYHCYVYNALITACKSYHRSNGRLPSQFDLNKLCTRIWHNCPFLHRYLYQNAMNETAKRVLQAFAKCEENRRRKERRNRGKSKGKKNTEVTTPPETVLACPRFRKPSRFDSYTNPLHMEVFTERNGRRMLKVSKVKGPVRCYNQKTPVPGVPRTCTIEKADKGTHTEYYACLSCWDDIERRRGDEYLGEHSPDAVGIDMGVSKTATLSDGTVYGNDHMYSKLLDLFRKKHEAFSTMLPGTPEYRKARSRLSHLYGRLRGIRRNNVEMISRQIVDAFDIICMEDLPVRKLRRKSRGKRMTNAYDDASLGILRRRLIDKAIEAGRRIILVDPKWTSQVCCRCGACVRKGLEVRTHVCPECGLVIDRDLNSAINILIWGLTGNPFPERWDE

SEQ ID NO: 26084 - protein, 401 aa, Methanogenic sp.
MFVPRVHMTEIRTMEIRLYPNKTQERTMLDTIGHCCFLYNHLLEHCRNAFAESLRHPTEYDMNKEITAFKKERPELITVYSRVLINVSTRVSLAFKGFFRRLATKTEHAGFPRFRSFSRYDSFTYTQSGFSLENGRLKLSKIGTIRIAGLRKMFGRLKTCTVKREGIGPHYRWKACLTYECEEIKTSFLEDTRESVGIDLGLETVVETSSEYSFVNPRHLRKAEKTIAAIQRRMMAFEKGSPGWLKYKQRLYHAFTRLRNIRKAERYGIVNYLISKFSLIAVEDIDVEKIQEKALGKGMRKSYSDASWAMLTDTLCTKAAEAGCTVVKVRPEYTSQRCSACGRLVPKTLSERRHVCTCGADMGRDKNAAFNVERLGLQALQLTRCRMEILGHSGRSQWGNP

SEQ ID NO: 26085 - protein, 425 aa, Methanogenic sp.
MKTIRMHIELTSEQRKVVDHNIDANRLVYNSMITACKNVHRKTGRLPTVFDLNKLGTQMRHNHRYIRDAYSATLNATSKRVIEACEKTLSSKRHKGEHKAESTAEVDPQESNGSGRFPRYRPKGSFSSYTYPHPIDFSVVTEKRNGKKRRFLRLGKVPGLVRCYNQSTKIEGRVKTCTVKRKDMGSYCQYYACITYETEPPVKDTTPLPPVAVDVGVSNIAALSTKKKYPNDHIFVKYGKKLAKLQRQLSRGLYGSPGYRKIQNRINHLYEKINNHRKNNIELISSEIAKNFSVIVMEDLSVRALRRISKNRKMTNGYNDASLGLLRRRITDKASSAGHDVILVDPRDTSQLCSSCGMKVPKDLSVRTHVCPYCRYVEDRDVNSCENMLERAGLMGVEWIDPLSVLLYREQNSRAPEEGCAGTAV

SEQ ID NO: 26086 - protein, 405 aa, Methanogenic sp.
MKTLKVRIEPNSAQRKVIDHNIEANRYVFNALVTACKQVYNKTDELPSVFDLNKLTTKMRNNSPFLGEALAMTFMATSVQVFRACKKTLDTHKREGGTLTFEPYRFWMRGDHFPRFRTGGGSGSYTYPVYKRDFSIVTEKRNGKKRRMLRLGKVPGLIRCYNQETRIDGKIKTCTIKRKDMGSHCEYYACITYEETPKPYTDPVKGPVGVDLGISNIAALSDGTKFPNDRIFSRMYKKVAKIQKQMSCALYGSEHYNKLQTKLNHTYGKIENHRKNNIENISAYIVKNHDFIGMENLSVKALRNKSENRFMTNGYNDASLGALTRRIKDKASSAGREIILVPPKDTSQLCSKCGSMVKKGLSIRVHECPHCGYTEDRDVNASRNVFQRALRLKIQGMGRPSLSRL

SEQ ID NO: 26087 - protein, 437 aa, Methanogenic sp.
MPYRTVKIQLFPKPEQEKKLLLTLHACRATYNDLNGYCRDCIDRYSEWRESMGVEESEDASLYETDTNPRPRFPSEFELTTLAGEFREINLWRREAYSAAVWEVGHRIHRAYQRWFDSLVDDPSAGKPRFRTDGRYDSFTYTEYNQYRLDTQGLFKGKKPRMFLGGVGWVRSSDNGIIKRVPTDCMKQAVISRKKMGKSNKWYITIFCECLEIPDNRTWYMDAETPDPVGLDLGARRVATLTDGTVVENHRTMRKNEKKLARIQRKISKTEKGSEERRKYLGHMNHLLKRIGDSKNDLLQKATRSIVQNRTKIFVEDLSVKKLIELQDNKESRKLFRDASAGTFMRLLRYKGEETGSEIVAVNPAYTSRICTKCGKLNKPFSEETFRCRFCGFTKHRDDNACVNVLRRGMGFDILGKSSIAGITEAEAEVRKNVTGV

SEQ ID NO: 26088 - protein, 414 aa, Methanogenic sp.
MYRSLKMRIEPDSEQRKVIEASFRYHCYVYNALITACKSFYRSNGRLPSQFDLNKLCTRIWHNCPFLHRYLYQNAMNETAKRVLQAFAKCEENRRKRERRNRRKSKGKADKENAEVTTPPETGLACPRFRKPSRFHSYTNPLHMEAFTERNGRRTLKVSKIKGPVRCYNQKTPVPGVPKTCTIEKVDRGTHTEYYACLSCWDDIERRRGEEYLSEHSPDAVGIDMGVSKTATLSNGTVYGNDHMYSKLLDLFRKKHEAFSNMLPGTPGYRKARSRLIHLYGRLRGIRRNNVETISRQIVDAFDIICMEDLKVGKIRRKSRGKRMTNAYDDASLGMLRRRLIDKAIEAGRKIILVNPKWTSQVCCRCGACVRKGLEVRTHVCPECGLVMDRDLNSAINILIWGLTGNPFPERWDE

SEQ ID NO: 26089 - protein, 452 aa, Burkholderia sp.
VSVNGTECLKWIGGQVIGLSLPAVLNLLQWRSCRISFSFSIDQLYSTRMQRFQAFRFELMPTGEQQRAMRQFAGACRFVYNKALALQKENHAAGEKFIGYVDMAKRLTQWRNSEETPWLKDAPVHAQQHALKHLERAYTNFFKGHASFPRFKRKGEHDGFLYPDKKQIAVDRKSGRIKVPKLGWLRYRNSRVVLGEVRSATVSRRAGKWYVCILTAREVEPPVAQGTAVGIDVGVSRFATLSDGSFVAPLASFRKHEQRLAKYQRRMARKVKGSANWKKAKARIQRLHVRIADARADFLHKASDAISKKHAMIAVEDLKVRNMTKSASGTAQAPGRHVRAKSGLNKAILDQGWGEFRRQLEYKTAWRGGYFVAVAPQNTSRTCPCCGHVSAQNRKTQARFACVKCSHEANADHVGALNILAAGHAVIACGGTAQSGCPAKQEPTEVTQAIAA

SEQ ID NO: 26090 - protein, 558 aa, unknown
  TnpB Polypeptide
MARFQGTTISVKVPINWEAMTMKSKQRLRQIVGRDTRVIRAFLGIIEQHENDLLAGRNKHRIHDGKLDKLTMTALRVKAGYAQRASVPHDFKARFPRISQNEITECRQTAVALYKSYLKLRAKRGLNVSRPASINQSRRIPRWVFSQRFKLLERSTAASRWWLDIRDSLDSVQEGRTFHDRLNIPLKMSPFHFNQIKRGDVKAVQIFTDRFGKWWATIAVRIFTDLPPKEDLPIGILGIDLGIEKAACSTLITPKKTRETRYFVQRQKVKVIKKYDRLVADLQRTMQNHKSNGLPYDKMAKKLRQMKAKRENVAKEYDRVLLRQILDYILDLSEKYTLYVAIGRLKNIRLRAKRGNYKGRRFRAMIHSWAFARITDGLKHGLAQQGWKVDGKDTCFRAVPEAWTSIMCWKCGSKGTRPKQNYFHCTSCGHKTNADRNGSINIAARMLMLTKSLHSVRGLGMWTRAVDRARRARPKARKKKSSQGKSLLSSKDSTSNLGESAAVHFVQSDFAGFSDETSESDDDPVVANTVKALSVIEGDDSIAIQEKEARSSGGIPSR

SEQ ID NO: 26091 - protein, 433 aa, Fusobacterium sp.
MKIKRIVKFNIKKSHTDYKYIKTQLIESKEIYNFANYILRQLYFKNSNKHKYSLEFIDEYPSLKDLFLEYIEENKQFTSLFYKLICEFSKLKQYSINLKIVQNIVDKLKNDWTSYWKLLKMKMTKTYDKQINIPRYKKKYNLVEYNNQVISKKKLKLGYIGTDKMKQGIKIANRHKNLECKCFRIYNKNDKFICELIYEKEIKQGEKNDRVASIDIGLENLFTIVFNYNKKGISIKGSKLKSINQYFNKMKASLQSSLPSNNHISRKIMLLLYKRREQLRNYIGYYTNKLIEILRKEKISKLVVGYNKGWKEKINIGVTNNQNFVSIAFRKILEILKYKLEDNGIEYKEQEESYTSKASYLDNDKIPIYKENDYTEYIFSGKRVKRGLYKTNKGQIINADLNGALNILRKSGEKLIEPLEYLKFNNIFTSKLI

SEQ ID NO: 26092 - protein, 417 aa, unknown
  TnpB Polypeptide
MGAGKPRNNRPRAGLGFRVYKPRVSRVNREKLKTLYNDVVNYVLGVVHELKGSKYLTYYAEEWKKMYENAKRVREEAGKRTLPKTPPLLIPVRFVMPDGSTRGDNNAPCVVDLRRGELRIPSYGIAQRLRRSLVRALVEENNLNPRPDFVLQVTRRGFLRLVASHYAPARVALPLRIIAIDENSLNGEALGAWDVLKPGRIVRSRYEELMPRNRGFLDRTAALFQGAAAGKAGALEEVKELLREAGKDGTEIAALLAPEKLAEIAAETREKEERLNRAFAEELVSLVRRLIREARARGWSVAIVVDPIDSESLKGSELQRTLLKPRRLLRNLARYEGALFKLYRASGKMCPKCGAWGVEIAHRRYRCPHCNIEWDRDKAATFWLAKRFLGEYFKEESGDETYVDITGWLEKHPRGLL

SEQ ID NO: 26093 - protein, 406 aa, Limnoraphis sp.
MIVYEMKLQGTVAQYKKLDEAIRTGRFVRNSIIKAWIDGQIKSRNDAYRYCKLLSDNPSFPWVNKLNSMARQAQAERAWASIERFYQKCRQKIPGKKGFPKFKKYQVRASVEYKTSGWKLSEDRGYLTFSDKFQAGTFKLWVSRDLHFYQLKQIKRVRVIRRHDGYYAQFLIDHTREENKELSNKQTGLDVGLNHFYTDSFGSQVENPRFLRKDERRIKKLQRRLSRTKKGSQNRKKARNRLGRKYLKVSRRRNDWVCKLAQQVIQSNDLVAIENLRIRNLVKNHHLAKSINDAGWYRFREWLEYFGRIYGVTVIAVEPAYTSQNCSNCGEKVVKTLSTRTHICPHCGYVADRDENAAKNILKSALKQLSNTVGQMEINAFGETDLCLSGETQLSKSTHRKRKPKQ

SEQ ID NO: 26094 - protein, 402 aa, unknown
  TnpB Polypeptide
VKRLQAFKFQLRPGGQQKCEMRRFAGACRFVFNRALALQNENHEAGNKYIPYGKMASWLVEWKNATETQWLKDAPSQPLQQSLKDLERAYKNFFQKRAAFPRFKKRGQNDAFRYPQGVKLDQENSRIFLPKLGWMRYRNSRQVTGVVKNVTVSQSCGKWYISIQTESEVSTPVHPSASMIGLDAGVAKLATLSDGTVFEPVNSFQKNQKTLARLQRQLSRKVKFSNNWQKQKRKIQRLHSCIANIRRDYLHKVTTTVSKNHAMIVIEDLKVSNMSKSAAGTVSQPGRNVRAKSGLNRSILDQGWYEMRRQLEYKQLWRGGQVLAVPPAYTSQRCACCGHTAKENRLSQSKFRCQACGYTANADVNGARNILAAGHAVLACGEMVQSGRSLKQEPTEMIQATA

SEQ ID NO: 26095 - protein, 349 aa, unknown
  TnpB Polypeptide
VADGTREESTWKDAFLWRFRQNHQTTPVILQQLSVVTSAKRSTNLATKDYQKHPEKYKTEPKKPRFRQKGGRSPVLFCNQQFKYDGKTIRIPYLNNFLIRFEIKNATPKQVTFLPHGEIFKILVSYETSEQSDYQGNGLIASIDPGLEILSAVAFSDMSQPVLFSGKKAKNYNVHFNEKMARVQSELKITTGKHHSKKTESLWRKRKGFFDNHMHQVSRKLVDLLAVKGVSTLIIGKNDQQKQKNKIKNFVQVPIFRLLELIKEKAERLGIKVIVLRESYTSRTSFLDNEKPIKANYDKSRRIKRGLFISNGGRKIHADVNGAYQIMRRAVDVVWDGTTNIFNPQTITC

SEQ ID NO: 26096 - protein, 309 aa, unknown
  TnpB Polypeptide
MIPIWKKDKTELKNVHSHTLQDVTMRVDLAFQAFFRRVKAGEKPGYPRFKGKGWYDSITYLQSVFSLNGNTLSLSKIGNIKIKLHRPLEGNIKRLTIRKTSTGKWFVSILTDIETYKPLEHLDKSVGIDVGILSFATLSDGTYVPNPRFYIQEEKALARVNRKLSKAEKGTLERKKYLKTLCRIYERISNKREDFVQKLSKNLVDNYGTICFEDLNIKNMSKNHNLAKHILDAAWSKLVTYTSYKAENAGRKVILVNPKNTSKMCSNCGMLVEKDLSERTHNCPFCGLSIDRDLNASIRAYPETQNLIF

SEQ ID NO: 26097 - protein, 404 aa, unknown
  TnpB Polypeptide
MLTFKYRAYPSKKQVVKLRRQMFLAKQLYNLLLAKYERHYKETGKSLTQFDMNQYITQLKNEQPDFKEIYSQAAQNVSKRIAGAFKAFFRRVKERKRGSKTKPGYPRFKKFVSSLTYPQSGFKFKNEHRLFLSKVGCIPLVLHRLPKGVVKTCFIKAYPSGKWFVGFSSETPEKTFEGNGKDAIGVDVGLTSFVTLSDGKRVEPPRFLRKSESRLKILHRRVSRKTKGSANRRKAKFRLARLAERVSNQRFDFLHKLSCQQVNDYGLIGVENLNVRDMVKNHHLAKSISDASWVTYTRLLAYKAGSAGCTLVEVNPKDTSRTCRNCGVKHALSLSERVFSCPACGFSEDRDVNAAKNILAIATAGLAGSHACGDSASTCFARSGQAVSAKQELHDVKVFESQRF

SEQ ID NO: 26098 - protein, 424 aa, unknown
  TnpB Polypeptide
MSIKAYKYRLYANTATTEKLHWVLDRCRELYNAGLQERRDAYEMGVKRHPNYYDEEARKQLIREHAVGYYEQKRELVDIKEERPEYQEVASHVLQDVILRLKHAYDNFFRRVQNGEQPGYPRFQGRNRYDSFTYPDGAGWKLNAQTRSAGKKGIVRVNLKLTKIGTVKLHLHRDIEGTIKTLTIKREGEHWYAILTCEIGKPEPLPTRYEDVGIDLGVTHFAALSNGEFIDHPRYFRKTEKKLASAQQALSRKKKGSHRRKKAVQQVAKCHRKIANSRRDFQHKASRKLVNRYQVIVFEDLQTANLTKRPKPKQDEETGQYLPNGASAKAGLNTSILDAGWSTFTEMVSVKAAWAGRTVVFVNPFMTSQLCSGCGAVVRKDLSERWHSCACGTELDRDTNSAKLILNLGYQHLSVGTRPTSATA

SEQ ID NO: 26099 - protein, 490 aa, Moorea sp.
MTAKVGINKKISTQVVPVVGMAKSVEIELLSTMKKLGIVRSESYHKLGSIKHWGLDWKKAYPEVRTFRTPESLGLPSKLMEWTVSDVAKAVRAQQAACADAVIKKIYKKFPGKDNQKTRKEYATQLKTLALLDSPLLHRLVRIEFQRGHSWVKNQIVYQQGGYKCKRISRNTYQLEIAGLRRGKRNRILVRSNRKIKGQIRLIYNQLVQRFEVHFLVDHGKVCIPVDRRSVGVDKGYTEAFFDSEGKAHGKGLGKLASKKSDRICAKNRNRGKLWAIHRKLEKIDPAKSARILKNNLSRKTENRRYRKDQTEILSVIGQASKSLFGGKALKVFAEDLTQPIKNKRQSKAMSRKLNSWMKGQMRDSLQKWADWTGSFVTEVQPSYTSPVDSITGTLLGKRSGDSEPIFNGVVLPADCNAAKNILDRGIDFEISRYSSRAEVQAVLLRRTARFLKGMGLSLADAVELGWLDSKHSKTRAFKELLNGISGAPK

SEQ ID NO: 26100 - protein, 346 aa, Cyanobacteria sp.
  misc_feature (247)..(310): Xaa can be any naturally occurring amino acid
LHYYSPDEISRVRLIRRADGYYCQFLINAERKETLEPTGNAIGLDVGLESFYTDSNGDKTENPRYLRKSEDKIKTCQRRLSRKTKGSANREKARQQLAKAHLRISRQRLEHAKRLARCVIQSNDLVAYEDLRVSNMVKNHNLAKSISDAGWYQFRVWLEYFADVFGRVTVAVPPQYTSQECSNCGVVVKKSLSNRTHQCKCGCVLDRDHNASINILKSGLRTVGHTGTYACGDLTSTLVGESLSEQXXXXXXXXXXXXXXXXXXXXXXXXXXXXXXXXXXXXXXXXXXXXXXXXXXXXXXXXXXXXXXXXVKYDHSVGQQNPALRELLVPERESDRPIPTFLSVVP

SEQ ID NO: 26101 - protein, 384 aa, unknown
  TnpB Polypeptide
MVKTYNAKIVFEKPEDKVLLSQSLSLAGEAFNLVSTERFKMKKCGGTKPLHERTYYKVKEQFPNIPSQYIIKVIKDVIAKYETIRKNHQVIEEAPEKRNLQLQLDKRLFTWKGEKELTITTIEGRIRIKFETYPLLEEAFQDGKKCDVSIFGRDNEFYLSIPFQFEVEPQNKKETVLGIDLGEGRIVATNHGHVVKGLSFKKRKRQIRHQKDTLKSKTTNSAQRKLKSLKRKERNHTRNYIHCLTKHILVNNKENVIVLEDLTGIKKKNQGRYRNRKSRQIPFFQFRTILTYKAPFYKKRVETVNPHYTSQMDSRGLENGKRVKGTCRYVGVDGKVLDADINAANNIRNRYLQLPSSKCKNLMEGQALVNEPYAGNLPGKPLRL

SEQ ID NO: 26102 - protein, 267 aa, unknown
  TnpB Polypeptide
MVGKKISSANKALKALRKNGHKIKQVTVKREGKHRWYAIICCELTEPIFKFMDVSKSVGIDVGITKFVHDSDNHEVENPLFLKQMLNPLRRASRHLSRRQKGSANYEKAKSRLQVLHERIRNQRLDFLHKQSTIYSKRYDLIFLEKLRVLNMTKNHRLARAILDSGWVTFGSMLKYKAKKVMEVYSPNTSIDCSHCGHKVQKSLAVRIHRCDNCGLVLDRDYNAALNILQRGIKALKLPMERREVTPVEFERTRKQESIEAHDFSHG

SEQ ID NO: 26103 - protein, 386 aa, unknown
  TnpB Polypeptide
VRVSFKYRLYPTKPQADFLTGELREACSLYNAAKQERDDAWKTCRKSINYYDQANQLKAMRADGCLTLANFSCCQDVLRRVDKTYKAFYARLKRGEKPGFPRYRSSRRYDSIAFPSYGDGCRLLDSGKLRIQGAGHIKVKLHRPVEGVIKTVTLKREAGRWYAIFSVEREAAPLPGSAAEIGIDVGLNSFAVLSNGAEIQNPRYYRKAQARLRCAQRKVAGRKKGGARRHKAVRLLQRAHAHVGNQRRDFQHKESRKLVNGYGVIAVEDLNVKGLAGGMLAKSVHDAGWSMFVAMLVYKAECAGRRVEKVDPRRTSQTCVCGARVPKTLADRWHDCPACGLSAGRDHVSARIILSRARTAGLESGTGLIAGQPSGANVEDVVSCVS

SEQ ID NO: 26104 - protein, 389 aa, Domibacillus sp.
MIMHKAYKFRIYPNKEQERLIAKTIGSSRFVFNHFLAKWNDTYKETGKGLTYNSCSVQLTQLKKELMWLKEVDSVAIQSSLKNLADAYSRFFKNQNKRPHFKSKKNHVQSYTTKHTNGNIAVADHKLKLPKLGWIRFAKSREVEGRILNATIRRHSNGKYFASILAETEVKEKSKTGSSVGMDAGLKDFAILSDGSIYKNPRFFRSLEKKLAKEQRVLSRRKEIAIKQKRKLSESKNYQKQRRKVARIYERMVNARNDYLHKISTEIIKNHDVIGIEDLKVSNMLKNHKLAKAISEASWSQFRTMLKYKAKWYGKQVVVVGKTFASSQLCSCCGYKNKDVKNLHLREWDCPECQTHHDRDLNAGLNLKNEAIRLLTAGTAGVAYSITGR

SEQ ID NO: 26105 - protein, 316 aa, Azotobacter sp.
MKHTKTLRVRVRVRVRDKHAPLLRQMARSVNLVWNYLNEFSHRSIRERGVFLSAYDMDRYTKGANKELGLHSQTLQEVSREYATRRKQFGKARLNWRRSGSTRRSLGWIPFKSGAASWKHGQVYHNGRYFKVWDSHGLGRYRFRSGSFSEDSRGRWYFNVVVEVELQPSLGQGAVGIDLGLKDVATCSDGTRLKNGRFYRGLVAGPGRRPAGRQQGPRPGDPLQDRQPAPGCPAQIQPAVGEPVRRNPGGRRVVHETREDPDGQVGARCRLGPTEDDASLQQASSSRWSTSATPPKPVRIAAHCLIRGRKVSRDLE

SEQ ID NO: 26106 - protein, 430 aa, Escherichia sp.
  misc_feature (146)..(149): Xaa can be any naturally occurring amino acid
VKRLQAFKFQLRPGGQQECEMRRFAGACRFVFNRALARQNENHEAGNKYIPYGKMASWLVEWKNATETQWLKDSPSQPLQQSLKDLERAYKNFFRKRAAFPRFKKRGQNDAFRYPQGVKLDQENSRIFLPTLGWMRYRNSRQVTGXXXXQENSRIFLPKLGWMRYRNSRQVTGVVKNVTVSQSCGKWYISIQTESEVSTPVHPSASMVGLDAGVAKLATLSDGTVFEPVNSFQKNQKKLARLQRQLSRKVKFSNNWQKQERKIQRLHSRIANIRRDYLHKVTTTVSKNHAMIVIEDLKVSNMSKSAAGTVSQPGRNVRAKSGLNRTILDQGWYEMRRQLEYKQLWRGGQVLAVPPAYTSQRCACCGHTAKENRLSQSKFRCQACGYTANADVNGARNILAAGHAVLACGEMVQSGRSLKQEPTEMIQATA

SEQ ID NO: 26107 - protein, 380 aa, unknown
  TnpB Polypeptide
MNKTIRKAFKFRLKVSTENNQKLTNYAGGCRFAWNKALALNLDRLNKKQPILWYSELCFWATLWKQSDEYGFLNELPSQALQQKLKDLDKAFKDAFDKNQPLKRIPVFKRKGQSSDSIRYPQGFKIEQEENRIFLPKIGWVRYRNSRKIVGTPKNVTVSRKGKQWYVSIQVEYETPEMTHKSTSAIGIDMGVKRFATLSDGSFIEPLNSFKKSAKKLATLQRKLKHKKKFSKNWQKQKVKITKHHEKIAAARRDFLHKKSTAICENQAVICIEDLKINNMSKAPKLKNVKQKSGLNKSILDQGWGMFFDMLTYKQDWNGGMVIKVPPHHTSQKCPSCHHVAKENRLTQAEFVCVECGYKNNADVVGAINVLTRGLSGVSL

SEQ ID NO: 26108 - protein, 436 aa, Thermococcus sp.
MIKCTVRIKLQASKEVEKILFELADTGAKIWNEVNYSRRQLFFNHEKVDFNSTEKAVYEKYKSKIGSATVQQICRKNAEAWRSFFSLIKKRKELPKWLRPKPPNYLKENGKRRPLIVLRNDQYKIEGNKLILKGLGKFKRLEIQFKGRIHLKGKQGRLEIIYNEVKRKWYAHVSISKVDEKFDGKKWVKLPRQPTGGLSAGIDLGVNNLMAVYVENGESFLVNGKPLKSIAFYWQKRIADYQSKINKSGCKKSRKLKRMHEKAKLQARHYINTAVRQTVEKLYYLGVSKIVVGYPKEIARGPNKGKKQNFLLSHVWRFNYVIKRLREVAEEYDIQVLLVGEAFTSKLCPFCGKPHDGARFVRGLYKCPAEGLVMNADLVGAFNILKKVVRMITPSLPGLTAGRGNWPKTRPEGFEEPFPRVVLMRTPQTSPSLARG

SEQ ID NO: 26109 - protein, 402 aa, Escherichia sp.
VERLQAFKFQLRPGGQQEREMRRFAGACRFVFNRALARQNENHEAGNKYIPYGKMASWLVEWKNATETQWLKDSPSQPLQQSLKDLERAYKNFFQNRAAFPRFKKRGQNDAFRYPQGVKLDQENSRIFLPKLGWMRYRNSRQVTGVVKNVTVSQSCGKWYISIQTESEVSTPVHPSASMVGLDAGVAKLATLSDGTVFEPVNSFQKNQKTLARLQRQLSRKVKFSNNWQKQKRKIQRLHSCIANIRRDYLHKVTTTVSKNHAMIVIEDLKVSNMSKSAAGTVSQPGRNVRAKSGLNRSILDQGWYEMRRQLEYKQLWRGGQVLAVPPAYTSQRCACCGHTAKENRLSQSKFRCQVCGYTANADVNGARNILAAGHAVLACGEMVQSGRPLKQEPTEMIQATA

SEQ ID NO: 26110 - protein, 443 aa, Moorea sp.
MIVREAKLLNGSLAQYQALDEAIRTAQFIRNKAVRLWRDQPKVNKARLSLLCKELAGEFPFAKKLNSMARQASAERAWLSISNFYRRCREGAKKKGYPQFKKHSRSVEYKTTGWKLSPECMTINFTDGFKAGQFSVFCNYETREDLFRLKINRVRVVRRADGYYAQFCFDANRKEKGSYTGNVAGLDLGIKYFYKDQNNNAAIYPKYLRQAEKRLKKLQRRLSRKFVRGKKPQSNNYHKARIRLGKCHLKVQRQRKDWAVKQARCVVHSHDVVVYEDLKISNMVKNHHLAKSISDAGWYQFTQWLNYYGNIWDKTVIAVNPNYTSQDCYNCGYRVKKSLSTRTHKCPRCQTEICRDTNAALNILKRGLEVLGIEYNSGATPHGFPVLGNAHQESTQGHWETAVDSETLGESATSVDERKLDSISCLNEPRITYCENPPLESPI

SEQ ID NO: 26111 - protein, 466 aa, Moorea sp.
LYKTIPVRATFSEEEKAFWVFQCEQANSLFNCAIYYAKQKHYEWLKEQEAYTTFWCGDELRCGWKTYKCSTKYPELDKALKMSPHYKGMAAQSAQQTLKTVGEALASYNQLVGLYYKGSVDRPRFPRYRKKGGLAAITFPKQALTYKEGLFYPSVSKESKPELLTKITLDPPDFIDPDWVKELTIRPYYGEFWIDWVIDDGKEPVKENPTLDYSQAIGIDHGGDNWLTCVSTLGKSFIIDGRKLKSMNQGYCRLVSKHKTGKPEFYWDSNLDRIQRKRNNQMRDAINKAARFIVNRCLVDGIGNIVIGWNDGQKQRSNIGKKGNQKFVIIPTKRLFERLKQLCPEYGIKLIITEESYTSKASFLDGDSLPKHGAKPVRVASALPKGWKPSGKRVRRGLYKTAAGNLINADCNGAANIIRKVTTQLGIHLAKVGRGILTVPHRYDIFNSLNKSYRRRSEAGRVHPPA

SEQ ID NO: 26112 - protein, 367 aa, unknown
  TnpB Polypeptide
MIVIRTIKLKLDVSSDAGNSLLKTMRDYTVAFNVCSAWGFESHSVSKINCHNATYHNIRQSVPNLPSSLVQGARDVACECLKAVKCQFKPLRKEYSAMRYNSRVINVFLTSGYATIATSDGRIKATFGVPEYYRPYLTWKIKSSTLSLRKNDDTFYLHCQLETDTPKLIPEQTVLGIDRGIVNIAVCSDNRFFNSKSVKKVRSRYAKLRAELQSKGTRSATRKLRKISGQERRFVTDINHCISKQIVQSPFTIFALEDLTKIRVQKRRGTEFNRKLNNWSFFELEQFIRYKAETLGKQVISVDARYTSQKCSVCGHVYKGNRQGSSFLCRKCGFEIHADLNASRNIAQDGISDLGRSSVNRPIVACS

SEQ ID NO: 26113 - protein, 415 aa, unknown
  TnpB Polypeptide
MKKNKKIKLVRQIIYKRNDPKYNEMDELCFKSKNLYNATLYAVRQSFIKSGEYLNYNKINKIFTEENNVDYRALPAKVAKHTQMLVDFVMKSFFALVKKKKKGEYDKKARLPKYLDKAKGRMTVHYERGALSFKKKKGYIHLSKTEIYVKVPEHLNENDIKFVRIVPGNERFTVEIGFEREPESQIMAENYASIDLGVNNLVTMVDTVTKRPIIINGRPLKSINQWYNKKIAEMRTEAERLHGKYWSRKMSGVTNRRNNKIKDYMHKASAYIVNHLVSNRIGTLIIGEIKEWKQDTNMYKVNNQNFVCIPFEMLKSMLEYKCMLAGIEVVRQDEAYTSKCSFLEDEEIRKHEKYMGTRSKRGCYKTSSGRKVNADVNSACNIMKKYLLKVAGNCTNLLHELVEVFSTPCLKIKTF

SEQ ID NO: 26114 - protein, 370 aa, unknown
  TnpB Polypeptide
MARKTFKFRLYPNRQQRERLTATVDVCRELYNAGLQERIEAWKKRTPVKVFDQINQLPDIKQIRPDVAEVFSQVLQDTLRRLDKTFQAFFARVKRGQTPGFPRFKGRNRYDSFTYPQSGFALGVRLQLSRIGNIKIKQHREIVGDIKTLTIRREAGCWYACFSVEFEPRKLPRKDTSIGMDVGLETFARLSNGRAIENHRFYRQAQASLRRAQRKVARRQNKESHRRRKAILLLQKAHAHVANQRKDFQHQESFKLVRDFGTIVVEDLNIKALSTGMLSKAVHDVGWSSFLTMLAYKAENAGRQLIKVDPRHTSQECPHCHAVEKKPLSERVHRCDCGLTLGRDQAAALVILWRGLRLQAPTDRQLATVA

SEQ ID NO: 26115 - protein, 398 aa, unknown
  TnpB Polypeptide
MLSFKYRVYPSSKQTLRLNRQMFLAKEIYNLIFDKAKEHYKQTGKMFTQFDMNKYISQLKKEKPEFKELHSQAAQNTSKRLADAYSAFFRRLQERKKGSKIKVGFPRRKKYVSSLTYPQSGFKFKNERRLTLSKIGCIPIVLHRVPKGEIKTCFIKKYASGKWYVGLSAEFEPKEFKSNEQGRIGIDVGLSSFATLSTGLKIEAPKFLRKSEKKLKLLQRRVSRKHKGSRNKKRSRLRFARQAEKIANQRLDFLHKLTTQQVKTYGLIGVESLNMQGMMKNHHLAKSISDASWSMYMRMLAYKAESAGCKLSMVASKNTTRQCNRCGGLQDMPLSKRIYECQSCGLVEDRDVNAAKNILERATVGLTGSNACGNLSSTLPLRIEQDISMKQELKEART

SEQ ID NO: 26116 - protein, 573 aa, Alphaproteobacteria sp.
MNQVRTFQIRLPRGDHEDVLDAWGDLAGRAIRYIHVRMAKAHREMEGLAKAEQAAFLREEKNALKRDTIKAFGISGRQYNGLFAQLMGLWESRRELAKVDVDRLKARIDRKRKAVDQLTKRLEKDRSARKALAEKSAAAAKKGRPEPLPTKSQARALLDSEARRKIRFSLHQGKRKLASLEHDLEKARASAAKTSVPRIVFGGKGLMRERLAIHPNDAQSLAAWRRKWSRRRSAGFMLIGGSDEAYGNKSCKMMMDGAGRVRLDLRLPDGLGLGKHLSIGGIEMPDFGRPELEAAMRRNLRPGNRIALTYRFVRDPEFRSDRLSAWRVCITVKVVIEELAPAIRRLGVDTNADHLALALIDGDGNPLEKWRIPLPLRGKTSGQRAAIIGDAAARVCAIAREHDAGIVLEALDFGKKKKELADARKRALPEHARYARMLSSLAYRQIGEAIQRRAEREGIAVDRVNPAYTSLIGEVNFARRYGMTRHQGAAVAIARRACGFSERINYIHGHRGRRSALPSPEEARRHVWRHWAVVHRERSATAASARREHSAHPSGRGKSPGSIGQEILQRKVP

SEQ ID NO: 26117 - protein, 418 aa, Eubacterium sp.
MSAGYAITTYKIQLNYKHLDWFKQTQSLFDAVLAFYYHLLEEQSELLGLSNQNLLRHLELQTIKQRNGNLPEIPLPYEKVPLYFRRAAINSAISMFRSYQGKLKAWEEGKIKGSKPSAPKQLHMSMLYYKGMYKEFNEKSIILKLFTGNSWAWVKHPYTVRPFPEDAELMSPRIVMNKKKVMMHVPVKVSVEDIRTAKERVEQNEKFVSVAFTMSDALAVCTTFEANGRAMHPYFIKGGKVLAHRRKQLLGYIKRGGQHQNSNNEKAYAKYYEKITRLTDHFAHDVSRKIVDYALKEGAKLIVMPSYGDTFEKGSLYYLKTNSMEFIGRRIIRYTTYKAWQAGIIVQHNSVGNAKKVCYQCGAPIYRFNTEYQTPSLNFIGGKNFQCPNKHCGSTALNTARNIGKSFYQTFYKEVAQT

SEQ ID NO: 26118 - protein, 115 aa, Clostridioides sp.
VIAVKKAYKFRIYPNKKQQELINKTFGCCRFVYNKYLAKRIEVYKNDKETFTYKQCSSDLTNLKKELNWLKEPDKFSLQNALKDLENAYNKFFKEKAGFPKFKSKKTNRFSYKTT

SEQ ID NO: 26119 - protein, 292 aa, unknown
  TnpB Polypeptide
MISSFSFLEFLTIFFISSQQFQYIFCRSHNFAASKKKNKQKINWIRLAEKNRIPTDCNYSNPRIRYDGINWWITVGIEYEDSVTVPSNDGIGIDLGIKDLAICSDGNKYKNINKTKKVKKLEKQKRRLQRSISRSYENNKQGKEYCKTKNVIKKEKLLLILNHRLTNIRHDHLHHITSEIVKREPSFICIEDLNVKGMMKNRHLSKAVQQQGFYEFRRQMEYKSKWNNIQVIIADRFFPSSKLCSCCGKIKKDLKLSERIYKCECGNVVDRDLQAALNLKKYGEDVLKRSVA

SEQ ID NO: 26120 - protein, 441 aa, unknown
  TnpB Polypeptide
MRQPENPWSLDRGMNGVRVYERRNYMYLTVKQQVKHLSKEEYLIIKELCHSAKNLANEAIYNVRQHYFTEGRFLKYEKNYTLLKNSPNYKALNSNMAQQILKEVDGSFKSFFGLLKLTKEGKYAFKDCKLPHYLPKNGYATLVIGFIRLNGNKLILPFSNSFKKTHKPVEITIPPVLLDKKVKEIRIIPKANARFFEIQYSYKAECIQRNLNTNNALALDLGINNLITAVTSNGKSFIIDGRRLKSINQWFNKENSRLQSIKDKQHFGRKPTNRQKSIARDRNNKVNDYMNKAARKVIDYCISNDIGTLVVGYNETFQRNSRIGRHNNQNFVNIPYGQLRSKLEYLCELNGMVFVKQEESYTSKSSFWDRDDIPVYNADNPKEYQFSGNRVHRGLYKTASGKTFNADVNGALNIMRKSSVVDMNILYSRGEVDTPIRIRIA

SEQ ID NO: 26121 - protein, 282 aa, unknown
  TnpB Polypeptide
VGKKSYTTNAVYGKSKKGNITCNIKLDETAGTLKLPKHKNLIKLIVHRPIRPSGKLKSVTVTLEPDGKTYYSILMEYPKQIVTKTKPTNCIGLDMSLPKLYVDSNGKSPDFLKPYRKMEAKIAQEQRKLSRKKPGSKRYEKQCVKVAKLHAKAKHQRRDILHKISCALTDEYGLIAIVDLDMAAMKQSLKFGKSVSDNGWGMFNDMLEYKAERKGKTVVKIDKWFPSSKTCIACGHIHKELQLSDRTYICPKCGHMMERDVQAAQNILDEALRMLNADATAD

SEQ ID NO: 26122 - protein, 477 aa, unknown
  TnpB Polypeptide
MKQRQKQSKKQQKGEPQQITKAVTHIRLIEVNPGKLAALDVLAPVYLALCQQYVTLFCTEEKPNKLRAPLYKTVLSERWHRVAIQQAAGIAKSWRTNRANAYQGYLQEREEYVEKQAEGTLDSKETEPVWQEWSIPALKQTCIQANANVVRLEPSQDSSFDYWLVISTLEFRKQLYVPVKLATYHKEQLTDPRTKQRRTINSSVQLNKREDGSWWLTLSYDETVTIPDKSEAPVIGIDVGIANFLTTSDGKHYGSFNKKLRERHKRDRQKRRRKAKLRKCLEKKGVAKEKLPSTSSATGQRLIRHTKQAINRAVNECFEEHAGCQFAYEQLSVATMKHKARAMNAYLRASNLGHIPKQIEWNALKREIQATRVKSAYSSQECRVCHFVDRKNRLDQQTFCCQVCGYRIHADLNASKNLAARLHDEALQACRNRQEVKALLMRRHESWKQQCRIIVVDPPVQLGLWACLEISTDVGEG

SEQ ID NO: 26123 - protein, 389 aa, unknown
  TnpB Polypeptide
VIRTYKYLLRPNKEQILALDFLLWQSRSIYNAALEQRITSYQVMGKGIGYSAQWAYFRDLRRGNPETFGKLNASSLQQLLRRLDKAFQAFFRRLKAGETPGFPRFKGRNRFKSIEYTYGDGCKLRQGENGRIHFYIQNVGEVRMCFHRPIPQNSEITHAVIKQINTRWYVCLMVKLPEQIALHQAKDKQVGIDLGLKNLIALSNGTLINNPRWLEDNLLKLRCLQRHASRQTKNSHRQKQTFSRIASLHEQIANQRNDYLHKIANHLVREFDLVAIEDLSLSFMNHNRHLSRSSHDAGLGELRQFLEYKAEEAGVQVVAVNPRNTSQICSKCGRIVSKELSVRVHACPDCGLILDRDVNAARNILVLALQSPPGRGGQAVTWAAAPNVA

SEQ ID NO: 26124 - protein, 203 aa, unknown
  TnpB Polypeptide
VRTFMSGYFPSGLAYEWAKQDVGRIYRLCHAMDRLQSRWSGKEIRHRKRYRLKRAARRIRKKIKNLVDEAHKKQAKWIVEQFHTILLPVFETSGMVRRIHRRIGSKTARAMLGWAHYRFQQRLIQKTREYPWCKVILCDEHYTSKTRGNCGYLHQKLGSNKNFNCPSCGIQMDRDLNAARNVLLRWLTLNDPFSSSSSFSSSP

SEQ ID NO: 26125 - protein, 494 aa, Scytonema sp.
MYRTIPVKAKFIDEEKAFWVNQCEHANSLINSAIYHTRQTHYNKLEQQQDAFTTYWRGDELLRNWKTYKCGTTYPELDKVLKDNPHYKAMAAQSAQQTLKTVGESIISYNGLVNAYYKGEVDRPSLPKYRKRGGLASVTFPRQALNYKDGCFHPSISRETKPHLLTNIALQLPEFIDSDWVKEVTVRPYLGELWIDWVIDDGKEPISNHPSLDYTQAWSFDHGGTNWLTGVSTRGRSLIIDGRKLKAMNQGYCRLVAKYKQGKSDFYWAGVLHEENEPALLERVPDYEDRSTKQRLVHFLGDNASDSNLDRVQRKRNNQMRDAINKAARFIVNQCLNDRIGNLVIGWNEGQKNGSNMGKRNNQNFVVIPTGRLIERLKQLCLEYGIILTITEEAYTSKASFLDGDSLPKHGEKPVGWKASGDRVKRGLYKSRDGHFINADCNGSANIMRKVAAQLGLNLVEVVRGALTLPQRFDLFTRLNKSYRRRCVACLQTA

SEQ ID NO: 26126 - protein, 268 aa, Scytonema sp.
MYRTIPVKAKFIDEEKAFWVNQCEHANSLINSAIYHTRQTHYNKLEQQQDAFTTYWRGDELLRNWKTYKCGTTYPELDKVLKDNPHYKAMAAQSAQQTLKTVGESIISYNGLVNAYYKGEVDRPSLPKYRKRGGLASVTFPRQALNYKDGCFHPSISRETKPHLLTNIALQLPEFIDSDWVKEVTVRPYLGELWIDWVIDDGKEPISNHPSLDYTQAWSFDHGGTNWLTGVSTRGRSLIIDGRKLKAMNQGYCRLVAKYKQGKSDFYW

SEQ ID NO: 26127 - protein, 102 aa, unknown
  TnpB Polypeptide
VEDLNLKGMSGRLHLGKGVQDNGYGQFLFMLGYKLEECGKHLIKVDRYFASSKICSLCGHKKKELALSDRMYVCECGNRMDRDVNAAVNIREEGKRIYKECA

SEQ ID NO: 26128 - protein, 419 aa, Aneurinibacillus sp.
MYLTQSNQIRGLSKEQFQQLREMCHYAKNLYNVGLYNIRQHYFAEKTFLEYESNYHAAKTNENYKRLQAGISQQILKVVDRSFKSFFNLIKKAKKGDYRFQDSKMPKYLKKAGLFNLIFSTNAIAIKDGFFRVAVSNAYKKIHPEYQDILIPFPARLEGKKLKEVRIIPRNNGQFFHIQYVYEQPSETVELDRDKALSVDIGLNNLASCVDTDGASFLVDGKKLKSINRLYNKEKARLQSVAMKQGMKYTKRIDAITLKRNNQVNDYIKKCARIIMNHCLENKIGHLVIGYNEDFKRNINMGKKNNQQFTQIPFGNLRKQLSNLCEHYGISYKEQEESYTSKASFFDNDVLPKWNPTDETKHSFSGKRIKRGLYRTSAGYELNADINGALNILRKSNLLDCTILQARGRLARPLRIRVI

SEQ ID NO: 26129 - protein, 422 aa, unknown
  TnpB Polypeptide
MPEIMRLAFKYKLRPNRKQEQAMRNFSGCCRFAYNALLAQEKEAYQEYLEELESRLCCGEALSKDEAKALCVKPKLNQYTFNYALKKLKEEYPFLKEYCHSQVLQQKVMDLYEAFKKFFKGNGGYPKFKKRHSDDGFRYPQGFKVEEDNGRIFLPKIGYVRYRNSRKIEGIPKNVTVREEADGWYASIQCEFALKPEISIPDIDTAVGIDMGVKRFLTLSDGNFINNLEEKLKPLENKIALLQKRIKHKVKGSNNIKKAYLKLTLLHKRKADIRNDFLHQVSTLLVKNHDVIVIEDLKVSNMSKSAKGSIANPGTKVKAKSGLNRSILNEAWHKFFTYLEYKLKLKGGILIKVNPKHTSQTCIKCGHISKDNRKEQEIFKCVKCRYEANADHNAAQNILRRAGLARMACQANLIRGRQQEPA

SEQ ID NO: 26130 - protein, 353 aa, unknown
  TnpB Polypeptide
VKRLQAFKFQLRPGGQQECEMRRFAGACRFVFNRALALQNENHKAGKKYIPYGKMASWLVEWKNATETQWLKDSPSQPLQQSLKDLERAYKNFFQKRAAFPRFKKRGQNDAFHYPQGVKLDQENSRIFLPKLGWMRYRNSRQVTGVVKNVTVSQSCGKWYISIQTESEVSTPVHPSASMVGLDAGVAKLATLSDGTVFEPVNSFQKNQKTLARLQRQLSRKVEFSNNWQKQKRKIQRLHSRIANIHRDYLHKVTTTVSKNHAMIVIEDLKVSNMSKSAAGTVSQPGRNVRAKSGLNRSILDQGWYEIRRQLAAIGNNINQIARAVNARGFASGEDIAAITAAQETIWNIAERL

SEQ ID NO: 26131 - protein, 413 aa, unknown
  TnpB Polypeptide
MLVKGVAFRLASDPPPEAISLLREFRLAVNKAVRASIDARVSSRNGITKLLYRTFREEHPGMYAQHLASSFEVAAGILKNHRKRLRQGRRPGTPFVKRLMMKAENQAYKLDRTEGIIDLPIRAGCHVELKLVVSRYHRRYLNDGTLSLGSLTVLPDRVIVAFRKEFPGLIAASSVLSLDTNERSLDGIFVEGGRKGDTSCVQVKAAFPEVAIIQQRHHERRRRLQKKKAHDRRLTRVLCGREGRREHHRVDYRLHSVANAVLEFAENHRSAIVLEDLRGMRPNKNKDLNRRLSLWPRRKLHQIIEYKAAWKGIPVIKVDPRYSSRRCPICGRIPDSRMGKWSEFACECGWRMDRHVNASMNLLQTAISKGLEVAGGLRFSPGAFQHDVMMTLCEPAMAVRSEPNGTSHIGVTS

SEQ ID NO: 26132 - protein, 499 aa, unknown
  TnpB Polypeptide
MDGELLESDTVMGLLASEVRDISSYATYVVRNDEALGGELARIAAMTPAEAGRRAGVTMPDFLSSGRTGRSRKEMLVQHRAVTEYRSYRERVNAANGESSKYVSQGWKRTVDGSAPSYGEDYVNLGAVDRAYSSIENDPFADGEIVLRMVVQGQWYRLIFNFDNRRFTEGKVALPVIKVEDGQPVFIFTVVTDNPVVQFSGDYVIGVDVGINNYATVVVRDTKTGRIVYETTLSQRVHSLWNSVRASEAQVCDLKKKAATLLHDRQERMSALDEAQLHREAASRKKRELAILAAQEIADLSHLWGNAVVAVEDLGWISNTMQNGRWNRGALVKWLAHYVSHNGGWVVAVTPSNTSQQCHKCGAQVTHPTHELSVCVEHGVMDRDVNAAVNIAARAVPRVAKARKTRAKNRKLQPQAALRTPVARRSLKYPGRDRTKSAPTPKRKKNRPRVVREVILPISPARVTVTRVLADCGAQGATGTCQAAIKQGNMTDEWRLCDL

SEQ ID NO: 26133 - protein, 239 aa, unknown
  TnpB Polypeptide
VEPETPNQDTTEHRTVLGVDLGVENLAVASTGTFWSADEFTHWKREYEQRRGSLQQTGTRWAHQNLAAIGRQEAGRFEQHFHRLANELIEEARGNGCSVIAFEELTGIRDRLPGATWGHVWAYRRLYEYVEYKAEVEGIVVEQVDPAHTSQRCSTCGYTHPDNRDGEAFACLKCGYENHADYNAAKSIGLRYLRWNQTGADGGAPVGVALNSGMLNVSGDYAPPSDEGRTGVHAESPRR

SEQ ID NO: 26134 - protein, 383 aa, unknown
  TnpB Polypeptide
MRKIQEGDHMANRAIIYRLYPTASQKLLLTKTFGCCRFVYNRLLSVQQERYKNGEKHLSRTHANNFCNRQLKPAYPFLREVDKFALTNAIYHLEDGYQRFFKHLGNFPKYKSKRKAAKAYTTNSTNGNIKIGEQYIKLPKLGRVKAKIHRKPKDDWLLKSATVREFGDGTYQVSVLFEYEETPVSPVPVTEEQVIGLDYKSAGLYVDSNGKCQNMPGYFRMAQKELAKRQRKLRHKVPGSRNYRKQQKRIARVYRHISNQRKDYLHKLSTATAKQYAYVCVEDLNMRSLSNKGFGNGKATLDNGYGMFLFMLDYKLAEHGGKLVKVDKFFPSSQICHCCGCRNPEVRDLRIREWICPDCGAVHDRDTNAAINIRTEGMRLLAA

SEQ ID NO: 26135 - protein, 376 aa, Bacillus sp.
MILAKKVRLIPTPEQEKVLRNHAGAARFAYNYCKRMSDRYYKLFGKSVSQLALQKRFTKIKKRKRYEWLHDINAQVPKQASKDFDTARKHSFKKYKNGSHTSYKSKKDLIQGFYANYERLIIGKKVVVIQSIGEVKTSQQLPRNKKPSNPRVTFDGRHWWISVGFQEDFESQELTDESIGVDVGLKELFVASNGTKERNINKDAKVKKLLKRKKSAQRDMSRRFKKGVKIQSAGYEKAKAEHLRLSRKITNIRNNHIHQSTAKLVKTKPMKIVVEDLPISNLLKNKKLSKAFSFQKLNFFFQCLSYKCEKYGIAYVKADKWFASSKICSCCGVKYDHSVQPEGQWSLKIREWDCVGCNSHHDRDVNAAINLSRWVK

SEQ ID NO: 26136 - protein, 413 aa, unknown
  TnpB Polypeptide
LRKTVLLNCLPLTANKRQILNSFFDEYLRVLNLTLEYLPNAKSSTELHHLTYSNIRKTSFLPSDVVQEARKDVWAKRKTIKKGFKRCSIRLNKRWFKFFETERCTPCFRITYSPRKSFVIPIKRDNGYNRFKDFLKGGWETKSICLLNGKIAVSIEKEYPEPVNDRRYVVGVDIGSTTLAAVTVFDSQTSKVVKQLYFGRDVAVRQRKYEERRSKLQHHADKGSEKAKKYLRRLKRKQRNFVKTRSGQIAKVIVNLALKYNASIAIEKLRLRATKGEVGKNGRKKINRIPYAQFRDFLKSNCLKYGVPFQEVDAYHTSKWCPHCGAVNSGHDSRNYALYRCKKCGMVVNSDRKASLAIAVKSLLERTSQGLTNSCFVQISRRRVAVNLLVRPDEGDLSGAVHLTQPLMESPLR

SEQ ID NO: 26137 - protein, 488 aa, unknown
  TnpB Polypeptide
MSQKVRIDGVRHAGASVFLGIDRCGNPCWTRNPERIMVWLCDGWRSRFNQRREQRPHSIPVKDGGTGGITDWIEEPLGGPNILPLMSDGQARTSCLWMAAIPSAILASTNRIENAEWFAGLKRKKTSGGRVPGFKSRRRGLGFVCWYTPSKGCHNAVFHKTGRKSGVVVITGMNPSQWRKPEDKARWRVIIHVRVSQPVRLYTSVHVDWTHRSLVFVNMPLPLPRTGNGKVGLDRGCVHTLTSSDGMFMDAPKPTKTELKRLKYLQRKMSRQDRTNEARGGRTAKFESKRHQRTLSEFNALQGRIVRRRNDWIEKTTTRLAKTNVLVAMEDLDVQAMTKRPKPRPDPDNPGHWLHNGARVKAGLDRSILNNCWSRVYKRLNDKMAANGGRLVLVPPAYTSQACHKCGHVAKGNRESQAVFHCVKCGYEANADVNAAKNILGRALVKTGGGTALDVEDPHWRPDEASTPSFLQAGSSFGVRSVKEIPRL

SEQ ID NO: 26138 - protein, 279 aa, Oscillochloris sp.
VIRAHTIRLNPTPEQANLFRQAAGTARFCYNWGLRAIKDALDQGMPVPTHRALRDAFKRIRTVEYPWTFQVGKSAIDGAFVNLGRAVKNFLDSRSGRRKGKKVGFPAFKSRKRGYGSFYVANDRFSVDGHTLKAQKIGTVNMTEPLRFVGKILGATIRYQAGWWWISIQVEVEHTPPTHTGPTIGVDLGITSLAVTSAGEVFENPKTPQACARHGQTAATVGEPQGEGQCEPPESRRQSWQRRISGSPASVKTGCTSSPPRWCGRHHWWALKTSMSPGC

SEQ ID NO: 26139 - protein, 345 aa, unknown
  TnpB Polypeptide
MIRRAQLNVGYANTGKLADLRRFATEASRVTNLYIDYLWELQDFKSKFVDTKVDTWFSARMQQCLGKQALEIVKSQRKRKKKTKPVFTKQSFTLDSRFVDVQFGLNTFDVWVKLSSIGSKMILNLPSKQHRQLHKYSNWKLRGTARLRFSHDQYFVDLFYEKKEPAKKKNGKKLAIDIGYKKLIVTSDNKRVGDDTIYKKIARKKQGSITFKRALVERDEAVNVACKSLDLDSLKILYVEDLKNVKKNSKGKMRKSFNNKLQRWTYPKVLEKLAMLCEEKGVEMVKIPPAYTSQRCSNCGVVCKSNRRGETYKCACGNELDADYNAALNILHIGKYGPDALQQIL

SEQ ID NO: 26140 - protein, 300 aa, Halophilic sp.
LTVACEEFYDTLDESGYQHWFLNDERWELTESTLSARDDEYFLHLGFRRPKPGDSETDAAEDRTVLGVDLGIENLAVTSTAHFESGRELLHEHRQFEQVRSGLQATGTQSAHRTLDRRGSREKRYNRDYLHNVSTRILAEAVYFECTHIAFENLKHIRDSLPKKRKFHQWAHRQLVQLVQYKAEALGIAVEFVPPANTSRRCCECGHTSERNRITRDHFTCTQCGATANADYNAAKNIGWRSVRRGLQDSRRTGDGQLALKSGTVKPNRGFVPYSEQEIEVESTDKPIPTASERATAPSE

SEQ ID NO: 26141 - protein, 447 aa, Bacillus sp.
MATDKSGKHIKGTKKELPEGWVTYGYRYAIFPAEEDRKQLERSFGCERKVYNEYVAGLYEHLEKIEFQGRFIQYKIPNYTTITQRYEFLDKSNDSFVYNDAKMRFQAALKKYNDEFAKKPVQYKKSVLKKMRTIGYVPTLRDIKGLPNFHSKKQGKFSYTTNQTNGNIKIVQKNEQFLLCIPKFRNGIPIALHRELPFEGIIKKATIKREGNRYMVSLSIDFPIKQEPLRSNIKADEVLALDYNQTDLYVDSEGRKAGYPRYHKIIEKRQRRLNKSLARKKNRALAYSEGNIIYSINYQNTVKNYQKTMTKAKNQRKDFLHKRSNQITNDYAAIVVEDLDLSNLAQCLSLGKKLHDNGFGMFRTMLEYKAKKNGKHLIFADKFFPSTKLCSECNKKKETVKLSERVYVCEHCHTKMDRDYNAASNLKQYGIKILSDLGFMAELSVLV

SEQ ID NO: 26142 - protein, 417 aa, Caldivirga sp.
MMQRFLSLCVLAKVVPCEGVVRQGSRRIPEGTYHRALKAEAEVVDGNLNDLLWDLTLYRHAMQRIVDALWDLDRVPNRSQMHQLFYQLLRSYGFRAHVARNIYDYALALVKATKSNNGSRPVLRRLSARLDYQDARVELDKGIVKVILRDKWYTLKLKHRRDYVEKFRGLRWKEVHVKYENSKLFVSVIFEFKYHPYVPRNIIALDINLKTIVAYNGFGVRRFKTRFADALSKRKRAEELQRKYPKRWRYNKRILNRVRELHRKARSIVVDWSWKLAKQIVLKALRRGHAIALEDLNGLRKRANNVSDVVVWKFTMFAYRKLQHAIMAKALEYGVPVIIVDPKGTSSVCPICGHKLTYIHRLAICERCSFIADRDTVGAMNIWLRALHAHAGACGLPPSAPPVKDETRQRGRKQMRG

SEQ ID NO: 26143 - protein, 239 aa, Okeania sp.
MATVSYPAQALKLKDNQIRVPLGNTCKRWFGIDSFLIPMPSNLEFSTLKELRLLPRNRCFYWEFIYEKEIVVKPQLNQENVLGIDHGVNNWLTCVSNVNTSLIVDGKHPPLWFPSREGIGVGWYNKQVSTIKENKPTGFWSNKLAAITEKRNRQIRDGINKAARIVINHCLVWQIGTIVFGWNKGQKNEIKLGKKSNSEFVPIPTARLKERIAQLCNEYGIILIETERLLYKYCFIFRW

SEQ ID NO: 26144 - protein, 521 aa, Okeania sp.
MAKSHGSLTGIEAKIEYHPANTELGALYESWKRSAVNWMQTEKLSESELEKRLMKKFNIQWAYADSIATEARRCLNQLKTAKKNLISKLELQLSAKTTATKKLITKLEKTLKLATKKGFPHTQARKKFCHQLLGLKSKIQKIANLKRKLKKLKNTERLHICFGSQKLFNAQHNLAENGYKTSDEWNVDWRKKRSGRFFCVGKSQPGGGTMMKVLPLQEDGLYKLQVQLPRPLQEKYGKKIQLKFSVSDRIGRYRATDLDYAINNLKPITISIFCREHKQENWYIHLSTYVQEIPVVHTRKNGCLGIDFNADSISVTYVKWDGNIKYLEEIPYKWKNKTTGQRQASMRNIVSQIVFLAEFFECAIAIESLDFSKKKAKMSEESKVYNEMLSNLSTGMFREAILSRCKRFGVELIKVNPAFSSVIGMINYMGKYGLNSGTAAALVIGRRALKLSEKIPQCLLRPEDVNKHDWSHWRRVASFIKLHRIRRTQLFQWRKALEGILTHGLWAEHQLSQQVHIETGE

SEQ ID NO: 26145 - protein, 688 aa, unknown
  TnpB Polypeptide
MSKIQVVKRKAKGFFKPEDIPTIQQTVQDVHDIISNASILLRAFYIDWIDRNGLANPIILEHHHIALACNVVQGAQEAPVRGKDSCKGCNDCPKCQKIELFNDLLRVFNTLYDKPNAIVTDFSVSHVIAYYIETLFTAYETNITTHFPKYPKRYITCDLLSKGFGPRVAKKIAGILVSHYLYDASLDSLKLLDELKDVSIHVNAFKDLFLEKQTVKEKSRAWDVKVHPWLYLAKMVEINKLLESRFTDVPAKYRKLLNPLPFHSSFVPMHIRLDTSGLSQLLMDNKKIEDFKQMYSAFYPDLTLNMKSKADMLSSFEKLVGRKENTKEESGLFATHLWDYMTNLTSCDQFKELYKSIKGTEWMFDNAVVTDGITISFQIIQRSVFGRKCLTGRKKAKEDVEEEIREPVKVLDHQKVLGCDPGKRDLLAITDGFKTITYTKGQRDQDVYKTIRQNLGVKRKRAAQLEEYETTVLNQCCKRSCDFDTFKGYCNARKGKEDELSKLYSHPVYRQFKFTNYCKTKSSEAKFVNKVFNAFGPSQDLGSKKNHCMDGSMVENAKKEVSSTKDLVISWGNWGKNPNALKGIGPTPGIGLRRRMESWFPTITTNEYLTSQRCPCCHGSRCLKKVKLPVIERHHLLRCTNDECQSRWWNRNVVGSFNILFKGLHAEAVFGEEEKVKRPKKRSKTAPC

SEQ ID NO: 26146 - protein, 362 aa, unknown
  TnpB Polypeptide
MNKGFKVRIYPNQEQQILINKMFGCVRYVYNYMLKFKQKAYSIFELKLRYIKISNILTKLKQRKIWLYEADAAALQQCLKDLDAAYINFFNGAGYPNFKSKRGKNSYRTVGYLQLDQDNKMIRIPKVGWIKFKDKINFSDLTKINNITISKTPSGKYFASISAEVDIKALAKTKKSCGVDLGLKDFCILNDGTKFENPRFLARNEKRLRLLQKSLSRKVYGSKNYEKARTKLAKFHEYIANYRKDYLHKISIFLVKNYDIICAETLQVKNMLKNHKLAKAISDVSWYEFCQQLEYKSLWYDKKFVRIDTYFASSQICSDCGFKNSNIKNLDVREWTCPECGKHHDRDVNAATNILNQGLTLI

SEQ ID NO: 26147 - protein, 356 aa, unknown
  TnpB Polypeptide
MKRAIKLVLPYDKRVAKTVITYNKACNFIMKRGYELGTFNKLKLHHATYKETRKRFPNLTSSLVCAARDQASDMLKREKLEILPVKKEFSSIRYNLRTFHLYLDKGIITLSTLFGRIKLPITIPAHFKPYISWRIAGTTLSIKNGKIILNLIAETDDPDKLAITKAIGIDRGIINPVVTNDAQFFNSRELRAVKGKYQWLKSQLQSKGTRSAKRHLKALSGRENRFVRDVNHCISKQIATSDAQLFVLEKLHIKRKKKNGRRFNKLLGNWSYMQFEQFLTYKADALGKTIEHINPKYTSQTCSACGQIRKANRKGVWYSCNNCGQTINSDLNAARNIVALSKFFKQQVAVNQPIVT

SEQ ID NO: 26148 - protein, 710 aa, unknown
  TnpB Polypeptide
VRTHVVTRLPIREVHSGARDVGIVAVRHFRLTRRSRHSTPLSAMQLLRGSSSDTRRRADAHEMWLRFTTVKLSRLRLRLAALLDLRDPSSAGLSISSLTGDDYVLTQAIGAAVFTQGLEGLLVPSATGVGEAGKDYNVVVFTDNLRAGSDLVFVDSMTSFEPAASLGAIAPVDKRASRAASAVPPPVTIAVDGGILSTWTTSGTSIASTSSSTTSSGARSGARRCWSMTLGEIAGPSSKASAPSRGGRFSTWRCSQTTSIWSSGHGRPPRLLMWSRPARASRPSSFARSTPSFGNCPLSGPDRISLARPGMSRRRPSPATSRRSGGCSLQAYVFRLYPSKPQTRLLASTVETCRHLYNDLLAERKEAWESEKRSVTKFEQMRHVKERKATNPYAKGVHSHILQVTVADLDKAFAAFFRRVKSGLEDPGYPRFKGRHRFDSFGLKEYGNGWKIDGRRLKLSGIGRVAVRWHRPMQGAPKTVRIVRKPDGWYAAITCETPPHPLPATGNAVGIDVGITSLIATSDGQHVPHPHTYRDEQRALRITQRRVARRKQGGANRRKAVQALRRQHQRIGNVRADFLNKLADSLIQRYDLIALEDLRIRNMVRNRHLAKSILDAGWGYFSQRLHAKAEDAGCVVYEVNPAYTSQTCSGCGERFPEHLSLAVRWVSCRCGLSMDRDQNAARNILSRAGQARWGKTWGTSPSVLQEAVGL

SEQ ID NO: 26149 - protein, 379 aa, Moraxella sp.
MYKTATIVIKNTNPLFAVIDDYAFLCKNLKNSALYVYRQFFFKENKTLNKYKLIKEFTQDKQADYVAIPRKVSQQIIFQVAQEFQSFWGLVKLGVKDKSKPRPNIPRYLDKQKGRANIIFTKQAISKKDLPKGVLTLSPFDKTRPISIHLGKLNQIIDYNNIQEVKIVKVANGYDVKICYKTQDTKTDTSVNPTRVLSIDFGVNNLMTVGNNVNLTPLIIKGQAQKSFNQYFNKKLAKLKSRLDTAKDFLKPSIRKKLDRLYQKRKHKVNDFLHKASHYLINHAVENHIDTIVIGYNKGWKQEIEIGKVNNQKFVNIPFATLLNMITYKAKEKGIQVIITNENHTSKCSFLDDEPIQKQSTYKGKRIKRGLFKSSNGRL

SEQ ID NO: 26150 - protein, 236 aa, unknown
  TnpB Polypeptide
MYIHICSVDLGINTDAVCTIMRADGTVLGRKFINHPSEKDRMYRTLGRIRRFQREHSSAQSRGRWAYTKRLNIELGRKIAGAIVKNAEENHADVIVFEYLEMQGKISGKKKQKLHLWRKRDIQKRCEHQAHRKGMRVSRVCAWNTSRLAYDGSGSVSRDPKNHSLCVFQTGKRYNCDLSASYNIGARYFIRELLKPLPVTERSLLEAKVPSVKRRTSCVYADLKELHLQMEILKAA

SEQ ID NO: 26151 - protein, 548 aa, Clostridiales sp.
MRTVMVDIKQNHPAVSYFEKNTTGSRAVRNTANFLIRNTMTGLCKSPEERTHMETEVLHTVFTGIQKANAYKDIQEGKAISAAFQKVKSGELAGLKAHAYLKSKLDSCGKRFSYPTMDHWFLSYEVLDAVLKHTGNTAYYSCTSQVNQQAIRKTVASWKAYFKALKDWKKNPGKYQAKPRIPGYIREHKATAHFTNQVCRMVRTGGRLYLSFANCKQPVHIGRETLIPGKYVKTEIKPFCGRYRICITYEDVFQEPELPADPKRILGLDIGLENFLAGASNTGARPFLIRGGWLKSLNQWFNKRRAKLLSTLTRGDDSQHSRKHSHALDALSRNRNNHIRDFFYKAAHWVMRWCISHQIEVIVIGHTKGMKQEINIGKANNQNFVTIPYERFLRVLKTVSCKYGVPVVEREESYTSQASLLDLDAIPTYGDGDEESVFSGERIKRGLYRSSDGRLIHADINGAGNIARKEYPHMFDEMDMGYLCDTVDVVTGEKILNIKRHKSRKGYKKRKSPAAKARHESRKSKRLELRILLEVNPQIKTAKKQIAA

SEQ ID NO: 26152 - protein, 416 aa, unknown
  TnpB Polypeptide
MRLVYKFYIPHTEQIDALCRVANNLYNQALYLFRQRLDADGAWTWYNDMDKLMKEVTNLEGACNYKLIKSHCSQQVLRVLDRNIKAYCKSIKDWKKHPEKYKGMPQMPHYRKRGGLSNLYYTNQVASIKDGKIRLAKDLYVSIPQWEKYGDSISRFNQVRFIPNSQNIKVEIVYEKETKKADVDKSKCAAIDLGLDNIATMVIAEGCVIFSGRFLKSYNNYFNKNLARLQSVKDMQGMKRSTNRIKRMYDKRDRYFEDVFHKVSRQIVDILVEKKIGTLAVGYNAGWKQESDMGKRNNQKFVQMPFARLVGYLRYKCEMVGIDFVVHEESYTSKCDALAFEKIGKHEKYAGRRIKRGLFRSSTGKLINADQNGALNIMRKVVGDSYVRKIVDSGHSLCPIRYRNPFQRIAGSIQKV

SEQ ID NO: 26153 - protein, 436 aa, unknown
  TnpB Polypeptide
MKLFPKIREAKTKIQYEWLTERHVIRSSDRFFSLLETLAHKANNVYNQGLYRVRHKLFQGEWMNYCALDQSFKTSRDNRDSMLYESMGNIHLVQQVLKTVCQDMTSWKKARDSYRKAPRKFIGYPKLPSYKKKGGMASFIVDNQTARLRPNGIVEIPCMNNFRVELWHKNVKKIQQVQIVPANGVFIVEIVYKTEKVIEYKPDNGRYLTIDPGVNNAFACASNVKDFVPVVFNGRPIKSVNQFYNKERARLLSIHKLSGQKSQSYRLDRLDFKRNQKIERYAHEVSKRIAELALSHECNTIVIGRNIGQKRGSRMTKKNNQNFIGIPHDKMLQMITYKANLLGIVVVPVNESYSSQTSFLDGEEVVNANGDKARVRRGIRPAKRQFKRGLYRSNNGTILNADINAAYQILRKVVPNAYADGIEGVGLHPLKVNLSF

SEQ ID NO: 26154 - protein, 380 aa, unknown
  TnpB Polypeptide
MDDYVRGYKYRIYPTQEQEVKFNKMFGNSRVVFNYFLSVRQKAWNEERRSVGYSETSRLLTQLKRQPEFIWLNLSDSMSLQESLRDLDNGFQRFFTGDARYPKFKSKHNAKKSYRTRNQKNGIRIEGNKLHLPKIGWVKIKLSRIPDGVILNATISKTPTGKYFVSLCVREDWNNVLKRNNGGEVGVDVGIKSFYVDSNGNVVENPRTFTKFQRKLARAQRRHAHRKDGSRRKQKARAAVAVVHEKIANVRRDFLHKESTKLVSDNQVIGIEDLHVAGMLKNYKLAKHISDVSWSSFFRMLKYKSVLYGCDLVQVGRFYASSQTCSVCGEKNSQVKDLDVRAWTCPHCGAHHDRDKNAAINILRKAKDILAASKKINQIP

SEQ ID NO: 26155 - protein, 411 aa, unknown
  TnpB Polypeptide
VKPLPEITKTIKLHLKVTEEQDLAFQELTNTYKDACNFISEYVFTHDFELNSFKIHKVLYTTIREEFGLKSQITTATFKTVTASYQTVQTQLFQNPYKDKNENGEVEYTQKTLDWLQKPLYFSRPQCDLNHGRDYAFLQTGKLSVNTMKNRALVDFDLPPCFKDYFDGTWKLGTAKLVKLNGEWYLHIPAAKEITNELDKTQPKHVVGIDRGLRFIATAYDEQGKTTFFSGKEMAKKRKKFNKLRAQLQSKGTKSAKRKLKKLSGRENRWMSDVNHQISKTLVQTYGEGTLFVIEDLTGVSFEEQNLKRTKEGRNELRSWTFYQLEQFLTYKALENGSKVLKVSAKYTSQRCPKCGRIHKPNRKHETHEYICDCCGYRSNDDRVGAMNIYTLGTMYVSGDTHPRFGIRKIG

SEQ ID NO: 26156 - protein, 370 aa, unknown
  TnpB Polypeptide
MLVRKTYEFKLYAAARNRFLTRQIEAAAKAYNHCIKLHQRYWKLYHKHLGANRLKKYLTKLKKTARFSYLLMIGSQALQDIVERIDCAYKLWWTNLKKKKKTSPPKKKDISKYKSFTLKQAGWKLLGDNSIVIQKKRYKYFKSREVEGKVKTVTVKRDACGDIFLYIVVEQEIEEIKVRSGEIVGFDYGFHDSMLIGVNEDKDIKAPSFFRKNQEKFKQANRALSLKEGGTNHKRAARLNRAKLYRRISWQRKDYHYKLAHELCDRYSLICLEDLSHKFMMKGHGKKAGDYGFAAFLKILEWVALKRGVTIVKVDRFFPSSQLCHCCGYQNHEVKDLSIREWDCPECHAHHDRDRNAAMNILKEGLRIAS

SEQ ID NO: 26157 - protein, 391 aa, unknown
  TnpB Polypeptide
MLISYKTEIKPTNEQINKILQCVGICRWLYNEYIAYNIRLYKLYMRGCLDEHQNHFISGMDFDKYVNNTLKKKEGFEWISLCGSKARKKAILSAEKAFKRFFQKKSGFPRFKRRNHQNTKLYFPKNNPTDWMIERHRLKIPCFGFVRVKEFGYLPIDGKVVSGTISQRADRFYVSVVVDAPERKYIRPREKPLGIDLGVKELAILSDGTMYRNINKDRVVKRLKKQLSRAQRRLARQLEDKKKRGGTALAANIKKSILRIQRLHVKLDFIRTNYENQVICQIVMREPSHITIEDLNVSGMMKNRHLARAIGECRFRGFRTKLTQKCRERGIEVRMVSTFYPSSKKCHECGNVKKGLKLSDRTYICDVCGHTMDRDVHAAMNLRDALEYIVA

SEQ ID NO: 26158 - protein, 440 aa, unknown
  TnpB Polypeptide
MLRGYRYRLYPSKDQEVLITKHLGCCRFVYNWGLNLKNEAYQNDGVSLSAYDLHKRLPALKEEHPWLTEVNAQSLQQSINHLSRAFTNFFEGRAEKPIFKKKHSPEQSFTIPQSYTVDFERGTVKLPKIGEIKTVFHRRFAGKTKSATVTRTSAGRYFISILVDDGEQPPEPAVSIPEQTVGIDLGLTHYAVLSTGEKVESPKYLKNSQKRLAVLQRRLARKQKGSKNRAKTRLKVARCHQMIADQRRDFQHQLSSRLVRENQALAVETLNVDGMVKNHCLAQAISDAGWGTFVSMLSYKCQEAGKTLLRIGMFEPSSKTCSACGYRKTDLTLKDREWTCPACGTRHDRDQNAAINIKQFALAGTERAVEPVDSLPLGRGMKQEAPSGRVGLFTTRRCPRTGSAALTGPVGLPGNRAQLASPPPAALERHGLLPVRGSEP

SEQ ID NO: 26159 - protein, 356 aa, unknown
  TnpB Polypeptide
MLRAYKYRIYPDKSQQEYFAKCFGCVRFVYNKMLEDKINHYKETGEMLKNTPAQYKKDYPFLKEVDSLALANAQLNLEKAYKNFFRNKNAGFPRFKSKKHKQSYTTNNQKGTIYIENGYIKLPKLKSKVKIKQHRFFEGNIRSCTISKTRTNKYYISILVEEEIEKLPKINNKIGIDLGIKDFAITSNGNIFENPKWLRKSEKRLKKFQRSLSRKKNGSKNREKARLRVAKMHEKIVNQRKDFLHKLSSKIINENQVIVLEDLKIKNMLKNHRLAKSISEVSWAEFRRMLEYKAGWYGREIIIAPANYASSQLCSNCGYKNIDTKCLSLREWVCPECGIRHNRDINASKNLLKLAI

SEQ ID NO: 26160 - protein, 395 aa, unknown
  TnpB Polypeptide
LKSKICFLATAYHIDVRKPGKEASSVEKAYKFRLYPNRAQEELMRKTFGCVRFVYNQTLAARRDAYATGKALSGYDCVKLLPGLKGAYSWLKEVDSTALQASVLQMDQAYKNFFAGRKGKRKVGFPKFKAKHHSRASYTSKVVGQNIQASDKAIRLPKLGWVKARVSTPVQGRILHATVSMSRSGKFFVSLCCTEVDIPQMPSTGAVAGLDVGIKDLVITSDGQKFSNPKHLQQAEQRLIMLQRRLSRKPKGSRNWEKARLRLARQHEYIANCRQDYLHKLTTQLVRAYDIICVESLNVKGMMANHKLAKVIADASWGELTRQLSYKAAWQKQLVEVGTFYPSSQLCSCCGYQNAETKDLALREWICPQCGYRHDRDVNAAQNILQEGLRLLASA

SEQ ID NO: 26161 - protein, 356 aa, Cyanobacteria sp.
VLSLTYKYKAIPTPQQVHIIEHTLTVCRQVWNFALRERKDWINSRKCQVNACSISGEYIIPADTKCPNYYDQANALTRAKTESPELKTVNAQVLQQVLRKLETAFLDRGRKGMGFPRFKNKYRMRSYVYPQLGKSQFLQGNKIKLPQLGWLEYVKSREIPDGFTVKQARIVRQASGYFVMLTLLSDVNVPDAVPDGHPVGIDLGLDKFVATSDGDVVDRPRFLNLLHRKLKLLQRRLRHKKKGSNNRHKLNRKIARLHQRIGDTRKDWHFKLAHQLCDGAGMIFVEDIDFRVWAKGLFGKHTLDAGLGQFLSILKFVCWKRGVYFGEVNKDYTSQVCPQCDAHTGKKELKDRVHSC

SEQ ID NO: 26162 - protein, 502 aa, Cyanobacteria sp.
  misc_feature (357)..(468): Xaa can be any naturally occurring amino acid
VLSLTYKYKAIPTPQQVHIIEHTLTVCRQVWNFALRERKDWINSRKCQVNACSISGEYIIPADTKCPNYYDQANALTRAKTESPELKTVNAQVLQQVLRKLETAFLDRGRKGMGFPRFKNKYRMRSYVYPQLGKSQFLQGNKIKLPQLGWLEYVKSREIPDGFTVKQARIVRQASGYFVMLTLLSDVNVPDAVPDGHPVGIDLGLDKFVATSDGDVVDRPRFLNLLHRKLKLLQRRLRHKKKGSNNRHKLNRKIARLHQRIGDTRKDWHFKLAHQLCDGAGMIFVEDIDFRVWAKGLFGKHTLDAGLGQFLSILKFVCWKRGVYFGEVNKDYTSQVCPQCDAHTGKKELKDRVHSCXXXXXXXXXXXXXXXXXXXXXXXXXXXXXXXXXXXXXXXXXXXXXXXXXXXXXXXXXXXXXXXXXXXXXXXXXXXXXXXXXXXXXXXXXXXXXXXXXXXXXXXXXXXXXXXXGDGLTGTGNRLVKSPRSKKKGGEASRQECLVTTF

SEQ ID NO: 26163 - protein, 326 aa, Clostridium sp.
LKELLDKNWLSFFEGVKKWSKDKTGFSGRPKLPKYLNKNGKNIVIFTNQNCKQENNKIIFPTCFNQYELNTSIGDNKLQQVRVLPRNKYFVLEVVYSMSKPQLKEDNNKYISIDIGLDNLATITNNCNITPIIISGRKLKSINKYYNKQLSHYREIAKRMNNLDWTNRMNRLTIKRNNMVMDLIHKASKSVIDYALSCGVNTIIIGNNKDWKRESSMSKKVNQSFVGIPHQLFIEKIQYKAENIGIKVIVIEELYTSGTSFLDNEEPIKENYNKSRRVYRGLFISNTGRKINSDINGSLQIMKKVFPNVIDHGIEDFGLNPIRVGL

SEQ ID NO: 26164 - protein, 402 aa, unknown
  TnpB Polypeptide
VKRLQAFKFQLRPGGQQECEMRRFAGACRFVFNRALARQNENHEVGNKYIPYGKMASWLVEWKNATETQWLKDAPSQPLQQSLKDLERAYKNFFQNRAAFPRFKKRGQNDAFRYPQGVKLDQENSRIFLPKLGWMRYRNSRQVTGVVKNVTVSQSCGKWYISIQTESEVSTPVHPSASMVGLDAGVAKLATLSDGTVFEPVNSFQKNQKKLARLQRQLSRKVKFSNNWQKQKRKIQRLHSCIANIRRDYLHKVTTAVSKNHAMIVIEDLKVSNMSKSAAGTVSQPGRNVRAKSGLNRSILDQGWYEMHRQLEYKQLWRGGQVLAVPPAYTSQRCAYCGHTAKENRLSQSKFRCQVCGYTANADVNGARNILAAGHAVLACGEMVQSGRPLKQEPTEMIQATA

SEQ ID NO: 26165 - protein, 371 aa, unknown
  TnpB Polypeptide
MELCQMGFKFRIYPNKMQERLINRTLGCCRFVYNHFLALRRDEWTANRKTLGYVQTSALLTDLKRYEEYLWLNEADSMALQEALRKLDTAYQNFFQKRARYPRFKSKHNYLQSYRTRNQKDCIRIVDGKIHLPKVGAVKTKLSRTFEGRILNATVSRSASGKYFVSLCVELDNESLPQPNSGGKIGLDVGLSQFLTDSNGNTVDNPRVLKRLMRKLVREQRRLSRKMPRSVNRSKARIRVARVHERIANIRKDFLHKLSTRLTDENQVIAVESLSVKNMMRNHRLAQAIADVSWSKFFRILEYKADLRGGKVLKVDPFYPSSQICSHCGYQNTELKNLKIREWTCPECGSHHDRDTNAAKNILRKALENVA

SEQ ID NO: 26166 - protein, 439 aa, unknown
  TnpB Polypeptide
MGAPSLPPILVFNQNYMILLMEQQFFRKEGEKVSDLTKTIKLRISVTPEQIELFRQTTEQYRRACNFVSQYIFDNAFDLAYLSLNKALYADIRSRFGLKSQMAQSSIKTTIAKYKAVKQQLLQRPYRYKDKNGNWRSITKTLEWLWKPVFFGRPQVDLVRDRDYSFVDGGKTMSIATLGERVKCSFFGEHFAAYLDGSYDLGTAKLVELNGLWYLHIPVTKEVKDFEKESVRHVVGIDRGLRFLTVSYDEKGKTEFTSGRKIATKRRKFQEVRRQLQSKGTKSAKRRLKAISGRENRWMSDVNHRISKTLVRKYGENSLFVLEDLTGVSFEESNLSRGKKQNYDLRSWSFYQLEQFLSYKTRENKSEVLKVSAKYTSQRCPKCGTIHKENRDHRKHFYVCQCGYKSNDDRVGAMNIQLLGTMWISGDNHPRYERITASE

SEQ ID NO: 26167 - protein, 422 aa, Limnoraphis sp.
MIVREAKLLNGSKSQYSRLDDAIRTAQFIRNKAVRLWRDERDVDKSRISRLCKELAKEFPFANKLNSMARQASGERAWNSISSFYRRCREGAKKKGYPQFKKHCRSVEYKTTGWKLSDDCKSINFTDGFKAGEFSLFCNSDVRRDLFTLKINRVRVVRRADGYYAQFCFNANRSEPGNYTGKVVGLDLGLNYFYKDTNDNAAIYPKYLRSSEKRIKKLQRRLSRKFVKGKKPVRSPDCESGACGRVDSQPQSNNYHKARKRLGKAHLKVQRQRKDWAVKLARCVVTSNDVVVYEDLKIQNMVKNHHLAKSISDASWYQFTQWLDYFGKVWDKAVISVSPHFTSADCSNCGFRVKKSLSTRTHKCPKCQTEICRDTNAALNILKKGMSILGAEYNSTEGHSETASFEETLGEIPPLLIRRHPT

SEQ ID NO: 26168 - protein, 397 aa, Clostridiaceae sp.
VGFKKKNEDSVVLCKKIQIYPTKEQIADIERDSFLCKILYNTYLTQRKEYYICYNTTMKMTEQRSQIPLLREQNTDYAKVYAKHLHAVCMDLDEDYKGCIKKRSKGEKTKLPRYKNKNYFYPIKTPKQYVKIKQDKIKLGFYELKVDVNEIPENYGEVWISKVRNKYIISITYEANKKENSNSTTLAIDLGISKLVTGINQNGEVIEIVNPRYDKYWNKKTDKVRSMRDTKKKGSKRYKKLTNTLNRLYENRRKQQEHFIHTITKYLVLNNKELILGDLSQEQMVKKSNLTKLNRSIKENWGLGKFKTFLTYKAKLQDVNVVYINEAYTSKTCSNCGNKQDMGLSKRTYTCECGMTLDRDINSSINIFNRFKEDTELNYKNINQVTILHFHYGKLSA

SEQ ID NO: 26169 - protein, 521 aa, unknown
  TnpB Polypeptide
MFVSLQFKLELKKEDKEKLIELMRKQSSAIRVAYNMLKELEKEKTRNPHAQIYHGLRQLFPELPTKYIDSAIYKAKQYPTDKPVVFGGKRLFEKLCKNHLTGKAREGLKKQWKEQRQGTLVSIGSKAEKGNRLTRFEDLNGQLCLRITTGNRDFIYAKVLREPSNNKDKWITFMAMLLESWQTQSYFPYTVELKLRDGEVYGSVSFEIPTPKVKHTKENGVIAIDTNASPIHLAIAEVSKTGELVSYQTINLHHLLGLSQNSKDHQEWILAHQLLDLAIEKGKAIAVENLKKLKKGMRGDGKAKLRKRLHQWNAKKFLQKLKRVAMLKGVEVIEVNPAYTSVIGMLKYAPQLSIDKDIAGAYVIGRRALGFKEDMPENYEKLLKDRTYLEFALKRYEEREKELRELLEKETNQYKRTALESEAKIVEKARKLLTNLIQSLQSESSSCEGANGRNPEQGRGSKVSSVVWQVLRVAILFPILGRILPRDLSPLKPVLVEGVWDRVRSRLVPLEAGGTVPIRDF

SEQ ID NO: 26170 - protein, 512 aa, unknown
  TnpB Polypeptide
MAPKATTQSFIHEFQLVTTPKEKRILEVRFNAGRNLYNACLSEALTRLSAMRGSDAWKTARNMPHGKARTAAFQTINERFEYSEYSLHKYAAKVCRACWIGDHIDSLTAQKLASRAFIAVKEYQFGKRGKPRFKRYGWMSSLEGKNNASGIRWRDGRVKWNGLDLRCVFDRKDKHGIQAHALSQTVKYCRLVRKVIRGNALWFVQLVLSGSPKIKAKNVIGRETVGLDIGPSTIAVVGDTDARLLEFCPEVDVRHKQIRSLQRKMNRSLRATNPDNYERKGTVRAGKKTWHRSRSYLALCTDLANHWCAMSETRKRSHGHLANKVLSLGATISTENLSYKSLQKQYGKSIGRRAPGTFIEILGRKAVNAGGQVSKFPTRTTALSQTRHCGRRARKHLRDRWHVCRKCGTVAQRDLYSAFLAKYVHNDVLDIRQAEQAWPGAHLLLERAMSGLKHQAANGRSTPASFGLNQRQSRSLVKDGSMAAKVRDIASIAKEAAKAAQAAGVSIAVRTP

SEQ ID NO: 26171 - protein, 361 aa, Okeania sp.
MYKSIRTKLKLNNQQKTLLAQHTGYSRWCYNWGLSLWNAAYKDGYKPNIRRLREVFTNHTKPLYPWMKNLSSKVYQYAFINLGEAFKRFFKGLGKYPKFKKKGRSDSFTIDNCGKPIELNGWSHKLPFIGWVKTYEPIEATTKKITISRHAGDWYLSLSYEFTQYPTPKTTEVIGVDLGIKTLATLSDGKVFDSVKSYRQFEAKLSQLQYLNRNKEIGSANWRSSQLKIAKLHAKVANIRKDTLHKLTTYLAKNHGTVVIEDLNVSGMLANRKLAKSIADQGFYEFRRQLEYKTQWYGSELAIVDRFFPSSKTCSNCGHVQDMPLNVRTYDCQSCGLSIDRDLNASINLRDAVGSTVNACG

SEQ ID NO: 26172 - protein, 391 aa, unknown
  TnpB Polypeptide
MKVVNKTYKFRIYPNKEQEILLSKHFGCSRFVYNHFLNERKEQYQKDKKSDNYYVQAKSLTELKKTEDYNWLKEVNSQTIQFALRNLDTAYVNFFRGNAQFPNFKSRKHKNTFTIPQFGRLEENKIIIPKFKGGIKVKLDKRKVNGKIGKMNITKTPTNKYYVSIFTEQAIEQLPKTNKQCGIDLGLKDFVITSDEIKYKNNRYTKKYSRELKKAQQHLSRKEKGSNGFEKQKLKVSKIHEKISSCRLDTLHKVSKELVEDYDLISIEDLNVKGMIKNHKLSKHIADASWGNFVNLLQYKCDWYGKELIKVGRFYPSTKTCNCCGWINQGLKLSDRKWTCKCGETHDRDINASKNILKEGLKIYGKGLTITKVESKSDFSDKAHSMKPETH

SEQ ID NO: 26173 - protein, 505 aa, unknown
  TnpB Polypeptide
MKGGYPMRSKTPSYVVNVKLHLPKSVEAHVEKSFRITNSAYNEALSFGLRRFEVMKGNPTYQALLTERQSSSDKEQKKDIDRTLTQLRRDYDLTEYGLSNRLSQQRRIAGSAYRHLNAGELQVIAGQAYRTLEKVLFYRVKPHRVKFRSKYDSKVSFRNRVNTEGTRLVPSERKGYTYRLFLHKASTFVDIPVKAFTPYQQLSLMRSSRIKYVQVIRQTIRGKRVYFLQITCEGYPHAKISKGTGVLGIDPGVSTLAYVSPTEVALVDLVPSQVNRQERLIRSLEQGVEQSRRVNQPELYHADGTIKKGVKFQPLSKRAQRLQVRRQRAYRSLSEERRKIHGALINHLLSQASIIKIEDLSVQALQKRSRDLRINPKTNRPFSKKRFGKSIFRAAPGTFRQALLTKANQLGVEVQVISPQTLKPSQYNHLTQTFEKKPLATRLFDLSPEWTGVQRDLYSAFLIRHVEQGTYQEEELTSDFPHFYDLMTQFLQAPIKTSRLAWYLS

SEQ ID NO: 26174 - protein, 418 aa, unknown
  TnpB Polypeptide
MKVLLILKIVNKYLEVRIYPSQMDKNDNGEKIASINEIESNIGIYRFIYNKELAFINYFRQLLKQNGYEDKLWITQSSCDVILKMLRQEYAFLEKAESSSRQQSQKDLVTAFKRYFKHDLKSHYPVLKKRKNTQKFTFRIMNNNNNIRIQKDKNGYYKIKLAKLGLVKFKTSKEYKKLLLKGSNPDDECVKIKHVVVKRVNDKYYAVFNIECIHVPVKIIRPQQQLGIDIGCSKLAVFSNGKEIPNLNLEKETEKIIQYQKMMSHHKKDSNRYKKAKKLYHKWMRKLVNKRNDYYDKITTCIVENACFIAVQNENIIAWKHNKFLSRKLQLNAPRKFMDKIEYKAQWNNIGFVKVSKNFPSTQTCSKCRKINPNVGGIGNLGIRDWICPKCGTHHNRDVNAAINILNNGLEIVGTTMQ

SEQ ID NO: 26175 - protein, 401 aa, unknown
  TnpB Polypeptide
MIRRQAYKFQLKTNLSQARQMRSFAGACRFVFNQALALQKAKYEAGNKKLSYADLCAELLTLKSSNPWLGESPSQTLQQSLKDLERSYTNFFAKRADFPRFKKKGLSSSFRFPQGCKLDQANNRIFLPKLGWMHYRNSGEVLGEVKNVTVSHSCGHWYISVQTEREVSDAKHPSTSAIGVDMGIAQFATLSDGHVFAAVNSFKQKQKQLARYQRTLSRKVKFSQNWKRQKSKIGKLHQTIANIRKDYLHKTTTIISQNHAMIVIEDLQVKNMSKSASGNLNKPGRHVKAKSGLNRSILDQGWFEFRRQIEYKQVWRGGHVLAVPPQYTSQRCSCCGTVSKENRQSQAKFACIACGYQANADVNAAMNILAAGHAVLACGEIVQQDNSVKQELTEETSHEHA

SEQ ID NO: 26176 - protein, 366 aa, Vibrio sp.
MLLAHKVELRPSSQQEQYLQQLCGVSRHLWNQLLHHFSGEDVKWSKKSAREKMYSLREEYLWYSDYSANILRCSIDNLDNAYKKFFKTKKGYPKFKSKHQKQSFNIYESQKFKVDGRDFRIEKFNKSKKSKPIKMGEKLRFEGKVKQANVSFQNGKWFCSFLIEVEVYKGNFDQHGSVGVDLGIKDLATLSDGTTFQKSNKLSLSLKKLVKLQRKLSKKKRETNRYAKAKLSIVKLHFRIKKQREALLHNVSDELTSKYKTICLEDLAVSSMTKGKGKKFNRMVLDVGMYELRRQLEYKSLLRGVDIYFVDRYYPSSKLHYECGFKNETLKLGESTWKCGGCGQLVDRDLNAAKNILTEGLRLANN

SEQ ID NO: 26177 - protein, 416 aa, Okeania sp.
MKLVERHVISKSHYLWSEIDHKAFLSKNLFNLANYYYRQYFFCDQKKLNFNELYHKVSKTDDYQALPTKVSKQIIKRLDQSWKHYFSALREWKKQQNKFLGKPKIPKYKHKSKGRNILPYPDESIYKKALKKGICHLSMSEIKIPTSQTEIIEARIIPKSSCYLIEIVYEKQEEITNNQQIAGVDLGVNNLIAVTTNQTGISPLLIKGRPLKAINTFYNKQRSCLQSQLKNNHNKSNYHRLKKLTHKRNCRVENYLHTASKIVIDWCVNYEIGTLIIGYNQTWKQEIKLGKKNNQQFVNIPHYRLIEMLRYKAQLRGIKVIITEESYTSQSSCLDGDDLPKDGEQKPEFSGKRVTRGLYKTRENKLLNADVNGSFNIIKKVIPDVFDQGIKGLPFNPVVVDPLRMTNISGFLIQFE

SEQ ID NO: 26178 - protein, 383 aa, Actinocorallia sp.
VKLVVQVKLLPDETARAALRETLHTCNRAANHASRRAFETGVTGKQSLQRLVYAEVKAMGLSAQPALHAIRKTAGAYATLKANLKAGNYGREGSKRRKAAESKPIRFRKEAAQPFDDRCLSWQMDARTVSIWTVCGRVRGIGFQCSLSQLKMLTEHRRGESDLVFRGGNWYLYATCEVPEPELGDPVGFLGVDLGIVNIATTSDGHRYAGKHLNQVRHRYRRLRQRLQKKGTKSAKRLLRKLSGREARFAADTNHRIAKRLVTEAQRTCRGIALEDLGGIRDRVRLRKPQRVTLHSWSFAQLGGFVSYKAALVGVPVVFVDPRHTSQECSRCHHISRGNRPDQSTFLCTSCGFAEHADVNAGRTIAQRGGVVWAVSHAAGDAA

SEQ ID NO: 26179 - protein, 532 aa, unknown
  TnpB Polypeptide
MTVLSVSYFSMRTYQTRISVSSESEKALSAYASLYGRVERTLFSETIDKGVKPESVKSDYQRRFGLTARQFNAIYRNLKGKVSSIKELRKSHINDRADKIKRLEKTVSRMEKRISNIRDGRLKGHQDVADKKYASLKFSLHQKKRRLHALKQKQKRHIEDQKSGKVRLCFGSLKLFNAQFHLSENGYDSHEKWKVDWQASRNNQFYVLGSKDETAGCQGCVISQNDDGFTLRVRIPDAFVSDSKYIVIPITLNYGADHVRQALQNKQAISYRFLKDKKGWRVFISTEAVQKYTVTSTQAGAIGVDINEHHLAVTETDRFGNPSSSISIPLSTYGKSSSQSKAIIGDAVKALIAFAEDKGKPVVVEQLDFRKKKANLENENVKRARQLSSFAYNQILSFIKARCVDNGIECVEVNPAYTSVIGKCKFMTRYGLSSHQAAACAIARRALKFSERPNRRDHLASSLPARNRNEHVWSFWRKVARDKAVSKSLSLLSKAQSSTSRTLPAVMQLRNDMTGRACHVSQKHCSSGEMLA

SEQ ID NO: 26180 - protein, 366 aa, unknown
  TnpB Polypeptide
MLKTYKYRLYPTRNQINALDDMISRHRWLYNDSLAQRKSAYEERQESVLYIQQSTWLKTNRQEQDKFVSLNFSSCQRTLRKLDKAFQAFFRRIKSGGTPGYPRFKGYNRFDSVEFTYGDGAKLRDNGKLYIQNIGEIKIKLHRTVDGIIKSATIKRQAGRYYICFSVDTEIMPLPKTGTIIGIDLGISNLVTTSEGVFFEPPKHLRKSEKKLRRLQRSVARKTKGSKNRRKSVRNLQRLHEHIASQRSDTAHKIARELIDQNDVIIVEDLNTQGLVKNHYLAKSIMDASWNIFVMTLLAKAVEAERKVIKIDPKYTSQLCSQCGNIVKKDLSVRIHNCPHCNLILDRDVNAARNILARGLDKAFVA

SEQ ID NO: 26181 - protein, 201 aa, Escherichia sp.
VKRLQAFKFQLRPGGQQEHEMRRFAGACRFVFNRALALQNENHEAGNKYIPYGKMASWLVEWKNATGTQWLKDSPSQPLQQSLKDLERAYKNFFQKRAAFPRFKKRGQNDAFRYPQGVKLDQENSRIFLPKLGWMRYRNSRQVTGVVKNVTVSQSCGKWYISIQTESEVSTPVHPSASMVGLDAGMAELATLSDGAQSLSL

SEQ ID NO: 26182 - protein, 426 aa, Nostoc sp.
MKAALRRLRLSHVFNHAVVQYIVIINNKGVIKLLVLEYKVKAKKLQYLAIDEAIKTTQFIRNKCLRYWMDAPREVKIDRFALNKYSTELRNEFKFVANLNSMAVQSSAERAWLAISRFYENCKKNVSGKKGYPRFQHDNRSVEYKTSGWKLNPTKRRITITDKKGIGELKLLGKWDIQTYPVKSIKRVRLVRRADGYYCQLCINVEVSDIQPLTGNEIGLDVGIESFYTDSNGHQESNPKFLRQVEKSVKHAQRRIYKKKKGSSGRKKARAIFARKHLRISRQRNEHALEIARNVCKSNDLVAYENLQVRNLLRNHCLAKSIADASWYLFRQWIEYFAGLFGKVAIAVAPHYTSQKCSNCGTTVKKSLSTRTHVCSCGCNLHRDENAAINILNLARLARDGQSRSNAVGLVAATLLGESLLEQVTR

SEQ ID NO: 26183 - protein, 391 aa, unknown
  TnpB Polypeptide
MKSYKFKLFPTEEQREKLELSLDICRRTYNHLLSELSNGFRKGELSNYLLDLKVCYPEMKQVYSKVLQVENDRLFANLSGLGNSKKNGNKVGRLRFKGKGWKKTFIYNQSGFKILKGNRKDNQLHLSKIGTIKMILHRKLEGNIKQIIIKKEIDNWYAIIQTDAIIKIECGDKEIGIDMSPSKFGVRSDGVGMEMPKEIDVSLKKLKKAHRNLSRKKKGSHNRMRARRLLQKRYWRTNNQKVNFYHQTSYNLVKECKVIGIEDLSINGMMMGYYNAKNFQKSGWSTFITKYLAYKAENAGCQIWQCDRFEPTTQRCSCCGEINQTKLELKDRIFNCPFCGLVLNRDVNASKNIIKYCRLGTNLCGVDSSTQEIEQESVMKQEKRRLSSEKP

SEQ ID NO: 26184 - protein, 277 aa, Bacillus sp.
VKCYFPKNNKTDWTVERHRVKVPTIGWIRLKEYGYISKNTTVKSGTVYQRAGRYYVSILCEVKEVKPNSILNAVGIGIDLGIKDFAVRSDGKTHKNINKTVQVKKIEKRLKREQRSLSRKFENIRKRGEQPVTNKRANINKNILRVQQLHARLANIRLAYVKSIVNDVVKTKPMFITVEDLNVKGMMKNKHLSKAVAQQCFYAFKTWLSTKCREYGIELRQVDRFYPSSKICSCCGQKKSDLKLSDRVYTCDCGNVMDRDLNASINLLQAKKYTILT

SEQ ID NO: 26185 - protein, 385 aa, unknown
  TnpB Polypeptide
LLKSFKTEINPTEEQSIKINKTIGTCRYIYNFYIAHNKELYENGEKFMSGKSFSVWLNNEYLPNNPDKMWIKEVSSKSIKKSMEDAYVAFKRFFMHKSKFPRFKKKGKSDVKMYFVKNNKTDCLTERHRIKIPTLGWVRLKEKGYIPTSKDGFNVRSGTISCKAGRYYISVLVDMPNTDNVQYNNFGIGIDLGLKNLAICSDGSVFQSINKTFNVRKVEKILKREQRKLSRKVMSIKKGESTQKNFVKQKLKVQKLHQRLNNIRTDYLNKTIHSIVKTKPSFIVIEDLNVSGIMKNRHLSKAVAQQKFFEFKTKLISKCKENNIELRVVDRFYPSSKLCHKCGNVKRDLKLSDRTYRCDKCGYVEDRDINASLNLRDAKTYTIIQ

SEQ ID NO: 26186 - protein, 404 aa, unknown
  TnpB Polypeptide
MLVTKAYRYELDPNNRQRTHLHQHAGVARFAYNWGLEQRIRLFKELQGTDRFTDAIKQHKLLNSLKKSQFPWMYQCSKCAPQEALRDLHRAIHNFYHGMKTGRKVGFPRFKRKGVRDSFRLTGTIRFKGRRIQLPRLGEIRIKEKRERYCRGRILSATVRRRASRWYVSITVEEEIPDPKSPPGGAVGVDLGIKVLATLSDGTAFQNPLALGRKLRKLKQVSRSLSRKKKGSKNGEKARLRLAKMYLKIFNIRQDALQKLTTYLAKSHSRIVIEDLGVSGMMKNRRLARAIADVGFYEFRRKLEYKCIWYGSQLIIAPRLYPSSKRCSHCGHKKMELSLDQREYHCEQCGLKINRDLNAALNLVAVSLPETQNACGEDVRLHTDPLGLVKQTSTNQELNISPEP

SEQ ID NO: 26187 - protein, 389 aa, unknown
  TnpB Polypeptide
MKKAKAKAEPQFYTRVVKFQLLPSKAQEEYLKMYGMATSIIWNKMLGIAKEEEKPDFFKIALNIKGWREGDELLSKVNYDVLGYVKDQIMNGFYKKGGGKRLKFKRIKGMEECSFSFRRFPIDKTYKKWKVRLPSAKGGVEINRWVKFNPHRWFEEGEIKTATISLDNTEKWHMAINFRINRPLPKKKKFSKKNTVGMDFGSKTAITLSDGSKLNPPDTSKYDTQIERLQRKLSKKEKGSNRRRKARIRLAKWIKRRSNFISHWTHQMSFNLSQSDYNAFAVEDWNIQKMMIQNKANKDLPNKATKAFNRRLKTVSIGDFRTKLAYKSDLTGKTYIPIDPRNTSRTCSSCNNLYEDLNIKERSWICDSCGAENDRDINAALNIKNKAFK

SEQ ID NO: 26188 - protein, 312 aa, Psychrobacter sp.
LAAYIKGSGEYLNLHSQTLQAISEVHAKSRKQFKKAKLNWRTNNPKAKRRSLGWIPFKKTAIKHISTRQSGKKSLKSTLQFSLANRQKLIIDMWDSYNLALYSINTCELVQDNRGHWYACVTVKEFPKIKCGTGQVGIDLGLTESATTSNGDKLTIKQTQKWANKLAVAQRAKNKNRAKAIHAKIKNTRLDLIHKFTTKLVKDNSLIVVGDVKSRSFTTKKTKLAKSTYDAGWFEIKRQLEYKCKHAGCHLEIVNERYTTQTCSYCLKISGSSPKGRADLGIRGWTCAECGTVHDRDINAAKNILAVGLDRL

SEQ ID NO: 26189 - protein, 415 aa, Kitasatospora sp.
VTPRRVTTVQLRYNFRVYPTSGQRIALARAFGCARTVFNDGLRARQEAYAAGSPYIGDTELQKRVITTAKHTVERAWLGEVSSVVLVQSLRDLHTAYRSFFSSVTGRRKGPKVAPPRFKSKRDSRQSIRFTANGFCLRESGRLYVAKVGDLDVRWSRALPTVPTSVTVTKDAADRYWASFVVDTDPKILSELDTETGIDLGLTHFAVLSDGRKVDSPRFLRRAEKKLKRLQKSLARCEEGSKNRAKARRKAARQHARVADRRRDWHHRESTRIIRENQAVYVEDLAVSGLGRTRLAKSVHDAGWSQFVSMLEYKARKHGRTFARIGRFEPTSQVCSACGVKDGPKPLKVRAWTCRACGSVHDRDVNAARNILAAGRADRPNACGARVGRASVPAPRREAGTHRDGRPAVAENQAP

SEQ ID NO: 26190 - protein, 470 aa, Nitrososphaeraceae sp.
  misc_feature (189)..(323): Xaa can be any naturally occurring amino acid
MPLAKKCYHCRVIEDLTNTKLVALEQEYNNLQHYLQTKEDLGLYSANKQQADRFYKIVKKTSRYPISIRNDLIRIEHNPNTIAEYWVRIPVKLVRGGLWIGLIKPYEPIPKDAKICECKLYKRDNRWFLDVVVEKEIPEKLQYQNVIGVDMGIRHIATSVELANDLTKFYGKNLNHVRGHYFWLRRKLXXXXXXXXXXXXXXXXXXXXXXXXXXXXXXXXXXXXXXXXXXXXXXXXXXXXXXXXXXXXXXXXXXXXXXXXXXXXXXXXXXXXXXXXXXXXXXXXXXXXXXXXXXXXXXXXXXXXXXXXXXXXXXXXXXXXXXXDIVNRAIETNALIVLGDIKHLRRRRQNTKGRKFNRKLSGFQYYKLTQYIKYKAALAGIKVIQVSERWTSQYCRKCNRKGIRKIQGLFQCKKCNVRSENADRNAAFNIAYRGLGQVSSLGVTVNIPRTFPSVDRNAMMRKEATDFNQW

SEQ ID NO: 26191 - protein, 461 aa, unknown
  TnpB Polypeptide
MKATRIIKSKNLNQGKYEQLKKQAEQLGNIRSVVWHDFGSISGVSIKSDRKIRDQWLKEKRHRQVSANAWKETLRDSFGDIKGYREAAKEKVRKVIYRQNFSENEKIGFYKRLSSESWPNDNYLRRLMRKHWKHGRNHKNNQIVVRSDNYTTFQLGGRAWIKIPSLQKGKRIPIPLNTNVEPNGTLRLILNNGIVEIHYTVDIAETKNCGSATIGIDKGYTEVFVDSNGIEYGKGLGKILTKKSDQLKQKYQKRNKLKAIANKKPHKKPNIIQNNLGRKKLNRQDRKTKSQIQDIIYQATHQLVDKAEVIAAEDLTSPIASKKFGKNVTRRLSAWTKGVIATALDTVSRRRGSSVILVNSAYTSQMDSRYGILLGKRSGDSFHCFDGAVLQADENAARNVLARLHDPEIDRWTPYQKVKSILLKRTERHRLGLLNPDSSCNSIELSTESELPKNVQLCLSF

SEQ ID NO: 26192 - protein, 399 aa, Phormidium sp.
MFVLEYKVKPKPYQVEAIDEAIRTTQFVRNKVLRYWMDNRGVGKTELFRYNTRLRKEFKFVEELNSHACQTAVERTLRAITRFYENCKSQVKGKKGYPKFKRNTRSLEYKVSGWKLSEDRKHIVFTDKKGIGHLRLIGSRDLNYYHPEQIKRVRILRRADGYYVQFCVKLDPRLTVSKPLTPSQKAVGIDVGLKYFLADSQGNIEPIPQFYRKSERQLNRLNRQKSKKFRKGQPQSQNYRKARQRYARKHLRVSRQREEFAKRVALRLIQSNDLVAYEDLNVAGLVKNRHLAKSISDAGWTLFRRWLEYFADKYGKIAIAVPPHNTSQNCSSCGEKVQKTLSTRTHVCPHCGLVADRDTNAAINILKLGLSRVGRTRIHASGETPSWLVGEILSANGDS

SEQ ID NO: 26193 - protein, 359 aa, Paenibacillus sp.
MSQTITVKVKLLPTKEQIQLLQQSSHEYIRVVNTLVAEMVEEKKRLKKTTKDIPANLPSAVKNQTIKDANSVFSTKVKKSKYAIIPILKKPICVWNNQNYSLDFTHISIPFMVEGKSKRLKIRALFIDKDHRNVDLLKHKLGTLRVTKSSGKWIAQIAVTMPTTEKTGMRILGVDLGLKVPAVAITDHDHARFFGNGRENKYKKRKFRSVRQKLGKQKKVNAIRKLDDKEQRWMKDKDHKVSREIVNFAVENKTSVIRLEQLTNIRQTTRTSRKNEKNLHRWSFYRLAQFIEYKANMAGIKVEYVNPAYSSQTCPACSKKNKAQDRRYKCPCGFKKHRDIVGAMNIRYATVIGGNSQSA

SEQ ID NO: 26194 - protein, 433 aa, unknown
  TnpB Polypeptide
VIVLETDLTEDEKRHLFHQADLLRQCGNELLGIMKRHLDQLLRTKKCRGLRKSYGKISKSIKSLQQIKELSNVQKRHLKDQKKNLQTVSDQMNEMQEEYHITWEYCRNTMKTLRLKYEQTSVIALSRAEDIWAAVSKVLYSDGERLHFKKRGDLPELRAKQFHKEIIGRVKNGSLEFRYGKVSLPVIRKETDLWLMDELEAVESYLKDPSFHDAYAIDQMKHGEIVSTYRPCYASIVCKTIRGKLRVYLHLTVEGLPFPKRTKDGVIKHLCGDGIVGCDIGTQTIAYTSDHVVGLENLAERGNSIRCVERQQRLVQRAMDRSRRAMNPDNYNADGTIRKGKKTWIKSKRYQKLQLSYRELCRVSAENRKLAIHEQVHKMRSLGDVFVTEAKNAKKLQKRANPEDPLNKNGKPKRKKRFGRSIQNRCPGIRVAA

SEQ ID NO: 26195 - protein, 330 aa, unknown
  TnpB Polypeptide
MLRAIKVKLYPNKQQTQVITNYLGTCRFVYNALLAQTIEAYKKDKTPFSIKQANAWLLELKNKEETSFVKDTYSQVLQQTIMNLHCAFNNFFRTIGKKQYVGFPKFKSKKLHNDSCRFTNQSIKINGNHIQLTGKLKHIPFRCSDRDTKKLNTEKIVSATLTHPSNGNYYLSIVIDTEMVKPTLPKTKAVGIDLGLSHFAVLSDGEHIPNLRVQEKLKKNIAKYQRSVSRKVNGSHNREKARLRLAQLHTKVVNIRNNFLHKFTHMVANEYHTVCIEDLNVSGMMKNHKLAYSISDVSWHECVKQLEYKCNKVVKVGRFFGSSKACSVCG

SEQ ID NO: 26196 - protein, 380 aa, unknown
  TnpB Polypeptide
MDRTVKIQLHTTPEQAQALSDTLSQFTTAFNFVCATGWQSGEKNGVRLHHETYYQTKAACPGLVSDLLIQARVKATETLKSAFDRKAKGRKTSQPHSQLCPVRYNIHTYTLNWETLTVRLSTSAGKMSIPFVVPPYSAKYAGGKIATADLCYRKGRYWLHVVVSLPDPDIAPVEEVIGVDLGLNRPAVTSKRHFLGGRHWKEVDRRNFRLRRKLQSKGTKSAKRHLKKLSGRSLRFHRDCDHVLSKRIVQNAQPGSTIVVENLKNIRTTSKIKRKGETKRRLHSWSFAQFHTFLVYKAAERGINVVKIDPRHTSQTCSRCGHQHRSNRKSQSLFLCKKCGYCLNADLNASYNIRNKHLASLDRLLAGGQTSDCLSSQASA

SEQ ID NO: 26197 - protein, 390 aa, Pseudothermotoga sp.
VLRAYKYRIYPTKEQREFFEKTFGSCRFVWNKILEEKLQALERGERLPRITPAKYKEEFPFLREVDSLALANVQLQQEQAFRNHFKNRKMFGIPKFKKKKDKQSFTTNNQNGTVMLIAEYLKIPKLKTLIRMKQHRTFEGTIKSVTISKTKTGKYYVSVLVEEEPKQDYNNNKKNLICGIDVGIISFATIATDTGIVKIEYPKYLIKNEKRLKRLQRQLSRKQRNSKNYEKARIVLAKKHEYIRNAREDFLHKLSKTIIDDNQVVVVEGLNIKGLTRTKLAKHILDNSWSKFISFLKYKADMYDVKVIEAGQFFPSSKTCSICGYINKELELKDRVWTCPKCGTTHDRDENAAINLREYGLDLYNQLVGMEQPELTPVETGPLPQGKSGR

SEQ ID NO: 26198 - protein, 544 aa, Streptomyces sp.
VGTLREVEASFVVPGPAGVAIRDRLRVSEADAAVLTEVGVYLGSLAAGDLAERSRQGLGHDAASWAVRKRSLTGRSSARWAGSITKATHDQWALARRGQAAHMARLRGHIASIEARLARPLGAKADKREGLVRGYGSRGEWHAKSRRLQTLKDRLAVVEADRAAGRVRVVRGGKRLANTRHHLQAAGLDEQAWRERWRSERMFLAADGETGKRFGNETIRVTDTGQLSLKLPAPLARLANAPHGRYLLDATVAFRHRSQEWCDRVTANRAVAYRIHHDVMRGRWYVTASWQRAAAPVLPLQAALARGVVGVDMNDDHLAAWHLDVHGNPVGEPQRFFYDLTGTAQHRNAQIRHALTRLLHHARRCGAAAIAIEDLDFSDGTSREKHGRNKRFRRLISRFPTAKLKARLVSMAAEQDIAVVAVDPAYTSRWGAQHWQKPLTTPTRTISRHDAASIAIGRRALGHPIRRRTTPPPHHRSDGAGHRIVQARPEIRRREETRPHVPGPRTGCAPPGRGAKAGDQGAQHRSGHPAEHESWQQDSLPLSL

SEQ ID NO: 26199 - protein, 425 aa, Symploca sp.
VRQQLYRTLTTRARFSDEEKLFWEDQCRHANSLVNCAIYQIKQSHFDFLEEQGNAFTSYWRGDELRSGWKTYRAKANYSELCSTLKDNEHYRQMAAQSAQQSIKSVVESIASYNGLVKAYYKGEVDRPRLPRYRQKGGLAAVTFPRQLLKYKDGCIHPPIAKEIKPDLIADIKLKLPSFIDSDWVKEVTVRPCLGEFWIDWVIDDGKQPVEVNPNLDYSQAWGFDHGGNNWLTGVSTKGQSLILNGKRLSSMNQGYCRLVAKYKQGKSEFYWDSNLDRVQRKRNNQMRDAINKAARFMVNRCLADGIGNIVVGWNEGMKNRSNMSKRNNQNFVMIPTKQLIERLKQLCPEYGIVLTITEEANTSAASFLDGDSLPKHGEKPATWKPSGKRVKRGLYQSAYGFLINADCNGAANIIRKVATQLGVN

SEQ ID NO: 26200 - protein, 414 aa, unknown
  TnpB Polypeptide
LNTLRQRRGDAPVVGYQALCRELSLSGPGCSGELSVTGARSILRRYSDAWFNTNARRLSGDGSVRYPRRRRSLMPSRYYAGTFAIADRHLSLPTARRCPPLALRLSRPVPYPPGTVRSVTLLNVGPKLFVDVTAEVPVATYEEGLGPDPAKVAGVDLGIIHPYALTTAGAALLVSGRAIRAEHRLHLAENKARSRALASRAPKRGQAGSRRWRKYRARTRRLEERHRRRVAQATHEAARAVVDFAVKERIGTLVVGDPRGLLKRDSGRRQNLAVNNWRPGQMIAALADKAALAGIDVELVDERGTSSTCPRCGAKVAKPKGRTFQCGTCKLVAHRDLVGATNIAPRGSRGGDTFDLSGLEIMHRRAGRHLPGRTRRDPRRVSMDNHRRERVDLWPAVARSETIGESLGRVVSAA

SEQ ID NO: 26201 - protein, 414 aa, unknown; identical to SEQ ID NO: 26200
  TnpB Polypeptide

SEQ ID NO: 26202 - protein, 424 aa, unknown
  TnpB Polypeptide
MTENERLEKNNRIREKGKETREKRKSQVCRVYRVKIDISHLNKAQKEHLKMLFVEAKWLYNDALTFMKDHDISEYDTKIITVHGLDKDRNPITHDLQYISSQMRQSVISGIKSSLKALSSLKKTNHQVGGLRYKSEYASINLKQHKVTYRFYDEKHIGIQGFSKPLKIRGAKQFWNITNLELANAKLLNLPDGYYLAITTYQNKGGEKKKYKPEIGIDMGIKTTITTSDGRKFKVLIGESERLKKCQRLIARRKKGSSNRYRARKLVRKSYQKLGNKKRDAANKITHELLEHEIVYMQDENLKGWHKGLFGGTVQHSVLGLVKRKLMPHERVIVLPQKMPTTKYCPHCGKLKKDIKLSDRIYECSCGYREDRDIHAARNMILLSKQSTCGTQESNAFGEDVRRRQKCRNADLVELGSPRFYKRG

SEQ ID NO: 26203 - protein, 418 aa, unknown
  TnpB Polypeptide
MGSYEAVKVRLDPTPRQERMMASHAGAARFAYNAGLARVKEALDNGESADWSHYSLRRWWNANKDELAVNRTTGEVWWSQNSKEAYSGGLRSLSQGLSNWSKSRKGQRKGKRVGFPKFKSKNATMRFAYSTDFTAPTAGDPYGLKLPRIGRVHCMENVYKLVNGAHLVRVSVSRRAGCWYASLTVEREPTATQAPKGGAVGVDLGVKSLATLSDGTVVPNPRALNTKLSALRKAQRALSRKVKGSARREKAKGRVARLYARVADVRADAINKATTMIADTYGTVCIEDLHVAGMVKNHHLARSLSDAALGEFRRQLEYKTARTGAVLRVVDRRFPSSKTCSNCGVVKAKLSLSERVFNCDDCGASMDRDLNAAINIRVAGSAPETLNAHGGTVRRGSPSGHVALVPVKCEPSRRKRAL

SEQ ID NO: 26204 - protein, 417 aa, unknown
  TnpB Polypeptide
MRLSFKFKPKLNHKQLVIIRELAWHCSKLYNTVNYQIKNNKEQKPIYTQLEKQFKNNWHSEYLHSHNRQQALKQLAQDWKSFFTSLKDYKKNPQKYKGQPGPPNFKHLNSNPCEIIFTNLAIRIRDDKLLLSLSKRIQSKYNVKALNFELPEAVQSIVDLDVIQQIKIKQDHISKKWYLLIIYKVKEAKESKQSNMMAVDLGLDNLATLTFKNNSECYIINGKTIKSKNAYYNKKIAGLQSIRMKQQGTSKIKDTREIKRLRLKRRHYIRDYLHKASWKIVDLAVGNKVSTIVIGDIKNIKQSSKLKSFVQIPIQRLVELIEYKAKLNGIEVLKINESYTSGCSAVDLEKINKSNYDKSRRITRGLFKTNQGLLINADQNGSLNILRKYLKDKCILRPIKQARDNGYVANPSRLRVS

SEQ ID NO: 26205 - protein, 377 aa, Bacillus sp.
VKRSKTYKFRIYPNREQSIFFIKTFGCVRFVYNLMLNDRQSIYKKSLKDSNTALKFPTPALYKKEYKFLKEIDSLALANAQLNLEKAYKNFFRNKAFGFPKFKSKKNPVQSYTTNNQKGTIRIIENKYIKIPKLKSLIKIKLHRKLRGIIKSVTISKRSSGKYFAAILCEEDIQKMRKTNTCIGIGLGSSEFAILSTGQKIGDNQFTYGMEVKLRREERKLFRRFRLAKDKGIYLFNAKNYQKQKRKVAKLQEKVINQRIDFLNKLSTDIIKNHDIICMEELSEKGMRENYKLAKRVSDISWYAFVSKLKYKADWYGKKIIKVACDPLLNELCSNCGCQVEKNLLANREWTCSVCYNHQDIEINISKNILAEGLKLA

SEQ ID NO: 26206 - protein, 136 aa, Bacillus sp.
MTSTGKYYVSILTEYEKEIVQKEIETVVGLDFAMDGLYVSSEDEKANYPKFYHIMLDRLANAQRVLARRNTGSIRWNKQRTRVAKLHEKVANQRKNFLHHKSKELATHFDVVVAGDLNMKRMSQTLSFRKSVADNG

SEQ ID NO: 26207 - protein, 368 aa, Bacillus sp.
MILARKIRIRPNKEQEHQLWRSVGTARWAYNWTLGKQEENHKHGGTFLSDGILRKELTVLKQPEEYAWLYEVSNNITKQAIKDACEAYKRFFKGLANKPRFKSRRKSKPSFYNDNVKLKVRNNEVLIEKVGWMKTSELLPIDVKYTNPRIHFDGKYWYLSIGVEKEKPQQKLTSESLGIDVGMKELAMCSNGMKFKNINKTKAVKQVEKLQLQVSRKYEMNREGIRFVKTSNIIKLEKKIQLLHRHLTNVQDNHIHQVTTAIVKTKPCRIVVKMLNIKEIMKNKHLSKAIAQQKLYDFKIKIQYKCEKYGIEYIKVDKWFPSSKMCSSCGEIKKTLRLSKRIYTCDCGHETDRDLNASINLSRYQLAN

SEQ ID NO: 26208 - protein, 446 aa, Abalone sp.
MSTQTAPELSTFQVRLKPTPAQKLVLNLMIKVTNHAYNWCIHLVETKGFKPKQYDLEKVVGKTNSKDVDPDLRMPDDDWFFDNKLSRIKTRAVRQYASDYQIGLKKVKKREYASKMRVEEGKSALEITPGKNLPTEFKTELENEVNGYIAFQKECVNPMSELQIKRYKPKKPEMCLMIFNTSMKGPVLLSRPVSRLPPLDHDMKIIKRPDKKFILCIPCKQSYTRKDFSATEKTFAAIDPGIRTFATVYEPENNNFIEFGNESWFKSSKIQKIQKQIDETNALLTKVRQRGRGAAIIENYERRLKKLHFKIKKKVDGLHGKINGHIRKNYSQVAWGDMAPKQILMKDGLTHGTKRKMQMLSHGRQHEKLARIEGVTMQNEKYTSMTCSRCGYVNKKLGSASRYVCPNCEQDIGRDENASINIWRKYTGTFFRTIGGEHVYEDDVKK

SEQ ID NO: 26209 - protein, 356 aa, Syntrophothermus sp.
MIVVHRFHIEPTKEQEQKLFQTLALCRRLYNAALKQREICYRQRGKPPSCTVQKNELPALKKELPEYKQVNAQVLQDCLQRLDNAFERFFGGLAGYPHYKDQVHYRSFTYPQADKQDHFKKPGYIYLPKIGYVKMKAHFEFDSGKVNRINVKYHNGKWYVNLTSEIQEAEAVEIVNKVGIDVGLLTFAVLSDGTKIDNPKYFHKSERKLARLQRQFSRKKKGSNNREKAKAKVTRLHDKIANQRKDFLHKTSYGIVQKYDLIAVEGLSVKNMIKNHHLSKSIADAGWGKFISYLEYKCLKYGKKFVKVPPGGTSQTCICGAHVPKDLSIRVHNCPECGLIADRDVVSAMVILQRAS

SEQ ID NO: 26210 - protein, 565 aa, Syntrophothermus sp.
MKKRKKELINPKSGMRYTVCGEFFPEVYPAFRAERWSRGEETPLDTEMRLFGACMRWAFNRLQEGYTREELKKQGQKTFGLNSRFADDAILKAKEIIVSQKEQLNREIKETEAKLSRAKKKLKQAEASYKKAIAANDPVRIEKAKLAIRGRRARVKKLSDKLEKLKSYRDNNAIPKVVFGGRSLWKRVCKGRATKKEWQNARQNRLYARGDKTKKGNPNIKLSWRNGEFYLAVTVSHLSEQKEVDSAGRPLMTRAPKASGKLWLPEKHRVKVLELLLSGAPYSVELIKGSDSRYRARITFTVESPKTQTHPNQGYLGVDTNPDGVALANVNYFGQPEPWPDGFIVPHPKALYKYAGEFQITIHKNGFLYLTVPELAYGRGHRRIYLTGVLAKVVTDIAKTIGKPIALEKLEFSKDRLDTNKKFNRMAANFPYRKVTEAVIRRAFKEGIGVKPVWPAHTSTIGWWKYMQQYGITVHHAAALVIARRASGFKEYITRELKQKIQSIREELNQKVNSLPGEGKGMTRKAKRLFKRLEEKISFHNGLTRFKQESFYSVWHNLKELALLK

SEQ ID NO: 26211 - protein, 410 aa, Syntrophothermus sp.
VPLIALKAQVHADPQTEAVLKDAMFCATKVYNGLLWHLRREYEETGKVDISRKNLNRILKELPRAKGYYSMSVQLTRDEVREAYRSFFALKKKGIKQHEAPGFRRKGCLSPLKYVQSGFKIDGDRVTLSLGTGREDGVKQVSFRISQRPDVEYDRVRELSIIYDKVSGRIEARLMVEVKPCENNGTGKVAVDLGETILMACVFDDGTVLLYSGRMIKAIRRYWQKVRANLQQNSRRWKQVAHLEKKQVEQLLHVATSHFIAECVRRGVKEIAIGDLNGIREGIDYGDRLNQRLHTWPYRKLVNMLKYKGALVGITVRDDIDEENTSKTCHACGTVSSSNRKHRGLYVCSCGWKAQADINGALNIYEKVYQVSPVKGSSGRVTRPAVVSFLLGWHGVAEPKRRNKALRASA

SEQ ID NO: 26212 - protein, 460 aa, Syntrophothermus sp.
MPVLKNVISSRQRIKRFITGTPEMIRQTEEIYRAVLGFYLNVIHDNLDKLPEWDRNSGTRALEKLTVRTEPRTNRKTGEKFGGNPNPLYPIDTVCPKFPAYLRRAIIAKAIGMAKSWYSNYQRWLRKKERMKARNERRVAEGKKPISFDERPPKYPAAGNVDITFYKGDFKNLSLKTNTIQLKVWDGSDWRFITVEVKPTSHSRKLHLDDSWEMTVPSIYEKEGIFYLVTAFEKKTNVIKFADYYLSKNPKVLAVDLNLGRKNRAVCALVGKDGTVHKVRHIGLAACNTTDVHHLLGLIARNVSGLGIVPKGHRPCKKLWRKVHAANDNYAHHLSKRLVDLAVEWGAGVIVFENLKRFRPDRNKHGSARMRQKVGYWLHRRVIKYTMYKAKARGILVALVPPRDTSNRCSLCGSLETVRNGSVLKCKNCDTLHNSHINAAINIGRAWFIREEKRLRQKIA

SEQ ID NO: 26213 - protein, 335 aa, unknown
  TnpB Polypeptide
MQKHFVKRIKRNLLYSHNSIEVLQRLDAAYQRFFKKLAKRPPKFRRAADFQSFVYKLHYGYKIDGNCFTINRLKKTYKFHKSRDFNGAIKTVRVKRDPCGDFWLYVTTDAKVESSNTTHDGAVVGIDFGLKTYLTLSDGRVYENPQFFKQTLRDIRKVHRRLSRSIKGSNNYRRRRLELGRLYRRISNHRDDYQWRLTHELCRRYSTICLETLSLEGMRRLWGRKLSDLSHASFVFRLEHVAVKYNTNVVHVDKWFASSKTCSGCGYVNKELRLVDRSWTCPECGMVHDRDVNAAVNILALGVGNALRSVSVGSGGRVPRRRHGDPNNSFMDKTS

SEQ ID NO: 26214 - protein, 278 aa, Planktothrix sp.
VVCRIKTIQGGSFKLIKHRNKWYAYLSITEDVPEVETEKTLGCDRGQNNLAVVAPKEGFGKFFNGQSVKHRRRYFQQRRQQLQEAKKFRALKKWNKKEQRWMEAINHTVSRRIVRFAEYHNADIVIEDLEGCRKTMKQSQKSRSDSGESRHTWSYYSLEQKLNYKLALKGLKLIKRPAPYTSKSCSTCGVIGKRNRHDFNCPNGHYHNSDFNAARNLSQWDGFACDLNLKRDASVMDSSGLNYGVFGAPPNSVKNNQKEYIQLSLFDWARYENPTPLA

SEQ ID NO: 26215 - protein, 302 aa, Planktothrix sp.
MEITKVIRKMGLKPRRFTTALIVNLCCNISQSCAEIYSIRSKARGKAMLVFEFKSYGKASQIEAVNEAIRTAQFVRNSCLRYWMDNKKIDKYDLNKYCAVLAKNFPFANELNSQARQSSAERAWSAISRFYENCKKSIPGKKGYPKFQKNCRSVEYKSTGWKLADDRKSIKFTDKKNIGELKLKGTRDLHFYQISQIKRVRLVKRADGVYVQFCVDVDRKENTKPSGNTIGLDVGLKEYYTDSNGVMVENPKFLRQGEKVLKRSQRRISRKVKGSKNRGKARQILGKRHLKISRQPIRLRSG

SEQ ID NO: 26216 - protein, 407 aa, Okeania sp.
MLVYEMKLKGTENQYRRLDEAIRTGRFVRNSVIRAWLDGQVKSRNDAYKHCKVLSDNSEFPWVSRLNSMARQAHAERAWASIERFYKNCRQKIPGKKGFPRFKKYQVRASVEYKTSGWKLSEDRRYLTFSDKFQAGTFKLWGSRDLHFYQLEQIKRVRVIRRHDGYYAQFLIDHEREEKKELTGKQTALDVGLNFFYTDCSGNQIDNPRFLRKDERKIKKWQRRLSRTQKGSQNRSKVRNKLGRAHLKVSRRRNDWVCKLAQHVIQSHDLVAVENLRIRNMVKNHHLAKSISDAAWYRFREWLEYFGRIYGVPVIAVEPRNTSQNCSNCGEKVVKSLSTRTHRCPHCKYETDRDHNASRNILKAALKQLSNTVGQTEINASREIDLCYVGETQPSKSARTPRKRKSK

SEQ ID NO: 26217 - protein, 395 aa, Caloramator sp.
MIKTYKVMLLPNNKQKTKLFECAGVARWAYNWALEQQQINYKNGGKFLDDKVLRKRLTELKQEEKYKWLNDYSNNITKQAIKDACIAYKNFFEGRAKFPKFKSKKKSKQSCYQDTDKVVITDTHIKLEKLTTSRKKNKQKLNWVKLGETGRIPIGKNIKYSNPRITFDGLNWWLSIGVEENSKQDNIQCSEGIGIDLGVKDLAIVSTGQKFKNINKSSKLKKLEKRLKRLQRKLSKKYELNKIQTEGGGYRYRKTKNIKKLELLVLKTQRRLKNIRHDYIHKITASLVRTKPEYVVMESLNTCGMLKNRKLSKSVQEQAFYEFKRQMEYKCELSGIKFILADRFYPSSKTCSRCGSVKDNLSLSERVFVCDKCGYVIDRDLNASINLKNYGKSIA

SEQ ID NO: 26218 - protein, 400 aa, unknown
  TnpB Polypeptide
MTYKLELKLNKEQQKLINSYIGVSRWVYNKFLEINNNNYDKNADIKYMDAYAFSKWFNNEYLKQHPKDLWIKEYYAKHVKQAMIDADINMKAFFRHERGRPKFRSFKKHQGSYYFCSDNRQHNIKRDDYKIKLPKIGFVKYKERGYIPIGDEFRIVSGRIKERAGRYYLTALVEQPDFKKIELIGESIGIDLGIKDFAILNNGVVYKNLNKSIRIRKFRKQLRRLQRKQSRQYQDYKRRLRANNYEKRATTDFNLAKTQNKILRLNSRITNILNDYQNKIIADVVRTKPQFVAIEDLDISGMVKNHHLARQVQQQKFYRFRTRLVYKCQWLGIPVHLVDRFYPSSKTCSQCGFYNEKFRKMNQKFLNIRAWDCPNCGSHLDRDINASENICITSKFKLAY

SEQ ID NO: 26219 - protein, 373 aa, unknown
  TnpB Polypeptide
MDVLVLEREAWNFISQMVFDKKITPSLKTIHNECYYACKEKFPTAPSQMIIRSEKSVLATFRSINSNKQKITKSPVRKKLTIQLDKRLYSLKENCNIRITTLKKNYPLQVEFQSYAKLLEMFDSYEVYDPSLFVKDNVIWIGFPFRSPIKTVMENKTSTGVDLGINRIAVTSDGIIFRDKHYNGLKRKVRHLKRELNSKNDLRKEGKGKTKAIRGKLRKLRNKEKNLSKLAAHRLSKQIVETSSGNVIVFENLKGIKTNTKKGNKFNNKQSQIPYYMIREFTTYKAQLSGKRVVTVNPAYTSQIDFRTGKKDGTRQKGRYVGVDGKILNADINAALNIAKKSKLPVSCVSNVIYGQGAINHPYFCKSSNSLVV

SEQ ID NO: 26220 - protein, 465 aa, Halobacteriales sp.
VKRTNTFTVRPLSGDGEQLLRDLLDASAALWNEVNFQRLMRYNNENGFEGDVWDANTGALEGKYKGVLGASTAQQVIQKNSEAWRGFFDTKNKYHDESNTSVTEHPEPPGFRGNEDDGRQLKTVIRNTSYTVEWGERSRLEILVGRELKDQYDHTGRLRLEIAGDPNWPDYEKQGRLDLWYDETDSTFRASQPVTVSDDARDTPLADETAALDIGANNLVACTTTTGEQYLYEGRELFQRFRETARKIARLQSKLEDGRYSSKRIRRLYRKRTCRRDHAQEALCRDLLERLYAEGINTVYIGGLTDVLDTHWSVETNAKTHNFWAFKKFAERLACTAEEYGILIEVRSEAWTSQECPQCGSTNRTIRHQDTLTCPCGFDGHADLTASETFLRRHIEQAVRPMARPVRFEWDDHRWSELPHSHESPKEQRTDPSTVHCDGNVASGVVRKSEISVMTRISDSRTKSA

SEQ ID NO: 26221 - protein, 421 aa, Halobacteriales sp.
MADQVVTRTLKASVSNHSQVGDDLDSHGFAASKLWNVGRWTISRVWDAIDHIPDAEELCSYLKTHDRYADLHSQSSQRVLQELGEAFVSWYEQGDSDANPPSYRKHSDTHPRSTVTWKNQGFKLDTKYGRVRLSKGRNMKPSPYAADYILCEHRLQTDDSQTLADVGTVQTVRAVWTGDEWELHFVCKMRVDAPDTPGEKTAGVDLGICNTAAVSIGDETLLYPGNALKEDAHYFQQEEYGTEGEDGPSNHAEWARRKKSRRQDHFLHALAADVVQQCAERDVGRIAVGHPKHIREDEDWGRHGNKRLHDWAFETLLSHIEYKAEDRGINVERVDEARLKASKTCCECGTGADSNRVERGLYICDECGLVANSDLNAAENMRATVTPNPAMDRSNGCLAQPSVRLFDKSTGRVRPQEQVVP

SEQ ID NO: 26222 - protein, 421 aa, unknown
  TnpB Polypeptide
MGGDGERTVLTLKAKIYPDSEQERAIAACIEGYRRAYNYMVLYCSFSLRDFGRLPSFAELCRFSTLIWKRLPSIRGMYNNSMHDAARRALTAYRACIERGRGRPRFKSVRAARSYGYPKPQDFRLERKGGRIRLRLGKVGRVRGSRQEPLPGDPRTCTVVRKDMGTHYDYYACVTFDMGAGYGRGEEWPERDVSSPVGIDLGVSHVAAFSDGAVYDNPKGFSRDLKRFERLHRRLSETLPGTRAYDKARSRLAHAYERLTNKRKQMVEQVSHDAVFLHGGIVMEDLSVQQLRSISMSRRMSRLYADASLGMIRARIADKAQSAGRSVVLVDPRGTSQLCSRCGLYVEKGLSVRRHECPRCGLRIDRDVNAAMNILERGSARDPGPVRGPNRPAGRHGPADPAQKAAGRLPDLYHKIQELEF

SEQ ID NO: 26223 - protein, 456 aa, unknown
  TnpB Polypeptide
MEITSSYQAEILTNADMKNTVQIYRRALAFFIDVCNKEWTNISPIDTQQKRQRYIERLIHPTKSNPNPKYPFDIKGSEYYKFPSYLRRAAINDAIGAVSSYRSNYTNWQNDGKKGNAPILQHDRHSMPVFYNKNMYKETAPKNAKYPKGISPDDENVRWLKLYKNKDWIWAPVKLRRTDINYINKYWGACKDKSAPTLEKIHNKYYLRFSFTETIILSDTPIAEQIICAVDLGINTDAVCSIMKADGTILARKFIDFTSDKDRMFHAMNRTRRKQSKYGPKSTRGLWAYVKRLNEDRAKKISAAIVEFASQHSVDAIVMEHLGFKGCKKRGSKAQRLSIWNHGIIREKVEQKAHLLGIRIATICAWKTSVLAFDGSGSVTRDDNNHALATFTTGKQYNCDLSASYNIGARYFIRGLLKSLPATEESRVKAKVPDAGRRTSCTLSTLRALAKELSAA

SEQ ID NO: 26224 - protein, 429 aa, Clostridium sp.
VVELMAKGKLKDKLFLSQRQQLKHLTKNEYTILKDMCFMSKNIFNVALYNARQYYLNEKKYLNYESNYHLCKDNENYKKLNANMAQQIIKVVDRSFKSFFALIDLAKKGGYQFNQIKLPHYLKKDSYFSLIFSEFNIKNGYFTVPMSPAYKKKHGKIMIKVPSNLEGKKIKEVRIIPKSNNARFFEIQYIYECTETQRDLDQTHSLAVDLGVENLATCVTNKGKSFIVDGRRLKSINQWYNKENSRLQPIKDKQKIKGITKKQFLLTRKRNNQVKDYLNKTARCIIDYCLNNNIGTLIVGYNPTLQRETNIGKANNQNLVNIPIGELRSKLEYLSQMYGINFKEQEESYTSKSDFFANDILPGFDVKAQGSYTFSGIRITRGQYLSSNGKIYNADINGALNIMRKSNLVDVTILQASGVLDMPLRIRIA

SEQ ID NO: 26225 - protein, 437 aa, Thermococcus sp.
MRRTVTIKLQPSKEQEKTLFELADIGAKVWNRVNYLRRQEFFEGKPVDFLKTEKIVYEEFKKEIGSATVQQICRKNAESWRSFFSLLRNKRDGELPKWLKPKPPNYLKDDRKRKLLIVLRKDQYKIEGNKLILKGLGKFKHLEIQFKGRIHLKSKQGRLEITYDPPAKRKWYAHISLTVKEKLINDEWVKVPRQPLGNLSAGIDLGVNNLMAVYVENGESFLVNGKPLKAIDFYFRKVIAEYQSKLNKSGCKRSRKLRRMHEKAKLQARHYINTAVRQTLERLYQLGVGRIVVGYPKGISRNSEKGKRQNFILSHVWRFNTVIQRLKEVAEEYGISVVVVNEAFTSKLCPVCGKPHNGARFVRGLFKCPATGLVFNADLVGAFNILRKVVKTITPSLGGLYAQRRGNWGKTVPEGSKTRFLVGFNETPQTSPPLARG

SEQ ID NO: 26226 - protein, 445 aa, Thermococcus sp.
MKRSVTVKLQPSKEQEKALFELAHASAVIWNKLNYQRLKQFKEFGRIDFNGTEKEAYHEFKNWIGGSTVQQLARKNAESWRSFFALNRKKKNGELPEWFRPKPPGFVRGENGRKVFLIPLRNDQYRIDGNVVELRRLGKFGRLRIQFKGKIYLRGKQGRLEITYDEVKRKWYAHISITVKEKLINDEWVKVPKQPLGDLSAGIDLGVNNLMAVYVENGKSFLVNGRPLKSIAFYWRRRIADYQSKLNKSGAKKSKKLKRMHEKAKLQAKHYINTVVRQTVERLYQLGVSTIVVGYPKGISRNSDKGARQNFLLSHVWRFNTVIKRLKEVAEEYGILVVLVDEVFTSQLCPLCGQRHSNGRIFRGLFKCRGEGVVMNADLVGAFNILRKVVEKITPSLPGLSAGRGNWGKTLPEGFSEPPSKRVMRITPQTSPPLARGFPDGNPTL

SEQ ID NO: 26227 - protein, 358 aa, Exiguobacterium sp.
VSQTLTVNIKLLPTREQQPILESMMGDYIQTVNQLVSDMVEAETMIKMTSKNVHVRLPSAVKNQAIKDAQSVFKKAKKSQFGIIPILKKPYCTWNNQNYSFDFKSISLPIMINDKAKKTAIRAEMVDQDNRNFSLLNNKLGTLRIIKKSNKWMAQIAVTILTTEKTGIKTIGVDLGLKIPAVATTDCDRVRFFGNGRENKYTKRKFRTKRKDLCQKKKLKAIKKLDNKEQRWMQDKDHKVSREIVEFAKENNISVIRLERLANIRQTARTSRKNNKNLHTWSFYRLATFMEYKAKLEGIKVEYVNPAYTSQTCPSCGKRNKAKDRTYSCSCGFKKHRDIVGAMNIRYAPMVDGNSQSA

SEQ ID NO: 26228 - protein, 360 aa, unknown
  TnpB Polypeptide
MNLTLTVKLQPSRDQAVALLETMDRFNAACSAIAEVAFRERTANKIRLQKLVYYDVRERFGLPAQMTVRAISKTAEAYKRDRSKKPVFRPHGAIVYDQRVLSWKGLDRVSILTLKGRQIIPVVFGEYQAARLKHIRGQADLIYRNATFYLAVVVDIPEPPLDEPKDWLGVDLGIVNIATDSDGEACSGGQLNGLRKRHAKVRARLQAKGTKSAKRLAKKLSGKEARFARDVNHCIAKTLVAKAKGTERGIALEDLKGIRGRITVRVRKAQRRVQQSWAFHQLRFFVEYKARLAGVTVVVVDPRNTSRTCPACGHVAKANRRTQATFCCVSCGFAGPADAIAAENIRRAAVMQPYAAGACA

SEQ ID NO: 26229 - protein, 474 aa, unknown
  TnpB Polypeptide
MALRVVSNYLRLPQKTFWIIDTLAYHAKSLYNVGLYNVRQHYATHQENCQILQGIRLDHTSKVDILVGSYLPFTRKKDFPFKEYSNYTQSKPNENFSLLHNDPAQQTLRSVEEAYKGYFELLKQYRKGKLENCPHPPHYLPKDGRFKLAFPRAHLTIRNGSVTLGMSYKFRKLHGLTGKELTFPIPPCIKPHQIREVTILPVNGGKAYKIEFCYRVPAKPKNLDPNQYLAIDLGLNNFATLVDTATGAAVILDGKRIKSINRWYNKENARLQSIKDKQKIEGITKRQARLLKKRDCRITEAMNRYVAWIANYALQHRIGTVVLPRWDGIKDKINHGKRGNQNFVQVPYHKFRQKLKSKCELYGIRFDDTHSEAYTSQVDALNLDPIRRPPYGKTRRIKRGLYRSALGTLINADVNGALNHLRKVAGDSVIPRIIGRGRVNRPVRIRTAFERSTFAPIKLQPCTPQGIPAASPLR

SEQ ID NO: 26230 - protein, 398 aa, Methanobrevibacter sp.
MKKAAGMMIKTIRVMLLPNNKQKTKLFQYANTARFAYNWALAREQENYKNGGKFISDGDLRKEFTQLKKTSEYAWLNNVSNNVTKQAIKDACEVYRDFFKGYTEFPRFKSRKHSVPKFYQDNVKIQFTDTHVKVEGFATSKKKNKQKLNWIRLAEHGRIPTDCKYMNPRIKYDGVNWWITVGVECKNSTSFPQNEGIGIDLGIKDLAICSDNVVYKNINKIQKVKKLEKRKRRLQRSISRRYEKNKKGGSYCKTSNIIKREKELLKLNHRLTNIRQNYLHQTTSEIVNRKPRFICMEDLNVKGMMKNRHLSKAVQQQCFGEFRRQMEYKSAWNNIPVIIADRFFPSSKLCSCCGNIKTDLKLSDRIYKCECGNVIDRDYQASLNLKRYGEVVLEQSVA

SEQ ID NO: 26231 - protein, 455 aa, unknown
  TnpB Polypeptide
MHLQNMLTTDNKLIINKENYKPFWDNSCDMISSCLLSHIDIDSAKDIDIDIKSWFPENHKFNFNLNDVPETNLYKENISITPIIRDRKIRIYPTQQQKTLFKKWIGVSRKFYNETVSIYKEGSDKKWNKVYQDIIEKFKDLDYIKSVPYQVKKGAVREHDNALFINKSKNKKSGKPFVMKYKSKKNPKQSCFIPKTAIKSAGIYHTIAGKLKMKEKEWFINSDNKPLDNICSCRLVLEHGKWFIIIPKKIETKNIDNQDGIVAIDPGIRTFATYFSTDGSFGKLGKNAFERILNLNLKIDKLISRLNKEKDKKKKSSLKRSINNTRFKIKNLINELHWKVIRFFTSKFKTIIFPPFNVSEMVKKSKRKISKKVVRSMYCFGFFEFKERLKMKCDEYGLTFIESSEAYTSKTNSFTGKLIENLGSKESFAYDNILIDRDINGARNILIRAMRDASV

SEQ ID NO: 26232 - protein, 497 aa, unknown
  TnpB Polypeptide
MQNCQVRAMKAQGRVNSPAALRRLEQVLNQLRELHDACLYQWRLAENNHEPKWFDANRQQKELTLMRAHSPEHDNVLRRLQDNVIRHTAARWNKYLKDENTGRPRYKTGRFRTIALDSPQGRVIRFTATGKPVLHINSLPAIRLLTSQQIPSDRQPRAVRITLKGRMIHVRLSYQFELPERLEPTLATSPVGVDLGIALSMATSTGQTFRSPKQAYLQTQERKARRKLSKVIAAAMATGTAGFRAALDADGRQRLTKKGRPMRQLVWSSGKPTKSYLKARRRLSAITERLALLRREFRHRVTTSLIEKAAAEGRDLLAMENLQVKNMTASARGTVEKPGRNVRAKSGLNRAILQEAWGETLTMLEYKAERAGIASVRVYAQATSITCSCCGHRDPKSRTSQSRFKCTACDYQANADFNASLNIADRGMLYFQKRKGLSIEDLRQARRDESHSGGTEGPETGPAGHPASQTSQESPINASASVLTRRDPAQAESFAIF

SEQ ID NO: 26233 - protein, 254 aa, unknown
  TnpB Polypeptide
LQNVQIRVDLAFKAFFRRVKAGENPGYPRFKGKGRYGVSRIHRLVSTSMMPARTSLYASKIGDIPIVLHRPIEGNIKTLTIRRSATGKWYACFSVEYEPSPVQQNDGEIGVDVGLESFATFSNGEKIENPRFFRTDEKALAKAQRKLSKTEKGTPERKRARKVVARIHERIANRRLDFAHQTSRMMVDRFGTIVFEDLNITNMQEKHCRCRLESVHHDHREQSGRGWFSRDPGEPQKYVSAVFLMWYDRQKDAL

SEQ ID NO: 26234 - protein, 404 aa, Streptomyces sp.
MIRAYKFLMRPTVRQTQALGEMLRDHCALYNGALQERRDAYRHASKTSVKYGQQSAQLKDIRGFDPERQGRWSFSSQQATLRRLDKAFAAFFRRVTSGETPGYPRFRGVSWFDTVEFPKDGDGVRWNSTPHGPITRVRFQSVGHVRVNQHRPVVGKVKTVSVKREGRQWFVVLTAEQTQPEQLPATGSVVGIDLGLAHFLTDSNGEHVPNPRHARRAATKLQAAQQALSRFPRRKAKDRTANHQRAVEKVAALHGKVRRQRLDHAHKTALDLVRAHAVIAHEDLKIRNMARSPAPKHDPDQEGVFLPNGAAAKAGLNRSIADAGWGVFLTILHAKAESAGREVIAVDPRNTSRRCPECGHTEKENRPTQEKFHCVACDHTAHADTVGAINVLRAGLVRRDANPA

SEQ ID NO: 26235 - protein, 404 aa, Streptomyces sp.
VIRAYKFLMRPTVRQAQALGEMLRDHCSLYNGALQERRDAYQHVSKTSVRYGMQSAQLKGIRAFDPERQGRWSFSSQQATLRRLDKAMQAFFRRVKSGDTPGYPRFRGVTWFDTVEFPKDGDGCRWDSTPHDPVTRVRFQGVGHVRVHQHRAVAGRVKTVSVKREGRKWFVVLTTEQDQPEPLPATGSVVGIDLGIANFLADSNGGFVPNPRHGRRAAQKLQAAQQALSRFPRRKAKDRTANHQRAVEKVAQLHGKVRRQRLDHAHKTALGLVRAHDVIAHEDLKIRNMSKAPAPKPDPGRPGTFLPNGAAAKAGLNTSINDAGWGVFLTILHAKAESAGREVIAVDPRNTSRTCPACRHMAKENRPTQEKFHCVACGHHAHADTVAATNVLRAGLARRNANPA

SEQ ID NO: 26236 - protein, 500 aa, unknown
  TnpB Polypeptide
MAKATKTIQHALSYQSTHAAWFAENQAVYNRVVAFYFEGINAHEKLIELPNKHALTALEKLTHQTLDTPEPPFPLSEIADALPAMFRRAAINAALGSARSFFAHVRKWKAKKAKAEAKGKKCGDRPPVAPRTWKKAVSFYAGMDKDRTETSVMLKVWTGACWAWLKVRTLGREVEDGFELGSPSLIRKGDTWWLHTPIEKTFTGPAKIAEQLTNTTTALCAIDLNIGATLAVCTIQTVEGTILATTFITGGKRIHGIRSRQLGRIARNRSKTGTIAEGEQDNAALWHRLRHADEAVSHRVSTRIVQFAKAHGASILVFEHLGNLKPEKGKYSKRGNMKRAYWMKGRMFTYAKYKAWNEGILTSRVSPRNTSRECARCHAPIIRYAQGMRRAEGYTVGTPLMVCPECGKRDNADRNASIVIGQRLIARFQEKPPTLGARQQEETKVSGAIISQDAKEDKRPSTSVFTRHGDRRGHGTAQREGRGMDTPSRSIPTQLRLLNE

SEQ ID NO: 26237 - protein, 158 aa, unknown
  TnpB Polypeptide
MRHTPSSRRRLKAIGQRENRWMQDINHQVSKALVENNPKHTLFVLEDLSGIRNATERVKTKDRYVSVSWSFYDLEQKLIYKAKQNQSSVIKVDPRYTSQCCPCCGHVEKSNRNKKIHLFTCKKCGYKSNDDRIGAMNLYRMGINYLADSQVPNTVVTE

SEQ ID NO: 26238 - protein, 438 aa, unknown
  TnpB Polypeptide
MEEKKKARKKKDRSQIITLIERHIIRKGHEYYNKCDEITFLAKNVYNSTLYEQRQSFINGNFKNYYEVNREFVNNNQRDYRALPTRVSKQVQMLSDQSFKSFFALLKLKQEGKYDKEVKLPKYLHKKKGRITAAYEKGAISLKKDGYVSLSQTGIEIKTKISREQIIGARIVPKKGYFVVEILYDVKKAEKKEKQNRYAFIDPGMNNLMTVTSNVFNPIIYNGRKIKSINQLAHKNNAKRQSRMPLMRFKNGATIQEKIAQVEKGLLEKDQSKGMKGLWRKRELRIKDSFHKITRDLVNQLVSHNIDTVIFGYNKEQKQDIKLGKKTNQNFVSIPFAILRQMLEYKCRLVGIEFIEQEEAYTSKCSFIDKEELKEKEEYLGERKKRGLYQTQSGKIINADINGSLNIGRKYLEKKGLYTEELHKELISKMHNPKRKTI

SEQ ID NO: 26239 - protein, 401 aa, Gemmatimonadetes sp.
MGTLTKIGGYKYRIYPNYEQRVALSQLFGCVRYVYNWGLSRRVEHYRETGESINSYDLSKELTQHKKAPDKTWLNDVLRMPLRVSLFNLDKAYKNFFQKRAKKPRFKKKVNSQSATITYQYFAIKDKKLSIHKIPGLLKLRWSRYWSVDADVKSVTISKDVSERYFVSFLVSEPVAPLRPIDTKIGIDMGLTHFLTTSEGEKVDNPKYFIKQLKKYRRLCRAFSRKKNGSRNKEKMRIKKAHLSAKITDRRRDFQHKLSSRLIRENQAIGLESLSVENMLKNRHLSKHIADASWSTFLAMLSYKGDWYGRDIATPEEEFFPSSKMCSTCGFVLDELPLSVREWTCPACSTCHDRDVNAAINIRNHTVGGTGIDACGESVRPQRRSKRQESVKQELSLQDSP

SEQ ID NO: 26240 - protein, 481 aa, unknown
  TnpB Polypeptide
LRSPLRTASGCQPSGQGHRGGHRGEPVKLQQAGSPRSPLRGVPQAYRYALDPTPAQERRLRSHVGAARYAWNWGLARVKARYEAEKKWYLAEELHRLWNAEKKRNPELAWWQENSKCVYQEAFRNLDRALHDFLKSKTGERKGRRLGFPRHKKKGRCRDSCRFSTGVMRCSGSTVTLPRLGTIRTHESTQALAGKIAEGKARILSATVSRTAQRWFVSFTVEVEREIPDHHRRPRTAVGIDLGIASLIMAVDHRGRVIRFPGPQPLRAALGRLRRASRAHSRKKTGSANRRKSAKRLARLHARIANCRLDAVHKATTWLAARYEAVVVEDLNVVGMLRNRRLARSLADQSFGTVRPQLGSKTVWRGGRLLVAERFFPSSKTCSGCGTVKAKAGRAHLPLRELWPGHRPGRERCEESSPRARRQWQRGLWSRGKTQQCWAHGDEAGGDPTKQASWGPQAGTRHRNKRVRPGPPPGNRWLRVG

SEQ ID NO: 26241 - protein, 355 aa, Okeania sp.
MQSIKTKLKVNNYQKTILAKHAGVARHAYNWGLATCISEYKETKKRPSAITLHKRLIAEVKSENPWYYEVSKCAPQQALRDLERAFKNFLTIPGRGFPVFKKKGKKDSFYLEGSIKILKGNYIKLPRIGIVKTYEILPSVPVKNVRISKKADNWYISFKYDDQPNPTAKERDIIGVDVGINALATCSDGTTYANLKAYKQAKKRLVRHQRAVSKKVIGCKNRIKAVKKLAKVHKKVADIRADALHKLTSWLAKNHSTIVIEDLNVSGMLKNHKLASAIADCGFYEFKRQLSYKCEWYGSQLVIADRFYPSSQICSQCGHKQKMPLSVRTYECSACGLTADRDFNAAVNLENYVSQ

SEQ ID NO: 26242 - protein, 444 aa, unknown
  TnpB Polypeptide
LSRSTTFQFTLDPNREQHQRLLAHAGAARLAFNHHLGRVKANLGQRAAERSYGVAEVDLTPALSWLRVSFINHMNAWKDGRAADARVSLDAGGNEVRGLAWRGEVSTDVFECASVNAAQALANWSKSRKGERAGKAAGFPRFKSRHKSPPAFRLRSKSKPGRTSPVRATGPRALRFPKLGELRAHEHTGKLTKLIKAGRFHVYAASFRFEHGRWVVAITGVAAQLHHQRRSPKNRHRPRVGVDLGIKTLAVVADEHGRVLHTWAGVKALHHAQARLKLANQSYSRTKRDSGGRKRAARRLGRIHARIAHLRTDLLHNITTELARGYTTVTIEDLNVAGMLQLRALARHVSDAALGQFRRQLEYKAAWYGTEVMVADRWFPSSKTCSGCGGINAALTLADRVYDCAACGLVIDRDENAAVNLARHHRKPRRYPRPPDPRTASAPG

SEQ ID NO: 26243 - protein, 481 aa, Bacillus sp.
MAMEKHYKTYQIWIKNGHRMHSNFKTSCKLAKNIYNTTNFYYRQVYTALTQIKELQPLQKEVLSTIQDNIGKMNDVQLHAYQKKREIEKLKPVETRKDVKCNLFKTPTKENPYVDYNFLDALFKVIVQNDYRSLPVQSSQGVMKTVFQNWKSFFESLKEYKINPTKFKGRPRIPGYNRSQEREVLFTNQDCVVKNNKYLKFPKTKEQLNIGKLGVVNGKIKQVRVIPKYGQYVVELVVDVPQSKEEMMLNERYMSIDIGIDNLATIVTNTGRRPILVKGKNVKSINQYYNKMKAHYLGILLKGKKTKEGPFTSNRLEKLYQNRSLKLKDIFHKASYHIVKTAVEECASVIIVGQNKDWKQEVNIGKKNNQSFVHIPHSMLISMITYKAEEYGIRVIVTEESYTSKASFLDGDNVPVYEKGKKHSFSGKRMKRGLYRSKEGVLLNADVNGASNIMKKAILRMLEKKITINSVQLFHPQTLIV

SEQ ID NO: 26244 - protein, 426 aa, unknown
  TnpB Polypeptide
MMQLVEQHVIDQADPRFAVIDAAAFKAKNLYNAANYLVRQAFIFEHRYGGYAELFHLLKHHEAYTALPRKVSNDILRQLDKNWRALFAACEAYRDHPSKFAGRPKVPRYKDKTKGRCLLIYDRQAISRRALARGILAPSGLAIEVQTAHRQVKQARIVPRIGFFVVEIVYEQQEAAPSGNPALYASVDIGVDNLAALTSNKAGFVPRLVNGRPIKSTNQFYNKRRADLQEALGHPGTTARMERLTTKRTRRINHYLHTASKAIIALLVQEGIGTLVVGKNVGWKQEAELGRVNNQHFVGLPHARFIAMLEYKAKLAGICFVLQEESYTSKASALDGDAIPTYDPKQESRYVFSGKRIKRGLYQAKDGRTLNADVNGSANILRKALPNAFDADGIEAVRAVRPVWVTFAWSVQPRALAAAGAIPTNH

SEQ ID NO: 26245 - protein, 402 aa, Escherichia sp.
VKRLQAFKFQLRPGGQQECEMRRFAGACRFVFNRALARQNENHEAGNKYIPYGKMASWLVEWKNATETQWLKDSPSQPLQQSLKDLERAYKNFFRKRAAFPRFKKRGQNDAFRYPQGVKLDQENSRIFLPKLGWMRYRNSRQVTGVVKNVTVSQFCGKWYISIQTENEVSTPVHPSALMVGLDAGVAKLATLSDGTVFEPVNSFQKNQKTLARLQRQLSRKVKFSNNWQKQKRKIQRLHSCIANIRRDYLHKVTTAVSKNHAMIVIEDLKVSNMSKSAAGTVSQPGRNVRAKSGLNRSILDQGWYEMRRQLEYKQLWRGGQVLAVPPAYTSQRCAYCGHTAKENRLSQSKFRCQVCGYTANADVNGARNILAAGHAVLACGEMVQSGRPLKQEPTEMIQATA

SEQ ID NO: 26246 - protein, 391 aa, Lactobacillus sp.
MFALEVKQMIKTQVVELRPNKIMQRELERLCNYRRYCWNLALATWQDMYEARTLDKDNNPSPNEHRVRDELVNNKADWQFALSARCLQLAVKDLANAWKNFFDKTQPDWGKPHFKSKKAPRQGFKTDRAKIINGKLRLDKPRGIKSWFDIPAYEALKMEEVKIASIFRERGHYYAALSYEEEAGLKAKTGKKTAIDVNVGHFNYTEGKINVLPAKLQKLYKRIKHYQRVLSKKRRVNGKSASQSNNYLQVRTKLQRDYRKAANIQNDLLQKFTTELVNNYDQIVIEDLNVKQMMMTHVASKGMQRSLFGKFRQVLTYKCEWYGKELILADKTYPSTQRCANCGYVKTGADKITLQGNKKHGTKHNEYICYECGYSNDRDDNAVLNLLALTK

SEQ ID NO: 26247 - protein, 547 aa, Streptomyces sp.
VGRLRELKASFVVPGTSGVAIRDRLRLSDRDTAVLREVGVFLGSLAAGDLAVRSRQGLTHDASGWAARKRELTGDSSARWAGSITKATHDQWALARRGQLAEMVWLRGQIGQVEARMARPLGAKASKREGLARGYGSRSEWHAKSRRLHALKGRLAGVAADWAAGRVHLVRGGKRLSHLRHHLDEAGLDERTWRERWQTARMFLAADGETGKRFGNETIRITGTGEISLKLPAALTHVANAPRGRYVLDATVAFKHRGQEWLDRITANRSVAYRIHHDHVRGRWYVTASWQRNAVPVLPLTAALARGVVGMDMNDDHLAAWHLDTHGNPVGEPRRFFYDLSGMAAHRDAQIRHALTRLLHHTRRCGAAAIAIEDLDFTDGKSREKHGRNKRFRRLISRFPTAKLKARLVSMAAELDIAVVAVDPAYTSRWGAQHWQQPLTTRTRKTTRHDAASIAIGRRALGHPIRRRTAPPPTHQSDGYGHRTVQAGPDTRQREEPRPHTPGPRTRCVSPDSGKKAGDQNTQHRLGCSAEQQPWQQDALPLSFQER

SEQ ID NO: 26248 - protein, 454 aa, unknown
  TnpB Polypeptide
VLAAAARTREKGAAMHQVLTAKLKLFPTADQHAALRATQLAYRDGLNAASQYAFAHGKLSNATKIHKGVYRDLRARFGLPAQLACSVSRQVAATYKGLRTKTQQNAAHRQAGRTKQRYKGLDSPPKYVAPTVSYVEGDDYGFKRGQQVSLHVLQGRIIVPYVGYNQHLTLIRQGAHIGDAKLWYDAPRKQFYLLVSLTVALPDPDPAQQPAVVGVDVGVRYLAVTATPDNQQQFYSGKTARHRADHYTRKRKALQHKGTRAAKRRLRQISGRERRFKLDINHHIARAIVTAHPNSLIGLELLTGIRDRTNRRRSQKASRKQRRANRRQATWSLAALQAQIAYKAALVGSVVVQVDADYTSQQCPRCGQTGRENRPNGGLTFACRGCGYRLHADLVGARNVALRTLATRQDWIATGCLSTSPDVADREAKAARLQRYAELRSSPATSPGIDAGVR

SEQ ID NO: 26249 - protein, 280 aa, Proteus sp.
MKRLQAFKFQLRPNGQQEREMRRFAGACRFVFNRALARQNENYEAGNKYIPYTKMASWLIEWKSDTETQWLKEAPSQPLQQSLKDLERAYKNFFQNGKNDAFRYPQGVKLDQSNSRISLPKLGWMRYRNSREVVGEVRNVTVSQSCGKWYVSIQTEYEATEPQHESTSIVGLDAGVTKLATLSDGTVYPPVSSFKVNQRKLARLQRKLSRKIKFSANWQKQKRKIQRLHSHIANIRKDYLHKVTSEISKNHAMIVIEDLKVSNMSKSALYVPSMPFCRTF

SEQ ID NO: 26250 - protein, 390 aa, unknown
  TnpB Polypeptide
MPVEEIRLTARFKVDLVDVDEAVISEIYRLFEEYRWIVNELIEYAHSHGIASPRRLWYAKYHELRQKYPTVPSHYIHTACRLATSAYKSFIEMKRLGVCEKEKPMFKGRTIWLDKKLFKLDVEGWRASIVVHKGMRITLKLPHGRYHEGFKGMRAGEARLVLREDGNLYLNVAFHQMVNLPEVSAEAKIVAVDINENVIVYGNDDFVERFETNEGIIRTRYFLKRRRIQSKIRGRELQRRLLEKYRGREWRRVREIYYKAAKKIIDKAVEVGAMVIVMEDLRYFNEEDKGSKELNGRLHRWGYRRFQQILEYQARLHGLNVKYVDPKNTSRICPVCGGELDPSQNGHRLRICQTCGLEEDRDVIAVKNLVKRYYEECQKYQKPLLTPSAR

SEQ ID NO: 26251 - protein, 398 aa, unknown
  TnpB Polypeptide
MYLVERHIIKPNNPLFKELDSVCFLSKNLYNKALYLVRQHYFNTKKYLGFYKMCKLLVDNKDVDYYALNTKVSKGTLLLLDRNFKSFFVLIKAKKNKDYNKSVRIPRYLDKQGRYVAVFNKEAVSIKFLKKGLIKLANISNVIKTKVKLEDLKEVRVLPRNNHHIVEVVYKKEEKSLLTNNGRYASIDLGLNNLATVSSNVEKPFIVNGKPLKSINQRWNKHKAELQSRLTNNSKSSKQIELITNKRNNRVKDYLHKSSRKIVNFLVSKNISTLVIGYNEEWKQNISIGRVNNQSFVSIPFHSFIQQLEYKCRLEGINVVLTEESYTSKCSFLDNEPLGKKDSYLGKRVKRGLFRSAKNKTINADLNGSLNILKKVFGEFQYPIEACCTPTRITPTYN

SEQ ID NO: 26252 - protein, 370 aa, unknown
  TnpB Polypeptide
LLDKNVNKVIRSSSHTLKYANRDKIDLYWKIIKDYKELLQLYLHKIHDGELPLKQNLSSKFCPQLNDISNSRWRALCYREASQIYRSQVTLLKKKRIKKITESVIKSHSINLNYMLWDIEEDKTKEFDCFIKIFSPYFQETKHRAILLKLPINHHRVSLRFKNNGWKLKNSFMLSDNFSLKLFWEKEEAEKKKNKLSAGVDCGYKKLLACSDGKVYGKELEDIYEKISRKKQRSKAFKRALKERDEAINLAVKKFYNEHKDCGQVIIENLKCVKYKSKFSKKFNNKLQRWSYIKVMNKFESLSETEGFQLIKVPPAYTSQRCHVCNTVDKSSRQGEVYHCKTCGGTFDADINAAINILRLGVYGPHDKIS

SEQ ID NO: 26253 - protein, 414 aa, unknown
  TnpB Polypeptide
MQLVETQVIKKNDSRYKLLDDLCFHTKNLYNTALYEIRQYYFETKKYLNYYAVDKKFKQEKKKEYYALPVKVSQQVLRSVDKNFKSFFSALKSKKMVSKKKSIPKYLDKVKGRFIVTFTIQAISKRGLNKGIIKFSGIECELKTKVNPLCIDQVRIIPRNGYYKVEVVYTVQEKKQKEDNRRYAAIDLGVNNLATVSSNVVKPYIINGKPLKSINQYANKKVAQLQQEIDTTKNNNRKTNLKEQKYKLFHKRDNKINTYLHKASRFIVNRLVSNEIHTLIIGKNDNWKQETNIGKRNNQNFVEIPHSRFIIMLKYKCELEGINVVITEENYTSKCSFLDNEKICKHVNNEYAGKRIKRGLFRTATGKFINADLNGSLNILRKVIGEFQYLIEVCSTPRVETIFDTRKLIFHQIA

SEQ ID NO: 26254 - protein, 485 aa, unknown
  TnpB Polypeptide
MARPRATKKKVSSGTHTRSVFLYGSPNAEKRSTLEKLQADYTDAVNFYISLLSDREECLLQLLQNDKKDPLLRKLEKESRIEGLSSAYSQNAFDEAVTKLHNRLDNIRKDVIAATGGSVFAVSILLFHAVLSGQSREEMCGMLARIRDSYKAKEKIQYYDKLHDTVKTMEEKEFLDSVSEVAMFYHIISDEYRIPVVKKAHVLSVTIPDRKRERMQVPVQADRDALRRMEQYGVSGSMRYTITDGGSLKLTCSFEKKTRTPEEHSAVIGVDVGITDAFHTSEGQAIESFQPVIEFYQTEVEPAFGKLSTLRNRKQQLRRFLKKHKGVLPEKVILNLRKRIDHLEKDIRQAHAPYRRKRHYYQLVEYTVRNAVNTYIESLNGDKTVLTAMELLDIKEFNKSRRVNGMLSDFSRGKLAEKLMEELSWHGFPFVQVEPAYTSQICRCADALTRQAVTGKCSIVPAAGIPMMQTTLAASISRPAQRIRN

SEQ ID NO: 26255 - protein, 362 aa, unknown
  TnpB Polypeptide
MKTLKLRIKDKHAKLLTQLATEVNFVWNYVNDLCFKHLQRTGQFFSAFDVAKYTKGASKECGLHSQTIQAVTEELVIRRKQFKKAKLRWRVSNPKSAKKSLGWIPFKKSAIKCQNGQIKYGAQWFSLWDSYGLSEYNVRTGSFVQDARGRWYACLVVDPKPVEQSASKTSIGIDLGLKDLATCSDGVVISNPKYYRQYEQKLGIAQRARNKKRVRSLHAKIKNSRQDHLHKASTALVRNHALIVIGNLSAAKLVKTKMAKSVLDTGFSALKTMLKYKCENATCAAVLLMFEEVNEAYTTQMCSSCKSISSSSPKGRADLGIRAWQCMECGTFHESRDQNAALNILALGHERLTVGIPLLASA

SEQ ID NO: 26256 - protein, 427 aa, unknown
  TnpB Polypeptide
MQYNVVTSYRSWQERIKAANGESSKYMSQGWKRTANADAPTYGGDYVNLGTADRSYAAIENDPFADGEIVLRMVIQGKWYRLVFDFDNERFTEGKVALPLIRVQDGQPVFVFTVVTDNPVVQFSGDWVIGVDVGLNDYATVVVRSAATGRIAHETTLSQRVHSLWNSVRASERQVRALRRKAGRLLSQRQARMSALDEAQFHREAASRKKRELAILAAQEIADLSHLWGNAVVAVEDLSWVANTMQNGRWNRGALIQWLTHYVSQNGGWVVAVSASNTSQQCHTCGSKVTHPTHKVSVCAAHGAMDRDVNAAANIAARAVPRVVKARATRAKNRKLQPQAPLRTPPARASLKYPGRDRTKYKPTPKRKNHHRVTREVILPSRPARAQAPCLEASVLADQGAHGTLGTNTAALKQGDTAYECRLYSPI

SEQ ID NO: 26257 - protein, 377 aa, Okeania sp.
MLLSIKVELKPNNKQVTQFRKACGVARHAYNWANALIKDVLVERETDKTVKVPSAIDLHKKLVAEVKSVNNWYYETNKNVPQQAVKELRTAWDRYWKKVAKQPRFKKKGCRDSFYLEAGSKASPKIKNDGKRIKLPSIGWVRLAEPLPSSATHNCVISRTADKWFIAIKYELEKPSIKADRPSVGVDIGIKELAVCSNGTVFKNPKAYRKMSKRMKHLQRSVSKKQKGSCNRKKAVSKLAKLHARIANIRKDAIHKLTTYLAKNHSIVKIEDLSIKAFLKNHKLAGAIADCGMYEFKRQLEYKTEKFSSKLVLVDRMFPSSQICSNCGNHRHKMPLKERVYICPDCGHAEDRDLNASKNIERWFEGIFPYDSTYVKR

SEQ ID NO: 26258 - protein, 366 aa, unknown
  TnpB Polypeptide
MQGKCRGLYNWWVMKLRDGEKWSLYAAKKSLQQSKHHDPELVQVYGKLLHEVYFRLDGAMKAFFRRVQAGETPGFPRVRPRHHFFTLCYPAMYLKIENGNLILPTGGGGKHGPKVYPNIQARLTETPPEHFKTVAISRDARGSYFASFVAEREETVCPSDQVVAFDLGIKTLATGVNEQGVFYHVGGFKGGQWYNRQLDKIRSKRDKCTKKSRRYKHLSKVYQRVSEKKRRKQRDSLHKASHVISHRMVERTVVVGDLSQRQMVMKEHREKKKRLNRMVFNDWGLYLFIQMLTYKCQLSGKDLQFVDEHQTSKQCSGCEHLQDMPLWKRTYRCLKCGLVMDRDENSAVVRRFGTHEISPLGRWGRE

SEQ ID NO: 26259 - protein, 533 aa, Hormoscilla sp.
MQESKAIPNLTILSDKLNTGASNTRAQNLFQKLSSGSILDGENLSTFWNELSIRISSGLSLPTATDSVDLDGNWLSGYAKTMQSNSWFKTFSSSFQNKSKFKICCPSDVAAVVGYAASESISQKETICYGKNPLRQSNKPKPNNVLKIPLFPDRQQHLIWKKWLAAYRWVYNQCVEFYNQGRSLAPKQSLYKYIQQLQSLPLNEWTKCLGNTRQEAVCEALSASRQSRKANGGKCYLRFRSCQNKSKTIQFNPGAYRNGKWFPTKVEGTTFAVAKGHELPPNCEYGTKLVYQNGQWFGCFPQHTPVRSTSSDKVIALDPGNRTFLTGYDGENVLEIGKGDIGRLTRMCLHLDKLIGRKIKASRKINKRLRYKLNKAIARLRVKIRALVDDLHRKAASLLVNNYKLIFLPTYQISQMVVKANRKINRKSVRNMLTWAMGRFASHLEQAAKRKGVLVVRCNEAYTSKTCPQCGHVHKKLGGSKVHKCPNCGHKAPRDWVGALNIMLRALQAVAFSVQDGVISIVDADVVLAQSPK

SEQ ID NO: 26260 - protein, 568 aa, Moorella sp.
MGKQKKRPINPVEGIKYTVCGEFFPAIYPARRNEKWAKGVEDPLTTEMRLFCACTRWAFNRLLEGDSREELKKQGQEVFGLNSRFCDDAILKAREIIGSQRELLVMEIKETETKLARAKKKLGWAEKDLAKAIKAGDTVKSEKAKRTVHGRKMRVKKLAAKLAGLQTHQNNGTIPKVVFGGCSLWKRVCQGRATREEWRNARQNRLYARGDETKGGNPNMKLSYQNGGFTLAVTISHLSEQIGTDSKGRPIMNRAPRVTGKLWLPAKHRLKMWELLLSGAPYTVELIRDNDGRYRAHITFTIAAPATVTNPNRGYLGMDTNPDGVALANVGYTGQPEPWPEGFSVPYPKTLHKFAGEFQVTIHPNGFLYIKVPELAYSRGYRRTYLIGVLAQVVVSITRALGKPLAVEKLDFGKDRLDTNKRFNRMAANFPFQKIIAAVMRKAFKEGVEVRPVWPAHTSTIGYWKYRQRYGITIHHAAALVIARRAIGFKERITKELKQRVQAVREKLIPKANSLPGEGKGMTRKVKRRFKQLDAKIPVDTRSQRADPFQTGILLLCVARLEAARFSE

SEQ ID NO: 26261 - protein, 401 aa, unknown
  TnpB Polypeptide
MPVLTATIKLKLHPTLEEAAAFTATREAFTACFNHVCAYGWQEGECNGTALHRATYVPLRAEYPTLPSQLVCAARVKATEALKAVHARQQQGRNMTCPQSDGIAIRYDARSSWVRLGPGEASVTTVVGRIRLPFRLCDHYQRYQDWQVRSSDLCQDRRGRWFLHVVVQQTIEAPLPNGEVIGIDLGIRRIAVTSDGRNATFYSSGHLTDRVRRYQRLRRSLQAKGTRSAKRHLRQLGRDWQRFTASVNHVIARRIVDAASPGTVFGIEDLNGIRDRCKHRKGEQRGRFHRWSFAQLQGFLRYKAAAAGQHVVTVDPRYTSQTCLRCGHVARGNRRTQSLFVCQVCHFSLNADLSAARTLRRRAIDSLVAPLSGGVSCQDDGSVFASNGRLRRKLPASAGGS

SEQ ID NO: 26262 - protein, 299 aa, unknown
  TnpB Polypeptide
LKFSRKIEIKFSKEDERILDGQSKICNWLYNRLLEAAIMDYKENNNANKLLDGRNLRDLVPKLKKDNEFLKSVHSSPLKNTAFRLKDAYHRFFDKKGSFPHYRSWKDRWFSLLYDEPNKGFKLLEGKNLSISLGIDKTKKRLTVLGELKEKLPLREDEKIKTFRLCKQQGNRFYAIFCIERPDAQRKDVKNWIAIDPNHKNLLMAVDNKGITYEFEKLSQIRYWDKIIDEIKSKRDLCLKKAKKVDIENGSTYYIPSRRWQRLNKALDNAYNCRREQIKSACFMHRKLAFKKLRLCSLW

SEQ ID NO: 26263 - protein, 372 aa, Paenibacillus sp.
  misc_feature (3)..(3): Xaa can be any naturally occurring amino acid
  misc_feature (356)..(356): Xaa can be any naturally occurring amino acid
MLXAYKYRLYPNREQRKTMDFTLERCRLLYNRLLDERIHAYKNEGKSLNYYDQANMFNERKKAVPALRQVHSQVLQDVAKRLDKAFQAFFRRVRAGEKPGFPRFNPASQYNSFTYPQGGYKLERNKLKLSKIGEVKIKLHRPVEGKIKTCTIIQKNCKYYACLVTEVGYQPLPHCSEHVGVDLGLRHLAVTSEGETFDTPKYLRKSEKRLKRMQRSVSRKDRGSNRRKKAVRILALMHEHVANQRKDYAHKLSRGLVNRFGLIAYEDLNTLGMVKNHHLAKSIADAGWYQLVQFTKYKAESAGRIVKQVDPRHTSQLCSHCGKIVKKELKERIHNCPHCGFVADRDVNAAINILQXARKWVAVSVDLRSPSL

SEQ ID NO: 26264 - protein, 405 aa, Streptomyces sp.
MTRVQFRYSFRLYPSAGQRTALARAFGCARVVYNDALRARETARTEGLPFPKTADLSRTLITKAKQTPERTWLGEVSAVVLQQSLRDLDAAYKNFFDGLKGKRPRMGAPRYKSRKDTRQAVRFTANARWSITPGGKLRLPKIGDLKVKWSRTLPSTPSTVTVMKDSAGRYFASFVVETGPQEVLPETTPELGIDLGLGHFAVLSDGTKIDSPRFLRRAEKRLKKAQRALSRKEKGGKNRDKARFRVARAHARVADARREFHHRLSTQLIRENQAIAVEDLAVKGLARTRLAKSVHDAGWSAFVAMLEYKAARYGRVFVRIGRFEPTSQVCSQCGVQDGPKPLHVRVWTCGACGAVLDRDINAAVNIAKAAGLAVSARGAQVRPGLVPAPRSEAGTHPTPQPSTAR

SEQ ID NO: 26265 - protein, 418 aa, unknown
  TnpB Polypeptide
MIFQLLTLTYEYKLKPTKEQTQEIERTLGVCRKVWNHALRERKDWLNSRKCLVDACSIQSEYIISSDTPYPNYAKQCKTLTDAKEQYAELTTVNAQVLQQVLRRLETAFVDMQRKKMGFPRFKNHYRMRSFVFPQMLKNCWQGSRHIKLPQLGLVKVIKSRDIPEGFEIKQARIVRKASGYFIMLSLQCDVNVPDVLAHGQPLGIDIGLEQFLATSDGEMVARPRFFKTLQCKLRLLQRRLKHKVKGSNNRRKLNQKVARVNQRISDTRKDWHFKLAHHLCDFAGMIFVEDINFKAWAKGMFRLHTLDAAFGQFFSILEWVCWKRGVYFGKVDKDYTSQQCPQCGTHTGKKYLSDRVHSCPECKYTTHRDVAAALVIRNRGSSGLGTSLGEIACGGDAAGGTRRDKKKGGTASVHSAV

SEQ ID NO: 26266 - protein, 391 aa, unknown
  TnpB Polypeptide
LKNHSTHITKAYKKIGEPTMVLKAYKYRIYPNKAQEELILQHFGACRFVYNWALETKIKEYQTDKRHISRFELQSILVKEVKPENEWLKQTNSQSLLASLINLESAFTRFFREKKGFPKFKSKKNPVQSFQIPQHYVVDFEEGNVKLPKIGLVKASLSREFVGVCKTATISKSTTGKYYISVLVDDGNELPSKQKFTDNTTVGVDVGIKDFAVLSNGEKIENPKYLKNSLDRLKVLSRRFSKKVKGSNNSKKAKLKLSRLHEKITNQRNDFQHKLSIKLVRENQAIALETLKVCNMVKNHNLAQAISDAGWGSFVTKLEYKAEWYGKTILRIGTFEPSSKLCSTCGYHNKELTLAVRDWTCPDCKTIHDRDINAATNIKKFALQDQNLITF

SEQ ID NO: 26267 - protein, 410 aa, Acaryochloris sp.
MMINLTYEYRIYPDAGQAELMTQWLETCRKVYNYALGERRDWIKSRKCDINVCSLRGEYIIPVNAPKPTYYQQKRNLTVARKVIPTVGAVHSQVLQDVMGRLEKAFNALWNSGHGFPRFKKRFRSFTFPQLGKAPIGKGTIKLPSIGEVSATLHRPIPDGFEAKQARVVRRPSGWYVQLILEATIEVPDIIPSGYAIGIDVGLNSFVATSEGELIAHPRFFVEAQHRLKGLNRVVSRKRKGSKNQQKARQKVARLYERIANRRKDFHRKTAHHLCDQAGMVFAEDLNLKGLAKGMLGKHCLDAGWGEFLDTLVWVGWKRGVYFSKVSASGTSQKCPACGASVKKDLSVRVHHCPECGYQTHRDVASGQVIRNRGLTTVGHIVDACGAEPIGVAMKQEPSRAILGSPRCNR

SEQ ID NO: 26268 - protein, 456 aa, Lachnospiraceae sp.
MSAIFTTETRLSEKDAHDIITYAKLYARDFGIMERYAWHYIVSNKGIPNKSVFNTELQIRFGVTKRTANSVIYDMLGRYKALEELKKTESYQYKNKISHLESKIEKLKLTVNALKIKAADNKLDDKQLARYRKLKKSLFYKKQKLQRYKDRLSQLEKDISENKYSLGFGGRKLFGAQYRLPENGFRSHVGWYNSYVRRRDCNIFYLGSKDETSGNQMFQLSPEPDDAYAIKVRKDGKYASDEDKYITGKCRFSYLDDEIRNSIVNRDRPISYRLKIRGRKVYLQAIVQFETHDICATTMCDGAIGLDFNDGHIDMTETDKHGNIVAMKQYKLIYHGTGTKAVNEMRTTIAEIGKYALSKGKSIVKEDLSFIRKKARTSKAEGSPGKKYNRMIHTLDYSRYEDTIKNMATRKYIDMIEVNPAYTSQIGKTKYAGVRKIPVHNAAAYVIARRGQGFKD

SEQ ID NO: 26269 - protein, 500 aa, unknown
  TnpB Polypeptide
VAVACKTVRQRLEHRPGISDWFADTRALFNQVAQFYFQVIQAHPELLALPNKAALTALEKLTHKTKANPDPAHPLEQVSANIPACFRRAAINAALGAARSFHANLERWRRRKEKAAARGKQFRERPPVPPRVWARSVTFYAGMWKEWQPGRIVLKLWDGRTWRWVRFRISGRELPEGWQAKSPQVVRRGRRWWLHVPVEKRFPQPTRLEEQVQSNLGLRLCAVDLNTNDVLAACVILKADGTAVASRFVRGGRKLHGRRKRLLGMVARNRSRTGIIAEGEQDNAALWRKIRALDENEAHRVSRRIVEFALAQGARVIVFEHLGAFRPAKGRYSRRANERRSYWLRGRIVRYTRYKAREEGLLVSRVNPADTSRLCARCGEELSRYSAGQEPGVYCLGAPLVHCPSCGMKGNAERNAALNIGRKLFARYEVAKPATGTSGCDSPKGEGVPVSQGAARHGDQDGHGTARGIPRFLRSQRSGGYAASTPGCAHAGVPEEAALL

SEQ ID NO: 26270 - protein, 430 aa, unknown
  TnpB Polypeptide
MKDKNFILYTRKIQIKRTDQAYKELDQMMFLSKNLYNVCLYRERQTFFKKRDCQDLEEQKKLKSYLTNSELIKQLQDENQTDYRALPAIVSQQVCNQVFDEYQSFFSKRKSDKLAQIPHYKDKAKGRNKLSFPKNAISKDELRKGFIKLSSVDTKFRIPDGINYQDIQQVDVIKIAGHIQVLVMYKVPKPALKADNRRCLGIDLGLNNLATVVSNFKGFRPTIYDGRELKSRNQFYNKYSSKLRSKLTIKGKERYISHKINSLTRNRYNFVEDCFHRISTDIINQAVSNEVGTIIIGKNDGWKQEINLGKKNNQNFVQIPFENLIKKLKYKAFAKGINVITTEESYTSKCSFFDDEIPCKHETYQGKRIHRGLFRTSDKKTINADVNGALNIIRKVVPTFCCETAKLEVADVGNPLRISFRDLVSKRMSL

SEQ ID NO: 26271 - protein, 398 aa, Scytonema sp.
MQTISVKCKIEVPVELRQEIDTTLEGFADACNQILFVAKREKCWNTTKLHHLVYKAVRESTGLKANHVCQAIRRVIGNAKAVKQIHAFRPTSINLDLRTFQYIEESQTVGVTLISGRRKFKLSIGNYQLGLLKGQSPTAATLNKTKRGDYYINIAVDIPTQPPGKTPKVIGVDLGRRDIATTSTGKSWSGEKIQATRDRYSRVRANVQRKRTRSSRRLLRRLSGREQRFQRWLNHNISKEIVKEAKQSNTAIAFEDLTNIRESLNEKPRSKAERRRTNNWAFYQLRIFTQYKATIAGVSVVLVPPAYTSQTCSRCHHIHPVKGKSYRSGKSFKCGHCGFECDADLNAAANIAVLGLSVSQPESPGMSCLLEGQLSLFPTNTLNWAKAPHRDSRGCLHY

SEQ ID NO: 26272 - protein, 204 aa, Campylobacter sp.
MEKWGLKLLKVTFLMRKVTFLMRKQSKRVLKAKKDKIKLGSNFRKTQIRLNKIYERASNIKKDLAHKISNQIVKNFDLIVVENLKVKNMTKRAKLKNVKAKSGLNKSILDTSFYQFLSFVEYKAMHNGKVFTKIEPQYTSKACCKCGTIKENLTLKDRVFTCDNCGYVEHRDINASKNILDRGLKSFGLGTSLLDYKQEALRVS

SEQ ID NO: 26273 - protein, 284 aa, Okeania sp.
MQSIKTKLKVNNYQKTILAKHAGVARHAYNWGLATCICEYESTKKRLSAITLHKRLVAEVKSQNPWYYQVSKCAPQQALRDLERAFKNFLTIPKCGFPKFKKKGKKDSFYLEGSIKIIQGNYIKLPRIGIVKTYEILPSCRVKNVRISKRAGDWYISFKYDYQPNPTPKEGDIIGVDVGINALATCSDGRKFSNVKAYKQAKKRLTRYQRRVSKKKIGSKNRAKAVKRLAEAHKKVADIRADALHKLTTWASFEPQHHSDRRFECKWNAQKPQTSKCDSGLWFL

SEQ ID NO: 26274 - protein, 408 aa, Paraglaciecola sp.
MKKTLRYNYRLKPTIEQEANLIEFGAYSRGLWNLLLSENIRRYQHDKTFLFYNTMASLIKELKEFEEFAWLKAFDSAAAQQVARDLETALKNSISKGRVQRFPNHKVTFKQKKLHNDSFRCVNNSNCIRIENGTISIPKIGKVPIILHRNLVSTIKTVTVQFRHGKWTASVVQEIECQVAKKVLTSIVGYDINSQHTVVGSNGWYVKNPKSFKQSKEKLGQLQQQLARRKKGSGRWHKTKQRINTLNGKISRRRLAFAHELSCSIANSSDIIVFEDLNVKAMQQFNGSMVNDNVMGLITQLSKYKAELRGKVYHEIGRFEKSSGICISCNHHHKLSLSQRTFACHQCGTIQCRDWSAAMSVAKSGETGLIAGGIVARVKPNTQHKAANQTKVFERSKLAVGSEKKEAI

SEQ ID NO: 26275 - protein, 486 aa, Rhodococcus sp.
MIVLAVELRQFASEVHSHLPHHLLAVRQDRAGERATPIFRDEHQMCVTVPHCVSATSDKPNLIHDTKSYRRGVLKRYRCRAYPTGEQHRALSRLFGCCRVVFNDALAARESARRAGRPIPSKGELSAALTAAKATPERAWLAEVSSVPLQQSLADLHRAYANFFDSHTGKRKGRKVGAPRFKRRTHRQSARFTRNAGFGVLEPGAGAGFVRLPKIGRVRYESSRPLPADPSSVTVIREADGRHYVSFVVDEPAPAVVPASPARAAGVDVGLTDLATIVYDDGTREKIDNPRWLRSKERGLARAQRAYSRTMKGSKNRDKARRKVAAAHRKVRETRLDHHHKLALRLVRENQAVALEGLSVAGLARTRLAKSVHDAGWSTLRRLIEEKAARYGAVVHTISQWEPTSQVCAGCGVRDGKKPLDVRVWVCSSCGLVLDRDYNAAVNVMLAAGLVERVNACGGSVRRVLACADPVKQEPAEQILPDGEAA

SEQ ID NO: 26276 - protein, 331 aa, unknown
  TnpB Polypeptide
MARYEAEKKWYSAEELHRLWNAEKKTKPDLAWWQENSKCVYQEAFRNLERALHDFLKSKTGQRKGRQLGFPRSKKKGRCRDSCRFSTGVMRCSGSTVTLPRLGTIRTHESTEALAGKIAEGKARILSATVSRTAQRWFVSFAVEVEREIPDHHRRPQTAVGIDLGVSALITAVDHRGRVIRFPGPKPLKAALRRLCRASRAHSRKKTGSANRRKSARRLARIHARIANCRLDALHKATTWLAARYETVVVEDLNLAGMVRNRRLARSLADQSLGSIRHQLGSKTVARWPAAGGRAVLPQLQDVLWLRDSESQGWPSAPSAARAAAWSSTET

SEQ ID NO: 26277 - protein, 181 aa, unknown
  TnpB Polypeptide
LGEDTSEDSEIAPTVANIRKDALHKATSAIVARTKPDSERPSVVAIEDFFVSGMLKNPYLALSLLDVGFAEFRRQLEYKTAWAGEKLLVADRFFPSSKLCHHCGCINDDLTLRDRIWRCDCGAVLDRDLNAAINLRNLAVRRVPPELACREQANACGNERSHLVFNCYSFSSEEIAIEVDV

SEQ ID NO: 26278 - protein, 401 aa, Spirillospora sp.
VVTEGNATVTNVKIVVQVKLVPTPEQAAALEATLDAVNVAANRVSGAAFAEFGLKAREIPLRRLVCSDLKAAGLGAQAAQHVIKRVVNAYATLRGNIRNGRLGGPDSKRRRKAESKPITFRTDAAHTFDDRNLSWQLDAGTVSIWTVAGRMKGLRFACSPVQAKTLNDHRHGESDLVRRDGKWLLIATCDIPDPEVFEPVDWIGVDRGIVNLATTSDGDNHQGRRLERYRRWQARKRAELQAKKTRSAVRLLEKRARRESRHATHMNHKVSKQVVAVAARTGRGIALEDLSGIRDRVTVSRDQRARLSSWPFHQLGEFIAYKARFAGVPFLEVDAAYTSQRCPRCGHTDRGNRRSRDHFMCRRCGLAGPADVVAGVNVRDRARSAWAFVNMPDPAPAQHYR

SEQ ID NO: 26279 - protein, 430 aa, Escherichia sp.
  misc_feature (64)..(64): Xaa can be any naturally occurring amino acid
  misc_feature (279)..(279): Xaa can be any naturally occurring amino acid
VKRLQAFKFQLRPGGQQEREMRRFAGACRFVFNRALALQNENHEAGNKYIPYGKMASWLVEWKXLERAYKNFFRKRAAFPRFKKRGQNDAFRYPQGVKLDQENSRIFLPKLGWMRYRNSRQVTGVVKNVTASQSCGKWYISIQTENEVSTPVHPSALMVGLDAGVAKLATLSDGTVFGPVNSFQKNQKTLARLQRQLSRKVKFSNNWQKQKRKIQRLHSCIANIRRDYLHKVTTTVSKNHAMIVIEDLKVSNMSKSAAGTVSQPGRNVRAKSGLNRSIXKVTTTVSKNHAMIVIEDLKVSNMSKSAAGTVSQPGRNVRAKSGLNRSILDQGWYEMRRQLEYKQLWRGGQVLAVPPAYTSQRCACCGHTAKENRLSQSKFRCQACGYTANADVNGARNILAAGHAVLACGEMVQSGRPLKQEPTEMIQATA

SEQ ID NO: 26280 - protein, 504 aa, Streptomyces sp.
LDHARAHAACHASALLWNRTVAWVREEWRAGRSPGREDIRRYVTSLPAEARPVHAHTAQAVAYDLADAIDLARASKARGVKGVRFPWREKRYRPLVFTAHFGWKVKDHGRLVLSLGRSRERLVVPVPEFTDRSGRSVSPDRWGEMKLCWDVSARCWALHVSYRSTDDGLPGASADHRKGGSSQSEARVLTIAVDEGIINPMTLATVSPEGAYQVLVINGRSGRAAKQARNKGVAQLQAKMSRCRPGSRRHRRLGEARRRTKERARRRLRDFNHQVTAKANSFVREQLAAHERTLPDGVRMVVRIVAGDVRGIERNTKKRRRAARSTRQQLTQWERGVQERQLAYKTGVPVEYISEAHSSQTCPYCLSRRKVRGRAYLCANKDCARLLHRDAVGGVNIHTLAVNDGAFASVAPDTDVRVKYLRAQPGWSPDQRERHGFHQRVRKRAGEGRRREARSSARNRAARSDAQSVRAMLPPACSAKRSTTTVPLPHRAPAGLSPVPPEGS

SEQ ID NO: 26281 - protein, 355 aa, Pasteurella sp.
MLLRKAFKFEIRPNGEQVRKMKQFCGCSRFVFNKALAWQNEQYEQDNHHKFSYTKLANLLPQWKKELVWLKDCHSQVLQQSLKDLESAFKNFFQKRADLPKFKKKGVKESFRFPQGCKIEQKNDRLYLPKIGWVRYRNSREIVGEVKNVTVSMKCGRFFVSIQTEFEQEIPTHKGGEIGIDMGIARFATLSNGEFFEPLNAFKTHKGKLAKLQKQLKNKVKFSKNWQKLKDKIGKLHHKIANCRKDFLHKISTQISKNHAMIYVEDLQVANMSKSAKGTAEVHGKNVKQKSGLNRVILDQSWLNTSRTCPCCNHTAKENRQTQENFECVECGYTENADVVGAMNVLTRGQAIVQA

SEQ ID NO: 26282 - protein, 532 aa, unknown
  TnpB Polypeptide
MSRYRLLPSSAQEAILRDHCGHARFVWNLAVEQRRHWRPGRANAPGYLEQCRQLTAARAEHPWLAAGSQMVQQQALRDFAQAMAAFFDPENPAGRPSWRKAGRDEGFRVVAVKPGDVRRLSRHVGEVRVPKAGRVRFRWSRAVPQGVKSYRVTMDRAGRWHVAFAVIPEPIPAPGNGETVGIDCGVAVSAALSTGEMLTAPGLSAGRRRRLRRLQRRLARARPGSNRRARVKRAVARLRAREADARRDWAEKASTGIARRFDLIRVEDGPGGEKDIVEFGVLGPLEVTAHGQPLLVRGARTRAVLAMLLMHDNQVVAADQLIEELWPGLPADRASASLQVRVSQLRKALRSAQDAERLVTRPPGYLIRVAPGELDALRFDRLARDGETALATGDAGLAARRLAEALSLWRGPALADVDAAPFARAEAARLEEGRITALESHAEALLACGRHRELIGDLETLTTAYPLRERLWSQRMLALYRAGRQADALRAYRDLRARSRPSPAPARSSYRVPSATWSPDRRSPSPIAAAIS

SEQ ID NO: 26283 - protein, 551 aa, Gammaproteobacteria sp.
MSKKTRKSKQSTSEVPHATYQTRLKNQPDVVSEALDDCAELLSRVERKLFAQTQKVDTFKGKVFNQIKSFFLSFFGILSRHFNSISFALQGKVDSYRSNLDRYIKENKERIEKTKKTIEKRYKKEVEPDVRQKHLNKIHQKKRRLARLEKRIEQLESDKATGRARICFGTKKLFNAQFDLKANGYENIEQWKSDWLQSRSNQFLLVGSKDETAGNQLCVAKRQKDGTLTLRVRMPDVLVPKHGKYVEIPRIKFEYGQNVIDAALNDNEARRILKSIKSSETKRYGVAITYRFLRDKKGWRVFVSTARPQIPIKTLKNIGTIGIDLNANHVALVETDRFGNIVGTEIIQLNTYGKSKGQTESIIGEVVKTIVAKSDITLKPIVIEDLDFSQKKSVLRENSSNRHARMLSSFVYSKFGAFLESRASKYGVKVYKVNPAFTSVIGRVKYASRYGLTVHHAAALVIARRICRFSERAPSNCQDEVLIPNNKGGHVTFSLPVRNRGKHVWSFWRLVSRKLKVVLAAQIQAAKSIDRSFSPRDPPAVGMETQFSLEF

SEQ ID NO: 26284 - protein, 298 aa, unknown
  TnpB Polypeptide
MSRYRLLPTPAQEAVLRDHCAHTRYVWNLAVEQHRHWRPGRAGAPGYLEQCRQLTAARAEHPWLAAGSQMVQQQALRDFAQAMAAFFDPGNPAGRPSWRKAGRDEGFRVVAVKPGDVRRLSRQVGQVRVPKAGWVRFRWSRDMPPGVKSYRMTLDRAGRWHVAFAVIPEPIPAAGNGETAGIDRGVAISAALSTGQMLTAPGLSAGRRHRLRRLQRRLARARPGSNRRARVKRAIARLRAREADARKDWAEKASTEWRRSNRITPASAARRAGTWMRSRARAKRASPARPAVSPATRT

SEQ ID NO: 26285 - protein, 265 aa, Dictyobacter sp.
LNRLVTLSTAEGYENQAFLKASLHKLRQANKRLHRRVQGSKNREKARRQVARLHYRITCLRQDLLHKVSTHLATCYGIIGIEDLNLKGMLKNRCLARSLSDAALGTLLSLLTSKVEQRGGQVVKVGRFFPSSKTCHGCGWRWEDMDLSDRLFVCQNADCAYHHVPQDRDHNASLNILDEALRLIGLMDQAVGGTGSDEDAKLAVDLMEDQKSFGFEAIEDEAATTKGVGLCLHTFYYINWSRYIGPGSLTHTDPSFHLKYKYVYL

SEQ ID NO: 26286 - protein, 257 aa, Dictyobacter sp.
LTRKQEKERGNLRRKLGTVNLAEKLRFVEMGKVTPPTKKRNKRKQVPCESVKILGATVSCEADHWYVSIQMEIKKPLPPTPGPVVGVDVGVKQAAVVSDGRVLENQKPLARHLNKLGKLQRHLSRKQKTKDPHTGKTTFSENYQKQRVKVARKHQQIANIRRDIQHKFTTELARTCGTIGVEDLNLLGMMANRKLSRAVPDAAMGQLLQFLKTKMARAGGRSSSPHAGSPRPNAVRLVRMSKSACRSTNLIYLRNDN

SEQ ID NO: 26287 - protein, 490 aa, unknown
  TnpB Polypeptide
MAQLAAEVRGISSYATYVTRNDEALGERLAQAGTVQPAVAGRRAGVTMPEFLANGRTGKSRKEWLLRYNVVTAFRSWQERVKAVNGESDKYVSQGWKRTANATPPSYGESDFINLGAVDRNYALIENNPFIDGEITLKMVIRGAWYRLIFTFDNTRFTEGKVTLPLIKVQDGAPVFIFSVVTDNPIVQFSGDYTIGIDVGINDYATVVVRNSTTGKIAYQTTLSQRVHSLWNSVRASERQVKKLREKAASLSLYDRQGRMAALDEAGLHREAASRKKRELAILAAQEVAYLSHFFGNAVVAVEDLSWVRNTMSHGRWNRGAFTQWLTHYISQNGGWVVAVNAANTSQVCHVCGEEVTHPKHKVSKCAKCGVFDRDVNAAANIAARAVPKVEKACKKRSRNSKLQPQAPLKTPVARCSLKYPGRDRTKNCPTPKRKKKCQGVNTLSSPARAQAYRLEASVLADCLTYGVTGTSQAAIKQGAITKYRLCSLN

SEQ ID NO: 26288 - protein, 422 aa, Nostoc sp.
LSSIQKAFKVTLIPTHNQEVLINKTIGCARYVYNRFLGLKKELYANKGKALNYNACSQQLTILKKEIEWLKEVDKFALQNSLKNLETAYKNFFADLKKSKIKLGVGFPKFKKKHGCKQSYKTNLTNGNIQVVENRLKLPKLGWIKFHKSQDITGKLVNVTITRTSFGKYVASILCETEIEKYPQVTQNIGIDLGIKSYLVTSDGEAVHNPKYYRTQTRKLRKTHKKLSRSQKGSSNRVKAKNKLARTYERITNLRDDFLHKLSTRLIKENSIICIEDLRVANMVKNHKLALSISDASWSKFVAMLEYKALWHDRIVQKVGTFYPSSQTCNCCGFVNPLVKNLKLREWSCPTCDNHNLRDVNASLNILSEGLRLMSQCSGREHLHKAPGVAAVGISEALNACEELVSPEVIQAEIVEAGITRL

SEQ ID NO: 26289 - protein, 390 aa, unknown
  TnpB Polypeptide
MNKAYKFRIYPNKKQQQCLTEQFGCIRFVYNNALFYRKELYAADKKHISKYVLVKRLVGLKEEYPWLKEADSQALQQSIIHLDTAFKNFFSQRARFPQFKNKHTYQSIAYPQRVKVKDNKIYLPKVGWVSIVLHRLYEGTIKTVYVSKAASGKYYASLVCHTSTEPTIIKELDEDKVIGIDLGLHDLMVTSHGLATGNPKFVLKAHINLKRKQQKLSRKTKGSKSKNKARLSVAKAHERAAGARNHFQHTWTKRLVDENQAIIVEDLHVKGMLKNRKLSKAISDASWHSFITKLEYKLSWQGKCFKKVDRFYASTKTCNACGALQEMPLNKRIYSCSCGWEASRDTNAALNIKKQGIEKLKAAGYTVSARGGLCKTSSEATAYEARSLLL

SEQ ID NO: 26290 - protein, 343 aa, Actinobacteria sp.
  misc_feature (6)..(6): Xaa can be any naturally occurring amino acid
LISSCXPWLAEGSQTVQQQALRDFTQAMAAFFDPGNPAGRPSWRKAGRDEGFRIVGRGRQWDVRRLSRKTGQVWVPKAGWVRFRWSRDVAPAVKSYRVTMDRAGRWHVAFAVIPGPVPAPGNGQVVGIDRGVVVAAALSTGQPLYAPGLTARERTRLRRLQRTLARASRGSNRRGRVKHAIARLRARETDRRKDWAEKVSTDIARRFDVIRVEDLKIGNMTRSARGTRENPGRNVRAKAGLNREILRSGWGLLVRRLADKAPGRVEKIKPAFTSQRCSACGQVDRASRESQAVFRCTACGFACNADVNAARNIAAGHAVTARGGDGVARPVNREPHLLLQSES

SEQ ID NO: 26291 - protein, 361 aa, Streptomyces sp.
VARQVKRAFRYRFYPTDEQAAELSRTFGCVRLVYNKALEERTRAWYVERRRISYAQSSAALTQWKKTRELAFLAEVSSVPLQQALRHLQTAFGNFFAKRAKYPRLKSKKESRASAEYTRSAFTWRDGRLTLAKMAQPLDIRWSRPVPGGSEPTTVTVSRDAAGRWFVSLLCQDTITPAPATAAAVGIDAGITSVVTLSTGEKITNPRHERRDFLHKLTTRLVRENQTVVIEDLTVRNLLKNGKLARAISDASWTVLRSMLEYKCAWYGRELVVIDRYFPSSKLCSACGTVRERLPLNVRTWTCDCGATHDRDVNAARNILAAGLAAAACGDGVRPQRESSRTGQSSVKQEPQRATAGNPRP

SEQ ID NO: 26292 - protein, 430 aa, unknown
  TnpB Polypeptide
LAFKKKRSKEEIAKYQKLVEQTTYKKGSKYYREMDQLCFLSKNLYNATLYHKRQSFFSEEDLISFNELRKKFVKEDQADYRALPAKVSGQIQMLVDQNFSAFFALLKKKTSGDYDKKVQLPKYLKKDKGRQVVIYPKDALSFVKEGFVGLSKTKILIPTKQNKENILQVRLVPKNGYVVVEVVYEVLKEKPLEKKNRYVAIDIGMNNLMAISSNVFNPVIINGKPVKSINEFYNKKISKAKSQAMTLEGLHATNKIHNLYRRRSSKLKDYMHKATTELVNLLVSNNIDTVIIGENKSWKQDINMGRKNNREFVSIPFYIMKSMIKYKCEMRGIEVIFYEESYTSKASFIDKDKVPTYNKNRKKKPEFSGTRIKRGLYKSADGSLINADINGASNIMKKALLKQGLWSDVLFTEVVQRIKKNPVKKNIRID

SEQ ID NO: 26293 - protein, 440 aa, unknown
  TnpB Polypeptide
MKVTSSYKVKINKTGFDKKAIRDTATLYRNAVTFFISLIEKEWSYISDNDVNIVTLVEALSHITKDNPKPKYDFDTYLYKFPSYLRRAAINEAYGLVASHFTRLDLYNKSNRKGIDKPPRLQYKHNSMPKFYISAGGMFKWIGENNCKIKVYKNNDWVWINLYLRPSDVRYIRNKGKVLSPTIQIKRDKSYFVFPVESEVMLAEKVDKVVGVDLGLNSLATLCVMDDKGTIHKRKFVKNNKETDLLNHLLNKKKKLQRNKKSTKSIFREINNCQDRLEVYTCKEIIKFALDNNAKAIVFEHLSPYIKAKGSYKEKIHLWRKRGISDRLSHMAHLYGLRYSTVCAKNTSKFAFDGSGEVLRGKNAGFKNNTMCKFTNGKEYNCDLSASYNIAARYFIREKIKPFEGDETQRLKLEAKCPLAFNGTGNVYSTLISLNVVLEA

SEQ ID NO: 26294 - protein, 205 aa, unknown
  TnpB Polypeptide
MRLVERHIVKDNRFEDICFKSGLLYNYVLYNIRQGIFSGNYLKEFDLSNKLCKENQFDFRNLPNHVSQQVIKQVFKNIKSWIKLKKDFEKNPSKYGNHRPHLPSYKQGKKQNMVVFTNCNCRVKGDNCIYFVKDIIKPIKTNVKKDELKQVRIIPQATCYVVEVVYERKETDLGLNKDNFLSGDSFIGKIIDSGFVFNPVRINIL

SEQ ID NO: 26295 - protein, 297 aa, unknown
  TnpB Polypeptide
LRDLNQAYQNFFRRVKQGGPPGFPRFKSKKHSKKSYSTANNNGDGIRFDGNRIRLPKLGFVKAKISRTIPDGYRIISATISQEPSGKYYASLLTEFEYDLPEIELNPDTALGLDYSSPHFYVDSNGVIADMPHFYRIAEQKLAREQRKLSKMVKGSNNWYKQKRKVAVAYEKIRNQRKDWQHKLSTKLADEHDIICLEDINLQNMAQGLHLAKATNDNGFGQFREFLKYKMAWRGKMVVTIDKWFPSSKTCRYCGYVNSELTLGNRVWTCPSCGNEINRDLNAAINIREAGLNLVYV

SEQ ID NO: 26296 - protein, 363 aa, unknown
  TnpB Polypeptide
MEKAYKFRAYPNKEQRMLIAKTFGCSRFVYNYYLSKRIKLYEDSKETLTYNKCCADLTQLKRELEWLKEVDKFALQNSLRDLDNAYKKFFIEHSGYPKFKSKKIHKHSYRTSFTNNNIEFFGDHIKLPKLGFVKIRDKQIPNGRILNATISQMPSGKYYISLCCADVEMEQLPLTGSVVGIDLGIKEFAITSDGKKYANPKYLQQSLDKLAKLQRSLSRKTRGGKNWNKARIKVARLQEHIANQRNDYLQKLSTELIRGHDIICVEDLQVKNMIQNHSLARNIADVSWSEFTRQLEYKANWYGREIKRVDKWYASSQTCSVCGYINKEAKDLSVREWTCPCCGTHHDRDVNAANNILVQGLAS

SEQ ID NO: 26297 - protein, 414 aa, Planctomycetaceae sp.
MLHRAYRYKLAPDPGQEALFRQFAGVVRLVYNLALEQRRDWWRHYQRQTGGRLNYVAQARELTALRAAFDWIAAVHVTPQQQALRDLDKAYVNFFAGRAGYPSPRRKGGNDAFRFQGREIETKRLNSKWSAVRLPKIGWVKFRDTRPLRGRVQNVTISLSADGWHVAFAYEIEHATPPNDLPAVGIDRGVVNTLTLSTGENLRLPASLAKIEQAKRRAQRTMSRRKRGSARHAKTRRRVAALQARAARIRQDWRHKASLALARNYGTVVLEDLATRNMTRSAKGTTKAPGTNVRQRADLNRAIRDQGWYGFETVLAYKLEERGGYLCKVDPRHTSQTCSACGAVDRESRESQASFHCRTCGFRAHADHNAAINILRRNTASMIVEEGHWLSVEAITMRVETHPKNPPPSGGGRC

SEQ ID NO: 26298 - protein, 227 aa, Calothrix sp.
KTVTNKVIALDPGVRTFITGFDGSDFSEFGNGDFNKIAKLCSHLDKLKSRHDKSVGRNFKRLRYKLRQAMERIRTRIKNLRSECHKQVASYLAKNYDVIVLPTFETSEMVVKKKRKLKNKTARAMMTWAFYQFSQTLEHLCNRYGSKLVRITEEYTSKTCTKCGHVHRKLGSSKNFKCPNCGYEIDRDFNGAVGIFLKAMWDTTFTDSVGDVVLNIENVLDVQKCPG

SEQ ID NO: 26299 - protein, 486 aa, Paucisalibacillus sp.
LEEEKETNKRYRTYQIHIKKGHKLYAYFNELTLTSNNLYNTTNFYIRQVYTAFKQGNVLQPLQKEVMDSITLNIGKMNGKQHKAYLKRLNNEMKKPENERKEVKENLFTLPTKESSFIGFNFLDCLFKTIKQTDYNSLPGQINQQVIRNVVQNWKSFFTSLKDYKAHPEKYKGRPSIPAYLPKGGRKEIVLSNQICKIKDGKYLQFPKTNIQLNIGKLAQLEGTYQQVRVVPKYNEFTVEVIFLMKETEVIVAKKESCMGIDLGLNNLATVVFNTGISPIIFKGGKVKSINQWYNKLRSHYYAVLRNGKSPKEGKYDSKRLMNLDKKRYRKIKDFFHKVSYNIVKVARENGIDTIVIGKNSDWKQEINTGKRNNQHFVQIPHTLLIELITYKANDIGIAVMTTEESYTSKASFLDEDDIPTYQVGNNETYTFSGKRIKRGLYRSKHNRLINADVNGAANIVRKVIPNAFANGIAAMCSSPLVVNVH

SEQ ID NO: 26300 - protein, 459 aa, Micromonospora sp.
VNTIQAYRFALDLSPGQERAVLAHSGAARVAHNWALARVKAVMDQRAAERTYGVPDDLLTPSMSWTLPALRKAWNAVKERVAPWWRECSKEAFNTGLDALARGLRNWADCRSGRRTGRPVGFPRFKSRRRTTASVRFTTGAIRVEPGRKHVVLPRLGRLKLHESARKLARRLEAGTARIMSATVRRDGGRWHVAFCVEVQRCERTPARPDSVVGVDVGITHLAVLSTGEPVDNPRHLTVAQARLRMLGRALSRKQGPDRRIGRRPSTRWERAAARLGRAHARVANLRRDGVHKLTTRLAREHGTIVVEDLNVAGMLANRRLARHITDAGFAEIRRQLTYKTQWNGGRLIIADRWYPSSKMCSGCGAVKAKLALSEREYHCQACGLVMERDHNASLNLAALAAEFDPAGSGPVAARGADRKTRERGQVAVKREPGTATAGQTGTVPPQGRTTDHVFTKAH

SEQ ID NO: 26301 - protein, 424 aa, unknown
  TnpB Polypeptide
MGEREMRRTSIVELVVDKSSEEKLKLLCSLSSKLWNEVNYARRRMFFEKRGVDLKATYKEFYEKYKALIGSATAQQVLNKNDEAWKSFFKLLKLKKEGRLPPFITKINPPGYKKKNNKRTLWTVLRKDQYRVEGDRIVFKGLGAVGKIELKYKGLIHLRGKQGRLEIHYDQDRKKWYAHTSFEVSEKATRGVWTSVPKKPRGDLVAGIDIGINNLMAIYVESGLAKLVNGKPLKAISHYWRSRIAEYQSMLNKYGLKTSRRLRTMYSKWRGQIKSYIDSRVRQAIEWLYNVGVSIVKVGYPKNIAQENGDFNNVHVWTYGYLLRRIYEVAEEYGITVVYVNEAHTSSKCPVHGERCGSRVRRGLFKCTRLNKVFNADLVGAYNILITPSPARDRGNGPETRPGTEPPKGDVVPNLPALAGTLAL

SEQ ID NO: 26302 - protein, 395 aa, unknown
  TnpB Polypeptide
MLVYEMKLEGEKVQYEKLDEAIRTGRFVRNSIIKAWMDGEIKSRNDAYKQCKVLADNPEFPWAKKLNSMARQAHAKRAWAAIERFYKNCKAQAPGKKGYPKFKKYQVRDSVEYKTSGWKLSEDRRYLKLTDGFEAGTFKLWGSRDLHYYQLKQIKRVRIVRRHDGYYAQFLIDHTREEKKELTGKKTGLDVGLNHFYTDSEGNKVDNPRFLRKDERKIKKLQKRLSRTKKGSKNRIKARNRLGRAHLKISRRRNDFACKEAKRVIQSNDLIAIENLRVRNMVKNHHLAKSINDAAWYKFREWLEYFGSIYGVPVIAVEPKNTSQNCSNCGQKVIKTLSTRTHKCPHCGYEADRDENAAINILQSAQLQVSTTLGRRVDNVSGETGRGRNEETRSV

SEQ ID NO: 26303 - protein, 266 aa, Halalkalicoccus sp.
VSKPTFTAHTVKYDTRTMTLFDDDTVSLSTTESRVRCELALPGADEGYQRQYLNSDTWSSTESTLTARGGDYFLHIGFRRPKNDTERNTAEDGTILGVDLGIENLAVTNTAYFFSGRELTHNLREFEKVRAGLQQTGTRSAHRTLVQSSGRELRYIRDVLHRASNAIVDEALRYECDVIAFENLTHIRDRTGTSWGHKWAFRTLYEQVEYKAEAVGVSVKQVGSAYTSKRCVECGFTVDENRPTRNDFQCVKCESEANVDYNAVVG

SEQ ID NO: 26304 - protein, 505 aa, unknown
  TnpB Polypeptide
LRAPRPGRPGSARRPRPPGPAPRCSCARPPKRGRTPRTARRRCRSSEFLASPSLPEDAPASRPGRNTVPYAAGHEKTAACTAWLPQFFDLRCDPVRVRTAYRCRAYPDQQQQAVLNRTFGCVRVVWNRTLAARQARWHLQGRATSYAESDRALTALKKDPDLVFLSEVSCVPLQQALRHQHQAFTAYFARRARYPRFKSRRGRQSAHYTRSAFTIRGGELRLAKMSTPLRYIWSWPDADLTTLDPTMVIVSREPDGRWYVTFTAEAAAPVRLKQTEHAIGVDLGVTDFAAFSDGDKIANPRHLERKARRLARYQRRLARCQKGSANCRKAAAKVARAHRKVRNARRDFLQRASTRLVRTADLIAIENLAVRNMVRNRHLARAISDCGWGEFRRQLEYKCERYGRRLVVIDRWYPSSKTCSACGHRLADLSLSTRHWRCPSCGARHDRDINAAKNILAAGRAVARGCPGDACGADVRHSGTSRVRSAVKQEPRPARAGIPVNQGEE

SEQ ID NO: 26305 - protein, 468 aa, unknown
  TnpB Polypeptide
MKDYQAICLNEEVLKPFWNWQCQELTSHLWLPTEIALQDLGSTSFNKLLSKMVENSWFSTRLYSHQNKNLQQTCSISSTYPTQECSDLEVIKSKSIKLSLTPEQNRMFKHWHDVSRWVFNQALNFMIITEGCEEFGIKRPSWMDIKKIFTQTLPEWTKDVPFQIKGIAVKEAVNAFWATLKAHKGKKGKISFHFRSWKDTEQSCYIPKTAISDKGIYPTISGKDLRFLESLPDEVLDSRLVWRAGKYFLTIPTKQRVSYGENQARVVAIDPGVRVFSTFYGLDSCGFLGQGDFSRIQRIAFRLDDFISRMSKVENKQRLRKMKLAAARMREKIKNLIDELHHKVALFLVTNFDCILLPTFETKQMVGRSNRKIQSKTVRNLLSFAHYRFKVFLKNKAFEFGKEVIEVCEAFTSKTHPETGEVKKVGSAKRIKLLNGQWINRDIVGARNIFLRALVDQPRKVTWQLCKC

SEQ ID NO: 26306 - protein, 407 aa, unknown
  TnpB Polypeptide
MNYNYRYRLNPSDALEERLAWTVDTCRQVYNHFLHRLNRIDDTSAYSEQERLPDLKNWWTTLKDVHSKALQKVVQRLYDNLSTLKGRKDNGYNVGTLNWKGPDEYQSFTYSQSGFELKNTSGRTRLWLSKLGEIPLTFHRDLPDDADVKTVTVKQEPTGNWYAILGVETSDDPPKKPDELTDVVGIDVGILKYAHDTDGTAVESPNLSDERERLERAQRNLSRKDHGSNNWEEQRKTVARRHADLKRKRHDFLHKLSAYYARKYDLVAVEDLDAKGLMELSGNSRNRAGAAWGTFLRMLEYKCEREGTHFVAVDPRGTTKECAACGVETEKPLWVREHSCPSCGFEADRDWNAAYNILVRGLKNVGTGCPESTPAETALPTGTSSVPAKRVVETGSPTLNERAKASE

SEQ ID NO: 26307 - protein, 286 aa, Ruminococcaceae sp.
MEKCYKFRIYPNAEQEILIQKIFGCCRFVFNRYLGKRIEIYKTDKSTFNYNDCSADMTLLKKELEWLKEVDSKALQSSLKDLEAAYQSFFRRVKRGDKPGFPKFKSKRDSRKSYNSKTVGKNIEVLEKSIKFPKLGLIDCRVSKQVEGRIISATLSQNPSGKYFVSVCCTDVEIEQFAKTGAVAGIDVGIKDFAITSDGDKFDNPKYLAKSEKKLVREQRRLSRKPKGSQNRNRSRVKVARIHEKITNQRNDFLHKTTTNLVKDYDVISVESLKIKNMVKNHKLAK

SEQ ID NO: 26308 - protein, 238 aa, Ruminococcaceae sp.
LPKLTPIKSVLHRTFDGQIKSATISRTCSDKYYISVLVEEEINTLPKNDTIIGIDLGLKEFAITSNGQKYENPRTLKKYEKQYKRAQRRLSRKQKKSSNRNKQRKKLAKIHEKIANIRKDYLHKLSREIVNENQVIISEDLNVKGMIKNHKLAQAIADVSWSEFTQYLSYKSEWYGRTYYKIDPFYPSSQLCHICGYKNAETKNLNVREWICPKCGAKHDRDINAAKNILAKGLEDIG

SEQ ID NO: 26309 - protein, 377 aa, unknown
  TnpB Polypeptide
MKTYKYPLGKQSNTLRIGNLLDDMWQVHDYFHRWQDQRYKDGLPYADWYAMKKHLRELKKTTHPHWKSLPSQAIQEELKRIDEAYVRFFKKLGGKPKRKVRHKFKSITFTQAGYELKNNRITITFREWNPKKQVWSFRRIPYTFYKHREFHGTIARITLKRDNCGGYWICIVTDHTDTKELSATGQRVGADFGMKDAYLTLSTGEKIQHPQPLKHSLKELRKLNKSLSRKKKGSNGWWRAVRQLARLYRKISNQRKDFHWQLASKLCKRFDTIVLETLNLDGMKRLWGRKVSDLAFYQFVEILKYKCQKQKRQFIQMGQWTATTKPCSDCGFHNETLTLNDRQWICPDCGSHHDRDINAAINILRAGIAVNDSARYA

SEQ ID NO: 26310 - protein, 532 aa, unknown
  TnpB Polypeptide
MKITNPLKLIMVNNKETNKLSDVNHVNNDLVSQCEFIDKLWLPNDSNFITLTPGNKQSKENIMYNSWFSCKKTSKIHNPDIGKLMVKAIINDDISSDDLRIKIIRLNMGKSPIYKAKIKEAIYVTRALYNMCIDLCCREIDPIPVNLKTLREILTGKKETNILPINLKEVFDKVPSGIRDEALRDFVKAYGIQIDLLKRGVITHFEMHHKKRKNSLQETIVLHHKEIRRKENGDKYCFPTKWGKEILNTYGEKLPDVINHDCRLIMKTIGNNEKFYLAIPTDVEVKPKVKNLNAVSLDPGVKIFQTTYDTEGTSYLIGENDANKIDKLSKIAQRMRDGIKRDWIGGDQIIKNGKKKLTNKKRIFRTAKNEKERKGLLKAAAKIEHKIKNKISDLHRKTAKFLCEKYDTVIIPNFRVKQMSEKKDENDNWKRKIGKETVRKMINWGHYSFRQLLIAKGKVTGTNVYVGTEEYTSKTCGNCFWINSKLQGERELKCEKCNLTFHRDVNAARNIMILNCKKSNLKQFKLKLNIIC

SEQ ID NO: 26311 - protein, 394 aa, unknown
  TnpB Polypeptide
MNMDLLIQKAFKYRIYPTKAQISTLENQFSMCRHLYNWNLTERIEAYLRDKTTLSYNQQQNNLPALKEERPWFKSVHSQVLQDVLRRLDNGYQAFFRRIENGDTPGFPKFKKRGQWNSISFPQYQKHPVASRIVVSKIGKIKIVYHREIPEDAKIKTLTITKEAGKWFACFSVQIFIVMEPKQDLLPPVGIDMGLIDFLYASDGSKVSIPKYLRKKEKQLQRLQRRLSKAKKGSKQYLKILKALQKCHYRVKCQRNDFLHKRANELLNKSDTLFHEKLTIKNMIRRPKPKQNEETGEYLPNGACAKAGLNKSIADAGWGRFFEFLHYKAMALCKQVVPVPPYYTSQICSSCGILVKKSLSTRTHRCECGFVANRDHNAALNILRIGMNTLQASA

SEQ ID NO: 26312 - protein, 459 aa, unknown
  TnpB Polypeptide
VSFSGVAIPENCVVRTFRVKVMSSPAKERRAKEMLVAAGDAWAWTIDRFHRRRRDDLPASNSNIEIWPDLRAHGSFGELTMHCSQDIAKCWSANFFAAKRRQKRGEEASLPLAKRYLMPVSWRKGEFSLTVESRFPDGSRRRPSVVLATARGCEPLSLSLSHDHPYDQAAVRAVRLLEDAGELFLDVTAWVQIVRAEVDPEMIAGIDPGIIHPLAIVTGEKALLISGRATRAEEFLHLEDQKGRDVCQSRYRAPVRARKGRPHQPGSRRWRKIAERKRREEAKSRRKVRLAANRAARVAVGFVESNHAGVIAMGDPSGIEQRDSGRVQNRRTARWLRASARDAVRYRAEERGIAFLAVDERGTSSRCPSCGEPAAKNGRRLICQGPLCREEHHRDIAGVQNIAQNSGAVVTRVALIEHRRVGQPSRRDRRRRRYDASRGEARTWAVEAGLPATRSLVAS

SEQ ID NO: 26313 - protein, 357 aa, unknown
  TnpB Polypeptide
MKIKRSATVSLKFATEEKKQQIESLASEYQSVTQQYIDLIWEDSSLELNKETKALVKDTSLSSRFRSNTVRLALQICNNTKKSAKALNKEATKPEFNGTLILDAMFVFINLDDPNSFDGWIRLSTLNKGKRIWIPFKRTKVLNKWLKRGFELVHSVRLRKYNNNWYADLILEKEVVSRETGQSLGIDSGINKALSLSDGSHLGLNYRYYADKINRKQRKSKAYERALKERDNYLRQEINKIEFSSLSHLFVENIKGIQQKTKQTKRVNKTVRKLFSVWVQGKTFGWLKNKCEENCVAFTSVPARYTSQTCSQCGHQEKSNRTKELFKCKQCSFTTDADYNASLNILSVGLRSLQSLS

SEQ ID NO: 26314 - protein, 360 aa, Ammonifex sp.
VKQILTIKLKLYEPTQAKRETYQLMADRVTDFANTYIALDKKSRPKTSKQAKEYSDPLPSAVLVQAIRDIESKPKAKHFKRLWPAFNNQNFRVEKELSRDGGAVWKASFPTLEKRVGVPVVVASYQEKYLNLLFAGKARQGTARLVKRGRDWYVHLSLTVTVEQEQRPEKVMGIDLGLICLLVASVSGQTLFFSGCHLAYVRRRFAELRRKLQKAGVHRALKKLGDKEHRWVTDVNHKVSRAVADFALSHGVTCIRMEDLAGVRWTKRQNRIQRRDHGRSLHYWPFYQLQEFIEHKANLAGIRVEYVNREKTSLTCSRCGEEKHSRSNGRWFVCPRCKKVKHVDANAADNIAQAISGLAA

SEQ ID NO: 26315 - protein, 403 aa, unknown
  TnpB Polypeptide
MKTLKFKLYQHKRNRFLKRSINAAGVIYNHCIALHKRYYRMWGKHLNCAQLQAHIALRRKRKEFWQLVGSQAVQDICQRIEKAYQLFFKHHKRGVRPPNFKKVRKYKSFTLKQAGYKFLGGNRIKIGQKVYQYWNSREIEGTVKTLTIKRTPLGELFMVVVVDSVIEPEIKVETSHIAGFDFGLKTFLTVSDGSKIESPQFLKQSLTAIKKASSQHSLKVKGSANRERARKNLVRRHEDVVNRRSDWFWKLAHALTDRFDVLCFETLNLKGMQRIWGRKISDLAFGEFLKILEWVAQKKDKQVIFIDRWYPSSKTCSNCGHVLTELDLSIREWRCPSCESVNGRDENAAKNVCAVGASTAKLGDVRQAKACNCCSILESPRVYAGEYVNFGVSALAAGRLPTF

SEQ ID NO: 26316 - protein, 451 aa, unknown
  TnpB Polypeptide
MLRVLSHKIRIEANNKFKTYCRKAFGCSRLAYNWGLAEYKKELKKYRKAMSLYRKEMKQYNESPLQFSEFPVKPKLPTVLDLKKRFNSIKAKDFPYMYEVTKYASQQPFIFLGKALTRYYEAKKNKTGPKVGFPVFKKRSETSGSFYLGGDQVELQRFKTCTGAEKKSGKLFLRIPNFGWVKLTEEIRFSGHINNVTISQDGDEFFASFSINVQEAAIEKKTAPENTAVGIDLGLDAALTLSDGIKIYAPKPLKRYINKIKALQRRLSKKQHPKTKDDETKYSRSYFRLLKKIKKLYTKISHLRKDFIDKTASFIARNYSYVALENLNVKGMMSNHRLARALADVSFGRLKTAIVNKVQLNDGKIIEADRFYPSSKTCCKCGEVKKDLKLSDRIYKCENCGNEIDRDLQASVNLLNLIKKSGVASAVRSLELRSILADLNKNQLANLVMKA

SEQ ID NO: 26317 - protein, 402 aa, Escherichia sp.
VKRLQAFKFQLRPGGQQECEMRRFAGACRFVFNCALARQNENHEAGNKYIPYGKMASWLVEWKNATETQWLKDSPSQPLQQSLKDLERAYKNFFRKRAAFPRFKKRGQNDAFRYPQGVKLDQENSRIFLPKLGWMRYRNSRQVTGVVKNVTVSQSCGKWYISIQTESEVSTPAHPSASMVGLDAGVAKLATLSDGTVFEPVNSFQKNQKTLARLQRQLSRKVKFSNNWQKQKRKIQRLHSCIANIRRDYLHKVTTAVSKNHAMIVIEDLKVSNMSKSAAGTVSQPGRNVRAKSGLNRSILDQGWYEMHRQLEYKQLWRGGQVLAVPPAYTSQRCAYCGHTAKENRLSQSKFRCQVCGYTANADVNGARNILAAGHAVLACGEMVQSGRPLKQEPTEMIQATA

SEQ ID NO: 26318 - protein, 469 aa, unknown
  TnpB Polypeptide
MNRGVPPTGPNARTGELTPPGVTSSARANSSAERSVPQRSITNTSGGRPGLQPGMNKVRHAAGQNVIPGRYCVRMSRYRLMPSATQEAALLGHCAHARYVWNLCVEQESHWRAGRGRMPGSAERCRQLSAARAANPWLAAGSVIVQQQAIRDHTQAMVNFLAGRHGRPSWRKADRDEGFRIVHVRPQHVRRLNRNAGEIWVPKAGWVRFRWSRQVPQDVKSYRVKRDRAGRWHVAFAAIPEAIAGPGTGETVGIDRGVAISAALSTGQLLHCPGLPAPQQRRLRQLERKLSRANRESKRRTQIRHAVASLKARGADIRKDWCEKASTSIAGRFDVIRVEDLQIRNMTRSARGTVVEPGQNVRQKTGLNRSILTQGWGLLVHRLEDKAPGRVEKIRPAYTSQRCSACGHVAAGSRESQALFRCVACGYTLNADVNAARNIAAGHAVAARGGNRAAGPTNREPQPVLLPTT

SEQ ID NO: 26319 - protein, 373 aa, unknown
  TnpB Polypeptide
MKILRAFKTELDLNNGQWTACARHAGAARFAYNWGLVRKIEAYQAGLKVPSAIDLHRELNALKKTELSWMYEVSKCAPQEALRNLDQAYAHFFRRVKEKQAGKNIKVGFARFKSKKNGLGSFRLTGAIHIFEKAIQLPRLGVLRLKERNYLPIDDVHILSATVSERAGRWFVSVQVEMEIPDPEPEEKSAAGVDLGILRMATVSDGNGVDNPRALKQGLIKIKRLQRRLSRRKPGSANRKKAVRQLARAHYRVANIRKDALHQATSWLAKTKSAVVLENLNVSGMLKNHHLAQAIADVGLYEFRRQLSYKGGWHGCKILIADRFYPSSKRCSGCGDVKPDLMLNEREYHCGRCGLVIDRDLNAAINLEQLLYA

SEQ ID NO: 26320 - protein, 372 aa, Okeania sp.
MKSIRTKLKLNNKQKTLMAQHAGYSRWCYNWGLSLWNAAYTDGYKPNTRKLREVFTNHTKPLYPWMKNLSSKVYQYAFISLGEAFKRFFQGLGKRPRFKKKGKSDSFTIDNCGKPIELNGWNHKIPFIGMVKTYEPIEATTQKITISRQAGDWYLSLSYDKRATPTPKTIDVVGVDLGVKTLATLSTGQVFPSIKPYRTAQDKLAKLQRQLSRKVKHSNNWHKAVIKLARQHRRVANIRRDALHKLTTYLAKNHSVVAIEDLNVSGMLANHKLAKSIADQGFYEFRRQLEYKTRWYGSKLVVVDRFFPSSQTCSYCGHVQDMPLNNRTYDCPDCGISIDRDLNASINLRDAVGLTVDACGRSAADSSGGSRK

SEQ ID NO: 26321 - protein, 533 aa, Okeania sp.
MVKSHGSLIGIEAKIEYHPVFEELGALYESWKRSAINWMQTEKLSESSVEKRLQKKFNIQWAWADSIATEARTCLNQLKTAKKNYITKLELQIQAKTTATKKLITKLEKTLKLATKKGFPHTQSRNKFFHQLLGLKSKVQKIASLKQKLKKLKNTERLHICFGSQKLFNAQHNLAENGYKTRSGWSLDWRKKRSGRFLCVGKSQPGGGTMMKVFPLQEDGKYKLEIQLPRPLQDKYGQKIQLEFSVSDRNGRYRTTDLDYAINSLKPITISIFRREHKQDNWYIHLSTYVQEIPVVHTRKNGCLGIDFNAESISVTYVKWDGNIEYLEEIPYKWKNQTTGKRQATMRNIVCQIVKLAEFFECAIAVESLDFSKKKSKMSEEGKVYNEMLSNLSTGMFREAILSRCRRFGVELIKVNPAFTSVIGMINYMPKYGLNSGTAAALVIGRRALKLSEKIPQCLLRPGDVNKHDWSHWRRVASFIKLHRIQRTQLFQWRKALEGILTHSLWAEHQLSQQVHIETGEPQNHLQSPMANV

SEQ ID NO: 26322 - protein, 225 aa, Okeania sp.
LAKCAEALPIRWSRQLPQNFVPSTITVKLEPSGRWSVSLRVNDKRDLSFAPVKKQVGIDLGITSLITTNDGGKVANPKNSHKLHKKLRLAQKSLSRKTFGSNNYQKARLKVARVQAKIKDSRLDYTHKLTTQLIRENQTVVVEDLALKNMVKNHNPPPSLPGRGARGVGSDANWSELVRQLEYKAEWYGSQLIKIDRYFPSSKRCSNCGHIVEKLSLSIREWDCP

SEQ ID NO: 26323 - protein, 411 aa, Halonotius sp.
MDITLRFRAYPDEETASEAWRHIDIHRQIRNHAIRDYYSHQPGNRPTAYDQHRKLTEWKQQWPVFGEVSAHAAQQTVSEIHKNIKTQQSRRENGHKTGRLKWQGSGERRSVAYQSEGFDVDHNTGRDGYATLRLSKIGYIPIRAHRELPSTDQIKRVVLKKEPTGEWFVCLVTKTSDDDLPEKPSPECLAPTDCVGVDLGIQSYIHTSDDTAVDTLDLSDECDRYAREQQNLDRKEHGSNNWEKQRRKVAKAKRRIKRKVLDYQHKLTTWLVREYELVAVEDLDVKPMLETSQNAKNRQDAAWSRFLDLLEYKADLHGTHVVRVEPAGTTKECSSCGVATSKPIWIREHSCPACGHTEDRDLNAAKNILSRGRKQLGAGRSESTPVQTALPTFTPLRVDAKRVVEAGSPEA

SEQ ID NO: 26324 - protein, 438 aa, Halonotius sp.
MLEVHRTHRAKICNRPQVAESLDRHGWSASKLWNVANYHSREVWEETGEIPDHEKLKDELKTHPTYKGLHSQSSQRVLEELAESFNSWYSSDDDRDNPPGYRKENHYDDQGRRVHEEHPRSTVTWKQNGIKHDTKNNRVRLSKGANHKEHPKAWEYILVEYETRPGVEVDNLQQVRAVHDQQKERWELHLVCKNKIETPNPPGDEAAGIDLGINNFAAVAYSTEDADLYPGNRLKQDGYYFPKEIATCDNSNGERASGLHHKWSERRTHFFHSLAKHIVERCVEKGVGRINIGDLAGVREDEDGSSKNWGKHGNLDLHGWAFDRFTKILTYKAKGEGIEVVEISERDTSKTCCVCGREDDSQRVARGLYVCESCDAAFNADVSGAENIRLNTNDQSNSESSASLGQDRSTGWLAQPAVYLHDLSHGFSPREQVVDCKP

SEQ ID NO: 26325 - protein, 157 aa, Lactobacillus sp.
LDKPYGVKAWADISFKGANDLNGELKVVSIYRENGKYWACLPFEVKVTKKTKTGQKTAVDVNVGHLDYPEGQVKTLPNNLKALYKRIKHYQRLLARKRVANGKKRPKQIITLRREQSCNVIIAKSLVFNTILFKSLPTMLVNNYDRIVIEDLAVKQM

SEQ ID NO: 26326 - protein, 223 aa, Lactobacillus sp.
LHISATKTVADFDNQTVKHVVGIDRGLRFLATTYDEQGKTVFFDGKAVMRKRAKYQKLRAKLQAKGTKSAKRRLKKLSGRENRWMTDVNHRLSKTLVQKFGSNTLFVLEDLTGVSFERTDLPKALRNQNKSWAFYQLAQFLTYKAHLNNSEVIEVSAQYTSQRCPKCGTIKKSNRNHDLHEYHCTNCDYRSNDDRLGAMNIQLLGMQYISGQEQPKFELTTNA

SEQ ID NO: 26327 - protein, 281 aa, Proteobacteria sp.
MQIRKGYTYRLQTHRRTGGKFVRFAGACRFVWNKMLAINTHRYVSGVPRLSYPEACELVAWWKQSDEYGWLREVHSQVLQQGLKDLERAYTHLCAGRTAPPCYRKKFLADSFRYPQGFKRDGRTVFLPKIGWVEFWHSRDLEGLVKNVTISRQGRHWFVAFQVEMDIADPVHPATAHVGIDRGIATFAAFSDGVLHPPLHAYCRAEKKKARMQRRLAGMVQYSCNWKKPQRRIATLDLRIAHCRHDFLHKLSTETSNNHAVIVSEDLQVKHMSRSAQGTVD

SEQ ID NO: 26328 - protein, 394 aa, unknown
  TnpB Polypeptide
VTLHLSHKIRIYPNNIQETYFNKACGCRRLAYNWTLENIKKLYEADEKPSKYGMCSLFNSIKQEQFPFVMEVTKWATQKAHYDAWDAYKRWWKKTSKHPRYKKRGKSRESFYLGVETFKVEKKRLKIPKLSSKIKMAQEIRFPGRLLSLTIGKDSNKWYASFLVEVLATYKYPHTCENQEVCGIDLGIKSLLIVSDGTVYENPKHLRRKKVNLRALNKSLSRKQKGSKNREKAKILLSRQHEKIKHSRRNFQHKCTTSLVRENKYIGIEDLNVSGMLKNHCLAKSIADAGWSEIRRQLEYKAKLSGSVIVLADRFFPSSKLCSVCSVKNKDLVLKDRTWTCSACNTTHDRDLNAAYNLESLARRYRDCGEDVSLETLCSQQPRRSKKRASTFVC

SEQ ID NO: 26329 - protein, 438 aa, Natronorubrum sp.
MLEVHRTHRAKILNHSQVEDTLDRHGWSASKLWNVANYHSRQVWEETGEIPDHEVLKDELKTHPKYKGLHSQSSQRVLEELAEAFNSWYSSDHERDNPPGYRKENYYDSEGRRVHEEHPRSTVTWKQNGIRHDTKNNRVRLSKGANHKEHPRAWEYILVEYETRPDVTVENLQQVRAVYDSAKERWELHLICKDESETPDAPGNETAGIDLGISNFAAVAYSTEDADLYPGNRLKQDGYYFPKEIAKCDDSSGDRATRLHHKWSERRTHFFHSLAKHIVEQCVEKGVGCINVGDLEGVREDENGESKNWGKHGNLDLHGWAFDRFTSILEYKAKIEGIEVVEVSESGTSKTCCVCGRKDDSQRVERGLYVCEVCDAAFNADVNGAENIRLDINDESNSESSASLDGDRSTGWLAQPAVHLYNLSCGFQPQRGVVDCKP

SEQ ID NO: 26330 - protein, 364 aa, Brevibacillus sp.
MLRTYKFRIEPTKEQLEKISETLMYCRWLYNALLEQRIIAYKKFGVSLTFYSQKKELPSLKKVCKEYNSVHSQVLQNVVERLDKAYQAFFRRLKHGEKAGFPRFKGMNRYHSFTYPQTGFSLEGNHIYLSKIGLVRVKLHRQVQGTIKTCTVIAKNGRYYVCLSCEVETQIQTTGRWVGVDLGLQHLAITSDGYFYDAPKYLRRSERQLKKLHRILSRRKKGSTRRQKIVALLAKQYEYVANQRNNNAHQVSSKLVNGYDLIAFECLEITNMIKNHHFSKSIADAGWNQLVQFTTYKAERAGKRVMLVDPRNTSQLCSSCDEIVKKTLAVRTHHCPFCGLECDRDVNAAKNILKRALQQLHNLS

SEQ ID NO: 26331 - protein, 589 aa, Dictyobacter sp.
VRTGRDQQSLSYPLRLPDEIQADALRLLDTSREVINLTVTALWERLDEFATRSNRYAYKQIEEMMAPPLAHGHRQWRCEAEQAGRILRGQAERKQQFALVLPLLEQGMIQPKTETKRAGKKRKVIKQALTDLCEINSDGGNAVELQSLIEQACNFYLANGCFPSTYEEMQPIPVLKASILPYAGDDGPEMGQTYRMSYDLDQKRLTLALRTPDVQGTWGRNWREKAVQMKLPDFVVGRAKAGHPLAPTLREIVEADGVRSAVLDFIIEVPVDESAPFAEIQTVLGFDWGVRVLVTASVVDLDGHQIGRPFFLNTGPFDGRQARLRRQIDQLKANVARLEQQRDRYPSGDPRRKPSEEALSIVRREISRCWRKYEARNNDLAHLAANILLVLATAFDCRLIAGESLKSMKSAGRGRGAKGRWRNWRNNSQVRGELWRVLRYKCFLAGIRLEWQQPRHTSHTCPRCGSPANTFRSPEHRSSVSEWGAWLSCSHPQCLWNGSRDYAASVNIARLGAALIRHAYTTGRVKHLVITNPSVQPVSYMGMWAALRLPPLVLRDHLMHSGRIYCNGWKVSVKLRSSYATPIMLRFCG

SEQ ID NO: 26332 - protein, 453 aa, Dictyobacter sp.
MKQIITAKLKLTTTPEQFAALRQTQLVYRDALNAVSLYAFEHGKTSSVTTLHKGMYTELRTRYHLPSQLACSVERQVAATYKGLWTKCKKNSAHRLAKITKKRFKGLDQPPHYSSPTVQYTYERDYTFQCDSRVSLGTLNGRISLPYQGYDKHLALIREGATIGDAKLWYDRQKKQLYLLVSLTIGLPDPTPAQLARVVGVDVGIRYLAVTSTSTGKASFHPGKRTRHQANHYARLRKRLQQKGTRGAKRRLRRIEQRERRLKQQANHCIAQQIIMQHPHALIGLENLTDIRERTKRKKRKRKKSGKGTEPVSPQARKANRVYSQWSFAEVHNLISYKAALAGSLTIKVDADYTSKACPMCGHTADENRPRKGLRFVCQNKRCGYTLHADLIGARNITLRTLLIRQDWIRTGCLSTIPDAADKEAKAARLQRYAELRWSSVVTTSLRSQTGDR

SEQ ID NO: 26333 - protein, 405 aa, Dictyobacter sp.
VSNRRTSKRKPTIGTKPSTRTYQFRLYPTRKQQRVLEHWLRLCCETYNAALDERKSAYRMAGVSLSFEDQCAELPACKAVRPDLAEVPAQVLQNVVKRVDLAFQAFFGRVAQDKTPGFPRFKSSGRYHSLTFKQYGNSFKIHPQDQHKRGRLELARLGHIKMVLHRAVTRTPKTAIVKRTPTGKWFVSITVEFSEQPAQKKRALACAEAVGIDVGLHSFAYLSTGEAIANPRFFRQEEAKLARASRKLSRAAKGTNARAKRRKVVARIHERIANRRKNFIEQEASKLVARFGLLAVEALVVRNMVKNPRLSKSIADASWSQFFTRLQAKAEEAGRQVVKVDPAYTSQTCSACEYRQPMPLSVRVYECPHCGLVIHRDYNGSLNILAEAFQACGRAGRVIPEALGL

SEQ ID NO: 26334 - protein, 357 aa, unknown
  TnpB Polypeptide
MIRKSTINLKFVNKGKLEKLKIIANEYQRVVNLFIDRLWKEQQFSGKFVKDTTVDSWLSFALKQTTAKHALSIVKSQRKKKKKTKPTFNKLIMELDSRVVKITQDINSFDIWIKLSNISNILDNKFGKRFSLNLPSKKHFHFNKFLEDGWLIKKSIRLRITEKSYFVDIIFEKKAPIIKIKGKQKAIDIGYKKLIVSSSGEFIGDNKIYEKISRKKQGSKAFKRALIERNELVNISCKALDLTNVKELFAEDLKNVKHKSKGKIHKKFNHQLQRWVYPKVLQKLAMLCEEEGILFKKIPPQYTSQRCSCCGEIHKKSRKNELFKCISCNFESDADYNASLNILHMGRYGVHALQPIL

SEQ ID NO: 26335 - protein, 393 aa, unknown
  TnpB Polypeptide
MLIQKGFKYKILPTKEQEKVLLQCGGNTRFLWNYVLKLNQDYYKETGKFKFWYELAMSLPELKEEYPFLKISHSQSLVVVVRQFDKALKDSFRKKKGFPKFKKKLKLNDSFTSPQAWRLGKGFIYIPKVGEVKWKKSRSLRGKPKSITVSQDGNKWYCSVLCEYEIKEKKKKNKNIVGCDVGIKEFATLSDETVINNPKITNKYKDKLTKEQRSLSKKKKGGKNNFKQRLKVRKVHNKIRDSRMDFLHKTSSSIAKNYDGIVVEDLNVVGMLKNHCLAKAISDVSWFEFNRQLKYKCLWGFKHYIKIDRFFPSSKTCSRCGCIQDMPLSKRTFNCPDCGLKMDRDLNSSINIKEQGINTLGYSGINACGDVLLGTSMKQEKECLDNQANATRL

SEQ ID NO: 26336 - protein, 251 aa, Peptoclostridium sp.
VYCGQHIKLPKLGMVKIRDKQVPKGRILNATISKEPSGRYYVSLCCTDVDIEVFENTNNQIGLDLGIKEFCISSCGEFIENPKYLKKSLNKLAKLQRELSRKTIGSLNRNKARLKVARLQEHIANQRNDFLQKLSTKLIKENDIICIEDLQVKNMIKNRRLSRLISDVSWSEFVRQLEYKANWYGRKIVKVGKFFASSQICNKCGYKNEEVKDLNIREWICPSCNETHDRDINASINILKEGLRLITIQNK

SEQ ID NO: 26337 - protein, 404 aa, Microcoleus sp.
LFNLTYEFKLKPTKSQIAIFEDWLEQNRRVYNYALAERKDWFKSRSCQISACSLRSEYIISADTPRPTFASQCKSLTAYRKTSENLQRVHSQVLQQTLKRLEKAFVSMWEQGHGFPRFKKAGKMRSFVFPQLGKDPIQGTVVKLPKIGLVKFNQSRPIPEGATIKQARVVKRASGWYVMLTLQWDLDVPQPMPHGEAIGIDVGISHFAAVSNGQLFPNPKPFRKLERQLKLLQKRVSRKCPGSSNRAKAQVKVSRLHERIANIRKNYHWELAHNLCDWAGMIFAESLNLKALAKGMLGKHCLDAGWGQFLQILEQCCFKRGVFFLKVDAKKTSQICPNCLTETGKKLLSERVHSCNHCGYITDRDVAAAQAVRIRGLAAVGYTVKMLSEGKLTRVPMTKESPSL

SEQ ID NO: 26338 - protein, 446 aa, Anaerolineae sp.
LAILLSSIPARTEPWAVKVKQAFRFELDPNQKTRMALAKHIGAARFAYNWGLARLKEALEQGRFPPSAIQLHKEWNRWKRENAPWWVEVSKCAPQEAFRDLEKALKAWQEGRANFPRFKRKKSLDDNKARLTGSIRVTPRHVKLPRIGKVRTKERTDKLLELIQAGKARILSATISREADRWFVSLTCVVERPDPEPREARNPEDIVGVDLGLESFAVLSDGTKIEAPKPLKKVLRLLEQRSRQLSRKQKFSQNFRKASLRLARLHCRVRNIRRDFLHKVTTWLAKTKPVIVVEDLNVWGMSQNGNLSQAIYDASWGMFRRMLEYKCQWYGARLIVVPQDFPSTKTCSNCGEIGPPLPLSQRVFRCEACGLEIDRDWNAALNLWQYGLATLNGPTGSSLGSNACGEGRLQGLGPVPLVEAGSSRSFVSPQGVKNDYELQNGISQRR

SEQ ID NO: 26339 - protein, 373 aa, Enterococcus sp.
MKVLKAYKYRLYPTSAQEEFIKKTFSCVRLVHNLLLQDRIQLYKTLKENPDLKVKLPTPAQYKKEHPCLKEIDSLALSNAQVYLDRAFKKFHREKSVGFPKLKQKKNAVRSYTTNNQNGTIKIIDGRYLKVPKLKSLIKMKMHRQMVGKIKSATISLTPSQKYFVSILCEEEVPTVEKTYAAIGITLGSSEFAVLSNGKRIDNDKYTKEFETRINREERKLMRRKEIAKSKGIELSQQKNYQKQKLKVAKMREKLMNQRIDFLNKVTTEIVRKYDLICIEEIHQADVFRNNKLHRGVSDVSWALFVSKLEYKASWYNKRLIKVSICGKSSEHSDNDMSSRLFFQDINEKRAMIDPETATSVQVLTQGLKEVVI

SEQ ID NO: 26340 - protein, 380 aa, Moorea sp.
MIVLEFKAYGKQRQYSAIDEAIRTAKFIRNSCIRYWMDNKGVNKYDLNKYCTVLAKQLTFANELNSMARQASAERAWSSIVRFYDNCKKKVPGKKGFPRFKKHCRSVEYKTSGWKLCPDKKSIIFSDLKGIGKLKLKGTWDLWRFDKKQIKRVRIVRRADGYYVQFCVQVDINEPVPATGNTIGLDVGLKDFYTDSNGDAEPNPRFYRKGEKRLKLYQRQVSRKKKGSSNRKKAINRLGKTHLKISRQRQEHAKRLARCVVRSNDLVAYEDLRVKNMVKNHCLAKSINDAGWYQFRKWIEHFGAKFGKITVAVNPAYTSQNCSNCGETVKKSLSTRTHVCQCGCSLDRDHNAAINILEQALGTVGHTGTWIIDPFAQRRP

SEQ ID NO: 26341 - protein, 470 aa, unknown
  TnpB Polypeptide
VNTALDAASQPAGTSVLSQPAHLAAPVRPASGSWADHTGALAVVFTGLPAGDLVLPVRLAQGAGQWAHLSHFLADPRIWHKIDLVRVRDRKAPGGWRYYAHLLVHQAGYQSIATRARRAQIPAGRRAGVDANVSNLALASFPIGHPEQLLVDQITCTDEQLNAAARAAKRARARQRALDRSRRNTNPTQYSPSARQAARAARRAANRLPPKQITNPGGPRHARADGAPLRAYRRDTLSRGYHCTRVDHAADVRASSQAKRTRAHQVAARVVATHGHSITVEDCTISTWARLWGKRIALFSPGMLMTALAAECAAAGGTLHKAGTQSTAMSQHCLCGTRVPKTLAQRTHECPACGLRADRDIVSAMLACCVQLADPNDPRTARVDYRLAHALKAGFASQQEREGSVNRHQPPASHAAGSARTGSHPVASAEQAALGPPPNRPSCGLDVTGPAENDSTTSCSALRDSQRVNS

SEQ ID NO: 26342 - protein, 377 aa, unknown
  TnpB Polypeptide
MEVKRAYRFRFYPTPEQEVTFARTFGCARFVYNYMLRIRTDAWSKEQKRVGYHDTSALLTELKKQPEMIWLNEVSSVPVQQSLRHLQAAFGNFFAKRAKYPTFKSKHGKQSAEYTSSAFKWDGKALKLAKMDAPLNIRWSRTLPKAAKITTVTVSKDAAGRYFVSLLCDDSVSAKPEASGQVGIDLGLTHFAILSTGEKIAAPNTFRKNEAKLAKLQRRLAKKKKGSANRLKAKLKVTRLHAKTADSRRDFLHKLSTRLVNENQVIAIESLAVSNMQKNHYLAKSISDAGWSEFVRQLKYKSLWYGRTLIGIDRWYPSSKTCSECRYTVPKMPLKVREWVCPECGSIHDRDINAARNVLAAGLAVSALGESVNPVCI

SEQ ID NO: 26343 - protein, 390 aa, Atopobium sp.
VERSYEMRIYPNARQRELIGRTFSCCRWVYNKCLEERRAAYESTGKSPTRFQQDRMLPSWKAENPWLMEADSHALQQAVADLDRAYQNFFRRCRQGGRPGYPRFRSKRDARQSYRTSQGVSVPDARHVKLPKLGLVKARVSRGIEGRVLSATVKQVPSGRYFVCLCCTDCPEPEAAPGAIAVLGIDAGVHDLMVRSDGVKIASPRALARSERRLAREQRRLSRKRKGSASRRKQKRKVARIHERIADQRKDAIHKATTDAVRESQAIAVENLDVRGMERDRRLAKAVADASTSEMLRQLEYKCSWHGRRFVKVSRWYPSSKTCSCCGHVLEELPLSVRAWTCPACGARHDRDLNAAANIAREGARLLEEGTAGPAGTSGAKASGTLLEQA

SEQ ID NO: 26344 - protein, 419 aa, Nostoc sp.
MLLTYQFKLNPTPEQVVILETWGELLRRHWNYALGERLDWLRRTRSQIDRCSLVFEPIGKIPDKPDYYTQASNLKQTKELFPDYKNIYADCQQQNLMRLDKAWKRWLMPDNKGKRGGKPRFKKRGDICSFTFPRVNSHKAGAHLKSNILKLSKIGEIEVILHRPIPDGFEIKQATILSKADGWYCSFSLEDKTVPTLLPIDEIKTATGIDVGLEKFLTTADGQSVTVPQYYRKAQSALARQQRKLARKVKGSKNYQRQANSFARLHLHVARQRKEFHYQVAHWLVSSYDLIVFENLNIRGLARTRLAKSILDVAWGAFLQIMQAVAVRRGKHTAGVDPKGTSINCSGCGERVEKTLADRVHICSCGLVIDRDWNSALNLLKRGSVGLPIPVCGGLDSSQPVKQKVSYVNLRCSRYIACN

SEQ ID NO: 26345 - protein, 382 aa, unknown
  TnpB Polypeptide
METKGGDKMQITITAKIQILPNTEQILQLQNTLSSIKKSLNVVSDIVFLTKELSQPKLHKLTYEILRHDHALKSQMAQSVMKTVVAKYKSAKSNKHEFNKVVFKKPEYDLVWNRDYSLVKGLFSVNTLKGRIKVPFRQEGMDQYFDGSWKFGTAKLVFKHDRFFLHIPSTKEIEVSLIQDIKNVVGIDLGINFLATSYDSSNNTEFYHGRHIKHKRANYSKARKELQQRQTPSSRRRLRLIGQRENRWMTDVNHQVSKALVNSAGQNSLLVLEDLTGIRNATEKVQLKHRYIFVSWGFYQLRQMIEYKAKLNRSLTITVNPKYTSQKCPQCGHTENANRDKKNHSFTCKNCTYTSNDDRIGAMNLRNIGIEYVHAELIKQVP

SEQ ID NO: 26346 - protein, 305 aa, unknown
  TnpB Polypeptide
VLTLDGRVSIPYTGYDKHVALIQQGAEIGAAKLWYDKPKKTFYLLVSLAVETPDPMPETHSTVVGVDVGIRYLAVTSTTKGGCNFYSGKHMVAKANHYARLRKRLQRKGTRSATRRLVAISGRERRLKQDANHVVSKSITQHYPHALIGLEDLTHIRERTKRRKGKKASKKQRTSNATYSKWAFAALHGMLAYKAVLHHSMAVNVDAHYTSKACPICGHTSDKNRPNKGLLFVCQNCHYILHADLVGARNITMRTLLIRQDWMSTGVLSVRPDVSDSEAKAARLKRYAELRWSPDTSPAFHALGN

SEQ ID NO: 26347 - protein, 344 aa, Clostridioides sp.
  misc_feature (150)..(264): Xaa can be any naturally occurring amino acid
MYPNKKQQELINKTFGCCRFVYNKYLAKRIEVYKNDKETFTYKQCSSDLTNLKKELNWLKEPDKFSLQNALKDLDNAYKKFFKEKAGFPKFKSKKINRFSYKTNFTNGNIMYCGQYIKLPKLGMVKIRDKQVPQGRILNATISKEPSGRXXXXXXXXXXXXXXXXXXXXXXXXXXXXXXXXXXXXXXXXXXXXXXXXXXXXXXXXXXXXXXXXXXXXXXXXXXXXXXXXXXXXXXXXXXXXXXXXXXXXXXXXXXXXXXXXXXXEFIRQLEYKANWHGRQIVKVGKFFASSQICNKCGYKNEEVKDLNIREWICPSCNETHDRDINASINILKEGLRLITIQNK

SEQ ID NO: 26348 - protein, 460 aa, unknown
  TnpB Polypeptide
MYATIQVRINASDAVKDYLVYQCRQSNNLINSAIYHVKQSHFEDCPRGEFFSGDEFRTGFKLQRVKTAKYAELCTSLKDNPNYKALGGQSAQQTLKSVAESFSSYNGILANFFKGEVRKPKMPRYRTKGGLAPISYPVQAVQFDIETGRCRLPVSLEIGSDVKELFGVKEVWINGCVGIKTSQIREVRILPRNNELYAEYVYEYGNQGVSCSLALDHSQALGIDHGGDNWLTCVSTLGKSFIVDGRKLKSMNQRYNKQVATIKEGKAQGFWSDQLASITEQRNRQMRDAIHKAARLIVNHCLENKIGFVIFGWNAGQKDGSNMGKRNNQNWVQIPTGRLKERLQQLCEAVGIQFVETEESYTSKTSFLDNDFLPTFGEKPKGWKPSGSRVKRGQYKSANGTLINADCNGAANILRKVATQLGLNLVEVGKAALNLPKRYDLFKGLKKAYRKRCEACLQTA

SEQ ID NO: 26349 - protein, 403 aa, unknown
  TnpB Polypeptide
MRTVEFVVLPVTKAKARKMFQIAGACRYIWNHFREKNLADYQAFRNGKGQRPQTSYFSLGVEFTRLRHETDWMLELPANPIKHTLKYFADAMKEAMAGKKGFPKPRSRKRTAPGFTLPSPGQFRIEKYDRKYRLLRIQGVGWVKITRRGGHPWENGTPKQVVLRHDGHRWRAFVFYEVEVEEKMDDGEVLGVDMNARQIATSDGHFYFLPDLKKKEARRKRYQRRMARQIKESNRRKDTKKKLAKISRKIANIRKNWVHQTTKEIAGKCGTVIVEDLKVKNMTASARGTVENPGKKVKQKAGLNRAMLDTAFGEIRRNLEYKCGRLVEVNPAYTSQTCSRCGHAEKENRKTQARFLCVSCGFASNADTNAAVNIRRLGVARLHGEDIASANPVNREIDTRLLF

SEQ ID NO: 26350 - protein, 551 aa, unknown
  TnpB Polypeptide
MPKARKRKDTQFDNKMSKCVFLYGNPTNDKADKIKRMQTEFTKLINQYIKQLYNSNNFTLQIVKDNNRDSQITSFEKSIRPDKINAAYSQNAFKIAITHLSNRLDNIRLDMCRECKSIFTTSKVLFAMSIDGKGRAEMITAMQDISKSAKSKKDASFYDECAKELKSIEDSEFKFMQQEFRVIYDMVSCEYKIPYVSRSQIPLDSRIMAIKPSRNIKAPYVITISNMTDVGGEKIEVPLNTSKHSIHKINTRKMAGMVSISMDIQRCLKVDWSYKNCVSQPKTSKIIGIDTGISDAFHTSEDKAIGSMSPVIDFYKNDVEKSFASLSNMRNKKSKISHYLRRHENLPEDVRRSLIQKVDKLDQMIQKAEAPHRKNRRYYNMLEHEIKSSIDSYIKSIDQETLTVLEKLDIKEFNNSRKANGKRSMFARGQLQKKLMETLNWKGYDFKEIEPDYTSQCCPVCSYTDKANRNGKSFKCQCCGHEADADYVGALNIKARAEDKEILDVCEKYKYNHGEMQKYIKIVYHTRNEKYKAAAGKAMRKSEGSGSRDAA

SEQ ID NO: 26351 - protein, 536 aa, Kandleria sp.
MTDEEYKKTLKQFHKLSDRHILVVETDMPYSDVLKIVTLSDKIRKAGNELVGLMRKNYDQLLRTKRYRKLLKLYGNTQDKDKRRVLAKQLNEMQSEYNVTWNFCRKSMIPIGKKYGIDAIFALTKAEDVWRGIKKCLYDNGKMIHFSKYGELPCIRAKQINRGIPISVKGDKLQFRIGKNIFGIQINDRFQQDEVDAVLSYHADSEMIDDKAVYRFVEDAYCIDTYRPCYATLVPKLIRGKYRLYLHLTIEGKAMPKYDKHGNPRHIYGNGTIGADIGTQTVAYTSNTEVGLKNLSERGNSIQTSERKERLLYRAMDRSRRATNPQNYNDDGTIRKGRKTWKYSNHYKKLKAKHSELCRINAVNRQLAINEDANHLRSLGDVFVTEPKNAGKLMKRAKETTKNSKGKFNKKKRFGKSIKNRCPSGFQTAVERKFKATGGTYIEVPNNYRASQYDHTADDYIKKKMSDRLYKLLDGTEVQRDWYSSFLLYCYDFRTEDIDKDKCNAEFERCYSKEKGLITWIKTNKIKILNSGIKIA

SEQ ID NO: 26352 - protein, 385 aa, Nocardia sp.
VATVQLRYNFRIDPSPGQQIALARAFGCARVVYNDGLAARKAAFEQGLPRISDAELSKRLTAAKKTPQRAWLGEVSAVVLQQALADLNTAYRNFFASLYGKHQGPRVAPPRWRSRKDPRQSVRFTRNASFAITAGARLRLPKIGDVTVRWSRDLPSEPSSVTIIRDAAGRYFASFVVQVGDQRLPPSDSEVGIDLGLATFAVMSNGQTIASPRFFRHAERKLRKAQKTLSRRKKCSANRAKARVKLARAHAKVADKRRDWAHKYSTSIIRDNQAVFVEDLCVRGIARTPLAKSVHDAGWGMFTRLLEEKAARYGRTFGKVDRWFPSTRLCSACGALGGNMPLHIRNWTCTCGVTHDRDLNAAVNILAAGQAERLNACGGAVGLPA

SEQ ID NO: 26353 - protein, 556 aa, unknown
  TnpB Polypeptide
LEDSRLENQAAWFNTQYFYDDSGRVIARLNPWHNEVIEYDTQGQAVRIGDRTYCYDHLGQITAEHGFFEALYGTDYNIEELNEKSFCPHQTNDFQYDKNSQLVEAFGKRYSYDLYGRCIRKGGTSYLYLGFEEIASFEEGLCKTLKIPGLGGPVAIEIDGKPYAPIVDAQEVVRKLIDPMNNSIYAENHCDVFGNGLTEEIPYAYRGKRYDQETNLLYFGKRYYNPASHQWLKPNPLGSIDHDNLYQYVYNNPIRYSDPIGYSFWGYALGLGEILAGGALMLRPGFPRFRGAHRYNSFCYPQSGFVLDGGELKLSKIGNIRVQLHRPVEGKIKTCTLRKNTSGDWDVSLSCEVEVWPKAPKEEAIGIDVGLTHFATFSNGKKISNPRFFKKGEEKLARAQRQLSKLKKGTLERRKKGKSVAKIHEKISNQRKDFCHKESRKIINQYQYICVEDLEIKKMIQKSSFAKSIADASWNQFRQFLTYKAEEAGRKMGLVNPAYTSQTCSQCGRQEPKSLGDRWHCCSQCMYSASRDCNAARNILALGLDGLSASSRSPPL

SEQ ID NO: 26354 - protein, 390 aa, unknown
  TnpB Polypeptide
MKKLKRAYKIEINPTDEQKSKIHRTIGVSRFIYNFYIAHNKEVYEKEGKFVSGMDFSKWLNNEYIPNNQDKKWIKEVSSKATKQAIMNGDKAFKDFFKKTKGFPKFKKKKNQDVKAYFPKNNKTDWTIERHRVKIPTLGWVRLKEFGYIPVNSIVKSGTVSQKADRYYVSILVEEDDIQVSKPVNEGLGIDLGVKEFAICSNGDVFKNINKTSTVKKVEKKLKREQRKLSRKYESLKIRNKNIKEGRATRQNIQKQVVKVQKLHQRLTNIRTDYINKTISSIIKQKPSYITIEDLNVKGMMKNKHLSKAIASQKFFEFKTKLMSKCKQNNIELRIVDRFYPSSKTCSQCGKVKKDLKLSDRIYKCDCGFNIDRDLNASINLKNAKKYKIA

SEQ ID NO: 26355 - protein, 387 aa, unknown
  TnpB Polypeptide
MNKGVKFRAYPSRAQQNLINQTFGCCRFIYNKGLAMRNDAFANGQRIGYLQTSAMLTELKKQEDFTFLKDVDSIALQQSLRDLDRGFKNFFEKRARHPQFKSKHNNHQSYRTINQGDNIRIVGKYIKLPKLGYVKIRQSMEVGHINNVTIERTPTGKYFVVLNVDFEPELRHNNGCMIGIDVGIKEFYSDSDGNVVNNPKYLEKSMHKLIREQRRLSRKQKDSNNHNKQRIRVAKVHEKITNRRNDFLQKQSTMIVSENQTICIEDLNVKGMIRNHTLAKAIASVSWSKFFSMLEYKATWYGNNIIKVPTMYPSSQTCSCCGYKNSLVKNLAIRSWECPQCHTKHDRDTNASINILNKGLSIESINSTVGHTEIYACGDRVKLKLLQ

SEQ ID NO: 26356 - protein, 293 aa, unknown
  TnpB Polypeptide
VLARLDQTYQAFFRRVQRGEKAGFPRFQGRDRWHSFTVKEYGTGARLDNGFLALSKRGRISVHWSRPLEGPPKTVTISREADGWYVAFSCVDVPVQPLPLTGQETGIDLGLASFATLADGSQIATPRRFRVAALALKRAQRRVSRRKKGSRRRRTAVALLAKAHQHTRNQRHDFHHQAAQPGSPPAGARVRRDLLRRVAGPHHGAEPLPGEEHRGCRVERVPRHPHVQGCECREARARGQPCVYQPDLLRRRRHRLHRLVRPVASVSGRRSEPPSRPHCCAEYAAAGANTRAQ

SEQ ID NO: 26357 - protein, 435 aa, Shigella sp.
  misc_feature (371)..(391): Xaa can be any naturally occurring amino acid
VKRLQAFKFQLRPGGQQECEMRRFAGACRFVFNRALARQNENHEAGNKYIPYGKMASWLVEWKNATETQWLKDSPSQPLQQSLKDLERAYKNFFRKRAAFPRFKKRGQNDVFRYPQGVKLDQENSRIFLPKLGWMRYRNSRQVTGVVKNVTVSQSCGTWYISIQTESEVSTPAHPSASMVGLDAGVAKLATLSDGTVFEPVNSFQKNQKKLARLQRQLSRKVKFSNNWQKQKRKIQRLHSCIANIRRDYLHKVTTTVSKNHAMIVIEDLKVSNMSKSAAGTVSQPGRNVRAKSGLNRSILDQGWYEMHRQLEYKQLWRGGQVLAVPPAYTSQRCAYCGHTAKENRLSQSKFRCQVCGYTANADVNGARNIXXXXXXXXXXXXXXXXXXXXXSGVAVRCLLFRQRTQASVARAVVIQRKKTACHKVNSDARYVDIQ

SEQ ID NO: 26358 - protein, 441 aa, unknown
  TnpB Polypeptide
MATPMVRAHKIHLHPTPEQEEYLRRACGTRRFVYNWGLAEWKKQYAEYKEGKREKKPTANALKKHFQAIRAKEYPWTFDVTKCVIEGAFADLGDAFSRFFKGQNKYPKFKKKGKSRESFSLANDKFEVGDHWIVVPVLGRFLMDELQANGTLPQKIRNKHKYRRGLGKINMAESLRFVVADPNKKAGKWRNERRKVSCSSVKILGATIGLSGGSWCVSIHVEVPAVSVINTHPVVGVDVGIKEAAIVSDGRRFENQKPLTRHLKKLKRLQRDFSRKQYDPQTKRGSKNREKLKIKIARLHGKIAHIREDAHHKLTTEIARTCSVVGLEDLHVKGMFKNRKLARAMADAGLGQLLRFFETKMQTGGGQALFVDRFFPSTKTCSGCGHVKKRMPLKYRTYCCLKCDLVIDRDLNAAINLEREARRILGEVLHVPVSDSGSGRT

SEQ ID NO: 26359 - protein, 384 aa, unknown
  TnpB Polypeptide
MYQVRRVYIGKTPQVDELARECGKLYSQTVTSFWRVVRKQGLWLKPKHLMRWYTSDKLHAHTADACIQAFFASLNSWRARRKSDPNARPPRRRRSYFRIKYKSTAIRLRDGKLTLSNGKGNQPLILEWQWETPKTVVIHWTGTLYETIATYQVEVPAQAQGNKVAGIDLGEVHLAVSHDGEQTIILNGRLLRAKRQYQNKLKATLQAKIDVKQKGSRRHKRLARSKHKQLKKLKNQIKDIEHQQSSRLISTLHASGVQTVVIGDVRAIRQDLDVGTKNNQKLHQWSHGSIRHKLTYKAERHGMSVSLQEESYSSQTCPSCGKRSKPRGRVYRCNACRFSFHRDAVGAINIRAKYQGIFGTSLAVGGMAPPIGMRSKPHTGVARR

SEQ ID NO: 26360 - protein, 493 aa, Streptosporangiales sp.
VGRFQVPAGWTAQAYRFALDLTPSQQRAFRSHAGGARVAYNTMLALVKAVMDQRAAERTYGIAEEDLTPPADWSFRGLRDEWNGLKHDAAPWWAENSKEAYNSGLYALANGLEAWSKSGTGERAGRAIGFPRFKNAKTRRSVRFTTGALRVEPDRHHVTLPRLGQLKTHESTRKLARRVEAGTARILSVTLSEDVAGRVFGSFQVLVKRSAEVPGHVGAGEPVVGVDVGVKEGCLLVAATPDGREVHRVPAPRSLAAAQGRLRALQRRAARQQGPWDPRTQARQQPSKRWEKTRRRVARTHARAAAVRRDVLCKETTALAQRHEVITVETLNASGMRSAGGARKKGLNRALSDAALAEIRRMLGYKCEWYGSVLVEAYRYFPSSQICSGCGGRKPSLTLDDRIYECDFCGLVIDRDLNAAINLARLGERLRTGGTGTGTGSSPAASHRAGDGRGATRETATTPVVNAAGRETSTRHGSTAGKTETATPQGEAA

SEQ ID NO: 26361 - protein, 339 aa, Streptomyces sp.
LAGRGLLGGAPAVPARRGGRLQELLRLPRGERKGAKTGAPRFKSRKDTRQSIRFTANARWSITNSGRLNLPKTGAVKVRWSRTLPAQPSSVTVIKDAAGRYFASFVLDTDPAADATRMPDTGQAVGIDLGVAHFAVLSDGTKIESPRFLRRAEKKLKKAQRELSRKQKGSKNREKARLKVARAHAKVADARHEFHHQLSTQLIRDNQAIGVEELAVNGLARTRLAKSVHDAGWSAFVHMLEYKAARYGRTLVKIGRFEPTSQTCSACGTKDGPKPLHVRQWTCTACGTLHDRDHNAAINVKTAAGLAASACGAPVRPGLVPAQRAETGRHGSPPETCAA

SEQ ID NO: 26362 - protein, 378 aa, unknown
  TnpB Polypeptide
MLIQRSYKYELIPNGEQVRKLKQFCGCCRFVFNKGLEEVKKYYDYTGYLLNYVQLAAFLPKWKQDVDWLKDCHSQVLQQSMKNLSYGLTNYTAGRANFPRFKVKGKKDSCRFPQGVKSDQNNNRIYLPKIGWVRYRNSRTIVGTIKNVTVTAKCGKWYVSIQTEYEQEKPVHTGGDIGIDMGVVRFATLSDGKYFEPINAFHSLKGKLVKLQRRLKRKTKGSSNWKKLVAKISRLHHRIANIRKNFLHQISNTISKNHATVYIEDLKVGNMSKSAKGTKDNPGKNIRQKAGLNRAILDQSWYEFRRQLEYKLCWRGGQLILVSPQYTSQCCPACGHTAKANRTTQALFACVQCGYTENADVVGAMNVLQRGRALSAAG

SEQ ID NO: 26363 - protein, 402 aa, unknown
  TnpB Polypeptide
MKQTIIYKLNPTKEQEWHLHNLCSIATKLYNTDNYQRRQEWEKTGKIPNAYTQKKALKNNVWFKLLPSQTAQEICFNLQNNYKSWFKLRKKDKEANPPRFRKKEMLSPITFYQQFKIIEDKIILSVSKKYKEERGIKNLQIEFSKWKEGIGTAKMCQIIFAKGRWFANIVYEVADKQINLNEKVRAIDLGIINLASVADNQGNSNIYSGKQALAVQHYFNSRIARVQSKLTKQFPKRHKSKCLNNLQQKKKRQINQIIHTISRQIVDDAKKDNISVIVIGDVKDIRKDKHFRKLTSQKLHSWSFSKLTQQIEYKSALSGIRFVRVSEENTSKTCSCCNNIRKSNRITRGLYKCKFCGRVINADLNGAVNILKKYLQLFPMENRSIGSVAQPLVSRIQNVIPR

SEQ ID NO: 26364 - protein, 359 aa, unknown
  TnpB Polypeptide
MKALKLRIKDKHAKVLIQLASEANFVWNYCNELSYKHLQRTGRFFSAFDVQKYTAGATKTGLSLHSQTIQAITEELVTRRKQFKKAKLNWRVSNPKSAKKSLGWIPFKASGIQYQNGQIKYAGRWFGLWDSYGIKRHKVKTGSFVQDSRGRWYVCLVVDAPEASQTMSSIAAQGKTPVGIDLGLKDFATLSNGQKIEAQRTYRKYQQKLGIAQRANQKQRVKSIHAKIKNIRSDFQHKLSRQLVSDHAAIFVGNVNAKGLAKTKLAKSVLDAGWSAFRTMLKYKSQQAGVWFEEVNEAYTTQTCSCCGSRCDSPKGRTGLRIREWTCQGCGTTHDRDVNAAKNILALGHERLAVGIPVL

SEQ ID NO: 26365 - protein, 365 aa, unknown
  TnpB Polypeptide
VLRTVTFKLRLTKQDSKTLLDTMRAYTKAFSISTKWGFENRSWNKVDNHNATYKLTRQSIPDLPSSLVQGARDCACEALKAVKCETFPERKPLSAMRYNQRVITVNLVHGIATIASTKGRIKATFFVPSNYRDYLSWSIKSSTISYDRRNKVFYLHISLEHSDPEKIADLNILGIDRGIVNIAVCSDNRFFNSKKTKNRRARYAYLRKELQSKGTKSAKRKLKRLSGKERRFGTDVNHCISKQIVNSEYTVFALEDLSKIRVQKRRGKEFNSKLNSWPFYQLEQFIRYKAEAIGKHVLLVDARYTSQKCSNCEHTYKGNREGSAFLCRKCGLEIHADLNASRNIAQAGISCLSRLSCQPAECIPT

SEQ ID NO: 26366 - protein, 359 aa, unknown
  TnpB Polypeptide
MDDKVHEVPVKVKDIFEIRDLHCLSSQMRQGLISRTQENIKGLSERKKKGHKIGKLKYKSEVRSIPLKQFGNTFKILDKRYITIQGLKQKLKVIGLKQIPEGADIANGTLIHKNGNYYLLITTYQKKTKQIAVVEKSVGIDFGLSRQLMLSRTGIAIQYAIPVSPKLRKLARKLSKQELHSKNWNKTRIKLNKEYDKATNIKQDIKNKVVSFLKDKYGTVCFQDENVKAWQRIWGRKILTTSIGGIISTLKKKVHTPIEVPKMYPSTKTCSKCGNIQDIALDERVYVCKNKKCSNIMDRDYNSSINIENEGLKRVGMVRTELTPVEIESSTLLFLRYFNSIPYVKASSVNESGSFTALA

SEQ ID NO: 26367 - protein, 451 aa, unknown
  TnpB Polypeptide
MGRDTQALPRPAGEDLSASSEPKTLFGGNLCKYTRTGNSADQSTIFSGCPLGMYLTRNFHIEGTDQLQRLSRCSAELWNRICKWYWRTVDRQDHWLSKTAMQQWHCKGHDVLPSQTAQAVADQFYNAVSSWHGNDRQGDPPKRCDKEYNVLRWKSQGVTLRDDGVLRLSTKRGEDPVLIDWPSSKEPKTVEIGKRPGGFVVRAQYDTQPVDRTTGNEVAGIDLGEKHLAAVFTGEDAFTVNGGELRALRHYQNQLKAKLDAKIDRKEHGSNRWKKLVRTKNKQLGHIDNKITDLLHKLSRKVVEMCLERDVSAVAIGDTSGIRDRIDYGSQMNQRLHQWAHGEFAHMIEYKAKLAGISVERVDEAYTSQTCPNCKYRHEPKDRNFDCPKCSLEAHRDVVGAANIRRKYVGSSGGRRTRLPGVMASPSGVRFHPHLSCNSRSDDLCHVQVAA

SEQ ID NO: 26368 - protein, 388 aa, unknown
  TnpB Polypeptide
MIKSMKVMLLPNNVQKTRLFQHAGAARFLYNWALSMEEKNYKLGGKFISYYELAKELTELKRTDEYAWLNEISITTCQKAIKDACDAYSNFFKKRAKFPKYKSKDKTKPSFFQTDQVIEFTDTHVKLSCLSLSRKANRKQLNWVRLAEHGKIPINVKHSNPRITYDGLNWWISVGIEYPDKNVNLSEEGLGVDLGIRNLAVCSDDSIYPNINKTKAIKDLEKRKRRLQRSISRKYEMNKKGDEFVKTKNIIKDEKKLLKMHHRLSNIRKNYLHHTSKEIVEKNPKFICIDDLNIQSMMKNKYLAKAIQEQSLYEFSRQLEYKSNFKGIQFIKADRKFPSSKKCSQCGRIKKDLKPYQKTYKCECGNVIDVHKQAALNLKTYGEENIAE

SEQ ID NO: 26369 - protein, 377 aa, unknown
  TnpB Polypeptide
MKTYCFKLYHAKRNKKLHKSINIAGSIYNHCIALHRRYYRIYGKSLNANKLKKHITRLKRRQRYAYWNNLGSQAIQDIVERIDRGYKLFFHNLKRGIKTAPPSFKKVRKYKSFTLKQAGYKLSNDNRIKIMGKEYRYHKSRDIEGKIKTVTVKRDPLGDIYLFIVCQVERPEVSPRSGNIVGLDFGLKTFLTTSDGNKIASPMFFKQGSKKLKQLSRALSSKQKGSNNRRKAKQALAIGHKKIVNQRKDFHFKLARELAETYAAICIEDLSLKGMQKLWGKKISDLGFSSFVNILEHQCQKAGTKLVKIDRFYPSSKTCSSCGFVFKKLTLADRTWTCPNCNVTHDRDVNAAINIYRVGTSTLKGEAVRPALAGVLQ

SEQ ID NO: 26370 - protein, 385 aa, Spirillospora sp.
MLTTWKRTEELAFLNEVSSVPLQQTLRHLQGAFAAFFDRRARYPRFKSKRKSRASAEFTPSAFRWRDGRLTLAKMAEPLNVVWSRPLPDGQAPSTVTVSRDAAGRWWVSLLCEDAIEPFPASGNAVGVDAGLNHLVTLSTGEKVANPRHERADRDRLARAQRELARKDKGSANRAKARLKVARIHARIADRRRDHLHKLTTRLVRENQTLVIEDLTVRNMVKNHALARAISDAAWREMRSMLEYKADWYGRDLVVIDRWYPSSKLCSSCGALAEKMPLSVRAWRCRCGTVHDRDVNAARNILAAGLAVTACGAAVRPQRESSRTGQLAVKQEHPRATKGIPTLQGREKCQSYLYDLCVGWTYSNSRASLWRTGCAPSPAHSQAAT

SEQ ID NO: 26371 - protein, 517 aa, unknown
  TnpB Polypeptide
LFAHQNASRSKDGRESRHPTTRTTGYSPAGVSKSSAAWINIPRHVRPCSFFTRLMRSYCSSSGTSMLTWFDTVPTIIRRFMLVSLVHRSSDEAYQRVRSSSPVRRGRGVVSSTVGRFSRSLERDQLSAPNQLRRPGRRRLGNRRVPRSVRRYARLFDRSTDRAQEPRSVALVLRTQRKGRSQRQARLLGQPRRGRELRTYIRNTSYSVEWGEHSRLEILVGQDLKEEYGLGYQERLRLEVQGDPNWKEYDKQGRLELYYDDVSETFRAFQPVTTDNSRLAHPLADETAALDIGANNIVACTVSTGEQYLYEGRDLFKRFRETTQRIAELQSKLREGRYSSKQIDSLYRRRTRRRNHAMDAIARDVIERLYDEGVSTVYVGDLTDVLETHWSVRTNAKLHNFWAFRRFIKRLSCTGEEYGITVEVRTEAWTSQTCPNCGSTEDTTRHQDTVTCTCGFEGHADLSASETFLRRHETDVARPMARPVCLKWDSHEWLESPRSPRPNEEHTNPQVASVDSA

SEQ ID NO: 26372 - protein, 402 aa, unknown
  TnpB Polypeptide
MEQAFRYRFFPTPEQDNLLRRTMGCVRLVYNRALAARTEAWYEKQQKIDYVETSALLTAWKKQSELDFLNEVSCVPLQQGLRHLQKAFSHFFAKRAKYPRFKKKRSGGSAEFTKSAFRWKDRQVFLAKCTEALPIRWSRPLPDGCTPSTITVKLDASGRWFVSLLVDNPGIKPLSPSIKAIGIDAGITSLMATSDGQKTINPKHFNRKYKRLRQAQKALSRRQKGSQNREKARFEVARIQASISDARKDFLHKLTTQLVRENQTIAVEDKAKVRNMVKNRKLARSISDAAWGELTRQLEYKAKWYGRTLVKIDRWFPSSKRCGKCGYIIDKLSLKVREWTCPKCQVFHDRDLNAASNILAAGLAVLSSNAEEVCGANIRPNRHSSKGQLRNSGNRKKQKLKE

SEQ ID NO: 26373 - protein, 420 aa, unknown
  TnpB Polypeptide
MKLPQRGGNGTMENTKVMKLHIHPSAEAVAAFKEMTSVYKDACNYVSQYVFDNGFVLNTNELNAKLYSSVRSMFGLKSQMTQSAFKTVTARYKTVKEQLKQKPYKYKNENGEWVNIARTLEWLWKPINFHRPQADLVRNRDYSFLENGTKISLNTLGKRVIVTFEKPACFKEYFENKEYSFGTAKLVSLSNEWYMHIPMTKAIADELDIAKPAHVVGIDRGLRFIISTYDEKGKTSFVSGKDIMAKRQKFADVRAKLQSKGTKSAKRALKRLSGRENRWMSDVNHQISKTLVQTYGAGTLFVLEDLTGVSFSDENLTRDSKSNRDLRSWTFYQLEQFLTYKAHEAGSEVIKVSAGYTSQRCPKCGRIHKENRNHKTHEYICDSCGYRSNDDRIGAMNIYTLGTMYVSGDTNPRFGVRKVN

SEQ ID NO: 26374 - protein, 429 aa, Candidate divison MSBL1 archaeon
MKRVLRQNLRGLNSEEYETLKSMCRLSKNLYNATLYELRQSFFDNRGHLDYYSAWERLKENFNYEMLPSQAAQQTMMHVHRAFRSFFKLTEMKEKGEYEGEVRLPGYLDKDGFFSLNLPNQSFQVKKDHIRIGIPRSFRREFDCEMTEVRIPFTYEEVKNKRIKQLQVIPKAKAQHFEYRLVYEEEKTQIETEEKTWLSIDLNVDNLAVCGDHSGHSFILDGRKLKSMNRWYNREIARLQSIKDKQGIQGNTRRINELYRDRRNKIHDYFNKAVHWILEYCKANKIELVIAGENEEWKQKSRLGDKNNQNFVQIPFDLFKRKLKSKLELHGIKFERVNESHSSKCSFFDWESVEHHEEYVGTRIERGLFKTSDGTLVNADVNGYLNIARKYFEENKEEGKLKTLRGVESSGVVATPRRIREPFKVPAFP

SEQ ID NO: 26375 - protein, 554 aa, unknown
  TnpB Polypeptide
MARCFLSALNVAEITKSKLMKSTVKLVTNIKLEIVEPSEEFSEMISTLSKLTNTSSKILFEFIKLNKDKVSSINPQGNIMLKRKEDDWVLALDGEKIPFEYSKTDDDKANPKIKNTTFRDKELSGIFREAGVANPSYGLQILENAANRYSGYGSRNADTKKGKIPKSFISFRDKGSFNLGRCGFVNLVWSNSGDVHTVRVKNPKSEGAKVKANPIEVKVRFSPTPDLEKKIKEFKDSFGVEVDKKTGKEITKFQANFSKKKNNSFVILLANYRKELAYEPVGTLGVDLNLDKEQWITTSAPIFGGSYHYPMPSHISKIIKEIDEVNSKINRSLEVSSKFRRIKGNVPHDNKNHSIESFGIVHKQRRRLRNRCVGENGLHAKLKDAIFQDRGVNLIKNYLIKNNLGLAMDMVQTGATTGTFGHDKVQEFFEMLLRTQGIPVKNTPAYYTSQRCSKCEHTEEKNRDHKAEEPQFECQKCGEVMNSGVNAAENIAQAALVMFEHDMYYVNKKKKDCRYGEDGKFYDIRNGKDNKIPFSINYIQELKKEKSACKNTNQ

SEQ ID NO: 26376 - protein, 122 aa, Ruminococcus sp.
LTDFQHKLSTSLAEIYDAVCVEGLSLKAMAGKLHFGKSVHDNGYGQFLSMLEYKMKERGKYLVKVNRYFASSKICSVCGKKKAGLSLSERIYYCECGNRMDRDVNAAVNIMNEGKRILIECA

SEQ ID NO: 26377 - protein, 398 aa, unknown
  TnpB Polypeptide
MEAAKVWNLCGEIHKQARMSHTKWPGRNELQKATKGQFALHSQSVQMVVHAFLANIDTTRKLRQSHQMKMKYPWREKRFYPVKWPAQAVSRENGRVVLPMGKGRASLVLHLDLPENSGACSLVWNNGFELHVCVETQQAEEAPGTVHATVDLGEIHLATVSTNIGEAMIVTGRGIRSLKRQRSKQLGKLAKKQSKCKEYSRRWRKLQRAKNRIKARAERRVRDMRHKATRKVINFCQEHEVGSLFIGNPHGVRNRDAGRHHNQRMSLWEYGKDIDYLTQKSKQAHIMSFTGSERGTSSQCPVCGHKHKPKGRNWACRKCGFTGHRDIVGSVNMHKLAFDEHVSFPHSVTYLRPSLSRRSSRADTPLASPDACCLSQSTGQPLLLEQVPTGIGHTVGVR

SEQ ID NO: 26378 - protein, 403 aa, Actinobacteria sp.
MKHSTVQRAYRFRFYPTREQEHLLRCTLGCCRKVYNMALEYRSEAWHQHQQPTDYKTTAALLVGWKKTEEYAYLKDVSSVPLQQALRHLQAAFKKFFDHQGGYPKFKAKHDMGSATFMRSAFTWDGGNLTLAKMREPLPIRWSRTLPKNTQPSSITISLTPAGRWYVSILCKTEVEQLPKSEHHIGIDMGVADFAITSDGMKIANPRHYAKYARRLTKAQQNLARKQKGSANYQKARREVARIYARIRDTRHDFLHKLSTQLIRENQTIVLEDLHAANMTKRCKPKPDPDKPDTYLPNGQAAKSGLNRNILDCGWSEFRQMLTYKAQWYGRQLIILDQWYPSSQICHTCGKNTGKKPLNVRTWQCPYCHTVQDRDINAAHNILAAGLAVKACGDTRLQHATIR

SEQ ID NO: 26379 - protein, 402 aa, Escherichia sp.
VKRLQAFKFQLRPGGQQEREMRRFAGACRFVFNRALARQNENHEAGNKYIPYGKMASWLVEWKNATETQWLKDAPSQPLQQSLKDLERAYKNFFQNRAAFPRFKKRGQNDVFRYPQGVKLDQENSRIFLPKLGWMRYRNSRQVTGVVKNVTVSQSCGKWYISIQTESEVSTPVHPSASMVGLDAGVAKLATLSDGTVFEPVNSFQKNQKKLARLQRQLSRKVKFSNNWQKQKRKIQRLHSCIANIRRDYLHKVRTTVSKNHAMIVIEDLKVSNMSKSAAGTVSQPGRNVRAKSGLNRSILDQGWYEMRRQLEYKQLWRGGQVLAVPPAYTSQRCACCGHTAKENRLSQSKFRCQVCGYTANADVNGARNILAAGHAVLACGEMVQSGCPLKQEPTEMIQATA

SEQ ID NO: 26380 - protein, 402 aa, Proteus sp.
MKRLQAFKFQLRPNGQQEREMRRFAGACRFVFNRALARQNENYEAGNKYIPYTKMASWLIEWKSDTETQWLKEAPSQPLQQSLKDLERAYKNFFQKRTAFPRFKKRGKNDAFRYPQGVKLDQSNSRISLPKLGWMRYRNSREVIGEVRNVTVSQSCGKWYVSIQTEHEATEPQHGSTSIVGLDAGVTKLATLSDGTVYPPVSSFKANQRKLARLQRKLSRKIKFSANWQKQKRKIQRLHSHIANIRKDYLHKVTSEISKNHAMIVIEDLKVSNMSKSAKGTTERPGRNVKAKSGLNRSILEQGWYEMRRQLEYKQLWRGGQVVAIPPAYTSQKCACCGHTAKENRPSQSQFECLECGYTANADINGARNILAAGHAVLACGGRVQSDRPSKQEPAEVIQTSV

SEQ ID NO: 26381 - protein, 397 aa, Oscillatoriales sp.
MIVLEFKLKGKQQQYRVIDEMIRTAQFVRNKALRYWIDNQGVKLSDLYKQCAIMAKEFEWAGKLNSMARQASAERAIFAIQRFFANCKAKKPGKKGYPQFKKHTRSVEYKTSGWALSVDKRCLTFTDGFAAGTFRLIGSRDLHFYAPKEIKRVRVIRRADGYYTQFCINVERTQELVPTGKAIGIDVGLNHFLTDSNGETMTNPRHLRQSERALKRLQKRVSRKKKGSSNRKKAINKLGRKHLKVSRQRKDFAIKTALYVVKSSDFIACEDLLVQNMVKNHKLAKSISDAAWSQFIQWLQYFGKVYGKTVVAVAPQYTSQDCSSCGNRVLKSLSVRTHVCLCGAVLDRDCNAAKNILAKGLRQAGINLNTAGHAGINAWGQTDLYSLVVTSTGKLTG

SEQ ID NO: 26382 - protein, 471 aa, unknown
  TnpB Polypeptide
MKRTVKIKANCSNNEDEILLIGSIQRNIKNYVWSRYSGIGSLLKQSGWTIRDELIQKDLLSKKITKTFSRTAIEQSASIIKTNWIATKKKVKKAIAQNENLTEDDKHYLYLCLKHTPTLYNILNYKKVDYSIDYLKDLKVDVHRLNNLLRRYVRRYKTKSHTNKINIIINPNIYKFDSNNKNFCFTGKKKHSRIVISLIGNVPKLKGTLELVKNQKSNQYYLHVPLDRIISKKEKTEQSEILGLDVGMTDLITLSNGSVYGANSSELFYTLSDNLVNKNRSRLFAHKRKLEQQIATEQDQSKKVILEQKLKNLEDNNLGSKKRSSKISKYKSRIVSHINCELNKMIKEEDIAEIVREDLNWISKKKKMSRKQQNRFSTWTKGILLERLSVKLAEKGIKETIVNPAYTSQICCKCNHLGIRNGKTFKCSNCNLSIDADFNASINIKKRKFIREINIDTPYKQVKEYYENLSV

SEQ ID NO: 26383 - protein, 323 aa, unknown
  TnpB Polypeptide
LKKLGNNISSFWSLIKKSDYNKKVRLPKYLHKTDGRFIVEFNKQTFSNKRDDNNNLIICKSSLDLRIPTKVENPQQVRIVPKTGCYVIEVIYEIKENKPKQNQRIASIDLGLNNLATVVTNDGDNPILISGKKIKSINQYYNKMTSKKKSLLPYNVFTSKSLDRLWLKRNNKISYEIHKITKFLANYFDERDVSKVIIGNNSGWKNGINLGRRNNQNFVSIPYSKFINQLTYKCQLLGITVVTREESYTSKASFLDYDEIPNYKDEVIPKFSGKRIKRGAYKSKTRIINADVNGAYNTMVKEDTNYIIGNREQLGFNPILIKL

SEQ ID NO: 26384 - protein, 378 aa, unknown
  TnpB Polypeptide
MQVISLKYRLFPTSCQVRSLEQTLNTCRQTYNWLLSDREESYETKKVSISYFEQKRRITVFRETWEELQNIHSQVLQNVAVRVELAFQAFFRRIKSGEKPGYPRYKGKDWYDSFTYPQSGFSIKDDRLKLSKIGDVKIKLHRPIVGKIKSCNIRRNNDKWYACFMCEIENEFFKDIDQSVGIDVGILNFAALSDGSFVENPKFFKTDMKALAKSQRKLFKQNKVSKKRRKAKKVVSRIHERIKNRRHNFVHQLSRKIVNEYGTIVVEKLNIKAMKSDIHNINRSIGDVAWGMFRNILSYKAVNAGRKYVEVNPAYTSQDCSGCDFRAKKPLKERWHHCPICGISLDRDTNAAINILALGLQSLQRQSLIKAISNNCLE

SEQ ID NO: 26385 - protein, 365 aa, Ruminococcus sp.
MEKAYQYRIYPNKKQKELIAKNFGCVRFVYNHYLAKRIETYRNANETLSFYGCCKDLTNLKSEYEWLKEVDSTSLQSALKDLDSAYQKFFKEHSGFPKFKSKKTHRYSYKSKRVGNNIEFCGNSIKLPKLGRVKIRDRQIPQGRILNATISQVPSGKYYVSLCCTEVETKHYESTGSAVGIDLGLKEFAITSNGDKIENPKYLKQSLQKLVKLQRGLSRKTRGGANWNKARIKVARLYEYISNQRTDFLQKLSTKLVKENDIICIEDLQVKNMVQNHKLARSISDVSWSEFVRQLEYKAKWHNRQVIKVDMFYASSQICNVCGYKNSETKDLSVREWACPCCKTEHDRDINAAKNILCEGLRLLA

SEQ ID NO: 26386 - protein, 204 aa, Scytonema sp.
MPGQKDCVRRIDLGLKEFLTTSEGEPVAIPQHYRKSQKRLRVIQKRVSRRKKGSNRRCKAVKQLGKQHKKVADKRKDFHFKTAKQLLSKYDVVAHEDLNVKGLSRTRLAKSMHDAGWSNFLSILTNKAENAGLLVIAVNASGTSVDCSSCGVKVPKKLHERWHNCPNCGCSLDRDHNAAINIRKRADGHAVLKAQRLLSNSRIG

SEQ ID NO: 26387 - protein, 246 aa, Pantoea sp.
MNVKTKTLSVRVKDKHAALLRQMAYEVNQIFNLANEITSKAYSNAGEFGAQVPKWLTAYDVQKQTAGLRKEKGYLIDSASIQEVIAVHGKARKQFKRAKLRWRISGGSKRSLGWIPFKVGFAKWQNGQVKFAGKLFKVWDSYGLSAYKFRAGSFSEDSRRRWYFNVAVDYTAQPTEGVSAVGIDLGLKDIATTSDGEKLAAGRFYRDLESSLGKAQRANKKRRVKLYTPKLKTVAKTHCTNSVQLL

SEQ ID NO: 26388 - protein, 412 aa, Ignisphaera sp.
VVSYPVRGEEPALVEALRMRALPEGSCDKLLEFLRLYRNAVQMIVDKIWSIDGRLSKRKLHRLFYSNLVSMGFRAHHAKEVYVYAESLVESARSNGGRKPILRKLSARIDRYDYKLDLDTMTLALKLHSGYEAKLKLVSSSERVGKFRGWGNYELVVKYDGSGFWVSIYFRRAVKAVKPRTVMSIDLNFDNITLAVLTLDGRLAKLKRFRTPHRKVLTHRIWVERVQRRYPRSWRFIKSVRKAIDRHGERVKNISWGYAHKVGDLVAGLASKHSSIIVLEDLDKLRENNKRGREFNKRLGLWIYRRIQFCIEYEAKERNLEVVKINPRGTSSKCPRCGKKLAKNKHRILRCRKCGFVGDRDVIAVINLYKKYVSKYSRCGVSGVALNAPKPDENPSGVQRNRDDAMKTHLVI

SEQ ID NO: 26389 - protein, 439 aa, Micromonospora sp.
LSCVQLRYSYRIYPDLGQQQALARAFGCARVVFNDGLRARQQAREAGEAYLSDGALSKRIITEAKRTSERAWLGEVSVVVLQQALADLNVAYRNFFASLSGKRKGRRVAPPRFRSRKDNRQAIRFTRNSRFAVLANGRLRLPKVGEVIVRWSRPLPVAPTSVTVIKDAAGRYFASFVVAVAGEPMPPVDAEVGIDLGLTHFAVLSNGTKVAAPRFLRRAAGKLRRLQQGVSRKQRGSNNRKKAVAKVARAHARVADTRRDWQHKLSTRIIRDNQAVYVEDLCVVGLGRTRLAKSVYDAGWAAFLGMLEYKAARYGRAFARINRFAPTSQTCSSCGRVDGPKPLGVRSWACPCGAAHDRDVNAAVNVLAAGRAESLNVCGAQVRPARVPAPREEAEIHPDAAQFPACSVEGAPSIEAEGTSIQRRSDRSPSGRECGSTAY

SEQ ID NO: 26390 - protein, 378 aa, Geobacillus sp.
MSTAGNVSSETIKRYVESQKKRGEFMPTITLRLELHKPTKVKQEMYERMTEVNTEFANWLLNHPELNQATSKIFKEFSSQRFPSAIVNQTIREVKSQKKKQKAKTFQKRWCCFNNQNLKIVKKGDFYTVAFPTLEKKIGVPVVVRPYQQTWLDRIIDGTAKQGTATLYKKKKKKKWYVAIPITFEVKQRKETNVMGVDLGLRYIAVASVGTKSLFFKGNPCAFIRRRYAALRRRLGKAKKLHMIRKNGDKESRWMKDMNHKISRQIVRFALANGVGVIRMEDLAGIRKRAASAKEAGRSLHSWAFHQLQTMIAYKAEMSGIRVEWVNPTYTSQTCKCGHREKENRNGIHFKCKKCGYTIHADLNGAINIAKAISGLSA

SEQ ID NO: 26391 - protein, 377 aa, unknown
  TnpB Polypeptide
MKLNRSSKMHFDKWLTRAKKDKINFILKEYALIVNYFIDNYEPDIPDVSQFNLSYATYIQKCIKDTGTWLTARMIKNAFSEGYGMVLSAKEKATKDDPYSRPVHHGKKAILSVTINTQSEDVSTVDFDFNVTLFSIGNKMKISIPLKKHKHWNKLDVLGKRSKSIILTRKYIQFSFEIKTEPKKESGKLLGIDIGINELFAASDGSFFGKGYKLLLEKLLRKERCSKGYYRTKNEIITFINGAINEIFKEDLQLIVVEKLKGLKNKMKERRRLSKNTRRFVSVWVYGYILNRIEQMCETNRVSFRSVPAYNTSITCPRCNHADKGNRKTQETFRCLNCGYAGNADFVASQNILVRFLTGPYCARFKPEDYLAYLSIV

SEQ ID NO: 26392 - protein, 392 aa, Cyanobacteria sp.
MHALLYNAAIANRKTQYEKFGHCVDYYEQQNSLPAFKQVWPEYKELGSHTLQATLKRVDLAYQSFFKGLRGKPKFKSIRHYSGWTYPDKAGWKAHATGNNGYLELTDLKLSIQMRGKARTWGTPTTCTIVYRNGLWYASITVECNPVRKTDAGAVGLDFGIYHAVAMSDGTLIENPKFLSKSQEKVKKASKQKRRKRAPNFRKKVKASKRWKKATKRVSKLQRKIANSRQDWTHKVATQIVSSNSMVATEELNLKGMTRKAKKGSKRKAQKTGLNRSMLDVGIGNLTKVIEYKLQEAGGFLVKVPTKKVKPSQTCPNCGHQRKKDLSERLHDCSECGYTDDRDVAAAKVMLSWALGTNALNRGSCTSTSIPQATGGWQQVWELKRQKPTPQR

SEQ ID NO: 26393 - protein, 481 aa, unknown
  TnpB Polypeptide
VRKRALTAESSSRWAGAITRTSEDQWRLAEQNLRAGKSSLTARIGRIEARLAVPAGGRVGRIRGYATAAERHAKSIRLQSLKARLARIERQLEAGAVSVVRGGRALLRKRGSLAAAGLTDEQWRAEWESARLFLTADGEKDKAWGNETIRWNPDEGGLEVKLPAPLAHLANRPHGRYRLSCPVQFSYRGDEVAAQAAAGAVRYDISHDPARDRWYLDASWKITRVRAASLDDLRQHPVVAVDVNDGHLAVAVVAPDGNILGPPATIGLDLAGLSATARDGRLRTAVTSLIATARQHGARAVVMEDLDFAAVRAEGRERYGSRPSRGSRGKAFRRLVSGIPTGRLRDRLTQMASNAGLSVIVIDPAYTSRWGAEHWLRPLREHHSKATGHHAAALVIGRRGLGHRARRRATGNQTAPEEAGWPAQARPRTTRRERPHPGNPPPHETPGSHPAPRPDGLTGARQATRQPKTVRGRRLDMTTSR

SEQ ID NO: 26394 - protein, 175 aa, Halanaerobium sp.
MTSKKIIREKGYKFRLYPNKKQKILINKSVGCTRYVYNHFLAKAKEDKYKTYTEYSKQLTQLKRELMWLKEPDKFALQNALKDLDKAFNNFFSGKYNFPQFKSKKNIKNSYRTNKFIRKSGTTNIEIKDNKIKLPKLGWVKFSKSQKVKGKILESGSVLNVEKYTIEILMLAKTS

SEQ ID NO: 26395 - protein, 371 aa, unknown
  TnpB Polypeptide
MVLLHEICIQKGNLYSRGDKSKKGNLNTRIEVKENGTFLRINVGERKYVYARIQAGYKKNKRRGELLQEIAEADIPYSVELKLKNGNIYAYFAIEEEYPEVKITKEKGVIGIDINAYPDNISWAEVDEKGNLIGYGSITMPELASGNKDKREYFRWQYAHEIVKIAKQKRKAIVIEGLEIKDKGKRGDFSGRKSRRIRHNFSYKSILSKIKTLAKREEIEVIEVDPYYTSIIGMLKYAPQHMITKDVAAAYVIARRGLGLQEKIPDNYIKFLNALTVEELEKLKEYVKKTVRNKHIKKKHIREINKAIEFLQSLESESGRVLKPLEGTSFSIYDFWRVLKVAVVTPLSPEKVPRDFSILKELLIQGKWGDP

SEQ ID NO: 26396 - protein, 393 aa, unknown
  TnpB Polypeptide
MRLVERHIVIDNRFEDICLKSGLLYNYTLYAIRQGIFSKIYLNEYVFSTMLTKDNQFDYRNLPAQVSQQVIKQAFQNIKSWVKANKSYENNKSKFKARPKLPKYKIGKKQNSVVFTNQTCKLKNGYINFPKMVNLQPIKTNQTNFKQVRIVPQATCYIIEIVYEKEKVDLNLEQNNILSLDLGLNNYVTTVNNVGIQPFIINGKIMKSFNHWFNKKKAKLMSFVGNKGTSNKLKQLNNYRNFWIEDKNHKISRFIINYCIENNIGTIVIGKNDGWKNGINLGKKTNQKFVELPHAKLISKIEYKAKLIGINVITNEESYTSKIDNLALESLIKQETYLGKRVKRGLFQSFTGKLINADVNGALGILRKVFDDSVITQIINSGQVFCPYKINVL

SEQ ID NO: 26397 - protein, 441 aa, Cyanobacteria sp.
VAKVKKLMGVQQMLLHPDKQTKAVLQYLCEQSGKLYNSGVYLARQTFFKTGLLMTGKFDLVYESTVGKSQIAQSLPSTPAQQTLLSVAEAFKSYKGLRELGFKGQLSNKPKLPSYLKGSKLFKVAYPNSGGQKPKIVNGQLQFSVGLTVKRWFGIDSFKLPMPTNLDVTKVKEWTILPKNGAFYLEASYELTEKICCTGLSDQALSIDLGTADNLAACVDTLGNSFLIDARAMKAFNQYWNKQVSTRKENKPQGYWDTWLDRVTRKRNHRMKDGINKAARLIINHCIKYGIGTIVLGWNEGFKCHTNMGRVNNQKFVQIPLGKLRDRIEQLCNLHGIRLVITEESYTSKASYLDGDSLPKYGEKPEGWKASGRRTKRGLYKSKNGSLINADLNGAANIMSKVARKLGIDLDRLGRRSLATVARVRLWTLSQSTLSAESPRL

SEQ ID NO: 26398 - protein, 488 aa, unknown
  TnpB Polypeptide
MRHTTFRFALDPTPAQAGMLARHAGASRFAYNQCLRLVTDALQQRTSDPTLAVPWSGFDLINAFNAWKRSEAAGRSFVVAPDATITKHVTGLVWQREISAQVFEEAAVDLGRALVTYEQGRVAKVKGRRVGFPRYKRKGRCRESFRLRNKAGSSAAWSIRVGEDHPRSVTLPKVGTVHVHDDTRRLRRLLRPVSQDDAGTGKLVVAPRARILFATCRRHGARWYISLNIQAPDFHPQRRHPCRPADDHGGFVGVDRGLSAFAVAATAARTEVGRFPAPKPLQRSMLRLRTRSRAASRTQPRSSNHAKAVRRLSREHARIANMRRSFLHEVSSQLVKTHDRLRREDLAVTNLLGNRKLARAISDAAWTELARQLGYKAVWYDAELVVCNRWAPSTRTCSQCGQVAPPMTLSERVFCCHSCGLVAGRDCNAAANLAAFTEAVGMAAAQAPDRRVSGRMTNASGGEGAGHRDSDGGTGPGEGGTEAHALMA

SEQ ID NO: 26399 - protein, 386 aa, unknown
  TnpB Polypeptide
MRLTYKYRLFPTSAQRTSLERTLELCRFVYNETLARRKNTYEETGKSISLYDTNKLLIEWKADKPALIGVHSQVLQNVQERVDLAYQAFFRRVKAGEEEPGFPRFKGYGNYDSFTFKQSGFKLIGDKITLSKIGDVAIKLHRPICAAVKTLTIQRDTVGNFYACFACAPSGHPEAVPLEPTHQSVGIDLGLTTFAYFSNGKKIKRQRWMKKDAADIARLQRKKEKLAKGSLERKKVIHALDHAHQRVANRRRNFAHQESRKLVNEYQFIAFEKLDILDMQSSKDKRYTRGIADVAWGQFVQFTAYKAANAGRVVALVNPRGTTQMCSGCHAIVPKGIEVRVHDCPHCGLKLNRDHNAALNILARGLASINPGYPLGASGIVEAHPF

SEQ ID NO: 26400 - protein, 439 aa, unknown
  TnpB Polypeptide
MSEECKTLEAYLATPTQHKQRKLRDEHERYESLLRRSFSEGCDTMSAVNEVVSGEDLNWHSKNALKKYVPNLLDADTYNAKQLADTHPIRYANTAAVFDVDEERHHKICWEVPLPGRGTNFWIPLQLNPEQEDWWAALIDDEDESVWAGEIRLQRDSDRWVLHVAANYEVEPDHSCSCESDEVTPVGFDVGESKLLVGCAFRDNTPIDPLFVDGGRVRHLRQRQESAEDRLKQRYASNLLDNLVWSRWQDAIEDEIEKASAQAVEYASQFENPVIVLEYLDGITDEDIGKYWNRRLGKWLFSRLQSRIEEKATERGIPVEYVYPHYTSKTCHACQHLGYRPHQGTFKCTNEACWVSEYQADLNAAANIANRLNPWGESLPWKSAGDDSLRSGGQWQAHEDTSPSEGLPSEKRASDDKVSSSSPTVGAGAKPETGDAHTS

SEQ ID NO: 26401 - protein, 293 aa, Mycobacterium sp.
VRFTTGVIRIEADRRHVSLPRLGAVRTHESTRKLAPRIEAGTARILSATVRQDSAGRWHCALQTIVAAKTGPAHARRSAHPIVGVDVGVKADSLLVVATPGGTEIDRVAAPKSLTAAQSRLRALQRRAARQLGPHDPQARTRRQPSKRWRRTQARIGRTHAHTAAVRHDVLHKATAALAQQHQVVVVETLNAAGMRAKGGSRKRGLNRALADAALAEIRRILGYKTRWYGSHLVEADRYFPSSKTCTACGRRKPNLTLADRIFDCDHCGVRIDRDLGAAINLARLGVPTHTRG

SEQ ID NO: 26402 - protein, 419 aa, Mycobacterium sp.
MKQVVQVRLEADAAQLDALARTLMACNQTANLVSAIAHREGVFRGRDLRAITYAQARQHAGLGAQVAQSCIRKVADSYTTLRANVRNGRYGKPGSARRAKVEANPIRLGALSAQPFDDRCLSWTHDSDTDTGGVVSIWTVDGRLKNLRFVGEPGQIALLRAHRSGETDLVIRRRRRRGSGPLVAYLIATVDLPEPAVRTGEHLDTAAGWIGVDMGIENIAVTSDRPLAAELMSNYGSEAPEGAAGRGSVKDRRTRNRELRHKLQAKNTKSAKRLLRKRARKEARFAADVNHQISKRIVAEAERTGRGIAVEELTGIRERVRLRKPQRATHSSWAFAQLGAFLSYKAARAGVPIVQVDPAYTSQRCTACGHIDRRNRTSQAQFVCRDCGYTAEHADILGADNIAHRAATTWAQSTAPSAA

SEQ ID NO: 26403 - protein, 416 aa, Mycobacterium sp.
VLTGRRFRVEFTDEQADYAERIGAACRAVWNTGLEQRREYRRRGAWMNYQPQAKELAEAKTEHLWLKDVPGHCLQQTLMDLDRACREHGTWKVRWRSGRRWAPSFRFPEGNKMAVEKLNRRHSRIKLPKLGWVKFRASRSLDGETIRSATLAREGRHWFVSVLVDDGRQTPEAHASPGSAVGVDRGVAAAIATSDGALIDQAFVTVGERRRAVALQRKLSRCAKRSTNRDKTRAALAAVRARERRRRLDFAAQTAHQIAAANAVVVLEDLKTKQMTKSAKGTIDQPGRNVAAKSGLNRAILSKGWHQFALVLSSAARYTGTNVVKVPAAYTSQRCSACGHVDPKSRESQAVFRCTHCPHTEHADVNAAKNVLAAGRAVTACEDQPRPAGRARSLNQEPAGNREELLRQPTTAAPAA

SEQ ID NO: 26404 - protein, 403 aa, Halorussus sp.
VADTDYSRRTAVTGLSVAPTDATRLRELIAEWKRGCQLAVNEAWGVCHTRSEVQQLAYDRLREETDLGSQHAVLATHRAAEAIKRAEDRSGAKPEFTSPTVAFDTRTMTVFDDRTVSLTTTDERVRCDLKLPTGGGYQSRYLDDEDWEPAKSALHYRDGAFAFHLGFRTPRPEVDAPTEGATVLGVDLGVENLAVTSTARFFSGGELAHRREEFERVRASLDATGTRSASRTLRQAGDRLDRVVRQRLHEVANGIVDEAEAYDCELVAVGDLAEVADLLPEASPFHEWLFDRLVSFVEYRAAERGIAVVEVNPEYTSQRCMECGFTHPQNRDVEDHQFECLKCGASAHDDYNAAKNIAFRCVRRGPLSSRGLGAAACALQSGVVTPDDGFTPYAELSEAPKSD

SEQ ID NO: 26405 - protein, 386 aa, Oscillochloris sp.
MTQTLSTRTVCCKLSLDADAVTAIRATAEAFNAAATYCASVAWEEHIINKNKLHHVVYGSTRVNYGLGAQLACCARDKAAEAVRAARAKDHATCPTFKPDSAIRYDARTYRLMSLDRVSLNTLTGRVVGHMVLGAFQRRYLYDTSWKVGGAELVQRDGQFYLHMTQTKASPKPDEPTGFLGVDLGIVNLAADSEGETYSGADVQRVRERRFQHRQRLQTANTRRARWRLRKNARKESRFQRDVNHCISKALVQKARTARKALAVEDLTKIRERVTVRRAQRRARHSWAFRQLRSFLAYKAAQAGVVLVAVDPRNTSRTCAVCGYCEKANRPDRSHFRCLSCGHTAAADTNAAVNIASRAASQTAYCAASPSGEGASTSPPVLAVGI

SEQ ID NO: 26406 - protein, 326 aa, Chamaesiphon sp.
LPCGRLQTAFTNFFAGRAKYPNFKKKRNGGSAEFTKSAFRWRDGQVFLAKCTEALPIHWSRQIPEGCTPSTITVKLTAAGKWFVSLLVDDHTVQPLPKTDKQIGLDMGVTSLIATSNGDKIANPKHFKRLRQKLKRVQTALSRKQKGSNNRHKARVAVARVHAQITDARTDFLHKLTTQLIRENQTIVVEDLAVKNMLKNHKLANSISDASWGELIRQLTYKCEWYGRELIKIDRWFPSSKRCGNCGHVVDKLPLNIREWECGVCHAKHDRDINASKNILAAGLAVSVCGATVRPEESKSRKRRIDSEVSSELCASRQAGALKQKP

SEQ ID NO: 26407 - protein, 406 aa, unknown
  TnpB Polypeptide
MNKIKVTRVEQHIIRKTNPIWKTIDDYCLRSKNLYNETNYIIRQQFIKTGKWDKFYDLCKSIKFLDCYKNIGSNVGQSTIKMVCEVWKSFAVASKDYNNNPSKYLGRPNLPKYKDKENGRYVLALDSNKVKLRDGYVHFCWKPFKNYIISTQLKNVRLIQLRFIPNKSHYTAEIVYEINVIDQKESSNKICGIDIGVDNLATVVNNTGLKSFVINGKVIKSYNQYYNKKLAKYESILKKTNNKNWSNRLQRLTEKRFYKIKDYMHKASKYIVSWCVNNDIDTIVIGNNIKWKQNSNMGNTMNQTFVQIPYKMLIDQIVYKAENNGIKTIITEESYTSGTSFIDDEEPTKTNYNNKRRIHRGLFKSNTGVFINADINGAYQIIKKVFPKAFADGIQGVSLHPVRVLL

SEQ ID NO: 26408 - protein, 389 aa, unknown
  TnpB Polypeptide
MTKAFTYRLRPTRKQESALEQTLTTCRYVYNNALAQRIETYKESGDSLSYVDQANALSDNKNDYQKQVHSQVLQDTLKRLDTSYRNFFRRVKQQKAGKNIKVGFPRFKPAQRYNSFCYPQSGFRLTNDNRRIRLSKIGDIRLIYSRPIQGKLKTCRVIRDVDQWFVILTCDIEDKPVTKSTKPAVGVDVGIKTLAVLSDGTEIENPRHWKQSQDKLHKEQKRLSRKSKGSSNRGKQRIRVARVHRKIRRQRDDFLHKLSRQLVNNYGLIVFENLNIRGMMKNHKLAKHISDAAWSRLIQFTQYKAEEAGVEVRLVNPKNTTQACSGCGKIVPKTLADRVHCCPHCGLVMDRDLNASVNILMVGTTKNYAYGDPTSTLSSCCSEQVESLI

SEQ ID NO: 26409 - protein, 389 aa, unknown
  TnpB Polypeptide
MLKAFKFKLNPTKAQSILLNKHIGASRFVYNLALETKQTAYAGYRVNLNCFDLIKQLPELKKECEWLKEINSQSLQQPIRNLDNAFTRFFKGQGNFPNFKKKSNGGSFNIPQNVSLENGKLIIPKFKKGIDVVLHRPIKGTIRQATISRTPTGKYYVSILCDTGDFNKPKAKIEENTSVGIDLGIKTFLVTSDGECFDNPKFLRNSISKLKYVQRKFSKNKGKRTKNKLAKLHEKVANQRKDFLHKTSSKLISDNQTICIEDLNIKGMLANHKLALSISDCGWSMFVDMLEYKAEWYGKNILKIGRFEPSSKLHANCGYINKDLKLSDREWVCPKCCEVVSRDVNASINIKNFALKNHLSVGRRLKNQGKLPTLFGALTLEAHTPLGYG

SEQ ID NO: 26410 - protein, 308 aa, unknown
  TnpB Polypeptide
MKKISGIYIIKNNINDKVYIGSAVNCHQRFIQHKSDFNKQCHNQRFQNFVNKYGIDTLIFEIIEIVENKEHLIDREQYWIDYYKSYNPKKGYNICKTAGSTLGCKMPISHKKSCKNRMFGNKYGLGKKWSDKEKKEIGQRSKMMWMNNPEKKKEMGNKISDLKKGVSIWDENRPHPMKGKIHPNRKHILVYKEGVLIDKCFGTKEVCNKYKLDRAAVVRVCNGKSKTTKGYVLKYFEPSSKMCGCGIINKDLKLSDRTWVCTSCGTINERDVLAANNILKFALNPKNKSGQVLSDEPMETLALVRSVK

SEQ ID NO: 26411 - protein, 394 aa, unknown
  TnpB Polypeptide
VIKNKTYKFRIYPTAEQEILLAKHFGCTRWVYNHFLNERKEQYQADKKSDNYYKQAATLTKLKKEEDTKWLKEVNSQTLQFALRSLDTSFLNFFRGNAQFPKFKSRKHKNTFTIPQFGKLEDGKIIVPKFKEGIKVKIHREVKGKIGKMNITKTPTGKYYVSIFTEQVVDELPKTNKRVGIDLGLKDFVITSGSKKFKNNRYTKKYAKQLKKAQQHLSRKQKGSNGFEKQKLKVAKIHEKIASCRLDTLHKVSHKLVNEFDVIVCEDLNVKGMIKNHKLSKHIADASWGNFVTLLQYKCDWYGKELVKVNRFFPSSKCCSECGWINQELKLSDREWVCKSCGVVHNRDWNASKNILKEGLKNISAGTVEYKGGEEIRPTLLAHSEKPEAPTPLG

SEQ ID NO: 26412 - protein, 403 aa, Cyanothece sp.
MITMTYDFKLKPKKSQVQKIETYLETCKKIYNYALRERKDWVNSRKSPINACSIHSEYIINPNAPKPTYNSQCKSLTEAKKSYSELKEPHSQVLQQTLRTLEAAFVNMWERGFGFPRYKKKMRSFLYPSVKQEWVGSGWVKLPKIGEVKMRMSRPIPDGFLIKQIRVVKRASGYFVQLSYQLAVNIPETPIHGHPLGVDIGLDSYLATSDGELVKRPRFFNQLHGQLKSLQRRLKNKKKGSNNWQKLQSKIARVHQKIHDTRKDWHFKLAHHLCDQAGMIFVEDINLKAWAKGLFGKHTLDAGFGQFFNILAYVCWKRDVYFLKVDKDYTSQICPNCNTHTGKKSLSDRLHCCPYCGYQTNRDVAAGQIIRNRGLVAVGQSVNENACGDILSGSIFDWLDKGL

SEQ ID NO: 26413 - protein, 417 aa, unknown
  TnpB Polypeptide
MAERTRRTYKAKITNQSQVRDDLDALGFAASKLWNVARYYAEDRWQEDGVIPDDAELKAELKDHERYTDLHSQSSQRVFEELAEAFTGWYNSDDGNNPPGYRKHGDQHPRSTVSFKEAGFKHDAKHQQVRLSKGRNLKQSRSDFVLCEYEVRPDVEIENIQQVRAVYEDGRWWLHIVCRHLIDPDSPGDATAGIDLGICNYAAVAFEDEVVLVPGNRLKEDKHYFTQQEYDTEGENGPSNAALRARKKLARRRTHFLHALSKHIAGMCEERGVGRIAVGDLTGVREDDDADKAENWGRHGNKRLHGWEFDRFTRLLEYKAAERGIVVDRVPENGTSKTCSVCGTENGDQRVERGLYVCEECDTAVNADANGAENIRQTLTPSPSPDRSNGRLARPATRLFDQPAGRFSPPDQVSCGP

SEQ ID NO: 26414 - protein, 623 aa, unknown
  TnpB Polypeptide
MAQYIYRKGIKGEFFKAPVNCTERRKQYMRTWKMTKNPKDKKDAVLCQYFLTNTTDAKCMYNTANFYIRNTMTGIQKSPEERTANETEVLRCVFNGILKANVLVDEKYDAAMDEYNKAKELYDEAVEERKKTAEQYQEIKIPVDTGNASAGTDAKTSADETKDAASGPSGKEAKLVEPEKPKDPKYFKYPTPKKWFLSYETLDAIFKLMENPVYCRMNSQVNQNAIRKLAKTWKAYFSALADYKKNPSKYKAKPKMPGYLKSAQFTAWYTNQTAQFKIIGSKAYIRFVHCKELFCIGNADLYKDMKYVKTEVKPSHGRYDVLVTFDDKKDDKVEFPAVPDNPKRIIGIDPGVDNFATVVNNFGKEPFLIKGDAIKAKNQWYNKGRAIATSKLTKGSDSTHSVKNSNYLDTLDRKREDFMRDFFYKAAWHICRFAMDNEADVIVFANNKEQKQEINIGKANNQNFVSIAFCSFESILVHTAAKCDIPVVVREESYTSKASVLDGDPIPTYKQGDSQKYTFSGERINRGLYRSADGTLINADVNGGANIIRKEYPDAFKGQNLDYLWKTTKVVKYTDLYKGAKSTCKEKYNNKQHRTSPNSKIRHFYRKNTRLGYRMFWRKSKSA

SEQ ID NO: 26415 - protein, 518 aa, unknown
  TnpB Polypeptide
MPSYCLELKLKVKKDSDRNYLQNYFNAVAKLGNEIRRFAIRQLGHLKQDKNYKSLLAEYVKVKGDKDSPERERLSKELSVIVGSYGLTKYGLQKSACQMRKHLKYVHSDVYQKLSDSIWRSVEKYLYGNGKQIHFKKWDDVMSFENKKNSTGIIYADGKVYINCTPKKPKGGIVLDIILPRNKESTHYMYETTCLADRTKYCRIVRKMFPSGWRYYVQLVQEGIPPQKHETGKGRVGIDIGTSTIAAVSKDGCILEELGDPASSPAEECLLQRKLDRSRRAMNPNNYKEDGSVKKGKKTWKKSKTYQAVQNQLKSLRRQKAARLKQWQEAEANKIATMGNNVFVETMDFKALQKRAKNTERQEQTSIVKQKDGTEKKVHKYKKKKRFGNSIGMHAPAQFISILGRKLSYHKGGLCRINTWKFKASQYNHVDDTYEKKKLSKRYNTIDGRWVQRDLYSAFLLMCSDDTLEHADQKRCTGNYKCFLKNHDACVNAILTDIKKNQKKVPSCFGINKKMAAL

SEQ ID NO: 26416 - protein, 482 aa, unknown
  TnpB Polypeptide
MRTKFKGSVSSSFYWQLYTQVFTCYQNKFNNIQRRLVFKVLNVKGFEYYKRDTKKNKKGDLKRVLIEKKHTPLSNCLTYLARYGNEGTNAYIKSNIDKCDVNKHDFYNNILRYCEKFGFERLYKLALSKRKRILSRYANNPIEFRSLTFSGRCRKKKIIDYNHRFGSVINSFISLSGLSRKSFDIPVTFNKGWHGNMKDYRKNNNDYEYTLSFNEKEHQVAVNICKDGERYIPEPNGKTIGIDVNCKHNLFSLSNETTYDYDRKLVNDFCKLCIEIDRLKGNKDYVIGKRKQWKLDTLKTKMIRSEQQLIANMCKTLHSQGVGHIVMENLNNGFGKCYVKDKYNGDINYNRKVSFLGLSSLKQEVEHIARKYDIAVSTVQASYTSKMCPICGCIEDGNRPNQETFECVECGYKDNADFNAAKNIRNRVLVTVLRDKLLKQLDNGAFEPRQLSRDKVKEVLLSFRRSLPKVGSECIGSNNTTF

SEQ ID NO: 26417 - protein, 550 aa, Actinobacteria sp.
MSGSLRPVVAPFVAAAPVGARVRTRLRVSGQDEAVLRVVGRHLGSLAGRDLAARCSEGWLDAQGKAASRARRKRALTEESSSRWAGAITRTTEDQVRLAGQNLRAEASGLRARIGGIEARLAVPAGGKADRVRGYASGAERHAKLVRLQVLRARLAAVERRMAAGRVRVVRGGKALLRKRGNLVGAGLTQAQWRGQWEAARLFLTADGEKDKPWGNETLRWHPDEGWLEIKLPGPLAHLANEPHSRYRLSCPVAFAYRGSEVAAQAATGAVRYDISWDPVRGRWYLDASWQAAPSLTPSLEELRAFPVLAADLNHGHLAAWVVNPAGPPVTIPLVLARLLAPQRDGRLRGPISSLIGLARQRGCRAIVIEDLDFADVREQGRERHGSRPSRGRRGRRYRALVSGLPTGRFRDRLVQMAANAGLAIIAVDPAYTSRWGAEHWLGPLRERVSPVPASGHHAAAVVIGRRALGHRARRRAGVTGGGQRTSRRRAAPRAPAATRTTRDGRPRQAHRQPPWWRKTATAARTRPPDQAAQDRPGPPASQDHLLPVQ

SEQ ID NO: 26418 - protein, 494 aa, unknown
  TnpB Polypeptide
MSDNELCWYLAFRTKLDPTKEQAEYFARASGTARLVFNWGLGQWKKQYEEYKNGLRSSPPKIKDIKKQLTQLKKEGEKFFWMKKVTKCAPQYALTDLGMAFEHFFDNPDDFKYPNFKKKGSSKDSFRLDNWQFKVENNRIHVPHVGWVRMHERLRFRGAKLLWATISRQADGWYVSITLELHDLDHLSPAKNQGRIGVDLGVLNFATLSNGLVFEGPKPLKKYSKKLAKLQRKFSRTEKNSRNRAKLRIKIARLHKKVSDIRLDAIHKLTAFLTANYSEVCIQDLSVKGMMRNHHLACAISDMGFREFRRQMEYKMKLRGGRLVIASRWFPSSKMCRFCGLRNKDLKLKQRLWVCPHCGRIIVDRDVNAAINLCNYIDRVDKKDSCSDSGSVAVSNQKRNAVTSESYPDVSPAGEDPSRLKATAERRGCQSTMQTCRKTLAGNDATDPGENSKAFYYGVGSDDWGSQWNSLPGSFGAEVVSKQTVNVQVCSEAQ

SEQ ID NO: 26419 - protein, 307 aa, Microcystis sp.
VALNLSQAYQNFFEKRARLPRFKSKHGKQSISYAAKVKFEGDYLKLPKIGLVYCVRHREFEGTIKTVTISKNPDGKYCASILVERSRDVDDGQSSLAPLDKGGAEGGGIDGKAIGIDLGLTHFCITSNGSKYDNPRHLAKHQRNLKRKQQRLSRKKKGSNNRQKARCKVAKVHSKISRCREDFLHKLSRKIVNENQVIAVENLNVKGMVRNHNLAKAISDCGWGMFCTMLKYKAEWEGKTYTEVDRFFPSSKTCHVCLNQVGSLPLDVRIWTCEHCQTTHDRDINAAINIKNEALRILSLGKARYCL

SEQ ID NO: 26420 - protein, 395 aa, Microcystis sp.
MEKAYSYRFYPTPEQESLLRRTLGCVRLVYNKALHLRTQAWYERQERVGYAQTSSMLTDWKKQEELDFLNEVSCVPLQQGLRHLQTAFTNFFAGRTKYPNFKKKHQGGSAEFTKSAFKFKDKQIYLAKCTEPLPIRWSRQIPESCEPSTVTVRLHPSGRWHISIRFDDPTIKPFPVTDKAIGIDLGISSLVITSDGDKVSNPKHFEKHYRRLRKAQKSLSRKQKGSKNREKARIKVAKIHAQMTDSRKDHLHKLTTQLVRENQTIVVENLAVKNMVKNPKLSQAISDVSWGEITRQLAYKCRWYERNYIEIDRWFPSSKRCSNCGYIAEKMPLNIREWDCPDCGTHHDRDINASKNILAAGLAVSVCRATIRPEQSKSVKAGAEPRKGKKQKPKS

SEQ ID NO: 26421 - protein, 387 aa, Escherichia sp.
VKRLQAFKFQLRPGGQQECEMRRFAGACRFVFNRALARQNENHEAGNKYIPYGKMASWLVEWKNATETQWLKDSPSQPLQQSLKDLERAYKNFFQKRAAFPRFKKRGQNDAFRYPQGVKLDQENSRIFLPKLGWMRYRNSRQVTGVVKNVTVSQSSGKWYISIQTESEVSTPVHPSASMVGLDAGVAKLATLSDGTVFEPVNSLQKNQKKLARLQRQLSRKVKFSNNWQKQKCKIQRLHSRIANIRRDYLHKVTTTVSKNHAMIVIEDLKVSNMSKSAAGTVSQPGRNVRAKSGLNRPILDQGWYEMRRQLEYKQLWSGGQVLAVPPAYTSQRCACCGHTAKENRLSQSKFRCQVCGYTANADVNGARNILAAGHAVLACGGCQQTG

SEQ ID NO: 26422 - protein, 339 aa, Thioploca sp.
MIIAHKIALDLNNKQATYCAKAAGVARFAYNWALATWNTQYQAWQADNTNPKPSETALRRQLNAIKREQFPWMLAVTKNAPQMAIINLGKAFKNFLATRAKYPTFKKKGRHDRFTITNDQISIEDSRIRIPILGWVRMRESLRFNGKILAATVSRRADRWFVSISVDTEDQTHLPTAENQGIVGVDLGVKALATLSNGEVFTGPKPLKRLMTRLKRLSRSLSRKVKGSNNRHRAKGKLARLHARITAIRADSLHQLTTSITRRFHTIGIEDLNVKGMRQNRKLSRAINDMGFFEFRRQLEYKAQMRGGLVKIVDRWYPSSKTCSVCGSIQESLPLSVRE

SEQ ID NO: 26423 - protein, 377 aa, Thioploca sp.
MMTFKAFKYRIYPNKPQEILLNKTFGCVRVVWNYQVEVFNQFDKNKTEPEQALTTTQLKKKFEWMGEVSAAALQQKEMDFKAFKRNYFSTTRKKKLGRPSFKKRDSTQSYRLPNQKFTLNNNSIRLEKIGKVKLVLDRAVPTGCQFRSVTISKNNCGQFFASVLVEIGIIPKPKTGKSIGLDIGIKTFLTGNDGFTVENPKYFRENQTKLKSAQQHLSRKKKGSLRYNKAKLKVARIHNDIANKRQDFIQRTTTKLVNEYDFIAIEDLNVTGMVKNHKLAKSISDAAFSKFYATLSYKAAWYGKEVVKVDRWFASSKTCSGCGWKNENLTLSDRTFKCKSCGLELGRDLNASKNILREALRVSSAIRTPSEGQTEIA

SEQ ID NO: 26424 - protein, 339 aa, Thioploca sp.
MALLRDYEGKKPSWMDIKKMFTRLLPEWTSDVPFQIKAIAVREAHQAFWATLKANQGKKPYFKFRSRKDPVQSCYIPKSAIKESGIYPTLSGKKLKLAESLPEDVLDSRLVWRAGRYYLTVPYKQQLVPNGDNQARLVAIDPGVRTFTTFYAEKSCGFIGQGDFSRLQRLAQHLDNLISRRSKAGKQRQRRMSLAAARMREKIKNLVNELHHKAALFLVKNYDCILLPTFETAEMVSKGSRKIRSKTVRNLLTFSHYRFKQFLKNKAFEWGKTVVDVCEAFTSKTHPQTGEVNNIGATKRIRLQSGQWVNRDLVGARNILLRALVDSPHCFTVAVNECH

SEQ ID NO: 26425 - protein, 287 aa, Rhodococcus sp.
VTPRRHRSGEGSSAIKGVECEVKRIVVVKLVPSPDQFAALESTLVLCNEVANEVAGWAQSRRLRSRRALQVALYPMVKARGLSAQPALHVLRKVADAYTTRQANLTNGNYGRPGSKRYTAVAGTAVAFRPQFATDINHQLSKTIVAKAQRTGRGIAIEDLSGIRDRVRLARRQRTQLHSWGYAQLRAQIAYKAEMAGVPVAVVDPRNTSRTCSQCGYCDKANRVSQATFRCRHCQWTGHADHNAACNIAALGHRTYRAAQSTAPIAATPPTASGNVSSKPGPSGPSS

SEQ ID NO: 26426 - protein, 435 aa, Natronomonas sp.
MNYNYRYRLYPTDDQREALAWTLDTCRQVYNHFLNRLNEADDIPSEYAQKNTLPDLKREWSDLKQIHSKVLQVVVERLYNNLRTLSGQKENGYNVGALRWKGAGWYKSFTYSQSGFTLIETDTRRDRLRLSKIGEVPIAYHREIPENATIKQVCIKRDSTGNWYATLGIETDEQPEKPAPETIDPKDTVGIDVGILKYAHDTDGTAVESLDLSDERERLRREQRTLSRKVKGSNNYEKQRTIVARCHDRIKRKRRDFLHKLGRYYVETYDVVAVEDLNVRGMMEQDRNSRNTAHSAWRTFIEILRYKAESAGTHLVEVNPRGTTKECSNCGVETDKPLWVREHSCPSCGYEDDRDANAAKNILQRAFSELGMGQAESAWFERRSLSSSRKSPIFERPPETATATDTRVVSASRVIERGSPALNERGRQTERSRAG

SEQ ID NO: 26427 - protein, 288 aa, Natronomonas sp.
MTVRAYGAYPLPTRSLRSLLEEGVLRLLEDKPAVEDIDPDDTVGLDLGVLSFIHDSDGRSVGRLDLSDERKRLEREQRSLSRKEYESNNWEKQRRCVAKVHAQMSNKKHDFKHKLAHFYTTEYDAVFVENLNVKGMLESSENARNKAEVGWRDFITILEHHGEKNGCHVVQVDPRGTTKECASCGVETRKPLWVREHSCPTCGFELDRDWNAALNVLNRGLDKLGVVHSEATSPEIEDFWCANESQSDSLTPVEAATAVSTDGGDSSSIVVDASRVCRGNLDRLSDYV

SEQ ID NO: 26428 - protein, 407 aa, unknown
  TnpB Polypeptide
MKIGYQVISYKFRLYPTEQQEEKMFEVLDRCRFVYNKMLEGLNKQGKPNRLGLQNSIPELKEKHPELKEVYSKVLQYESYRLFSNLRGLAGLKKNGKKVGRLRFKGKGWFKTFTYNQSGFKIIETGKRHDLLHLSKIGDIKIRMHRKVKEGKIKQVIVKRYRSGKWYAFICCEQPISDKKEIEKVVGIDMGIIHYVTDTEGRQVGHPLYLNKSLKSLRRKQRKLSKKKKGSNNYNKQKIKVAKIHEKVKNQRDDFLHKLSRSYINNCDLIAIEKLDVNSLMRISYNARYIMDSSWNRFAQFLSYKAERAGKTVVKVNPRGTSQECYKCGKEVEKSLAVRTHKCPYCGLEIDRDYNSSFVVLKRGLEEVLGQGLSEFTPAETEPLPREISASSVVESGSSLRQLGVVH

SEQ ID NO: 26429 - protein, 516 aa, unknown
  TnpB Polypeptide
MAKKGKYRTFLISMPQELIPIYDFVQKKLNQFLSDPAFRSKLLALDFSKHRGNVWRDIRDIVGKEELTSWKGEIPNPVWYFYMLCANLLRIVKSKDDAIICFNALKDNGNKIDQDLFESLNERGIYPTVGFLRNLKRSDEPPTIAKKATFVMDYSISAEQNCQRIADNIFGFNYESGKYLTYEVVIPLSVRKNLTGKIAKPRFIKRKSDGRYVGHCSYEMEIEPSKGKNILGVDLGKKKLLSSVVLYSDGNYSDEIINSRLSHRIDEKLKRKLKDLERLFAKNKTLEGLINGDINLFNSHLEEIRQNRVNQILELRENISNTKRYIAKLIASEIVSIAKENECKEIHVENLSWLESQGGRWNHSEIQDFITEFAELEGIKVIKIYAKHTSSAHPITGELGRESGRNVRFSNGDIIDRDLLASINIAKRNKRNQKENKVNKLRKGHTSTPKKVKKPSNRKVSLAIRQKLLTNQRGTEIVVLYPRKTGDRTWEVLDVLSKPHKLSLMSYLSHQCQFVT

SEQ ID NO: 26430 - protein, 391 aa, Methanocella sp.
MLRSYRYCFYPSTEVRNNITTALNYCRFTYNKLLELYRNGKIKTVYDACNHVATLKQQYPELKTVYGKTLQRVGNHLFNNIMVLASLKKKRVKTGKLRYKNEYRFRTLEYNQSGFKITENLLELSKIGTVKLILHRPLPEGRIKSILITKTKSNNYYAIFLVETSNITMLQNDKPVGLDMGVKIFCYDSYGNFVDNPKFLEKSLYKIKLLQRKLSRKQRFSHNWLKTRCKLAKLQEYVANQRNNHNHQVSRYYVNNYGIICVEDLDILRMLNRQNRTGKTLRRNISDAGWGDFLSKLAYKAESAGRILVKVNPRETSQKCYHCGNIVKKDLSDRVHDCPYCGVSINRDFNSALNILRKGLELLSGREGREPPGLPVEPAVNRDHQVSKPLA

SEQ ID NO: 26431 - protein, 358 aa, unknown
  TnpB Polypeptide
MLCTLKIKLVPTVKQFEQLMDTMKQFNLACNYISQIAFDLKTFGKIGIQRICYYEVREKFGLSSQMVVRAIGKVSESYKADKKTLHSFKETGAMVYDQRILSFDGLEYASILTLNGRIKVPMIFGDYHQGLLCGKRVRGQADLIIQGGIFYLLLVVDVPEPPKKIVTEFVGVDLGIVNIATTSDGDEFSGSAVRGIRYRNAALRKKLQRKGTKSSKRLLRKRARKEHRFCMNVNHVISKRIVSVAKDTNRGIAMEDLGGIRDRVTVRKAQRGELSSWSFFQLRQFTTYKSALAGVEIQFVDPRNTSRTCTKCGNIDKKNRKTQSHFECTACGFVANADINAAVNIGRRAVVNQPYAGV

SEQ ID NO: 26432 - protein, 538 aa, unknown
  TnpB Polypeptide
LVIWACWSAWSWSPGHTCSLDRGTPNGRTATTRLGRRARGCQAPLCAFGSLDAAARAVSDPEAASCPPCEIDLGAVIATPLPRTAGQRGPGGSPPSMRVGTWSQLWTLAGRCRSRAVPLKHDKRDMQREGATMATVTQAYRFALDPTPRQRRALASHCGAARVAYNWGLTLVKTRLHQHQTDPGVQVPWTLPALQREWNRAKHQAFPWWPENSKEAYKSGLDGLARALRNFSDSKRGRRIGRPVGFPRRKKKGRARDACRFTTGAIRVLGDRKHVQLPRIGVIKTHESTRKLARRIDHGSARILAATISRTADRWYVSFTVEAQRAIPASNGKQTVVGVDVGVRHLAVLSTGAMIANPRALEGSLRQLRRLNRQLARREPRSRRRTVTRRRLARAHARAACIRRDALHKLTTTLATEHGTVVVEQLNVAGMLRNRRLARALSDTGMAEVRRQLGYKTAWYGSRLLVADRFYPSSKTCSACGWVKAKLTLAERTFRCEACGLVLDRDLNAARNLAKLVQHVARSGREWPGDAKRSWSRP

SEQ ID NO: 26433 - protein, 244 aa, Blautia sp.
VGRYIKLPKLGFVKIRQSMEVEKINHVIIEHTPAGKYFAVLNVDFEPEPRSNAGGTIGIDVGIKAFYSDSNGNTVSNPRYLERSMRKLIREQRRLSRKQKDSYNREKQRIRVARVYEKVTNQRNDFLQKQSTMLVRENQTICIEDLNVKGMIRNHKLSKSIASVSWAKFFEMLKYKAGWYGNEIHRVPTMYPSSQTCSCCGYRNPRIKNLGIRIWECPKCHAVHDRDTNASINILKKGLQMQSA

SEQ ID NO: 26434 - protein, 442 aa, unknown
  TnpB Polypeptide
MRTVRLRLLPNGSQERRLRRIADATARLWNELNYVRLVQFRASGKINFKDTGHEFYHRYKGKLGVNAGQVINLNNGAWMSYFKLKEMYEQGKLPRFYGKPSPPGFWKDKLLGRRKLVILVRNDRYYLEPISGGEGYVILKDWNLRIKYAGRIKWAGKQGMLVIKLEGNRWFAYVPIEVGGKPAKSNPKGYVRGIYEKIQIENPKGSNKAFIDVGLNNLFAVVFNHSDTAILIKGSTIKAEYYYWKREIGTHQSIRDWLRNYGFESWRRYHAYWLHTKYKQHERLRHYYRTAIRFLAKALWRMGINEVFVGYPYMVSQDDGNEYNANIWWFNKVIRWLGEVLQEYGIRLNVVNEYGTSKQCSICSMKHENGRIKRGLYICQTTGIEINADLNAARNIAKRAGYEVPMPRKILSYMVTTNGVKPLTPMEGVTIETPKINPTSPR

SEQ ID NO: 26435 - protein, 394 aa, unknown
  TnpB Polypeptide
VCFKTFKFYLHPTAIQVANLDRIRLTCCELYNAALQEKRDAFKSHGLNLNCAFQQSELTDVKAARPDVGAIYSQVLQDVLKRLHRSFDAFFRRVKAGQKPGYPRFRPSRRYDSFTFPQVSREATLRAGGVALESGRLKVHGIPGAIKVKWHRPLEGIPKTATFKREGDRWYVIFACNGILPKILPNTGKECGIDLGLTTFAMLDDGTAIENPRFLRKAERKIARTQRLVSKRKRGSRRRNKARALLAGHHRHVSNARRDHAHKTARMLVNEFERIAVENLNVEKLSRGMLSKSVHDAGWGTFIAVLTSKAANAGRELIAVDPAGTSQECSGCGTVVRKELSERVHRCDVCGLVCDRDVNAARNIRSRAFAGPDGAFGEDRPQGHPMTREAVCFS

SEQ ID NO: 26436 - protein, 454 aa, unknown
  TnpB Polypeptide
MVKTIFIFAEQTTTDGKRFLLGYELGESSPSTGDVVVLDSSSESLLNTCILINMMEVTISAVVKHRAEGRKDIDELLNAFRDMVNYAIKKGLEKGYSLKKLHAECYQAFKSRYDFHTHIYPQAYRVAQSIIKSWKSRKGKEPVMRKRIVRVPKTIFEIDTERSVLILTIRPKERIEISLELSDYHKGLLSKGEVKEILLGERFVYIPIRVRVDLSEPSGFVAVDVNEDNITYVTSDGKAAKIYLGIKRLREIYHQKKTKIQREVKGKKRDELLRKYGERETNRIKDILHKAMRFIADTLKGYGFILENLKGLRKSANRKVKKYNRKSGRVQEVSVRTKKMKGRLNSMPFYRIQSYIEYKALLNGSPVDYVSPHNTSKICARCGGLVNSLRACPVCGLDRDINACLNLLDVGRCGAPERLSVEVMKVGWRGVETLNAYEVNLLELREQSESSVVG

SEQ ID NO: 26437 - protein, 413 aa, unknown
  TnpB Polypeptide
MGYRSAETNIAVQLVHLRLSEAQQLQCDALRREAGRCWTAMLQAHIASRDGLWLSESDLQKQFKGQFALHSQTVQALAQKLVANVDTARELRKTNPAAQYPYRAKLYQTVTWKQQAIHRHAGNVVLSNGRGNAPLALPLPAQFATVALVKCELTWRADHYELCLTIDTGVVNPPLDRHVKAAGVDLGEVNIAACVTDAGAGISINGRYLRSVNRLRHKRHAALNRRLTRCRPGSRRHKKLLKSKARASATFYRQSRDVLHKAARQLVNFARTEQVAHLAVGDVREIADGTDKGRHQNQRMSQWAHGQFVGYVKGKARRYGISTEYIGEEYSTRTCNECRHCHKTAPRGRVFTCAGCGAIVSRDGNGAANIASRYRYGEYGHVHVQSLTYLRATEVVLRTTANVAGVKPGSHAP

SEQ ID NO: 26438 - protein, 397 aa, unknown
  TnpB Polypeptide
MSKTLTGLRYRLCPHAGQERLLARSAGACRWLWNWALAYREDLWLAARSAGATGFRGSAGYVHLSSLLPGLKEQFPWLSEAPHHTLQSTLRDLDQAYGSFFAGRSGHPRYRRKGAGESIRFPDPKQFAVDGDWVKLPKLGWTRFRLSRPISGKVRNITLSRDGSHWTVSFCVEGQFDLPNLGIPAVGLDFGAAQSVTASNGVVVSFPVATPSEERRLNWLQRQASRRLKGSKRRKRAIEGVARLRRHLANRRRDAAHKLSTRLATTHAAIVIEDLNIRRMTASASGTIEEPGHDVRRKSGLNRRLLAQGLSDFRRMLSYKCERSGARLVAVDPAFTSKTCSQCKHCAPGNRKSQAVFQCAACGYHTNADLNAALNILAAGQAVNAQGGSGVAPTGEL

SEQ ID NO: 26439 - protein, 273 aa, unknown
  TnpB Polypeptide
MTNISCPSLSRIWPHLFTPICLTWQDSISGRTTSQLSHARTERPSYTRAVRSCQRTSSLLNRGLRRYPSSQGGHEHKHADSAYLEALSREHDCFLKDQMHKISTDIIRYCVDHRVGILVIGVNKLWKQNTNMGKKNNQKFVSIPHYRLRQMIEYKALRAGIDVVEQEESYTSRADVTASDFMPVYGKVKARPVFSGRRIERGMYLCRDGYCINADCNGAANILRKAVPDAWKGFKDFHFLATPASRGFHQLNPAGRNNSHKQHPDWKILSPAV

SEQ ID NO: 26440 - protein, 400 aa, unknown
  TnpB Polypeptide
MRTEFITTYRYRLLPTQEQLTQLREFAGCCRYVYNRAVSELNVDDAPERISYSALCKWLTKLKHSTEVPWLANAPSQSLQQALKDLTQSCHKVSTERKHGRKAHVRFRSRFDGLGSIRFPQNVRLEEAWGTSKLRSYIVLPKLGTVEYRRSRIVPADAKIVQATVREECGKWYVSIVVREAQDVPDVNDTSTFGVDLGVRHFTVLYDGVETIFCDIPEAMKQKLRRLDERIRRLQTIRSVKIERKVFGSAYRKLCKKIRKLWLKVRRIRQDFLHKLSTWMAKSQHHVTVEALKVQRMTSAEGEHKRSLNRSILEQGWYLFCTLLWYKLERCGRCLVEVNPAFTSVTCSACGHRSKSNRDGERFRCSACRHEDHADANASKNIWAAGQAVLRDTILAPADR

SEQ ID NO: 26441 - protein, 362 aa, Paenibacillus sp.
MLKNKRQGGEAMQTITVQIRIFPNDVSLLKEMGDEYIKTVNLLTEQAEASGTFPKLTSKDVDAKLPSAVKNQAIRDARSIHNKTKKQGKRPILKRRAYYVNNQNYSLGDHSVASPVILDGNVQRLKISAHVMEREQRLLSSGKLGLLKIVEKSGKWYVQISIERKTEQATGDVIMGIDLGIKIPAVVVTSTGKTKFVGNGRQNKYIRRKYKERRRKMGKLKKLSAIRKQENKEHRYMKDQNHKISRKIVNMAIEEQVSVIKLEKLTNLRQTTRTSRKNAKNLHNWTFYQLQTFIAYKAALAGISIIEVNPAYTSQTCPSCEKRNKAKGRTYECSCGYRAHRDRVGAINIMRQPVIDGNSLSA

SEQ ID NO: 26442 - protein, 424 aa, unknown
  TnpB Polypeptide
MLQLRAYKYRIYPDAQQCAVLAQFFGAKRWIYNHFLAENKSRFERKEKHLSNFDCNTEITKLKQQTDTSWLKGIDDWCLKHASEDLATGFKNFFDSVKGTRKGPKVSVPQYKSKYDNSQSYRTRGFKIDFETGTIRLPKIPNVKCIFDRRFTGTVKTATVSKTASGKYFVSILVEEPIQLKPSTGLEVGCDLGLKDLLILSNGVKFAHPENMLTKAKRALKQAQRKHARTKKGSKNREKARIRVAKCYERITNQRNAYYHQISSYLVNNFDAIYMENLNVKGMLKHPTLARKIHESAWTTLVAMISYKAGFYGKTIHKIDQFVASSKTCSSCGHKLTKLDLGTREWTCPDCGTHHDRDLNAAKNIKNFGQLDCYDHVLTSVESIEEGLIIPKTLEKFASKIEGSAQKSSSQRDGVILDNLNTIV

SEQ ID NO: 26443 - protein, 370 aa, Nitrococcus sp.
MKLRWSFRCYPTSEQERILARTFGCARFVYNRFLAERTAAFQRGDRMNYNQSSAGLSRLKRDPDYLWLNEVSSVPTQQALRHLQTAFRNFFDKRAGYPSFKKKEGRQTAEYTRSAFKFEVGNQRLIIAKLGRLKVKWSKHVPVNPTSATLIRMPSGRYFVSLVVDVQPAPLPQTGESVGVDFGISRLATLSNGDRVANPKYLNRYRRRMARIQKDLARKQKGSNRRWRCKRKLARLHEKVTNFRKDTINKLAWSLVTRFDTIAVEDLNLRGMVKNHSLARSLSDAAIGSAIRAIEAKAAMHDKTVVKIDRWFPSSKLCSACGCLQSSMPLSVRQWTCECGASHDRDENAARNILAVGHTATAHGDGVSPH

SEQ ID NO: 26444 - protein, 364 aa, unknown
  TnpB Polypeptide
MKLIRSTKCSLKFSTQKKKNELLIILDEYSKVVNFFINYFWLNPTIMSKGSLLKPVVDLPQESWLSARLRKVAAREAIDMINASKERWKNKAVIPVHKGNRMYVSCTIADLIPSKLSTEFDAWLHLASIGNKKILDLPIKYHKHFNKYNLTGKRLNSYIITKNYVQFSFEIITLPKREGKLCIGIDTGINALASLNNGKQYGLDIKEYIERVKRCVQGSKGYYVAKRALKQRIDEVAIEIVNTENPDLIVVEKLKSMGKKSKAKRLLAKSIRRSIGTWNWKYWLKRLEAQCETNRISFRSVAPYYTSTTCPVCGHSDRGNRLGEVFLCLKCGHKDNADINAGKNILNRFLTGQYGVCYKEVSLI

SEQ ID NO: 26445 - protein, 364 aa, unknown
  TnpB Polypeptide
MKLVAALKLTPSPEQAACLRATLVRCNEAATWLGQLGFDAGILGQYALHKLAYADLRSRFGLTAQAAVRTIAKVADAFKVNKEVAPAFRPNAAQPYDDRIMRFVQDGNAVSLWTLQGRMVISCTMGEHQRRLMAYRKGEADLCLIRGKWFLAATCDVPEAEPFDAEDWLGVDLGLVSLAVDSDGTAYSGEAVERARRHHQKRRRGLQKCGTKGAKRRLRKLAGKQARVQKHINHVISKALVRDAERTGRGIALEELKGIRARVTARSGDQRARLGNWGFAQLGGFVAYKAKRAGVPVAYVDPRNTSRQCHECGCIDKRNRPNQATFKCVGCGHEAAADTNAARNIRQRGWAGHRGVMTREVLAA

SEQ ID NO: 26446 - protein, 324 aa, Escherichia sp.
LQQSLKDLERAYKNFFQNRAAFPRFKKRGQNDAFRYPRGVKLDQENSRIFLPKLGWMRYRNSRQVTGVVKNVTVSQSCGKWYISIQTESEVSTPVHPSASMVGLDAGVAKLATLSDGTVFEPVNSFQKNQKKLARLQRQLSRRVKFSNNWQKQKRKIQRLHSCIANIRRDYLHKVTTIVSKNHAMIVIEDLKVSNMSKSAAGTVSQPGRNVRAKSGLNRSILDQGWYEMRRQLEYKQLWSGGQVLAVPPAYTSQRCACCGHTAKENRLSQSKFRCQVCGYTANADVNGARNILAAGHAVLACGEMVQSGRSLKQEPTEMIQATA

SEQ ID NO: 26447 - protein, 453 aa, unknown
  TnpB Polypeptide
MYNKGMKLSEVKRMPKKKQRAGPSLTRTINHIRLAAANTGKLVALDVLWEAYQPLCKQYIGLFCETLEPDAMLAFCFDSVLSARWQRVAVQQAAGITKSWHSNRLNSLKAYHEKLVYYESLEPIKQQAHKKPEWNEPALPTLHAVSIQANENVALQVKLEKATDSTFDFWLRLSTLDKGHPLYLPVMLAKRHRKMLSGHVPNRSVTLSRRDGWWWLSLSISEPLPILQTTSHTIGLDVGIVNFLSDSDGHQFGTVGQRFMQQVERVNIKTARKARLRACLKKRGVADEQLPSTSSAQSQRLARRVKHDIETAVVQCFEAHPDTLFVVEKLDVSGMRFKSSRMNRYLRASQIGHIQDHLYWTATKRGVPVVAVPAAYSSQSCPHCHYADRANRPDQQTFCCVKCGHRGHADVVAATNLKTRLNDTELRQCPNKEAIKKLLDKRHAAWLLQQPPS

SEQ ID NO: 26448 - protein, 320 aa, unknown
  TnpB Polypeptide
LYDLQKHITKLKKKSKYSYWKQLDSQAIQDVAERIDRSYKAFFEHIKKNKSGKKSPPKFKKVAKYSSFTLKQAGYSFHNSNGITIMKKDYKYFSNQEIQGKIKTVTIKRDRLGNFYICVVTEQEMEINSRTGNAVGIDFGMKHFLNLDNYSVIDSPEYFKQSLERLRKAHRKVLRCQKGSNNRKRAIKELDRIYRKISNSRRDWFYKLANSLTKQYSVICIEDLNLEGMKKLWGRKISDLSYYEFVQILEWEALKNGSKVVKIYRFAPSSKACHCCGFINDELTLNDRRWVCPSCGEHLDRDVNAAINIRNLGLAKLNCK

SEQ ID NO: 26449 - protein, 462 aa, unknown
  TnpB Polypeptide
MGQATRTTKLFLDLGRRDQGGANTDKRAALDATALVLNQARTFYIDFFLAHTDKLAERVPYYSEQHLEMRERAISANELLTWAEACTVETAAHPHPWEGWDFSARFPEMPCIYRRSVIKDAIGKVRSYLSNLANWQKTKKKKGRPGLPGATDHPTLYQGTCELSLEEARGGDRFVRLKVYDGHAWQWVNYPVVCSRYFQQRQREPAWEQQSPTLVLSKQTAALHFPQTKTIAARKVKESKLDPDLVTVAVDLNVKHLAVITVRRHEQIIETVFVSDHGLDQQRYRHLKRIARKQWLSGKPVKGEHSNQQLWRHVRRMNEDAARKVACSLARVCAQYPGCVLLFERLRKIKAKAGSKSRRMNRRQANQLRGKINQYAREKAFLAGTVTVEVNPHGTSQYCSRCGQGGERFSFHHGQRVSVRWGKLFWCPHCHYEANADWNASVNGHHSFFHEFHWKPRPKRSG

SEQ ID NO: 26450 - protein, 375 aa, Clostridiaceae sp.
MITSTKVRLEPNNKQNTKLFQSSGTARWAYNWVLSKQEENYKNGGKFLSDSILRKDLTQLKKTEELKWLNDYSNNITKQAIKDSCEAYKKFFKGLSDKPKFKSRKRSKLSFYQDTEKIKFTETHVRLEKIGWVKLSEHNRIPTNSKYSNPRVSFDGVHWYVSVGIELNQIQLELIDKSIGIDVGIKDLAMCSHKEKPYKNINKTKRVKNLEKKLCRLQRKVSRKYEKNREGGSYVKTGNIIKLEKSIKKLHKKLDNIRTDYRHKVTTEIVKAKPSRIVMENLNISGMLKNKHLSKAVAQQSLYEFKTMIKYKAERCNIEFVEADKWYPSSKTCSKCGYVKPKLSLSERTFICECCGAVIDRDRNASINLSRYKVS

SEQ ID NO: 26451 - protein, 416 aa, Haloferax sp.
MAIQVTRTYVGSIQNHQQVCDGLDSLGDSASKIWNVARWTADRVWDEVGKIPNEGSLKSYMKNQACWKDLNAQSSQKVIEELSDAFQSWFDLRHKDSKSNPPGYRKHGDKRPRSTVTFKADGFKHDPENNRVRLSKGSNLKEHFSDFILCEYQTRPDVDLSEVESVQNVRAVWNGDEWELHFVCKVSLETNDSAGDKVAGIDLGIKNIATVAFSDEYVLYPGNSLKQDKHYFTRAEYDTEGENGPSERLMWARRKLAERETHFYHTLTDTIITECAERGVGTLAVSWPEDVRDSDWGKTGNKKLHTWAFDRIYQYLEYKGKIRGVEVLKENEWDTSKTCSRCGDDTKGNRKHRGLYVCSSCGLVGNADCNGAENMRQKITPSPHGEDRSNGCVAQPSVHLFDSESGCFAPREQVVS

SEQ ID NO: 26452 - protein, 327 aa, unknown
  TnpB Polypeptide
MRFRLYPSAAQKVFLLEQCGQARYVWNLGLEQRLMWRRWKGPTPGFNAQAAQLTEARRVEPWLAYGSQTVQQQALRDLDQAWQRFFAGTHRRPTWRKAGEDEGLRIVGPQAVRVRQDNRARSSVLVPKIGWVSFKRSRALVDWKSYRITRDRAGRWHIAFAAIPDPIPAPGTGGVVGVDRGVTVAVALSTGEMTSPAGLSMKEAERLLRLQRRLARARRGSNRRRKVRTLIGQLKSRDGDRRKDWVEKTTTGLARRFDVIRVENLNVKGMTRSARGTMANPGRNVAQKAGLNRGILKSGWGLLAGRLEQKAPGRVEKVKAAYTSQTL

SEQ ID NO: 26453 - protein, 422 aa, Pseudoflavonifractor sp.
VVLRKFFAGQFLVCKSTILQSLKKGGGGMAGGQTRGLTAGKAVQFTTIKARLCPTQAQAELFEKTFGCCRYIWNRMLADQQRFYIETDKHFIPTPAKYKNEAPFLREVDNQALIQEHNKLSQAFRVFFKNPECFGPPKFKKKKTDKDSFTACNHKFESGPTIYITKDGIRMTKAGIVKAKFPRRPRNGWKLKRITVEKTKSGKYYCYILYGYEVKTPEAVAPAPETTLGLKYSMGHFYVADNGETADPPHWLRQSYEKIVKIQRQLNRMQPGSKNYLDTVQKYRALHEHIANQRKDFIHKQSSRIANGWDAVCVRDDSMRDVSQKKILPGNALDSGFGMFRECLRYKLARQGKTLIVVDRAALTTRTCSACGFVRNDRPHQKGAWACPKCGARQDREVNAAKNIKAMGLDQYFNQEAARKSA

SEQ ID NO: 26454 - protein, 391 aa, unknown
  TnpB Polypeptide
MLRRYQYRLYPTKDQEALIAKHLGCCRFVYNWALDRKNRAYHNESLSLSKYDLMQHLPALKEELPWLKEVNAQSLQQSILHLSRAFTNFFEGRAEEPTFKKKHSPEQAFTVPQAYTVDFQLGTVKLPKIGTIKVKYHRSFVGTTKSATIIRRSTGRYLISIVVEDGKKAPKPTDPIPDQTVGIDLGLTHYAILSTGEKVENPKYLKNTQTRLAVLQRRLDRKKKGSKNRNKARLKVARCHQKIADQRKDFQHQLSSRLVRENQALAVESLNVGGMVKNHKLAGAISDAGWGMFVSMLAYKCREAGKTLLKIGVFEPSSKTCSVCGYRKADLTLKDREWTCPDCGTHHDRDLNAAINIKQFALAGAERAEEPVDSLPMGRGMKQEAPCVSGG

SEQ ID NO: 26455 - protein, 342 aa, unknown
  TnpB Polypeptide
MIQVQLKIRIKQKQEDVFNRWLLILTRVWNWAIRKIEQDANDNIYYSKFKFTNLLANHSQKLEIPSHCVTSMLAEAHNTWQKCFKKKCARPRFKGKKNPLTSIPFPDPIKRPEGNFIQLPIIGKLRFHKQNIPEGKIKCARLVKRASGWYLCLFVDAKPNHIEKHSNEEVGIDPGFKTNITLSNGEKIQKPKRLEEIAARLKQAQKGGNKRLVGRLYERMRNRRKDDNHKISRKLIQQYQLIVFSKDNIKGIANKFGKSVGEATHYQLRSMLAYKAEHSNRKYIEVDSRGSTCTCFVCKQKTGPTGFKALKIREWECSNCHSCHDRDVNSALNTLELGKAVA

SEQ ID NO: 26456 - protein, 582 aa, Rhodococcus sp.
MAVDDATGEPIGLDDVDTRVGWLLDLVTAAGAGLVSRLWQPATFDVLAAGRDRQDRRLPAQGHVAAARLGWAPIYPDGVYVPSRVSRVVTAQVVATLRTLAYRDTAIAALSARFDPATGVVSPPTGPGDDVPSGFARGVRRQLAARLRRDGGAPAGPLRITEIQEPPRMAAMAQLSAADQQLAQITVADRELVLTVKLPTCPAPAGRAQWRSVRLTATIPAHLYGRAITDWHLPTLVLDRRGLLWRCAATALVPAAALNSATVAVGVDWSPTTLGAAAIVAEGSGGLSSDYRGWTYDDRGLGIKLARLQAEGQLLHRKAARLTRLAATALPEVRAELQAKIAVLNEHRTAVGIKRGRINRELAFDFARQVTDYAAAAGAQVIAVENLTTLKTRGHGQVNNNRAAQSARRQAVAALAHTAAGAGITVVSVPARRSSAQCPGCNEPLARPGGYHDAWCPRCRVGGNRDHVAGVNLAKRALLARNKVTRRRGQMPTIRVAEHAPVRKCRDKNNPTPSRARHRRVRHSLPAATPWLGVTPKQHVPAPQASVWDTVKPTPPHGDAGSRDTHTPLQSATRVEDSMRSM

SEQ ID NO: 26457 - protein, 361 aa, Clostridium sp.
MLKAYKFRLYPNEEQRIYLAKTFGCTRFVYNRMLAERIKSYEENKNLDIKSVKYPTPAQYKTEFEWLKEVDSLALANAQMNLDKAYKNFFRNKSVGFPKFKKRTNTNNYTTNNQRGTVYIENNHIKVPKLKSMIKIEQHRQFNGLIKSCTISQVPSGKYFVSILVDTKIVKLPKIDNKIGVDLGIKDFAITSDEEIFSNPKHLKKSEKRLGKLQKDLSRKQKGSNNRRKARVKVAKLHEKIANQRKDFLHKVSTQLIRENQTIVIEDLKVSNMIKNHKLAKSIADVSWSEFRAMLEYKANWYGRTIIVAPSNYASSQLCSSCGNKSSQTKDLSCRTYICPVCGMIMDRDINASKNLLKLAM

SEQ ID NO: 26458 - protein, 371 aa, unknown
  TnpB Polypeptide
MRLTVQVQLLADADQRAALQATLALTNQAANLGSEIAWQRGAFRAYNLQQLAYGQIRALGLSAQLAVRVIKRVADAYKLGRFTKRTFRADAAQPYDDRCLSWQPDQQTVSIWTVAGRLKGIRFAVGEQQRKLLAYRKGESDLVCRNGKLYLYTTCEIPEASAVAPNGFLGVDLGIVNVATTSDGTRYAGKHLNRIRHRNQQLRAKLQHKGTKSAKRLLKQRCRKEARFAADTNHVISKRIVVEAERTGRGIALEDLQGIRGRVRLRKPQRATLHTWSFHQLGSFIGYKALRAGVVVIHVNPAHTSQSCSGCGHVDRANRQDQATFRCRSCGFAGHADWNAARNIAERGDAGWAAANQPHADGRLVARVASR

SEQ ID NO: 26459 - protein, 391 aa, unknown
  TnpB Polypeptide
MAKVVKRAYKYRFYPSPAQTGELARTFGCVRKVYNLALEARTEAWYQRHERVSYVQSSAMLTEWKRSDDLAYLTEVSSVPLQQALRNLQGAFVSFWEKRAKYPRFKSRKRSRQSAEYTRSGFRWQDGTGGTLTLAKMSEPLDIRWSRPLPDGAKPSTVTVSRDAAGRWFVSLLCACPVEPFAVTDAAVGIDAGITSLVALSTGEKIANPRHERRDRARLARAQRTLARKQKGSANREKARVTVARAHARITDRRRDTLHKLTTRLVRENQAVVIEDLSVRNMLRNHCLARAISDAAWSDLRGMLEYKADWYGRDLIVIDRFYPSSKTCSACGHVAASLPLNVRAWDCEQCGARHDRDVNAARNILAAGLAVSACGAGVRPQRESSLRGGRR

SEQ ID NO: 26460 - protein, 290 aa, Geobacillus sp.
MADGSRKANCKSKQKESSIFTASPFKRYATNISSLDNPLKKPSNKDFARLVIPTGKRSTSTQNGRKTVSNCMKMEKIELSMGIHNRKREKPIIVYASNLPQGTIKEIECCYDNGWYLAVTYEDGQEAKAYQPGHMVGVDLGEIHTMGAFCENGQALLITGRKVRSLHRLRNKKLAEIQRRPSKCQKGSRQWKKYERAKRYVLSKSERQLRDALHKTTKQFVDWCLAQSGSDVYIGKVEGVQRNTRKKKRANRKQVQKISNWSFGKVKQYLAYKLAQHGIRLKEVEETYTR

SEQ ID NO: 26461 - protein, 404 aa, Calothrix sp.
VFNLTYEFKLKPTQKQSNTFEQWLEINRRVYNYALRERKDWYKSRSCQVNACSLHSEYIIPADVPRPTYASQCKSLTEAKKTNPDLKSVQSQVLQQTLKRLENAFTSMWEQNHGFPRFKKHGRMGSFVFPQMKGDRLETGRVNLPVIGWVKFRQSRSLSVDGVIKQARVVKRISGWYVMLTVQWDVNPPQPIPHGEAVGIDVGLTSFVATSNGLLVKRPRFFVDAERKLKLLQQRVSRKPHGSNNRKKALYKVASLHEYVANCRKDWHRKLSHQICNHAGMVFVEDLNLVGLSREMLGKHCLDAGFGQFFNILEQTCFKRDVYFQKVDGRKTSQICPNCGIETGKKELSERTHYCSNCGYTTDRDIAAAQVVAIRGLAAVGHTVKMLAEGKFIGIPLKQESPHL

SEQ ID NO: 26462 - protein, 365 aa, unknown
  TnpB Polypeptide
MWTINNPEQKMIVRKTVKARIFALTRIKGALLREEYDNFQACLRGFDAPLYSATKQQAHRLLRKVRKQNGKGPKNKEYPMILRRDVFNIRKTENKLAKFWVKIPVHHVRGRIKVPIQLPRNQEHLLSLSIREGKLLWKGDHWSLHITVMKEVELRQTQPPSTILAVDLGERRIATSVVIADGVMKNPKFYGKKVRGIRRHYAWLRRRLGKRKLLRVIKRIGHREKRKVDAILHKISKGIVSEARRLNAVIIVGDLKGIRDKVKDKGGRMNRIVSHMPYYHLTQMITYKALWEGILVYKISEAWTSKTCHRCGREGERLSQARFKCTNCRLDHFNADLNGAINIAERFSSYIGESRAALDTAQTLE

SEQ ID NO: 26463 - protein, 509 aa, unknown
  TnpB Polypeptide
MLSKSVVSRTYPRVPYAAFDKNGGPLDLNDVLSGIRKDAELVAHYALKEMTEQNLALSTYFKRIKPADAGRQMNLKLPAEVKKQFKSGASRLEKMFQEQVVSNLRSWAARVEVMTQTSNKYASAGWKRTASKSKPSSMKPRLALSATDKWYHRNFCVTPEHISLDMVVQGRWVTLHFPTPPQLLEKGCEPGAPDIWVDKNNRVMFGFHGKTDPGRPNFSERYVIGVDVGVKHPAAYVVWDTENKEIVERSLLGQRARSLNNKIKRTQTQVSSLKRKGKDEEAASHRQHLSNKRRELSILIAQELADASWHYDNAIVSFEDLSHIKNTMKYGRWFRGEVFRRTRDMVESDSGRVFKVNAAYTSQRCHVCQSDLDMNNYSEPRCATCGITHHRDLNAAANIAQRVNVKKACQTRKKHATARKARKSKCHSKPLKHPGTKNRPTPKAPQNQKKRTTRTRPPLPSKEVSVRMCPADHRVSAVDHVMWFQTTSGTTNPKENLYINSVNWVYPKE

SEQ ID NO: 26464 - protein, 370 aa, Vibrio sp.
MLNKAWSGKMLLAHKIELRPTEMQAEYLDRACGSKRHAFNQLLAHFSQDGVKWSKKAANEVYKQLRLTFPWYGEVSQRVTRNTIDDLDNAFKHFFRRVKLGEKAGYPTFKKRGVNDSFALREKEKFQVVGRTLRIEKLKAPIKMRQTLRFVGEARQVTISKRAGKYFASILVETQDYNPKDANRAASVGVDFGIKELATCSNGVVFAASQKLKASLNRLARKQRKLAKQVRGSNRYAKTKLSIAKLHKRISDQRQAIAHQVSDYLTAHFDRIVIEDLNVSGMVKNRKLARAVADCGFYMLRQQLEYKAALRNCELVVASRWFASSKTCSGCGAVKESLPLSMRTYDCDHCSTSLDRDLNASINLNNYMVV

SEQ ID NO: 26465 - protein, 321 aa, unknown
  TnpB Polypeptide
MEQMTITAKIQIVVDETDKVLLDETMSVYRNACNYVSDYVFRTHDLKQFSLNKVLYSTLRENFNLKSQMAQSVLKTVIARYKTILENQNEWMKPSFKKPQYDLVWNRDYSLTQNCFSINTLNGRVKLSYFADGMSKYFDHTIYKFGTAKLVNKHGKYYLHIPVTYDVEESNVSDICNVVGIDRGINFVVATYDSKNKSGFVSGKAMKQKRANYSKLRKELQMRQTSSSRRRIKAIGGRENRWMQDINHQVSKALVKNNPKHTLFVLEDLSGIRNATERVKTKDRYVAVSWTYRLGGRRSGESGRILPVGSSDCIDAELADT

SEQ ID NO: 26466 - protein, 442 aa, unknown
  TnpB Polypeptide
MMVGSVKDSELQTITAVGKVSVTDDSTAILLGLLGFSATKLWNTAVWYSKETWKTTGKIPTYHDLDIVMKQEHPLWYRRLHSQSAQAVLEDLWQSYKSWYALRKKGDKRAKPPGYRRKTALSAVTFKQAAVQWDPRTSTVRLSIPKDIYDKQFLYLKVRMPYGYRFTNDNIQIGRLVYLKGVWYVHLVYKMLLPELKGNREAMGVDLGMVNMVATACTDGSTSLWLGGELAALERYFEKQKSKTTKSRSRKSFAQNQKRSRQRTHLLHSFTKSLVRDAEARGVSTIIVGTLKDIRTGKDWGDSGNQALHKWPFDRIVKMLTYKARLKGILVVDLNESYTSQTCSQCNTINKSSRVHRGLYVCNHCGAKINADVNGAVNILKRYLPEQISVSWSSGCLAQPAVNRFAWRKTRPATSAHKPGTWQTTLPHLRTESVMALSSCRV

SEQ ID NO: 26467 - protein, 348 aa, unknown
  TnpB Polypeptide
MARSVNFVWNYINELSERSIRERGLFLSGYDICKFTQGANKELGLNSHTVQRIGKEYATRRKQFRKNKLAWRKSFGSRRSLGWIPINTGASSWKFGQVYHNGSYFKVWDSYGLSQYRFLSASFNEDARGRWYFNVAVDVEPSSDRANKAVAGIDLGLTDVATCSDGSKMINHRFYKGMENMLANAQRARKKSRVRAIHAKIRNRRKDAAHKFSRRVVDNYGAVYVGDVSSLKLAKTRMAKSVFDAGWGQLKTMLEYKCDHAGIVFKEVDERYTTQACSSCGCLPLSRPKGIAGLGIRLWTCSECGVTHDRDINAAKNIAAVGHGRPVEGIPTFNAERCQWWPDGDNAA

SEQ ID NO: 26468 - protein, 585 aa, unknown
  TnpB Polypeptide
VSLVVGGDAACPGAEGRSVDPGFPPHGPVRCRVSGLRAVAAPFVAAVPAGARVRTRLRLSPADEAVLRAAGAHLGSLAGRDLKARCGEGRLDAKGRAVSRRERKRALTAKSSSRWAGAITRASEDQWRLAERNQRAERATLRARIRAIEARLAVRVGGQAGRVRGYATRAEWHAKQVRLQVLRARLSRVEQRITDGRVQVTRGGKNLLRKRHHLAAAGLTEARWRQEWESTRLFLTADGEADKVWGNETIRWHPGQGWLEVKLPAPLAHLANRPHGRYRLSGTVAFTYRGGEVAAQAATGAVCYDITFDPARGRWYLDASWRIPAQPAPALEDLRRYPVLAVDLNHGHLAAWVVMADGNPAGLPITVPLTLTGLPASQRDGRLRAAITTLIGRAREHGCHAIAVENLDFADARGQGRERSSPRPSHGKKGRGFRRVVSGLPTGKFRDRLAQMTTNAGLAVIAADPAYTSRWGAEHWLAPLRQQASPVPPSGHHAAAVVIGRRALGHRVRRREGVTGADQRISRRGAAPRAPAAQRIGRDGRPRQASRQPQRRRKTATAQRPPPPDQAAQDRPGPSASTDHPVPAQ

SEQ ID NO: 26469 - protein, 448 aa, unknown
  TnpB Polypeptide
MAYCHNNPYVNSILLENQQKFHQQMTWLEKYRSYLQAKGAVIQDKIGTINSIHKGDRRLRGLYARLSVIQNRLRTYQFKPLISGGKRAFRDRIRHKLTRQEFKIHRDASFTCVGKKQGVNLNIKVLTTKKVKIRTFSKAKGKKWLTIPFSGNEKQDPLLQTLFQAAKYTVTVKRLLVKKELRYYVHFSYELPEPEERYAFENGAIGLDMNYQVLGLTNVDQSGQLLSYQPIRLRNLYSLRRNQGMNYLSFKLDKILNYCVHKKKGLIIEDLAFPQYFSYNKPLNRKLNQFKTAAVELLKRKCLKRGVAYREVFPGYTSQITKYKYSRLHNLSGHILASYVIARRGLGFQEDLPPIYQRLLAQVGGALKPRLNPSSPYYKWAQIHDLFKHSGITSFKTAKILPKVVLMQYILNPATGAQPDNLRAGLSPTGKIEDCHKFWNFVENNRFL

SEQ ID NO: 26470 - protein, 419 aa, unknown
  TnpB Polypeptide
MQSEKRNITAVVKDEMLVKGVVFHLESDLPSEVKFLHEDFRLAVNNAIRAGLQARVTSRNALNKIAYKDFRQEHPRMYSQHLVSAFEVAGSALKNHRRRARKGVTCRVPYVKRLMMKAENQAYKLDRKSGVIDLPIRAGCHVELRLVVSQYHRKYLDDMALSLGSLTVLPNRVIVAFRKDAPKPFVPESALSLDTNERSLDGVFVTDDAGMAVKAEFPDIAIIQQRHHDRRKRLQKKKAHDRRITRRLCRREGAREHHRIDHRLHQVANSVLRFAEERRSAIVLEDLKGMKPKRNKELNRRLSMWPRRKLHRIIEYKAHWKGIPVVKVDPRNSSRTCPICGRIQYSRMGPEFRCECGWRLDRHINASINLLQTATSKGMAGGLWFNPGAFQHDVMMILYDPVTGARSEPNGTSGIAVVT

SEQ ID NO: 26471 - protein, 294 aa, Moorea sp.
MIVLELKAKGKPSQYSAINEAIRTVRFIRNSCIRLWMDNKGTGKNDLSKYSKILAKEFPFANKLNSTARQAASERAWSSIGRFYENCKKKVPGKKGFPKFQKCGRSVEYKKSGWKLAPDKKSITFTDKKGIDLRSRFAIGKLKLKGTWDLWRFDKKQINRVRIIRRADGYYVQFCIAVEVKEDLNTTGRTIGLDVGLKEFYTDSEGHSEPNPRFYRTGEKRLKFYQRRVSRKKKASSNRRKAINRLGRQHLKISRQREEHAKRLVRSYRKKSAAFIVGRLCIKGGRFCCKAALF

SEQ ID NO: 26472 - protein, 191 aa, Okeania sp.
MVEKAYKFRFYPTPEQESRLLRTLGCVRLVYNKALAARTQAWYEHQERVGYKQTSAMLTNWKKQEDLDFLREVSSVPLQQGLRHLQTAFPAECCANTNFFSGRTKYPKFKKKRNGGSAEFTKSAFKWLDGKVYLAKCSEPLPLRWSRQLPQNCAPSTITVRLEPSGRWSVSLRVNDVRDLRLKPTNSPSGD

SEQ ID NO: 26473 - protein, 427 aa, Streptomyces sp.
MSKADRGRRYRLYPEPGTAARLESWGHTARALWNMALYQRIYVYEQRGITLNLAGQGRFLTEARREMDWVADLPAQCAQQVLRHLDVAYVNFWNPDHPAGFPAWKKRGHHLAVSFPGQAVQVRKLNRHWAEVRLPKLGWIRFRLSRALGGAIRNAGVTRDGNGWHISFGVYTGREPDAPNGKPACGVDFGVASSAFVSTETESRTMPPTLRPNERKRLKALERRKARQVTYAKKHQGGRYSKRLRRTIAQIAGLRTRQANRRQDFTHKLTTDLAHNHGMIGIEDLHVKHMTKAARGTAQHPGSRVRQKAGLNRSILDNAPGERRRQLEYKCRMHGSQLIAVPPFHTSQTCAHCGRVDPDSREGCGRLFSCVHCGHEDDADHNASVEIEARARRTGGSVINSTRSATTARVPAPRRRRTRETLPATHG

SEQ ID NO: 26474 - protein, 198 aa, Lyngbya sp.
VLKSYRAVLKQKLARAKDGSNTRKKIKRLVARVQSRIARCREDFLHKLSRKIVNDNQVIVVENLAVKNMVKNHNLAKAISDCGWGIFCTMLSYKAKMEGKVYLEVDRFFPSSRISHLTGYRFTDLKLSDRMLYDPIAEKWIDRDINAAINIKNEGLRILSLGTSDTANLRENKTGGKTSVLLDAFPLEDGNPVSDEVG

SEQ ID NO: 26475 - protein, 567 aa, Streptomyces sp.
MCDLCRWWSLGVVTDFCDTGWGVEEMGGLRELAASFVVPGPSGVAIRTRLKHLTAGDEKVLRLVGDLLGTLASRDLKARCSAGLEHDTKQWAQRKRTLSEQSSSRWAGSITKASHDQWALARRGQLAHIQSLQAGIETIAHRLSVPVGEKGSKQAPGGYRSTREWHAKRLRLCVLEDRLQAVRADREAGVVRVVRGGKRLLNTRHHLQEVQLSEEQWRLRWQAGRRFLAADGESGKRFGNETIRVTPGGEFSIKVPAPLAHLANAPHGRYVLAARVSFAHRGEQWADRVAANRAVAYRIHEDVSRGRWYVTASWTIPAVQTVPLEAARTGGLIGVDTNADHLAAWRLDAHGNPTGNPRRFDYDLSGTAAHRDAQVRHALIRLLHWAERHHLAIAVEDLDFTAETTREKHGRRKRFRNLISGMPTGRLRARLVSMAAELGIPVVAVDPAYTSKWGAQHWQKHLTTKDRKTTRHDAAAVAIGRRALGHPIRRRTAPPPHDRSDRAGHRTVQAEPGTPGREGNRPRIPGPRTRSVRAGRGENAVDQNAQHRSGRSAEHGFWGQDSLPLSL

SEQ ID NO: 26476 - protein, 627 aa, Microbacterium sp.
MMPFSPEFERAAYMVIVIVDTAHKGGMNLPDGYDHGTTRAYRLCRPVCNPCKAANTAAQGARRAARLAAGMPEDAHGKPSGYSYWNCRCRRCSIAVLGEPKQGQSTRAERRAASDEALAGQLTRVVRYRYEILPDPVVGRALRRTIGAARYVYNSAVAFARDHRRETGKYPALAGQSNAIIAEPRSRLPWLAAVPHAVLSAALRDAQRAQQNHLSSLAGQRRGPKVAAPQMRKKSHGGSVSLSDGAFRIAGGWQNTGRTGGRLHLGKHIGTVGVRWSRPLPSDPTTATVVLTPDGRWWVSFVVREALALTKPQNPGRVAGVDLGLTHFATIAYSDGRFEKIDNPRFLLKQERKLAHMQRDLARMQGPTRGRKASKRWDKQRRRVARLHTHIANQREHFARREAAQLIRENQGIVVETLNIAGLGQSKVGKSVYDTAWGIFLRALQEGSVKRGRDLIVLPRFFPGSRKCSACGTVDGPKPLRVRSWTCPECGATHDRDVNAAVNHLEYAYQVAALAAEDLTALDLAAGLAERLNARGWGVGQHMAPPRDTTPCEASNGRTGWERKLLARRRRSRRSALRRKHVRNRGARTVTSQAAQGVAGDAGGIARGFQRNRPVKASELPRKSRAE

SEQ ID NO: 26477 - protein, 352 aa, unknown
  TnpB Polypeptide
LASESGVKKYIKNNGYLLHSQTIQACAESYFESLKSFFQVRKSDPEAKPPKRTPRYFKVRWKSSAIRLKDGQLMLSNGKGRDPVILENVQEKPKYVEMYFHRGCYYFGLVYKVDVPPKQETGITISVDMGEIHPIVRFDGKRTTIYNGRFLRSIVRYRNKFKAQIQNAMDTCKKRSRKWYKLRKAKQRTLDKLDAQIKDAEHKITSRFISDCQRAKADTIVIGDLTHIRDNIKYSKKSNQKLHQWAFARIADKIKYKAELVGIKVVSVSEAYTSQTCPKCGHRKKPSNRNYHCSQCDFKYHRDGVGAINIHNKVSGVTNTPVSRDLGSPLGVKFNWHLSCLGLNPRKFAISG

SEQ ID NO: 26478 - protein, 339 aa, unknown
  TnpB Polypeptide
MFTNTEVNYKAAWNMFRKVHTAGKPKFKRKGRPVQSYSTSNHYSSATVKKHGGAPSLYNGSIKFLDHNHIQLPKLGPIKVKLHRSLPTNRLVRIATVTIKHYATGQWTVSLLLKSDEPFHQALPNTNQAVGIDLNTENFLTTSDQKQVANPHYYRALKKHLAKHQRILSRRARRAKKEHRPLWASKNYQQEKLVVAKIHQRIRNRRLNFLHETSTALIKSHDLVVAENLKSKNMLKNHALAMSISDVGWRTFLGMLEYKAPLYGRTFVEVNPAYTTQTCYDCGFVMGSKGTKRLTLHDREWTCPNCHVHHIRDHNAALNILAKGQRLLTRPDQNLEAIY

SEQ ID NO: 26479 - protein, 461 aa, Acidobacteria sp.
MLLAEAQRGDHGASDALQQFIRNNLESDDKWGLLVLFSRKKLRRLFTKKYSIDGQILTDGVRVIFPLRTPEASTRKAAGGAASGRARSTDGKMELVAAYLADEEATCYAAGCAIPVAKRKRAEFDCLTENMEDILKKAKAAKEAVDAKAAAERKAAAAAEKKRARDALTKDDLKAERDAKAAAKKSKREDPHAHIQTLPDDWYVTGVDIGHCNPVYAARKMVGAPAEERPEFFKVTLGQWYTMTGQRARALLLKKTAKRAKLAPLPSRAVAGNAIWGVLTERARSYAANYAVYGSLGMRRMAFDCYMKKQRALMKVHRKLVPDQKTVLAWGDGDFQTTRKGLSSSVHKTIERYIKQRSGSVMRITPEHRTSMNCSCCHSKMKNVTQGLLKRRNGQLFRTNRSPDGDVIVREIHGLYQCSKEGCYTRWDRDLNAAINIRNVFLSICATRLPPLHFQRSFKME

SEQ ID NO: 26480 - protein, 483 aa, Phycisphaera sp.
MKDSTFIQQGELFTQNFSHETPPSKPSSKSIEDLTQSIVNSKDINPTPYSYDRVSNIKLRYIARNENKILMEAFEKELMLKVRQTAKILGKKCRLGVVHKMCNQSGYIWTPQNEKITPTFMRDSEDWFKDIWNDCENKGLPTILIEQVINRYQSYKKRNKKLPSYVEFKKDTINIKKNYIRYCDCENAIFLRDLHNNVIKLNIEETKSVLVHKEIWLDKLKAKKTKASSDLKTITFAANIMFKHRQIIPIVKIKETDAYCAKSFFAIDINKSDKDWLTFNMPIDGSMVYPKPASIKEAETKIKKIEKAINDSLSLKPHERKGKGVRVDHPEFKGKIFKCTSDGRRRLRLYWKDAHKKLQKAINKLDMLKRIERFCVENQLGFAHDDVASGQQNGTFSQDKLKIYWVARAREARFPFEIVNPAYTSQECPQCGHRSPKNRVKDDFKCLNCDYENESHKVGAINIANKAIKAYSNKEQVFSPDSE

SEQ ID NO: 26481 - protein, 423 aa, Methanolobus sp.
MLLTKKYKIHPTEEQTDTLWYISEQCRFLYNHALAERKESWEKSSISITYNKQQNDLPELKEINPDLKKPYSKTLQGVLKKLDGGYKSFFALWKNGDKDARPPNFRGKKYFFTIPYNQSGFKISDNVVTFSHKCNDVELSFEIEESLQEMKIKQFEIFNDNPYKAMGDFYISVSFEIESTKKYYDNNKYQAIDLGISKTVTAINTDCKFFEAVNPRPDKYWNSKIDKIHSRLDRCKKGSRRWKRLHASKRRMEKKRHNQIKDFQHKLSKKMVENTRANTIIIGDLNVKKMAKKPKVKTITKADGTTKKVKDFKEIALSRSTQNNGYLAQFVNILTYKAELAGKKVVKVDESYTSKACCSCGKIHEMPLSQRDMICDCGNKIDRDRNSSINIMTRYLSQNAIWTGYREFLGNLQIKLHIFRSYL

SEQ ID NO: 26482 - protein, 419 aa, Methanolobus sp.
MKKGYRYRIYPDKEQITLLEQHFGSVRFVYNRSLFIKNLMYSKFKINVSEVDLNNNLTSLKELHPWLKDLNSQSLQHANRNLLIGFKNFFEGNGAYPTRKNKKNNKFSFQVPQNYQINLSTSQIYLPKIGWMKIVLHRDFLDKEFVENELVTKEVNGEIILDQKLNKKFDILKTLTVSRTSAGRYHASILIDDHVPEPELVEFDENTTVGIDIGIKSFAVLSSGEVIENPRFLKNSLMKLKKLQRAVSRKQKGSRNRRKAIAKLAKQHQLVANQRNDFQHKISMKIISENQAICIEDLNVRGMVNNHCLAQSISDVGWSEFIRKLIYKAEWYGKTIIKIGRFEASSKLCNICGYKKDDLTLNDREWECPSCKTLHDRDLNASFNIKNIALNNLNTAGTAGRACGLTDNGQGEEARSLSF

SEQ ID NO: 26483 - protein, 403 aa, unknown
  TnpB Polypeptide
MPKIVDVNCTYKYRLYDNREANRRLHDTINISGIIWNHITALRKRYYRRFGKHLNSGLLQKHVSHLRMRTQRFAYWQKVGSQAVQDICQRHDKAYERFFNKEGGLPRFKKVKAYTSFTLKQAGWKLGADTHQRGSQKHPKWTGQITVLGEVYKFVKHRPMQGDIKTVTVKRDAAKRLWVCFSVVERISLEDETSTGQIGGFDFGLKTFLTTHDGIQIDAPQFFKQDLPQFRIIQSRVSKKDKGSQNQIKGQKHLARRHIRIADKRRDFHFQLVHLLFKHYDTLVFEDLNMEGMKRLWGKKVSDLGFAQFVKIAQWMAVKHGKRVIIIDRWERTTGTCSQCGNKQKLELKDRVFQCERCGLEIDRDHNAAINIVEAGHRLILSQSEEVPALSTASGVHGRSPRL

SEQ ID NO: 26484 - protein, 309 aa, unknown
  TnpB Polypeptide
MNRAIKYRLYPTSEQKAMFARTFGCCRKVWNLMLSDKNAFYRETGKLLHNTPAAYKEEYPYLREVDSLALANVQLNLQAAYRNFFRDKKVGFPKFKSAKRSRKAYTTNNQGGTVALRPNGIRLPKVGTVRAVVHRLPEEGWALKSATVSMESDGKYYASVLFEYEQHTEPVSIHTDSAIGLDYKSDGLYMDSRGHTGSFHKYYRESQQKLAKAQRRLSRKQGSRKGEEKSRNYLKQLRKVNRIHRHTANQRLDHLHKLSAEIANQYDIVCVEDLDMKALSNKGFGNGKATLDNGYGMIFSGNAFQSCTA

SEQ ID NO: 26485 - protein, 412 aa, unknown
  TnpB Polypeptide
MRSQKIRLKLTKEQERLAWWYSKVSRNYWNLLVDIDNRNNKGEFDEILSRNGNKTYYSKLHERDVYSLNQSDYTNLAKIVITKNYEEDAEKWSWYYQPNQSFIYTFVARELVKIRTRNKGKLSIKNVGKTQPSFNVRCDTPYSNNRPSRIYLKDNGNLQIPTIGEVRFGSVRLDFDLSCKKQVANVSFDGKHWYLSYTENVDTSVTDLPEYTDGIGIDLGITPLATMSDGTIVPNIKTFRRVRILEKRLKRLQRKLSRKYLINKCNKHNKTKNIIKLERQIKLIYRSIKNIRINHIRKFVSELVKKQPQYIAIEDLNVKGMMKNKYLARDIANCSFYTIREHLTRKAKERHIVVRLVDRFYPSSKTCSNCGSYKVDLKLSQRVYRCEHCKMQIDRDFNASLNIAQTDRYILS

SEQ ID NO: 26486 - protein, 265 aa, unknown
  TnpB Polypeptide
VVRDRDPQSPVARGARTRSALREGHRSGHALSGGLAVSTTADQQTQFLAGRAAVHQGEAFQRVRKRWQHKGTRSATARLRQFALRARRFKASTNHQVAHRLVAPATLFGLEDLTHMRERTQRTQRTGKRQRRKYAKWAFAEVGAFIAYKAALAGSVVVKVDADYPSQQCPTCGYRAKNNRLRTGLRFRCTNPEGCRCDLHADLVGARQVCLRTLAVRQDWAATGHLSPVPDVSSDEAKAARLQRYAELRWRTDASPPALAVGQRD

SEQ ID NO: 26487 - protein, 423 aa, Lactobacillus sp.
MIKRKGASIVKQTFTAKIRLYPTNKQIASFKAITKEYQRLCNIVSQWYFDGHFNANQKVFQKDMYRYLRNESPNLNSQMVQSTYRTVKARYDTVRTQLYQRPYRYDTEVIDEKTGKHIWKSVPRTLDWLWKPIHFKRPQADYVHGSNYSFVKERTMISLNVLGKRIKVPFKADYLAYLFFANAKLGTAKLVQLKKHWFLHVPVTIEVSEWEKLRNQHIVGIDRGLRQIMTIYDEKGKTKFFNGKQVAHQRKKYAYLRKRLQSANTKSAKRHLKRLAGRENRWMEDVNHRLSKTLVQHYGANTLFVLEDLTNVSFDEKNQGTRDRNRDLHSWSFYDLQVKLTYKSQANQSQVLIVSAKYTSQRCPKCGQICKENRNHALHRYDCAYCGFKTNDDRVGAMNLYELGKQYLTGNEHPKFELNNVTD

SEQ ID NO: 26488 - protein, 412 aa, unknown
  TnpB Polypeptide
MRSQKIRLKLTKEQERLAWWYSKVSRNFWNLLVDIDKRNNEGEFDEILNKNGNMTYYSKFYNREIYSLNQSDYLSLVKLVVTKNYKDNEEAWSWYYQPNQSFIYGFLSRELVKIRKQNKGRLNFRRITDIQPNFNVRCDVSSDKKRSSRIYLKENGKLQIPTLGNVKFGSTRKDFDLSSKKQVANISFDGKYWYLSYTEDVEIQIVELPDYTDGLGVDLGIKTLVTVSDGTTVPNIKTFRRVRILNKRLKRLQRKVSRKYHINKCNKHNKTKNIIKLEKQIKLIHRSLRNIRINHIRKFVSDLVKKQPQYIAIEDLNVKGMMKNKYLAKDIANCSFYTIREHLIRKATERHIAVRLVDRFYPSSKTCSNCGNHKKNLKLSQRVYYCPNCHTKIDRDFNASLNIAKTDRYVLA

SEQ ID NO: 26489 - protein, 378 aa, Tepidibacter sp.
MIKAIKIRLLPTKEQEILMFKSTDIARFAYNWGLAKWEEMYKQGLTPSKSKIKKEFNNTIKKQEEYKWLYEVSGQVIPQAFDDLNTAYQNFFKGKAEKPKFKTKKKSKKSFYVRYDAIKFKDNQVNMEKIGKVAYTSNYDIPRLDKYKNPRCYFDGKYWYLTLGFEHGEKQTELNKDLSIGVDLGIKDLAIVNCLDKPIKNINKSIEVRRLKKKLKRLQIQVSRKYEMNKNEKQFIKTNNIIKLEMQIKLIYRKLSNIRNNHIHQATNKIVKLRPYRVVMEDLNISGMMKNKHLSEKIQEQKLYEFIRQMKYKCEFNKIEFVQVDRFYPSSKTCSCCGNIKSDLKLKDRIYVCNNHDCKLVIDRDKNASINLGNYKLA

SEQ ID NO: 26490 - protein, 213 aa, Acidilobales sp.
MREYIGRFKGLKWKEVHLKYVDGVLYVSIVFEVTYKPYTPRGAVAIDSNLKQIATYDGSGVKRFRARFVDALGRRARAEEIQRKHSRRWRYNEKILNKALHRKARNIVIDWCRKFAKELILKARGNGYVVVLEDLEYLRKNIAKNGNSITWKLSMFAYRKLQEVIVSKAIEYNVPVAFIDPRNTSSTCPRCGVKLSYIHRLFACLGICVILGM

SEQ ID NO: 26491 - protein, 226 aa, unknown
  TnpB Polypeptide
MEVGNIHHVTIEHTPSGKYFAVLNVESEPEPRPNQGGTIGIDVGIKTFYSDSNGNTVANPKYLERSMRKLVREQRRLSRREKGSHNRDKQRIRVAKVHEKVTNQRNDFLQKQSTMLVCENQTICIEDLHVKGMIRNHKLAKSIASVSWAKFFEMLEYKAVWYGNEIRKVPTMYPSSQTCSSCGYRNPLVKNLRIRIWECPGCHAVHDRDTNAGINILKKGLQLQSA

SEQ ID NO: 26492 - protein, 356 aa, unknown
  TnpB Polypeptide
MQQAITIKLKLVDPTQHKQEIYQTMADRNTDFANRYLELNKDDRPKTSKDASVDLPAAVVCQTIRDLKAKTNAKHYKHHWPGFNNQNFRVEREPTASGGAVWKASFPTLEKRIGVPIAVQPYQEKYLDKLQQEEAKQGTAFLIKRGRDWYLHVSLTLTVEEISGEKIMGIDLGLIDIAVASVSGQTRFFPGGYAAYIRRRYTRIRESMQRNKAHRALNKLGDKEHRWITDQNHKIARQIVDFAKATGVKLIRMEDLTGIRWTKSQNKKQRKDHGRSLHSWAFYQLQHFIEYKARLDGIRVQYVNKEKTSRTCSSCGAYLKNRPNGRWFSCPRCRKVKHIDANSADNIAQAISGLAA

SEQ ID NO: 26493 - protein, 405 aa, Streptomyces sp.
MIRAYKFLMRPTVGQQAALGEMLRDHCSLYNGALQERRDAYRHSSKTSITYGRQSAQLKEIRAFDPERQGRWSFSSQQATLRRLDKAFKAFFRRVKSGEAPGYPRFRGVSWFDTVDFPKDGDGCRWNSTTHDPTTRVRLQGVGHVKVHQHRPVTGNIKTVSVKREGKRWYVILTAEQTQPASLPATGSVVGIDMGITNFLADSHGGFVPNPRHGRQATAKLEAAQRALAKFPRVRRDTTRTANHKRAVQKVADLHRKVRRRRLDHAHKTALRLVREHDVIAHEDLKIRNMVKAVEPKPDPEHLGSFLPNGAAAKTGLNRSISDAGWGVFLTILHAKAESAGRDVIAVDPRNTSRTCPDCGHLSAENRPTQEKFHCVNCGHQAHADTVGAINVLRAGLVRRETPPV

SEQ ID NO: 26494 - protein, 483 aa, unknown
  TnpB Polypeptide
MCRDRKEIPGMGRKKIVSITEAVRIQQVIDHTELYTEDDGMRFDAGVFLDLFCQKKKKKTSSRKKGEEASYITYRFRGYPTEEQEQSMKQTIGCCRFFWNRMVGDRLDFYRIMGETLYNTPADYKDASGLEFLRLADSNALANVQLNVERAFSEWLKGEKGKPRFKKKYLCPDSYKTCLINGNIRLTGEGLVLPKVPGAVKIEAHRPVEPGGTLKSVTVTREPDGKWYFSIQYQYPSKEERDNTFLETEGDVSSLKVIGLDMSIPHMYVDSNGEFPYYYNNGNRVDFEKHSLATEKKIAREQRKLSRMEKDSANYRDQCIRISRLHAKAKHQREDFKKQAACRLAGEYDVVAVEDLDIAAMKKSLRLGKSLSDNGWGGFIQLLEQQCIKYGHLLIRVGKWFPSSKTCISCGYIHRELKINDRLYVCPECGNAMDRDHQAALNIKKEAVRILAEEYSAGKECGWKPISLEGLMEELRERTLLYA

SEQ ID NO: 26495 - protein, 457 aa, Arthrobacter sp.
MDFGRRNYRFRVYPTPEQAAALERQGHAARALWNLIHGAWQANGFRVGLDWYTREIKNIRKDEDYGWFADLPAQAAQSVWKNYFKAWMNCWDPGHPAQAPTFKKRHTRLGIDIPQARDLKPTRVNGKYITVNVPLAGKLKVRLHRKVDFTAVTGARLVRDGLGWHLIFRTRTGPIARPTAHKRAAIGIDRGVVVPLALSDGTNFEHPDFLTGTEAKSLLRLERQLARQEARRRATSARTSNRQRRTQASISALRNRQARRRKDFLDKTSRKIATDYSLIVLEDLDISNMTTRAKPKPDPENPGSWLPNHAAAKTGLNKSILNEGWGDFHRMVAYKAGEHGGTVITVNARYTSQTCTTCRIIGNRESQADFRCTNTTCSMFGIAVNADTNAAQEIETRGTELASSGMTVATAGPAPTTVPIPPAEVRAEAHTSAGGQFTMTPNPSSRCTTNSRCWPTT

SEQ ID NO: 26496 - protein, 378 aa, Streptomyces sp.
VQLRYNFRLYPTPGQRQELAKAFGCARVVFNDALRARREAHAAGLPYIKDTDLQKQIVTAAKRTEERAWLGEVSSVVLVQALADLHTAYRNFFASVTGSRKGPKAAAPRFRSRKDNRHTIRLTRNGFSIRPNGRLYVAKVGEIPVRWSRELPSDPSSVTIVKDAAGRYFASFVVRTHPTAVLPETTSEIGIDLGLTHFAILSDGRKVSSPKFLRRAERKLRKAQQALSRKAKGSNNRKRAVAKVARLHARVADARRDHHHKLSTTLIRENQAVYVEDLSVKGLARTRLAKSVLDAGWARFTAMLEYKAARYGRTFGKADRWLPSTRTCSVCFVVGGPKPLDVREWTCDGCQTTHDRDVNAARIVLAAGRADKRNACGG

SEQ ID NO: 26497 - protein, 465 aa, Lactobacillus sp.
MKKMAKKKEKAKASKSKKIAKVKDEKKQREKLIIPMTELPYHLGLKMRIYPSNEQKRLIAINSGVSRSVYNKLIVINSELNQLKKVNTYVKLVADRIEALEERKRKLSKYYFYMNSEDVDSLTIAQAKRCYSAAWNMYFKVHSSGRPKFHKKGVNDGYQTSCSYDSKKKNIENCTPFSGTVRFLDMKHVKLPKLGRIRISGSSYRKVLAHNPNFRIGTATIKYDASGYYLSLQIGDVVPFKSQKPKTDKTTGIDLNLDNFLTDSDGVVVDNPRFYRKSLKRLKRLQRRASRRQTRAKKEGRELWQSRNYQKARLQTSRLQRRVRNQRDDFLQKLSTAYINNHDVVVLENLRGKNLLKNYALAMSISDAGWTSFQRMLEYKADLYGKTYLEIDKRNTTQSCSSCGSIMGHNGHEKLTLKDREWDCPMCGTHHIRDYNAALNILEKGIAKLSDQEYKIIPYDSEAAS

SEQ ID NO: 26498 - protein, 584 aa, Rhodococcus sp.
MAVDDATGEAIGLDDVNIRVGWLLDLIAAAGAELVSRLWQSATFDVLAAGRDLQDRKLPVQGHVAAARLGWNPNYPDGIYVPSRVTRVVTAQVMATLRTLTHRDTAITALSARFDPAAGAVAPPTGPADYVPPGFAREVRRQLIAHARRTDGAQSTRLRITDVQEPPRMAAMARLSAVDRQLAQIAVTDRELALTVKLPTSPAPAGRAQWRRVRLTATIPKHLHGRAITDWHLPTLVLDHRGLLWRCAATELVPSGDLDSATVAVGVDWSPSTLGAAAITVENPDGLSSDYRGWTYDDRGLGIKLARLQAEGQMLHRKAARLTRLAATAPPEVRAQLEERIAILDEHRTAVGIKRGKTNRELAFHFARQLTNSAAAAGAQVIAVEDLTTLETRGHGRVNNNRAAQSPRRQAVAALAHTAAGVGIMVVSVPARGSSALCPGCDEPLARPGGYHTAWCPGCRVGGNRDHVAAVNLAKRALVGRNKAARRLGRLPAVRVADHAPMRKCRDKDGPTPSRPRHRRVRRSLPIVTREMGVNSNSMFLHHKRRCGTRSNPRRHRAIRVAVTHVYLQRPPHQWQIVRDLRRR

SEQ ID NO: 26499 - protein, 415 aa, unknown
  TnpB Polypeptide
LKILRIRKCEELFIKVQRVEQKVIKRTHPKFKIIDEMCFRSKNLYNEANYIIRQELIKNGNYINYYNMNFEFKTHENYKLTFSQPANCTLRLLDKNWKSYFKAIKDWKEHPEKYLGMPKLPKYLPKDGRFPWMIPNNQLVYNYEKSTIYLRNRLLNDFDWKCRCLGRPIQVRFIPKGTCYVMEIVYEIELPDQPSESNYIAAIDIGVDNLITMSNNVGKKPIIVNGKVLKSINQQYNKQRAKLQSELKKRNNRNWSKRLDILTFKRFCRVKNYMHNASSFTVKWCKENHIDTLVVGKNDTWKQGKKNMQNFTFIPYEMLLGQLKYKCENVGIKYVEVNEAYTSGTSYLDDEAPTKENYNNEKRIQRGLFQAKNMLINADVNGSLQIMRKVFPDSYTGYGIEVDLTPTIINAVKAA

SEQ ID NO: 26500 - protein, 209 aa, Streptomyces sp.
MGVTHFLTTSVGEHIANPRFLEAATQELAEAQRHLATFTKRTKRRTKKHRAATRKVPKIHARIQRQRLDHAHKTALTLVLDHDAIAHERLNTATMTKAPAPKPNPERPGAFLPNGATAKTGLNRRILDAGWGVFLAILANKAESAGRTVIAVDPRNTSRTCPSCGHTAKENRVSQARFQCTTCGYTANADHVGALNVLKRAGLALCDVA

SEQ ID NO: 26501 - protein, 403 aa, unknown
  TnpB Polypeptide
LVFLLIVHLNHPRRPLHSCRGGIGNRPFWEPTTLKSLAVAMQRTIKLTLPFNDSLFRTVTLYNAVCNDVLKVGFQARTYNKNRVHKLTYHGIRQKYLQLQSSMVQCLRDQACDMFKREELKRLSVKKPFSSIRYNQRTFKPYLKKGAVSLSTVDGRVKVEFSMPKYYERYVDWQAKSATLSYDVRSKRFRLHLVVEKETPAKVRATSVLGMDSGIINHAVLSNNLFFASNHIRSVKGRYQFLRRKLQAKGTRSAKRLLRKRSGRERRFTADTNHRIAKLIVQQPFTVIALEKLKVQRKKRNGQRFNRKLGSWAWRQLQQFVEYKAEALGKTVVYVNPAYTSKTCSRCGERGIRKGLAFECPSCGFELNADLNAARNIAQRGRVSFEQASVNEPYVASQSIATK

SEQ ID NO: 26502 - protein, 231 aa, unknown
  TnpB Polypeptide
  misc_feature (3)..(3): Xaa can be any naturally occurring amino acid
  misc_feature (32)..(32): Xaa can be any naturally occurring amino acid
  misc_feature (51)..(51): Xaa can be any naturally occurring amino acid
  misc_feature (59)..(59): Xaa can be any naturally occurring amino acid
  misc_feature (70)..(70): Xaa can be any naturally occurring amino acid
  misc_feature (72)..(72): Xaa can be any naturally occurring amino acid
  misc_feature (77)..(77): Xaa can be any naturally occurring amino acid
MRXGTGGCVCRSRLRQSRALRRGRPSALILGXRILPSRARGSALQPAAGRXGYADKISXAQRRGHQRQAXRXHRKAXRCRADALHKFSRKMVDRYQRIIVGDVSSLKLARTRMAKSVLDSGWGMLKSFLDYKSQQAARTFEVVSERNTSVTCSTCGALSGPRGVNGLIVRSWVCSDCGESHDRDQNAARNILIGSRCRTSVRGNESSASLVPPSSASRAREAGTDTARAAA

SEQ ID NO: 26503 - protein, 294 aa, unknown
  TnpB Polypeptide
MPRHSQPHSPAVVHRTARAGLRLTRGQRRRLLGLLLSAGDMWACVLELNAWRRARQDAPLVSYQGLCRELAVAGPGCFGELDSAGARSVLRRYSDAWFAAAARRKNGDTSARFPRRRRKMMPVRWYHGTFVLEGRRLRIPVARGCPPLQVRLDRDPPYPPGQVRSVTLLYDAGRLWADVTAEVPAAIYPPGAEPDPGRVAGVDLGIIHPYAAAGPGGPRRAPPAPQGHQGAAAGGGPPRAETGAARIPALAALPAPPAHRGGTARPPGPPGPARSRPHRDRLGRRPADRHPCGR

SEQ ID NO: 26504 - protein, 245 aa, unknown
  TnpB Polypeptide
LSWRAGGCGSRWPAAARRYRCAWTVTRPTHQARSGRSRCCMTRADCGPMSPPRSRPPFTRRARSRIRAGWLGWTWASSTPTPPPGRAVRAEHHLHLKDTKARQRAVARRAPKPGQRGSRHWRHYRRRQRIVEARHARRVRQAQHEAARTVIGWAVARRIGTLVVGDPRGVLDLAAGRRHDRRTRDWRVGHLISVLRDKAQQAGIALTLVDERGTSSTCPACRARSPGRAAGCSAARAAGFRATAT

SEQ ID NO: 26505 - protein, 363 aa, unknown
  TnpB Polypeptide
MQKGVKFRIYPNKEQQNLINQTLGCCRFIYNKGLSMRIGAYRNGEKIGYSQTSAMLTELKRDSDYTFLKEVDSIALQQSLRDLDTAYKNFFQKRAKYPVFKSKHNHHQSYRTINQGDNIRIVGKYLKLPKLGYVKVRQSMEIGHINNVTIEKTPTSKYFAVLNVDFEPEFRPNNGRVVGIDVGIKKFYTDSNGNTVDNPKLLEKSMQKLIREQRKLSRKQKGSKNFDKQRIKVALVHEKITNQRNDFLQKESTKLLRENQTIYIEDLMVKNMVRNHKLAQHISSASWSKFFNMLEYKAQWYGNDVKRVPTTYPSSQTCSCCGYKNPLVKNLAVRTWTCPVCHTMHDRDKNASVNILKKGLSAA

SEQ ID NO: 26506 - protein, 449 aa, Acinetobacter sp.
LNKEKYKQLEKQAVLLGHVRSEVWARYGAIAGLSISDRTIRDAWMKEGRNFGVSANAWKETLRDCMGDIKAFREASKEKVKQAIRKRTTCDKELKRLYTLLKKDEWQEDNFLHRQMRKHFRHGVNHTYNQIIVRADMCKTFELNGQCWLKVPSLVSRQTIKIPLNTTMEFAPIGTLRIILKNGNIEVHSTYDAVESQDCGQATIGVDKGYSEAFVDSDGEVYGQGLGKLISSESDYLNQKYKNRNKLRAIAKNKPHKKAQIELNNLGRKKLDRRQDAQKSKLKTLIFTATHKLVDKAKLIVAEDLTSPIQSKRNYGKNTNRRLNTWVKGLLADALTSVSHRRGSTVHLVNAAYTSQCDSFLHGLLIGTRKGDRFHRFNGEVVQADWNGARNVLARLNDTEISRYTPYKTVKRILQERTDRYKSELTDLGSSYTLGDKTLTECELVLDYV

SEQ ID NO: 26507 - protein, 398 aa, Escherichia sp.
MILAHKIALAPNNKQATYFSRAAGVARFAYNWALAEWKRQYEASKTDSQAPKPSQTALRRQLNAIKREQFPWMLEVTKNAPQMAIIQLGEAFKNFFAGRAKYPKFRKKGVHDRFTLTNDQFKIVGCRIRIPSLGWVRMRESLRFDGKIMSATISLVDERWFVSIAVETTDTSHLPQAENQGAVGVDLGVSALATLSTGEVITGPKSYKKLLSRVRRLSRSLSRKQKGSSNRKKAKIKLAKLHARIAFIRSNALHQFTTDLTRRFHTIGIENLNVRGMVKNYYLARSIADMGFFELRRQLEYKTAMRGSQLVIADRFYPSSKMCSDCGYKLDELPLSVREWTCPSCGTHHDRDVNAAINLKNMAVSSTVSVCGEEGSGCIRKNAVKPASMKQEANSRFS

SEQ ID NO: 26508 - protein, 596 aa, Streptomyces sp.
MVVYVSDRVRRAGEEQAARALRLALHHRAVVGALLATWPADPSRRTRAEWTTLREVLPAGTSAAEIRNRTRQIRDFARAHDGCLPAGLCELEEPPAVAAVVLLAAMDRQQTSLERVGDAGARLRVKLPLCAAPASRRDWAWHVIDLRLPVTVEADAALHSPTLRPTRTGRIAVDLPHSRPVATGEATGHTVAVGFDWGVNTLLTGTVGRLTGGGATARVLTDGRPLIYDATAISAKLHRLRTHREHLAAKRDHYRALTTGLGTAHRARDELLDRTASLEREHARVCARIRHLNDALAWSAARWAVDQAAALGASVIYLEDLATLETRGRRRGNARLSGQIRGTLAEAIRHLAAKRGLTVAAVPARGTSALCPRCLATLGHHPAPDRLGERGWKWAHCTGCDLSLDRDHAAARRIVSRGLLAQTHTLTQRATGTRTIHTTVDGPVTVARRPKKTTRRMRHAHRAQTLPVQPAGPKTTPAKARPTPTRRPKTTRRTPEVRTVPATTPTGAVKRPAGHDTQTPTPFPGQAPGHGAPAPRRPEQPLPGSGRRLSHETCRQRTRAAERTGFHHTHATEVHPLTPRFGPHRDGTRPRRARKA

SEQ ID NO: 26509 - protein, 430 aa, Streptomyces sp.
MVSIVSHGTLVKRQCGHRARLALSPAEALRTDGQAHAARTMWNLLHAWWQMMPKEKRTLAHADAAVRQARKDIDFLAVLPAQAAQAVLKTYFQAWKNCWDGRAGAPNFKGRFRTVMSVDVPQGRDLNIVRVHRRWGMVNIPKVGRLRFRWTKDLPVGKHANAENRITGARLVKDALGWHIAFRVQSVEVKPEPHQGPEVGIDVGVTVPIALSDGERYEHAEWLTEKEKARLVHLERRAARRKQHRKPGERTSRRLHRTYDQIAGLRAKAKRRALDWQHRTTTAIARTYGTVVVEALTITNMVKSARGTIEEPGKNVAQKSGLNRSISREAWGRTVTMLTYKTARLGGTLHKVPAPGTSQRCSACGFTAPGNRESQAVFVCKNPDCGWSGNADHNAARNVLHLYRMGLALVPAAGRAVVRRAKHVKPVAAR

SEQ ID NO: 26510 - protein, 401 aa, unknown
  TnpB Polypeptide
MVKKNKGYKFRLKPNKEQIIYLEKAFGCSRKMYNIYVDMLYSKLEEENFANGKISYKSMKFPTPAAIKKDYEYMKEIDSLAFANVQLDFLGALSKYNNEYDGKTYCKKAVKQSKTLGKELTFKDLKGMPNFKSKNRNQNSFTTNNQNGTVSIVDNNFVRIPKLKELIRFINHRELPQNSIIKSAAISKNCKNRYYISFTVEYYVDEVKIPSNNILGLDYSQHDFYVDSEDKRANYPKYYVKSEDKLKKEQQKLSRKILKSSNWIKHKKKISKIQNKIADQRLDWLHKKSYSLAENYDAVIVEDINLRAMGQCLKLGKNLSDNGFGMFRNFLKYKLEDRGKQYITIDKWYPSSKICSNCGNKNENLQLQDRIYKCQQCGLIIDRDYNASINIKEVGSTLLAW

SEQ ID NO: 26511 - protein, 355 aa, Okeania sp.
MKSIRTKLKVNNKQKTILAKHAGVARHAYNWGLETCIKDYEETKKRPSAITLHKRLVAEVKSQNPWYYEVSKCAPQQALRDLERAFKNFLTLPKRGFPKFKKKGKKDSFYLEGSIKIIQGNYIKLPRIGIVKTYEILPSVPVKNVRISKRAGDWYISFKYQCQPKTTPKKRAVIGVDVGINTLATCSDGTIFANVKAYKQAKKRLTRYQRRINKKELGSKNKAKAIKKLAKAHKKVADIRADALHKLTTWLAKNHSTIAIEDLNVSGMLKNHKLASAIADCGFYEFKRQLSYKCDCYGSKLVIADRFYPSSQLCSHCGQKQKMPLHKRTYECSNCGFTADRDFNAAVNLENYVLH

SEQ ID NO: 26512 - protein, 219 aa, unknown
  TnpB Polypeptide
VTISQTPGGRYYASILFEYEDQIPEKEMHSFLGLDFSMHGLYRDSNGNEPAYPGYYRNAEKRLAREQRRLSKMQKGSNNRRKQRIKVAKLHEKVSNQRKDFLHKQSRQITNAYDCVCIEDLDMKAMSRSLKLGKSVSDNGWGMFTAFLKYKLEEQGKKLVKVDRFFASSQMCSACGYKNAKTKDLALRQWDCPQCGIHHDRDVNAAINIRNEGMRIVTA

SEQ ID NO: 26513 - protein, 385 aa, unknown
  TnpB Polypeptide
MNLKSKNIKERSKYMHLGFKYRVYPTEEQKVFFAKSFGCCRKVWNLMLADKNNHYKETGKTLHPTPAQYKKEYPFLKEVDSLALANVQMQLNRAFKNFFENPKNFRFPQFKSKKRSRRSYTTNNQKGTIQIMDHGIKLPKVGMIHAIVHRLPGPEWIIKSATISQKSDGSYYISLLCEKEEEEITPLPVFDEKVLGLDYKSDGLYMDSNGRLGDMPKFFQKAQKRLVKRQRKLKNKDIHSKNYQKQLKKIAKLYVHTADQRKDFLHKKSAAITKQYDYVVVEDLNMRSMANKGFGNGKATLDNGYGMFLTMLEYKLHNKGGKLEKVDRWFPSSQLCSCCGFQNQEVKKLNVRTWICPKCGSIHDRDLNAAVNIKNEGLRILRSAA

SEQ ID NO: 26514 - protein, 377 aa, unknown
  TnpB Polypeptide
MEIKRAYRFRFYPTPEQEVILARTFGCARFAYNYMLRMRTDAWYQRQERVGYHETSAALTALKKTPEHAWLNEVSSVPVQQALRHLQTAFANFFAKRAKYPNFRRKDGVQSAEYTTSAFKWDGESLKLAKMDAPLAIRWSCTIPKGAKPTTVTVSRDTAGRYHVSILCDDAVSAKKKVKGQVGIDLGLTHFVILSTGEKIAAPNTFRKNEAKLAKLQRRMAKKKLGSANRKKAKLKVARMHAKTADTRRDFLHKLSTRLVNENQVIAIESLAVSNMQKNRALAKSISDASWSEFVRQLTYKAQWAERTLVGIDRWYPSSKRCSDCGHTVAKLPLSVRGWTCPECGTIHDRDINAARNVLAAGLAVSAHGESVNPMSL

SEQ ID NO: 26515 - protein, 425 aa, unknown
  TnpB Polypeptide
LTFRIQTGQKEKVDMSTPEMKTKTKTQYSVRRVHLGRTAQLDELAHACGQVYSRTLLFFWRTVRHKGLWLKPSHLMRLIATDPDQLLHSHTVDATVQAFFAGLSSWRERRKTDPTARPPRHRKWYFRIEYKSSAIRLQDSLLILSNGRGKAPLVLFWEWDLPQTVVIHWTGSEYEAIATYQIGKGLPEEEEVSLEKRRAAHSAGIDLGEVHPAVSCDGERAHLLNGRLLRSKRQYRNKLIARMDAKISRCKKGGKRRRKLIRAKQKRLRKLKHQIHEIEHKQTSYLVNTLHQEGVEKLVIGDVRTIRHGLDKGSKTNQKLHQWSFGSIRHKLTYKAERLGMRVVLQEERYTSRTCPVCGHRRKSAPAGRVFRCTNRTCRWQGHRDGVGAANIRAKYRGEFGSRHVVGAMAPPTGCGYVPQLRVLL

SEQ ID NO: 26516 - protein, 173 aa, Clostridium sp.
  misc_feature (173)..(173): Xaa can be any naturally occurring amino acid
IYKISNPNNEGLGIDLGIKEFAICSNGNKFKNINKTSTVKKIEKKLKREQRKLSRKYESLKIRNKNIKEGRATRQNIQKQVVKVQRLHQRLANIRTDYINKTVFSIVKQKPSYITIEDLAVSNMMKNKHLSKAIASQKFFEFKTKLMSKCKQNNIELRIVDRFYPSSKTCSNX

SEQ ID NO: 26517 - protein, 367 aa, Clostridiales sp.
MTRIRGYKYRAYPDKKQREFFSKNFGCCRFVYNHYLAMRKAKWEEWHDTMSYSETAKDLANNLKKEHEWLKDADSTALQQSLRHLDNAYQNFFKKRSGYPKFKKKRSVQSYRTMNNKGSIRIEGDGIRLPKAGKVKIVNTIKFEGRILSATVSKTSSGRYYISLQVEEEYELLPNKGGEIGLDAGLTALYTDSANHKIENPRTLSKHEKRLRRLQRELSRKKKDSKNREKARKRLAREHEKAADIRNDFQHKMTYRLARDNQVVCIEDLNVKEMMGNHRFARSIADASWSEFFRKLEYKMGDRGGILIKVPRTYPSSQRCSCCGRQNRKVRDLSIRSWICPECGTQHDRDVNSAVNILAKGLEMLAS

SEQ ID NO: 26518 - protein, 403 aa, Geitlerinema sp.
MSSVAEFTDSASTARKSKKIQIYLTAEQRHLARQWFGVSRFVYNRTIEYLQTDGTQANWKAIKTDLLNSLPEFCKAVPYQIKSIAIKDACTAVREAKKKFKKTGQIQKPKFRTRRDPVQSCYIPKSAVSEVGVYRTILGSVRFAESLPKKFGDCRMSMAYGRFYLCVPEEAVRQSAVERRERTRTKRIAVSQPENQGRVIAIDPGVRTFATFFSEQSFGKIGEGDFSRIQRLCHHLDDLISRSSKASSSAKRRLRKAASRMRLKIRNLIDELHHKTARFLVDNFDVILLPTFETSQMSKRSQRQIRSKTVRSMLSFSHYRFKQFLKYKAFETGKLVLDVCEAYTSKTVSWTGELLNIGGAKQIKSRIDSQVMDRDINGARGIFLRALVDTPWMRQHLAFVNER

SEQ ID NO: 26519 - protein, 377 aa, unknown
  TnpB Polypeptide
MEIKRAYKFRFYPTTQQEEILAKTFGCARFAYNYMLRQRTDAWFQRQEKVGYHETSAMLTALKKQPEFVWLNEVSSVPVQQSLRHLQTAFGNFFARRNKYPKFKKKDGAQSAEYTTSAFKWDGKNLRIAKMDEALNVRFSRTIPKAAKVTTVTVSKDCAGRYFVSMLCTDEVQAKAPVEAKVGIDLGLTHFAILSTGEKIAAPNTFRTNEKKLSKLQRRLAKKTPGSNLRKKAKLKVARLHAKIADSRKDFLHKLSTRLVNENQVIAIETLAVSNMQKNHCLAKSISDAGWSEFVRQLEYKSLWYGRELVGIDRWYPSSKRCSDCGHTVKKMPLNVREWTCPECGTIHDRDINAARNVLAAGLAVSANGESINPVCM

SEQ ID NO: 26520 - protein, 412 aa, unknown
  TnpB Polypeptide
MQLVEQHVISRGDPRYAVIDEAAFKSKNLYNAANYEIRQVFIHEGRYLNYNEVQRRMQSHEAYKALPAKVSQEILMVLDRNWRKGFFEALKAYEKDPSKFTGRPGLPKYKHKTEGRNVLIYTVQAISKKGLKNGLIQPSMLPISVKTKHKDIDQVRVVPRNGYYVVEVIYTKEPVQAHVDPSFCVGIDLGVTNLAAIASNREGFAPRLVNGRPLKAWNQWYNKRMKELKKLLPKADRERVTRQMECITNKRNRRIDHYLHTASKHMIDFLVENGIGTVIIGKNPLWKQACEMGRRNNQNFVFIPHARFIDMLTYKAALVGIGVEVREESYTSQASFVDLDPIPDYTPSDETEHVFSGKRIGRRNRLYRTKDGRTICADVNGAYNIVRKSKPDAFAKGTAGYVVHPVRLAIAV

SEQ ID NO: 26521 - protein, 375 aa, unknown
  TnpB Polypeptide
MYKTFTFKLYRSGKNRRLHRQIEVAAGIWNHCIALHRRYYRLYHKTLNGYRLKKHLTKLKHRPRFRYWNELGSQAIQDVAERIDRAYALFFRKAKTGAAPPGFRPRHKYRSFTLKQSGWALQGENRVRIGRQIFRFSKSREIEGTVKTVTLKRDPMGDLYVFFCCEVEDRPNTHVTTGKIAGADFGLKDFLTFSDGSREVSPLFYREGRKAVRSAAKKLSSKQKGSNNRRKARTALARIHKRVADKRRDHHFKLARELALRYDCLFLEDLNLKGMQRLWGRKIGDLGFAGFVNILHHQALKAGLVVHHVSRWFSSSKLCSACGTVNEALSLKDRHWRCVCGVVHDRDHNAALNILREGASSLGLGDVRPLGAVAV

SEQ ID NO: 26522 - protein, 469 aa, unknown
  TnpB Polypeptide
MKKRKKRAKKGEPQRVTKAVTHIGLEETNVGKLSVLDQLAQVYLALCQQYVTLFCTDELPDSFHAPCLVTSLSERWHRVAIQQAAGIAKSWRTNRANAYQDYLDALAEYKEQEADRTLEAGAKEPEWREWDVPTLQQTCIQANANVVKCEPSHGSTFDYWLTISTLEFRQQLFIPVKLSNYHIEVLTDPKTGKRRTINSSVTLNKRDGAWWLTLSYDEMVTVQTPPDAPVIGIDVGIANFITTSDGKQYGTFNGKLRERQKRDREKRRRKAKLRKCLEKKGVKKLPSTSSMTGQRLIRRVRQEINRAVNLCFTEHEGCQFAYEQLSVTTMRHKARAMNAYMRASNLGHIPNQVAWNATKQGIAATRVKSAYSSQQCHICHYVDRKNRPNQQTFCCKVCDHTTHADLNASQNIAARLYDEELRACTSRAEVKALLMRRHEHWKQKFRIAVVDPPIQLGLWASSETSTDVG

SEQ ID NO: 26523 - protein, 430 aa, unknown
  TnpB Polypeptide
VRGERDMYLTIKQSYKPNKSERKLLNLLCHISKNIYNSYLYVYRYAYFNNIEYVDQLLNKKLYKNENFKLINQDTTKGIRKKVIVNMNNFKNGYIKIPKYLDKHAMFPIFVSTPTIITIKDDLYFKIPYADLTKSSKIFQTIFEDELINCFIKESALKESFEIFIKVPRHLYKKQIRGVTIKPKFNGLEYEILYSYIDDLKPLKLTKSFKNIMAIDLGINNLASIIISNNKAFIIDGKHLKSINQYYNKQIAHYCSIKPNNKKLTKKEFLIHKKRNNRTNDYINKASKQIIKIALENEVSEIIIGFNYNFKTKSLNLKKANQLFKEIPLSKFKDLVISKAKKYSIKTSTINESYTSLCSFYDNEDIKFHYKYQGTRISRGLFKTKNGIVVNADINAALNILKKSKPERTDILSFLRNSGQAMPCRLKVIL

SEQ ID NO: 26524 - protein, 381 aa, Nostoc sp.
MGELTLTLKLPFYRLNQVKALELERLTIVNTQVANDLLLIDKKERAKLTSSAFRHVEIGSAWINQTIRNTNAKTKVKRFKRVWLETNNQNFEISKQGNFYTVAFNLLRGRKGRIPMTVHQASHIEVLDKVILGEAKLGSLKLFKSKKGIWYALISVSMQVADSQLIKGWIGVDRGQTNIAVAALPNGFGKFWKGGRVKGLRRQFQRTRRKLQQAKQIKEVKRLEQRERRIMTHINHVISKQLVQFARDFGMGLRFEDLSGCRQTMKQKKKTKSDAANNRNTWAFYQLELFTRYKAIRAGVPVESVPAPYTSKTDHRNGVLGVRNGNWFRGYDGYRCNADFNAARNVGQWIGFSCPLGLKETVSTMGAVDPEGGVNDSPQLV

SEQ ID NO: 26525 - protein, 352 aa, unknown
  TnpB Polypeptide
MIIRKLKLKLNKSQEQTLVSWLWNLTGVYNWGIRKIELDSQNKIYYSGFAFQNLLSGHSDKLEIPSHVLQGTLNQAHNAWSRCFKKIAKKPRLKSIRNRFNSIPFPDPIRSPKGNRINILGLKGLKFHKQPLPEGKIKLGRIIKRPSGWYLCLWIDTIHTFPVKTTDKIVGVDPGFHTLLTLSDGTKVENPRELRKGEDRLAQAQRGGRKKLATRLQERQANRRLDRNHKISRKLIESYKTIYYSDDNFSNMTTLFGKSVAEASLGQIIGMISYKGRIGGRDVIPVNSKHTTMTCLTCWSLTGPTGLAGLAVRHWQCSDCGSVHDRDINSARVIANVGSGFDLGVLESPCRG

SEQ ID NO: 26526 - protein, 395 aa, unknown
  TnpB Polypeptide
LTDTKQRKLQETYETVKEVATICFNTEARSRLELHRKLYPTLTQKYQISAQLILEALFYGWNAQKTAEQIKDVIVRFDQNISSFRETTRGNPVVTVRANNERIGLPIRQDGAYHRMLAHMADGWAVGSVLMKHNRSFLVCLSKDLPNPPTRPNVLGVDVNAGSVAISILTPQKRILRQLYLAGDIEHAQIRFTKRRAKLRSHRDGHDLNDNHSRAAMKLKQLGKRQHDYVQTNMWLLAKQLCQIAKDYDANIAIEHLRHLRKKKGQVNKKARKRINRIPYGLLRLTLQHKGPQMGVKVVEVPPRYTSQTCSRCGYRAKANRKRRLFLCQRCGFTANADRNASVNIGLRAIMNPVTVANRYGFNGQNSQVGASFNRLDRQDEAHSWSHPEMSRVAS

SEQ ID NO: 26527 - protein, 466 aa, Thermochromatium sp.
MTRCATSPAVQGGERARTAEPSLPFGFSVVSAAVRCTGARWRSAHRRRMRRSKMATLILPMQRLQAFKYELMPNGQQARQMRRFAGASRFVFNKALALQKERYERGEKKFGYAGLCKLLTEWRNSAETAWLADAPIHPLQQALKDLERAYSNFFARRADFPRFKKKGRRDSFRYPDPKQIKLDQGNGRIFLPKLGWLRYRNSREVLGTVKNVTVSQSCGKWFVSIQTEREVEQPIPHGGAVGIDMGIARFATLSDGTFYAPLNSFKRYEVSLRKAQQAMSRKVKFSNNWKKAKARVQKIHSRISNARRDFLHKTSTAISKNHAMVCIEDLQVRNMSKSAAGTADAPGRNVRAKSGLNKAILDQGWFEFRRQLDYKLAWNGGYLIVVPPQNTSRTCPCCGHVSADNRQTQARFECVECGFEENADVVGAINVLRAGHARFACEVSGAVGPPAAGTRRSDSGAAQCRA

SEQ ID NO: 26528 - protein, 381 aa, Thermochromatium sp.
MLRTASIRLNVRPDQVAALGALQSAYADACNRLVPTVIEHRCWNRVALHQLAYARLREETPLGSQMVCNAIFSVCKSYKAQKELGRIKKDEPAPVVHFDRASVHFDKRTYSIKGECLSLYTLSGRIAVPMVLGEHQRRIMASGKAKEAELVCRKGRWYFNLVVESDDADPIASSPVMGVDVGENNLAATSTGKVWGGGQLRHKRNCHLALRRRLQSNGSQSAKQKLRQVSGKERRRVTHINHETSKAIVAEARRIGASKIVMEDLCHIRDRIRAGKRVRARLHRWAFRQLQTFVEYKGKAAGIAVEYVNPAYTSQTCSCCGALGRRVKHRFVCDKCGLRAHADCNASRNLARIGSGAPLPRAAVNTPNVGDAVNHVCCVSQ

SEQ ID NO: 26529 - protein, 230 aa, Thermochromatium sp.
MIIAHKMALDPNNVQATYFKNACNVARFVSNWALAEWQRQYQAYKADPSLPKPSEGALRRPLNAIKREQFPWLVEVTKCATQRAILQLGIAFENFFTGRPKYPRFRRKGVHDRFTLTNDQFSIDGCRIRIPNLGWVRMSEPLRLSGKIISAPISRVAEPWFVGLTEPHTALLKRLRWNTRRNGVAVWWLCLTGPLQATRPARPVARCRRGYRSRCTPGSARSAVQAKIGI

SEQ ID NO: 26530 - protein, 201 aa, Thermochromatium sp.
LNQGRVVALDPGIRTFLTGFAEDRAFKLGEGDFARIARLCHHLDRLISRIAKARCRQKARLKKAAHRLRWRIRDLVDELHFQAICFLLDRFDLILLPTFETKELSAKSRCKIRAKSVRAILGYAFFRFGQRLEAVAKRVGKVVLRVNEAYTSKTASWTDEIKSIGGAKTITSNGLTVDRDINGARGIFLRALVDVPSRMII

SEQ ID NO: 26531 - protein, 411 aa, Thermochromatium sp.
VLIAHRIALDPNNTQATYLARACGVARFAYNWALAEWKRQYEAAKADPSLPKPSQMALCRQLNAIKREQFPWMLEVTKNAPQMAIIQLGQAFQNFFAGRARYPQFRKKGVHDRFTLTNDQFDIDGCRIRIPHLGWVRMRESLRFAGKLMSATVSRVADRWFVSITVDTPDTSHLPKAENQGAAGVDLGVSALATLSTGETIPGPKPHKSLLDRLRRLSRSLSRKQKGSANRKKARARLAKLHARIANIRADALHKLTTNLTRRFHTIGIEDLNVRGMVKNRHLARSIADMSFFEFRRQLEYKAAMRGGVVVVADRFFASSKTCSACGHKLDDLPLSVREWTCPDCGSIHDRDANAAINLKKVAESSAGGCQPFQRHADCSVTACGEADSGLGRTLKTKPASGKQEVSFVPV

SEQ ID NO: 26532 - protein, 417 aa, Halapricum sp.
VATEYRYRTAITRLDVSEEQQPLLEATIAEWKRGCQIATDLAWNHCHEKRAVQSCAYETVRAETNLGSQHAVLATHHAADAISGCVEREANGKTTSKPQFTAPTIPYDQRSMTLFDDGTVSLATVESRVRCPLVLPEDDDGYQWQYLRDDTWEMTESTLTVENGTYLLHIGFRQPKTDTEREDAAEDGTVLGVDLGVENIAVTSTARFFPGGSVTHRLRSFENTRRSLQQTGTRSAHRTIQEASGRQKRYLRDVVHCIANGILTEALKYGCDTIVFEDLDHIRTRTDGTWGHVWAFRTLIEFVGYKAESEGISVETVSASSTSKQCAECGHTDDRNRPTRDHFACQSCGAEANADYNAAKNIGLRYVRRGQQSSRRTGDGQLALASGTVTPNGEFIPYPDGFEAESTDKSSSTKTVV

SEQ ID NO: 26533 - protein, 306 aa, Anaerostipes sp.
MKDIFFKNLIFKERGKIRKELFDMRIFSTYSAKIKNYNHIFKKTVSVYREAVDFMIQVCLQKWEDIRKEDYLCSPVIYVERLCHRTKQNPEVPYESFDRKFYKLPSYLRRSAINEAIGKVSSYKSNLKNWKEEDPKIRGRKPSFPKAGYSYPCMYRGNMYQQIGKYEARIKVYIRNTWDWLTIKLRRSDMDYIERRCKARKHCSPILQKRGDEWFLDFPMKEYIELCDTDVADRIICAVDLGINSAATVSVMRSDGTILGRHFLKLPKEQDCLTHSINRIKKAQQHGNRKMPRLWAKVNGINHEII

SEQ ID NO: 26534 - protein, 384 aa, unknown
  TnpB Polypeptide
LLKSFKTEINPTKEQIVKINKTIGTCRFIYNFYIAYNKELYKNDKKFITGRAFSTWLNNEYISNNPDKIWIKEVSSKSVKKSIENGYKAFINFFKHKSKFPKFKKKNNSDIKMYFVKNSKTDCLSERHRVKIPTLGWVRLKEKGYIPTSKNGFIIRSGTVSHKAGRYYISVLVDIPNINNVQCNNFGIGIDLGLKEFAICSDGSIYHNINKTYNVKKIEKSLKREQRKLSRKIISIKKGESTQKNFVKQKLKVQKLYQRLTNIRTDYLNKTIYSIVKTKPSYIVIEDLNVSNMMKNRHLSKAIAQQKFFEFKTKLISKCKENNIELRIVDRWYPSSKLCHNCGHIKKDLKLSDRTYKCSKCGYIEDRDINASLNLRDAKTYKII

SEQ ID NO: 26535 - protein, 403 aa, unknown
  TnpB Polypeptide
MATYWTSVQVAAQNAVSDFIYRLKKEYKGVKPIDEKYHHQGKNYTKHWSYNRSLKKSFKRVPYTEEQKHYANWLVCGCYPQFFRLLDGMAPDPTCEGQLAMGIDSKIAKKSSFKTRPQDMGRVANDVRRLIHETRSTTVRLPRCGGKGNYFGCDSSSWTQKDGRDSVNLMNYAGTPKKVRKAQAEENASKSKKKPSDRHPRLHIPLKGKPKLEGTLRVYLHEDKGYLSIHYHRSIPCQDKKLRKDGITLGFDAGLSEGGYDSKGRCIAKNLGKMSAAISDRRMLKDQRRQPLIAKVKLLKASNDAEDRAKARRIEHNNLRNKKETKKRAAEREQLVNYVRRELKKKVFVKPKQPAKTLVIENLGPMGGQKFGKRMNQRLSAWDRGDIVTALEELCSLYGVELR

SEQ ID NO: 26536 - protein, 599 aa, Planktothrix sp.
LVKSALEPQWEARFEGTSYGFRPGRSAHDAMSRIFQSINKSEYFILDADISKCFDQINHDYLLSKIDCPSTMKAQIRQWLKAGVMDNGIFNATEAGTPQGGVISPLLANIALDGMIRLIDLNFPKKGKVQAKVIRYADDFVVISPQLEIIQQCQIVIEEWLKPIGLELKPAKTRLCHTLREIEVNGENIPPGFDFLGWNFRQYPVGKHHAGKSGGAGKSSKTLEFKTFIKPSKKAIKAHADKVKEVIKTHKTAPQYALIKRLNPVIRGWCNYHSKVVSNWSTRKGTSFDVPNKVAFLLKKQKGKCTFCGQYFTPEDIAEIDHIIPTSLGGKDEYKNLQLLHRHCHDIKTSTDGSYNSKEDGWYASIVIEDASVPSPLSLDTVKSAVGIDVGLKEFLVDSEGDAVPIQQYYRKAQSKLARAQRELSRKVKGSANYQKLAHKIACLHQFVARVRKEFHYQVAHKLCEKYDLIGLEDINIKGLAKTRLAKSILDAAWGQFSQILEAVAVKRGNWIVKVNPYGTSQRCSGCGKNVPKALSVRTHECPHCGTVLDRDHNAAINIKNLALNAVGLTVSACGSKRGYSACEAGIFICEEKKLTLYR

SEQ ID NO: 26537 - protein, 275 aa, Streptomyces sp.
MGEAAVRAPCPSGARSCADPARRGPSPRRPGDIDAGVNLPLALSDGNHQDHGRPPRLPDGTADRDKWLNADEKAELLRLERRAAHRKGFLKRGEKTSRRLHHTYDQIKKLRARAKRRAVDWQHQTTTAIARQYGTVVVEQLQIKNMTKSARGTIEEPGKNVAQKSGLNRSINQEAWGRTVTMLAYKTIRYGGSLHKVPAPGTSQRCSMCGFTTPGSRESQALFVCKNTGCGWSDNADHNAARNILHLYRMDHALIPAAGRAVVRRPRGVKPATAR

SEQ ID NO: 26538 - protein, 440 aa, Streptomyces sp.
VATERAQEKRQFGHRARLALTPAQVRLVDAQAHAARATWNLLHDLWTMTPKCRRTLKAADEAIRQARKEIDWLGVLPAQAAQAVLKTYFQSWKNCWEGRADEPNFKARLRSVMSVDIPQGRDLQITRVHRRWGMVNIPKVGRVRFHWTRDLPVGKHASADNRITGARLIKDDLGWHIAYRVQTLDTAPQPHTGCDVGIDAGVNIPLALSGGNHQDHGRPPRLPDGTADRDKWLNPDEKAKLLRLEQRAAHRKSFGKRGEKTSRRLQNTYAQIKRLRATATRRATDWQHQTTTHLARTYGVIVVEKLDIPNMVKSAKGTMDNPGKNVAQKSGLNRAISQEAWGRTVTMLTYKAARHGGTLHKIPAPNTSLRCSACGFITPGSREDQATFVCKNPDCGWSGNADHNAARNVLHLYRMGHALIPAAGRAVVRRPRGVKPATAR

SEQ ID NO: 26539 - protein, 390 aa, Geobacillus sp.
MKKITMTVKLPLFRPTHAKQEMYRTMRSEFARLLNRVLDIKRQQPALNAKDIDHLLKKESILPSTTRQEARKLALSRYEEWEMNKTTKSFPRFKEKQTILFNNQNWRLRYDNGRLKLGIPTIEKGILTLEKYVPVQTNDYTEFWVQTLLTGEWDRTSKHYHPSFERIIEIKKGQGQLYEKKKRWYFAFSVTLIMRETEKPVQGKTVGVDRGLKMIAVAGCGQTGEYLIFHGRHLGHIRRNYHRLRRQLQTAKNRKAIKRLGCKERRIVHYWNHVISKRIVQFAEQTGATVIKLERLKGIRQMKRHWKRSDRNIHSWSFFDLEKKIQYKAEQKGLTVEYVDPYKTSQQCFRCGNVKRTNRRGSLFQCSCGYTKQADVNASFVISARPSIAG

SEQ ID NO: 26540 - protein, 578 aa, unknown
  TnpB Polypeptide
MAFGSKNSTPSFVLTLPFDISLNEQDYLYKEFKKCGVIYNQLVSATTKMWHQLRKTRKYRELMAAIAKAAPDSKEQKVLLKQRQEMIKSSGFSEGAFHKMVEPYAKHFAIHSHVAQKVASAVWTAWEGFFFRKGKAVHYKKLEDVTSISGKNNATGIVLRPANLTTSNIRSAKNKKQKAIEQRYYKAYGQPDPEDDKKVILPDAVIPQMEADIVAAVAKVKLSIGEGSLRIVYGDHEFPVVVRNPNTQTGRYQQEALKCGVKYCRITRKWVRNKWKYYAQLVLEGYPPVKCDSNGVMRHPVNQGRVGLDIGTQTLAISSNDICDLRVLAPSARAQAKSLVNEITCTMRAMDRSRRATNPKYYNPNGTIKRLKRKHGQKQKRKWKYSKRYYRLRAKLRNLYRKLADIRKMEHNILANELLQHGNEFVVEDMNYKALQKRSKETKVNPKTGRAHTKKRFGKSLSRCAPAMFISILNKKANRYGGSVIKVDTFETKASQFDHTDESYTKKKLSERMARLHSGEVVQRDLYSAFLLEHIDIESLQYNMETLNSAFPAFLEMHENTKHRLQAVGSSLPASIGF

SEQ ID NO: 26541 - protein, 363 aa, unknown
  TnpB Polypeptide
MLKHKTYKFRIYPTQTQKVLLNKTFGCVRFVWNYNVDCFNNNIDNTSSIKNLRTEHSFLKEVSSAALQQKERDFIEFKKQYFNKSRKKQIGRPSFKKKGIYNQYRLPNQKFSLSSTHIRIEKIGKIKIVVDRQIPKEAKYLSVTISKKPCGHFYASVCVEEDILPKNKTNLKVGIDLGIKTFATQFDKVEISNPKFLVKSQNKLRRLQRIFSKKVKGSRRWEKFRYKIARLHERIHNQRLHFLHSYTTELVTKYDTIVIEDLSVEAMLKNKNLSKNISDASWSLFRSLLTYKADWYGKKLVVVDRYFASSKTCRCGYVKQNLKLNDREWVCPSCNTRNKRDLLASINILEEGLRITSVGVDAD

SEQ ID NO: 26542 - protein, 403 aa, unknown
  TnpB Polypeptide
LLPSRIVDKWESENIEKDIVKCRKIRLKVTDSNRSALDEWFNTSRYVYNKTVCEIKNGAKVNFQDLRNKLVTKERDKIRNKRVKDWETRTPKEVRATAVKDVCNAYKTSMANLKAKNIKHFDLSYKKKTSFDQSIGIQKQSIKNKNGNLEIYSRILKPIKLGKRSKNLKVGNCDARLVKQKNRYFICVPMKCKTEKNKDYKRVVGIDPGVRKFMTIYSEEKISEYRQKRDLLKRLNAKIDKLRMERIRPLRRGERVKARKKSINKVEIRKSDLIDELHWKTIREITKENDVVCYGDIKSHDIVKRYNNNNLNREIMDLKLYKFKERLRNKCIEYNKVLIEVDESYTSKTCTNCGVINDVKDSERYECKSCEIKIDRDLNGARNIMLKGIQSLPSAFLGGEKNK

SEQ ID NO: 26543 - protein, 276 aa, Rhodocyclaceae sp.
MSFKGLDRVSLLTLSGRIIVPVIMGKYQKERFTNAKGQCDLVRREDGKWFLLVTVDLPDGTKPPTTDFIGVDLGVANLATDSDGQRYSGNAVEAVRVRQHALRRSLQKAAAGKKRRGLRPKNIRRKLKRLSGKERRFRANENHRIAKSLVAKAKGTGRGLALEELKGIRARTRFHKAQRARMGGWAFAQLRAFVEYKARLAGVEVVYINPAYTSQTCAVCGHVSKANRPSQAEFRCVACGHADHADVNAARNIRCLARASVNTPKVSEPHQDLLFA

SEQ ID NO: 26544 - protein, 541 aa, unknown
  TnpB Polypeptide
MAKNHGLQVGIEAKIKYHAAFEDIGFLYEQWRRTAANWLQSGLNEDQVEKRLQSEFNLQWAWADSIATEASQCLDQLASATYNQISQLKDRIKAKTKKAKATLKQLSARIKKAFAHSDADKFQNELMGLKSKITKIQSLKRNLQQLEKSLRLHICFGSRKLFNAQHHLAENGYANHAEWLEDWRKKRSGRFYCIGKSQLGGGTMMKVFATEEIGIYTLQVTVPRPLIQKWGMHLSLNFEVSDRDGRTRRGEFNYALECLKPITTQVFRRKYKDDQWYIHLTTYVEFVPWVHTIKRGCLGIDFNAEALSVSYVKPDGNIAWCQDFPYLWKGLTTGQRVAMMRDLVVQIVRVAESLGCAIAIESLDFSKKKARMSEESKLYNSMLSNLATSSFREALESRCQRFGVQLIKVNPAFTSVIGMNKFMARYGLNSGTAAAMVIARRAMRFSERIPQCLSLPEDEAKHDWSAWNRVARFIKQHGIKRTQLFDWMKALEGILTCSSGQAEHQPSKQVTTQTGESKNPCQSPMDEVPVINSFVQLSLGF

SEQ ID NO: 26545 - protein, 408 aa, Campylobacter sp.
MTISHKIELIPNNKAKTYFKKAFGCSRLAYNWGLAKWQEYYKQGIKKTHLDLKKEFNAIKKEQFPFVYEVSKYATQQPFTHLNLAFNKFFRDLKQGKLSYPKFKKKKDNQGSFYLGGDIAKIINKDKAFYLHIPNLGYVKMRENLRFKGKINSVTISQKANKYYASFSMEISDDEFHQTHKQALNSHQALGIDMGLNSFVSLSNGLEIKAPKPLYKLTRKLKRIQRKLSKKIHPKTKGDTTRKSKNYLKQSLRLSKIHQKIKNTRNDFLHKLTTILIRHYAYFGIENLNIQGMMKNHHLAKAISDVSFYEFKRMLTYKAEYYKRAVIEADTFYPSSKQCFVCKSKKEKLTLSQRVYQCENCGSILDRDYNAALNLQSLAQEKVGLVQAEFTPEDLTALLSDLAINQII

SEQ ID NO: 26546 - protein, 367 aa, unknown
  TnpB Polypeptide
MFMAYKYRLYPNKEQEEYFSKCFGCVRFIYNRMLSDKISYYKETKKKLNNTPAQYKQEFPWLKEVDSLALANAQMNLQTAYKNFFNKPDTGFPKFKSKKDHYYSYTTNNQKGSIYILEKYIKLPKIGLVRIKKHRDFVGVIKSVTISKNPSGRYYASVLVDQDDNAKLPQCNNKIGVDLGIKEFCITSNGEMVANPKYLCKSENKLRKLQKDLSRCQKGSKNKEKCRIKIARQYEKITNQRKDFLNKLSKRMINENQVIILEDLRVQNMMGNHKLAKSIADTSWSEFVRQLEYKADWYGREVIKIDTWYPSSQICSSCGNRDGKKSLSIREWTCPKCGTHHERDVNAAINILKEGLMIRTAGTAEIA

SEQ ID NO: 26547 - protein, 396 aa, unknown
  TnpB Polypeptide
MRKLIKGIKVMLVPNNKQNTLMFQNAGVKRWAFNWALGREKENYANGGKFISDNDLRKELTQLKQTKEFSWLNNVSNNVPKQAVKDACIAYQRFFKGQAKFPKFKTRKKSPPKFYQDNIKIQFTSTHVKFEGFAKSKKANKQKLNWVRLAEHNRIPFGKDVKYINPRVSFDGLNWFISVGIEYPDNVETPLNEGIGIDLGIKDLAICSDEKTYGNINKNKKMKRLEKQKKRLQRQVSKKYEDNRDGLKYIKTKNIIKLELKIKSVQHKLNGTRDNYLHQTTSEIVGREPSHITIEDLNIQGMMKNRNLSKAIQQQSLYEFGRQLKYKGLWNHIEIRIADRWYPSSKTCHDCGKVNKLLNLNDREWVCTGCGSILDRDYNASLNLRDTNNYKIFKVV

SEQ ID NO: 26548 - protein, 419 aa, Erysipelotrichaceae sp.
MYYTRNVSIKQNSPLYPYLDRIAHLSLNLYNAGLFRERQLMTSSKKAECDWYDHEREIRKEAAGVSDLKVKHVVRDLKSFFEAMKQYKTNPKMFTGKPKLPGYKHKGGTSSFDISNQDCAIYQNKKGSYSAKLPLIRERVSLGKKIPGRLKEVHVCRKHDTYVISFVFDDGKGIPAVKEESCRIASIDLGVNNLMAVTNNCGLECILFNGKPLKAVNQLYSKKCAKLASAMTKGSDKKLESTKQYRSVCLKRNNRIHDYLLKSAKLFITWCVENRIDTVVIGANAFWKQEVDMGSQNNQTFVQIPYDQLKRMIQWQCERNGIRYEEQEESYTSKASFPDRDDIPLYEETDDEDEKKEKPVFKGTRIRRGIYQSWNGTKINADLNGSANILRKKFGEVFVTEPDFSNVRYILHPDIALNR

SEQ ID NO: 26549 - protein, 269 aa, Archaeon sp.
MTECTSTVGVDHNLRNLTVGNESQIHYYDLPRAVKIARTTMRIVASFKRDDVRIRTDISSKYGRRRTARTGHILHNVTKTIVERAVHRREAIVLEDIRGIRCLYRKGNGRGRRYRGGMNRWSFGEAQRQIEYKARWIGLPVIRLSRYETRGSSVTCLRCGERLQSDKRLGRKLWCGKCRIVMDRDRVAAINLAQRGRVRFARSRPPTVMEAQGGADESVMGNPTPTVIPGVDAPKPTPTKSRQNQIILALGIVAEKRVDYGGKGSWLDG

SEQ ID NO: 26550 - protein, 335 aa, unknown
  TnpB Polypeptide
MPRYRLLPSPAQQVVLRGHCAHARFVWNLAVEQHRHWRPGRKSAPGYLEQCRQLTAARAEHPWLAGGPQMVQQQALRDFARATANYLGGTHHRPSWRKAGRNEGFRVVALKPRDVRRLSRHVGAVRVPKAGWVRFRWSRAVPPDVKSCRVTLDRAGRWHVAFAAVPAPERAAVHRWTALPIPPRTDWAEKASTGLARRFDVIRVENLDITGMTRSVAGSAAEPGRNVRQKSGLNRAILAQGWGLLARRLRDKAPGRVEKVKPHFTSQRCSACGHVDPKSRESQARFACTACNFAGNADVNAARNIAAGHAVTARGGDGAARPVNREPQLLLQSGQ

SEQ ID NO: 26551 - protein, 361 aa, Undibacterium sp.
MIPSAATSPATFNTRVLRLRLKDKHATMLRDRAVWVNQIWNYCNDLQQQVWRREKRFLSGYDFAPFTKGAGKEGIPLHSQTIQAISEEYATRRKQFKKVKLRWRVSRGAKRSLGWIPFKASALSYRNGQFWMSGIDQPLSQYKLGAGAIAEDARGRWYINITVKVPKAALTEGRAALGIDLGLKDFAAFSDPVLDNVEVRQFYRDLEPALAVAQRANKKQRVKALHAKIANRRKDFHHQLSTALVRRYGPIFVGNVNASALAQTRMAKFVLDAGGAQFRTMLQYKCDDAGGWFVEVNEAHSTQDCSACGARSGPKGLKDLGIREWTCPQCGTTHNRDRNAAQNILRRGRETLAAGIPVVSA

SEQ ID NO: 26552 - protein, 377 aa, unknown
  TnpB Polypeptide
MILAKKVRLYPTEIQEQKLWQSVGTARFIYNWTIARQEENYKNGGKFIPDNDLRKEITQLKKSELQWLKEVSNNVAKQAVKDACNSYKRFFKGLSDKPRFKSRKKSKPSFYNDNCKLKVKDNVVNIEKVGWVNIKPYSIPLDTKYSNPRISFDGKYWYISVGIERELPKVKLTDESIGIDVGVKYLAICSNGMTFKNINKTKEVKRLKKVLKRKQRKVSSKYDINKIKKGGENRCQFKKTNNIIKLEKEIRLLHRRLTNIRSNHIHQATNKIVKIKPSRVVMETLNIKGMMKNRHLSKAIAEQCLYEFKRQIQYKCKKYGIEFVEADKWFPSSKTCSYCGAIKKDLKLKDRVYQCSCGLKIDRDLNASINLSRYKLA

SEQ ID NO: 26553 - protein, 342 aa, unknown
  TnpB Polypeptide
MLRKASLSLGYANAGKIVVLDTLVEEMTRVVRLYIDELWERQDFRSTFVDFKVDTWLSARLQQCLGKQALETVKSQRKRKKRTKPYFKGAAFNLDSRFVDFQYGNNSFDIWVRLSSLGRRLQLRLPAKAHAHYNKYRDWSKSKSVRLLKRRGTYFLEVFFEKQAPDVKPVGVTVGVDCGYKQLLVSSDARVYDVGLEQCYEKIARKIQGSKAFKRALIERDNLINCSLNAMPLGEVREVVCENLKNLKKETRGRLNKKFVNKLQRWSYAKVLTKLQYMTEEAGVLLTRVNPAYTSQRCCYCGVLCGANRRGKSYACACGNEMDADVNAAINLSHMGVYSPHA

SEQ ID NO: 26554 - protein, 373 aa, unknown
  TnpB Polypeptide
MVEYSYKFRLYPNREQENLILRTFGCCRFVFNHYLALRKETYEQTGETLNYYACAKDMTTLKQQEETLWLKEVDATALQSSLRDLDDAYQHFFRRVKKGEKPGYPRFKSRHHHRQSYKSKCVGANIKVLDTAVQLPKLGLVKCRISKEVRGRILSATISQNASGKYFVSICCTDVEIEPMPPTGAAVGIDVGIKDFAVTSDGVSYPNHKYLAKSEKKLARLQRQLSRKSKGSRRREKARIKVARLHEHIANQRQDAAHKLSTQIICENDIICIEDLAPKNMVRNHSLAKSISDAGWGEFRRQLQYKAEWYGKTVVGIDRFYPSSQLCSCCGAQWSGTKDLSVRGWTCPECGAQHDRDINAAKNILHEGLRLLA

SEQ ID NO: 26555 - protein, 497 aa, unknown
  TnpB Polypeptide
LQSTPSSSVECKEEEQLCTEENEKRKMTKTINARSKKKRKTETTVNRTLSIKTYPNHSQKKILKRWLGLMRYAYNTVVRWDKNHIKPQTLNEKLKLYVDVKVGKDPDEKDKKLQRLCVWGERKFLRTVVWLGLRLRGLHNEIPPNVIDESIDEALVARKNVIQKNLKATKKSSLSFKSKKDLQQTMAIRAQNFSKKEWNHFYVRHLHNSSTLSSERYKPNELKGKRDLCPFHFETKRKHNKWPSQKIDCDCKLTYLQKTNEWIFHWVYETQKQVCETQAEVHVVSIDPGVRTPFTWYSSTKGVGKIGEYDIGRIFRLCKYMDDLISKKDRLANSTSKRKKKKALRVDKAIFRMRKKIRQLQNEIHRKTIKFLTDEFDVIVIPPFEVSGMVNRKTRKITKKTVRKMLGWSHYKFRQRLISKAEEKGIHVIIQNEAYTSKTCSWCGNIQKIGGSEVYNCRNCGTVMDRDENGARGIFLRALLDGALILFGDHAGNSSFT

SEQ ID NO: 26556 - protein, 482 aa, unknown
  TnpB Polypeptide
MIQPKTETKRAGKNRKAIKQALADLRDSSADGGNAVELQSLIEQACNFYLQNGCFPDTYEEMQPIPVLKAGLLPYAGDDGPAMGQTYRMSYDLDQKTVTLALRTPDEQGQWARTWREQMIQMRLPDLVVERAKSGHPLAPSLREIVETDGTLYAVLDFIVEVPVEQPTTFEEIQMVLGFDWGVRVLVTASVVDLDGHQIGHPFFLDTGPFDGRQARLRRQIDQLKAKVACLEQRRDRFPVGDPRRKPSEDALPLLRREISRCWRKYEARNNDLVHLAANILLVLATAFDCKLIAGESLKSMKSAGRGRGAKGRWRNWRNNSQVRGELWRVLRYKCFLTGIRLEWQQPRHTSHTCPRCGSPAHTFSSPEHRSQVNEWGAWLCCSNLQCLWNGSRDYAASVNIARLGVALIRHAQKTSRVKHPSMTDPSVQPVSYIGTRAALRLPPLVPRGHLMHSGRIYYNGWRLSVKLRSSYATPIMLRLCG

SEQ ID NO: 26557 - protein, 355 aa, unknown
  TnpB Polypeptide
VADWNLAQEQTPDPKRKEPTWKEWHIPELRVPCIQANANVVVVEQSQDSTFDYWLRISTLDKGNPLHVPVKLAPYHRKVLHGRTINTSTTLLRRKGVWWLTLSFDEDVPLQTEPSAPRVGVDVGIANFITTSTGKHYGTFQGKLAKRHKRDREKRRRKAKLRACLKKKGVEKLPSTSNTSGQRLSRHVRQEINRAVNQMILDHPDARIVYEDLSVASMRFKAKAMNAYLYASHLAHIPEQIAWATAKRGVAAHTVKAADSSQECHRCHCVDRANRPDQSTFFCVVCHHREHADHNAALNLSSRFGDKALAGCKNKGEVKALLMKRHEEWKQKNRACVVCPPSSWACGTTQRLQRT

SEQ ID NO: 26558 - protein, 426 aa, Acholeplasmataceae sp.
MRYKAIKTRLKLDKDQKTFLLLLMRASKNLYNEALYNVRQHFFNTKTYLTYEDNYHLLKSSDNYRTLSTSQAQAVIKKVDEAMKAFFGSINSNNKMKVRLPRYLDKFGYYSIIDRMVYKPDNEYYKLPRGNFIKRVSKYFILPKKDNYLYSSLNILDELNILIETPKCIINKQIKEITIKQRFDGKYIEVIHTYIEEDVLCGINLKTETMGIDLGFNNLVTCAVTNENHLLIDGKKLKSLNQWYHKRMSHLSSTRPNQNVLTNQMIRLIDKRNHQMTYGINKAARLIINHALVNSVGEIIIGYNEDFKDIVLSKQYNQMAKSIPLAKLRDRIVYLAKEYGINSKVINESYTSKASYLDNDIIPELDYKKHSFSGKRIKRGLYLSKEGKKINADLNAALNILRKGNPKTKKLGYSGVNTPKRTYLFG

SEQ ID NO: 26559 - protein, 346 aa, unknown
  TnpB Polypeptide
MLVSKTIKCRIFNPTKYKYNLLNQEWERYQDFIELEKSDLDWLADKVPVYASYKVQARWYWNKFRKQNFPISLSNQILKIKETNHKLAKYWVRIPVKSKRGGLWLPIKPHKEFPESYKLCESKLVKKKDYFEIHIVIKKEIEMRKSYSSIISIDIGEKVLATVLLNGKPIFMGREIRGIRRHYAWLRKRLGERKLLKVIKRISDKEKRTVNLKLHEISQRIVSLAYQHNSLILLGNLKGLKKSAIGKRFNRIVHSMAYHKLTQHITYKANWSGLQVIKIDEKGTSMTCSECGYENKSNRKNQGLFICKNCGYQANADFNGVKNIKKRFEDYMSSNGALVQALKLRD

SEQ ID NO: 26560 - protein, 277 aa, Campylobacter sp.
MNTFFKMRYHRDLSNTYKFNQITIIKNHNKYYLAFSIIYDESNVSLISSKDFDIKKAVDIDLNINEITLSSGELIATNSKLLSRAKYDLAFKRLQRKQSKRILKIKKEKIKLSHNFKKTQLKLNKIYEKSSNIKKDSYHKITSKLIQEFDLLAVEDLQIKNMSKRAKLKNIKAKSGLNKSILNISFYQFSQYLEYKAKHNGKFFIKVNPQYTSKTCSVCGNIKKNLMFKDRVYLCEKCGNTLHRDINAANNILKRGLKSFGLGISLEDYKLKAFRIS

SEQ ID NO: 26561 - protein, 449 aa, Carboxydothermus sp.
VKALKQVITIQARLFPKAEENEVLDNLMRKWNSCKRYAYNRLLEGKTRKELKKELQQMFNLNSRYVDDAILEASEVLQSTKELGENPRKVIFGGKDLFFKLKSKHLSIKQRQKYKKEWLDKRKGTLFSRGDKTKHGNLNLRVIEENGQFFLRVNAGDRKWLFIQLKSSHKKWRKFEEAMLNSCPYSVRLQRKNNKYYAYISFEEDLPDTAIDFSNGAIGVDLNAFPSHIAWAEIKKNGNLESYGEIPTLHLWDGRKEKRDYFAWVYAHEIVKLALKKKKGIVIEKVAIKDKGFRGDCKGRKSRRIKHSFSYRKLIAKVKTIAQRYGVAIREVNPAYTSVIGMLKYAPQFNLTKDTAAAYVIARRGLALRERIPLKYRELLESLQSKSRSVSSLTEGRNEGTAVKGKTLPYKPWRVLRVALLTGALLDRPLYRDLSPLKRILVSGMGEGG

SEQ ID NO: 26562 - protein, 365 aa, unknown
  TnpB Polypeptide
MAHKIALDLNNHQRTYMLRATGVARFAYNWALEQWGIQYRAWREDDTLPKPSQFSLRKQLNEIKKESFPWMLEVTKCAPQLAIIQLGEAFKNFFAHRAAYPKFRKKGVHDRFSISNDQFAVQGKRIRIPKLGWVRMREALRFSGKLVSITVSRMADRWFVSITVDTEDRRQQHNENQEAVGVDLGVSALATLSTGEVVQGPKAYSKLVKRLVRLSRSLSRKARGSNNREKARRKLARLHAGIANIRQEGLHQLTTSLARRFSIIGIEDLNVRGMLRNRRLSRSIADGAFYEFRRQLEYKSGIYGGTVVVADRWFASSKTCYDCGHRLEALPLSMRHWVCPECGTYHDRDVNAAINLRNNAVSSTV

SEQ ID NO: 26563 - protein, 420 aa, unknown
  TnpB Polypeptide
MQSSKLTHTLSFGLDIHTGSGDDLQTGCLEARRIRNEANRLDKEGWDWNDIRATVADNADHVKNTSQLIVDKALGEVERYLDYNDDGWGRPYPYMDGMYPMVMNHGEGYRFFIEDEDTVRFRISSEPYNHVKGELRGSPDHFDRLRTVFSDDEWRVGTAEVVHKHDEWRLHVTVTHEQHRVASKHDADTIVGVDVNEDCIALAAMARDGDVKDSVVFEYPSVKEQRHEFFTKRKRMQKAKQTAFETVVQTEEHDYVHDCLHKVSREVIEWVSQFPNPVIVFEDLKDMRDSIDYGTRMNRRLHSLPFAALRDMVSYKAAWMGIPSDDVDPEYTSQRCPRTECQHTERANRHKKRFKCRQCGFQDHADRKAAVCVVQNWVDEQNGNVPSLETLPRVWKVRRAASGRGGATDSHGLGLSSGVY

SEQ ID NO: 26564 - protein, 414 aa, unknown
  TnpB Polypeptide
MIRSSKHTLKFCNKQKLLDINYLISEYRILLQNIVDHIWLNGYNNFSINRNKLNCPTFINSTFLKQFNCDFTERLKQCAAKQALSMVSAATEKRRKQLYKLKELQRNNLNTKHLQRKISLFPLVKPNAFHANPELDSRFVDFDFSDQKEFMCFVRLFCFKKGKNIKIPVVYSPVFDKWNKIGKLKSSIRLSEKNITLIFEVEEQEKNKIGIIVGCDQGIKDVVTLSDHQTAPLYQGKYSLSDVQKRLSRKKKGSKAFRRTQEFRKNMINWSINQLNFDNIKELRIEKLFNVRYKQKSSRFLSHWTYALINDKLYRVSEEKGFLFREMPNEFRSQRCSCCGWVRKANRKGKTFCCNKCGNTLDADLNAASNLELDLFEIPYWVRLKKINRQGFYWRTDGIFSESQELIVPDAKKE

SEQ ID NO: 26565 - protein, 347 aa, unknown
  TnpB Polypeptide
LPLFEVFSISQGTERFFLQLVAEGSSPLKHAYAGKDLRMAIDPGLGSLTYATEDGTIAKVQIAPSADTDHRAVRKLQRAMERSRQATNPDNYEAVDVVRHGKKKKSFKVKSGRLQWRFSKRYESLRAELAEIFRLSAATRKREHGEVCNWLLGHAGHIIVEDNSYKAFQRGRFGKTIGRHAPAALYAQLTNKAESAGLLVEVVSPKKLKPTQHNLLTGQFVKHELWERRVRLGNDDDDRWIDRDAAACLNLLYADLEKQTYAPERIREAVLAGVTAWLDAGVVVIQAREGITEREFGRFRRRGIPSLTVQGLRQQGFRGRSDSKSGATPRRKASTVSKPSHFSGEVV

SEQ ID NO: 26566 - protein, 361 aa, Acidianus sp.
MKIRSGGLEALFDRYIHAKKFVLGWLYENKTIKKKDVHQALYKTLREKFELKARLAEDCYRDAISTYKGWLKNPKRGRFPIIRNKSVWLSPKLSYNFNIEKMRLTILGEDVEILGYPRTLQQYKDWEIAEARLTKRGEDYYLNVVMKKELEEVKPTGLIAVDINMEGVYLGTDKQVIIIPTYLSDAHHYKNLAEKLQKKYPRRWKENERILNRIRHFHIKARNILLDFAKKVGKWVVDEAKRLNANVIVLENLNKMINHVNHLQKDYRDKLYMMQYRRVQEWIQQQAVKHNMKVIFVDAKYSSQTCPKCGSKMEESGYRTLKCEKCGFEENRDYIAVYNLYRRGYLSLSTAPQRRDVDSNR

SEQ ID NO: 26567 - protein, 275 aa, Acidianus sp.
MPQELVEAKILEYGKLSKIYSDILYQEKYREALRKLGSDAPPSNLLKDIGPFNNMRLGPLAIIDSGNNIIKIPKINVLVKVDEKKGTPLYAIVDFSNGIKVYIGFEIEQPIVGIDIGIRHLFTIVAIIDSGKLYKVKFIGDKKMVDVFSKYLGESQGLIYINKIKERSRKPVQEAVQFLEELKPKVIAIEDLRLYDEKVGKGLRAIQEILEQELFRRGMKVRRLDPRNTSKICSKCGYKKGEVLGSIFVCPSCGYKADRDFNAAYNLALKCYYTC

SEQ ID NO: 26568 - protein, 361 aa, Acidianus sp.
MKIRSGGLEAIFDRYIHAKRFVLGWLYENKTIKRKDVHQALYKTLKEKFQLPSRLAEDCYRDAISTYKGWLKNPKRGRFPVLKNKSVWLTPKLSYNFNIKKMKARVLGQEVEIIGYPRNVQEYKDWQITEARLTKRGEDYYLNVTMKKELEEVKPTGLIAVDINMEGVYVGNDKQVVIIPTRLSEAHHYKSLAEKLQKKYPRMWKENKRILNRMRHFHIKARSILLDFAKKVGKWVVDEAKRLNANVIVLENLNKMITRVNHLSRDYRDKLYLMQYKRVQEWIQNQAMKRGMKVVFVQAKYSSQTCPKCGSKMTESGYRTLKCEKCGFEENRDYIAVYNLYGRGSLTLSTAPQRRDVNTNR

SEQ ID NO: 26569 - protein, 412 aa, unknown
  TnpB Polypeptide
VNKRNVIYSGLLYDDGMLNLTYEYKLIPTDAQRQTFDQWLTICRKVYNFALRERKDWVNSRKCDFNSCSIKQEYIIPADAPRPTFARQCKSLAEVKKSVPELKLPHTHVLQQALRQLEAAFVAMWERGHGFPRFKKRMRSFVFPQLNLESVKHFDGADWVNLPKIGLVKMHLSRPIPEGFEVRQIRVVKRASGYYVMLALQCDVDVPQASPSGHGLGIDLGLKHFLATSDGELIDRPRFFVDGQRQLKSLQRQLKRKKKGSRKFRQLHYQIAKHHEQISNSRKDFHFKAAHHLCNQGQTIFAEDLNLKAMSAGMLCKHTLDAGFGQFLYILSHVCFKRGAYFAKVDPNGTSQTCPRCQTHTGKKELSERVHKCLECGYETNRDVAAAQVVLQRGYTAVGRIAVNFGEGKLHE

SEQ ID NO: 26570 - protein, 266 aa, unknown
  TnpB Polypeptide
MSSSKFRVWLNHEYLPQHPEYLWIKEAYSKAVTQAVNHGQTAFKKFFNHESAFPKFKKKGRSDVKMYFVKNNPKDCRCERHRVNIPSLGWVRIKEKGYIPTTKEGYIIKSGHVSMKAGRYYVSALIEIPDNKTADLSNEGIGIDLGLKDFAIVSNGKTYKNINKSARLKKLEKRLVREQRCLSRKYENLKKGESTQRANIQKQKLKVQKLHHKIDNIRTDYINKTIAEIVKTKPSYITIEDLNVSGMMKNKHLSRAVASQSFTNSE

SEQ ID NO: 26571 - protein, 369 aa, Clostridium sp.
VKIIKAYKIRCYPTEEQKQLIMKTFGCCRWYWNQALHDNIEYYEKNKKGKINTPAFYKKENEWLKEIDSMALCFTQMDLQSAFSKFFKEKNVGYPKYKSKKRPKNSYKTMTSSGYPVTENDIKLPKLGYVKMINHRHKIGIAKSCTISMTPTGDFYISILWRDEEILEKPEPINKEIGIDLGLKDLAICSDGEKFPVLQSLRKELPKLKREQRKLSKMKRGSNNYDHQKLRVAKLHQHIANQRKDYLHKISYKLTNENQVIALEDLNVKGLMKNHHLALSISDVGWSEFVNMLEYKALDKGRTVQKIDRWFPSSQICSCCGCITGKKPLWIREWTCPECGEIHDRDINAAKNILTEGKRILGASSCPDR

SEQ ID NO: 26572 - protein, 410 aa, Deinococcus sp.
MPQSHTDVRPFGLRQKAFKVRLCPTAEQAAQINRTIGSARFVYNTFLARRKESYRETGKGLTRFQCDKELTALKREEDTAWLRDVDKFALQQAVRDLDRAYENFFRDCKKPKGQRKSGFPQFHFKKGQKQSYRTNFTNGNIAVAEDRLKLPKLGWVKFRKSQEVQGRIISVTVRRNAAGKYFASVQCEVEVEPLPASGKAVGLDLGLKSFLVPSEGEPVGNPRHYRANLRKLRRAQRTLSRRQKGSNRRQRAKTKLARVHERISNLRRDFLHKLSTDLIRGYGVICIESLRPGNMAKNRSLAQGIMDAGWGEFRRQLEYKSEWYGRTLAPIDPFFPSSQLCHDCGFQNPAVKDLAVREWTCPHCGETHDRDLNAALNIRDEGLRMVAAGTTDTKNARGEGVRPANAGSPR

SEQ ID NO: 26573 - protein, 477 aa, Deinococcus sp.
MPASTHLRVRHALHPAPAQTAALDNLWHLGQHLWAVLALHARLEATGQPQPMQRVAALAAGPPPTSQVPVRLPRRSTAERRRELEVLARARGWRAHLGSATLDGLVSDFGRTLKSLGPVAPPDAIPLTPPHDFALVLGGLARPVGELHAEIAGVPGLVQAPLFLLPGPAGAAVETWRRTFGGDLTTRRGALEAGLLAGDPEADASYLAHVARYGLIESHLGAVPDHAPATPPAVSLVLAEAAQLHHSDAGGYQISWAFRVTGLTPPSHQDLIALDPGVRSLWTWVSGRHSHGRSPMPLSLLRPWSPAMPGPPTRLLAQPQDLIYARLRRHQLLHRTRLKPVLEAGLARFLQFAAVAVERTDFGGMRCRGEDYPEAADFLGTRLYEQFLCDCARLDPGHRMAVWVPPAWTSVDCSVCGARGAVHYRGRSGRCQTCGQHLDRDHNGARNVYQRGAAQLVARGLPWTPAPLPIPPRRRRP

SEQ ID NO: 26574 - protein, 431 aa, unknown
  TnpB Polypeptide
MRLTERHLIKPNHKIYKTLDELTFKAKNLYNHGLYLYRQSYFEYKKDPEKPILSWKDIDKHLRRECHEDIQVLPSKVANAVLKNLGEAISSYWKLVRLHRTGELTQRPRLPYYLHKTTGRYPLSFNYQTFGKVRGTNKELILCPTSLCLRVPTKVDNPKQVRIVPHYHNFVIEVIYEVEDPILNTTSKYAGIDLGVDNFATVTFSSRNQPLIIKGLELKSINQGYNRLIAKAQSLLPESQKTSKHIHRLWSRRSWILQSKIHQITAFLTTLFDEMRIETVFIGKNKNWKNELPFGKVVKQRFAYLPYETFIKQLSYKCQLRGISVITQEESYTSKASFLDNDDIPVYGEVENPSFSGQRIKRGMYRSGDGRLINADVNGSYNILRKGMLNQHKVLRIDNPIIQPVVVKEIGQVPNQSLTILYVTPSILARG

SEQ ID NO: 26575 - protein, 383 aa, Salsuginibacillus sp.
LSIHKAYKFRIYPNRHQQTMINKTIGCSRFVFNYFLAEWNEAYATKGKGLTYSSCSSELPALKKEYEWLTEVDSVAVQTSVKNLADSFTRFFKKQNKLPRFKSKGNPVQSYTTKHTNGNIAVVDNKIKLPKVGFVKFAKSREVEGRLLSATVRRNPTGKYFVSLLVETEVDELPKTGQSIGIDVGLKTYASLSDATDYDNPRFLRSLETTLAKEQRKLSRRYEQAKKDGKPLREAKNYQKQRVKVARVHERIKNARTDYLHKISTDIVKNHEIIGIEDLQVTNMVKNHKLAKAISEVSWSEFRSMLEYKAKWYGKKVVAVEKSFPSSQLCSSCGYRNQDVKNLALRTWTCPSCHTHHDRDFNASKNIEAEAIRLRTEGTSGIA

SEQ ID NO: 26576 - protein, 457 aa, Brasilonema sp.
LLTNYVYKLRPNIAQQLKMSNWVDMLRSHYNWCLNDRLTQYAQQYIQGDYCDIRTKAEACPITCFVSKNGATGEAWKDSQQKNPRRSAGDIQITALPELKKARPWYAEIDSTVLQQNVKRLDIAYKNFFVRAACPKSIGRGFPKFKNRSNFTSFTYVMGVKVQGDKIYLPKLGWMRFFNSRPIPTGFTIKACTLRKRQDGWYVSIRIEDKTVPDYVVKPLTEVKKIIGCDFGITKLVHLSDNYQIENPKFLTNKKTKRILKVRQRRVNQKVKSSANRKKATIKVGKLHKIIADKRQAYQWYVANKIVSKNVDAIAVEDLNVSAMKRRCKPKVDEQTGRFLKNGQSRKKGLNRSISDASWSDLILKIEYLAAKSGKVVIKVNPKHTSQKCQNCGHIDKSNRDREKFICISCGWMHHADINAAKNIRDKAFSIVREDFSELKRPKQRCGDITALYEQTP

SEQ ID NO: 26577 - protein, 291 aa, Moorea sp.
MEFKAVLKEPQRLAINEAIRTARFVRNKVLRYWMDNRGTGKKELYRYNTQLRDEFKFVRDLNSHACQASVENVERAIKRFFDNCKNKIPGKKGYPRFKKHSRSVEYKQSGWKLSPDKKSINFTDKKGIGQVKIKGTCDLWRFDQKLIKRVRIVQRADGYYVQFCVKIDNSEQLEATGFTVGLDVGLKEFYTDSEGYSEPNPRFYRKGEKRLKFHQRRVSRKKKGSSNRKKAINKLGRQHLKISRQREEHAKRLARCVIRSNDLVAYVRAACRKARLKSQELRKKPLSCQVY

SEQ ID NO: 26578 - protein, 290 aa, Borreliella sp.
MSANKVYKYRIYPNVNQKKYFSKAFGCVRFLYNKMLSDKKDYYEKNKKSLSVNPSNYKNEFPFLKEIDSLALCSAWIDLNSAYSNFFREIKKGNRTQGFPKYKSKKNRQTYRTNNQKNSIRIENDYIKMPKIGFVKLALHRNIKSNEVIKNVVVEKDIDDKYYISVAVECLDVKNNDKTKDNKKEVVGIDMSMRHFLVSNEGEKINHPKYLLKNESKLKKYQRKLSKKQKGSRNRAKSRLRVAKLHRKISNQRKDFLHKLSYYFVANYKNIVIENLSIKGMQKRNVWQKC

SEQ ID NO: 26579 - protein, 231 aa, unknown
  TnpB Polypeptide
MPKQETSLKKRQKKPRRPMRDEGIVAFDLGIKTLATGYTDQGRFYHIGGFKGYRYYNKQLDKIRSKRDKCKKKSRRYIHLSQVYKRVSEHKRNKQGDCLHKASHLIADRLAERAVVIGDLSQQQMVIKKQENETPKERWKRKFRNRMVYNDWGLYRFVQMLAYKCLLAGKELHVISERNTSKQCHRCGNLQDMPLWKRTYRCGNCGLVMDRDDNSAINIYQRFLARLGPHT

SEQ ID NO: 26580 - protein, 402 aa, Shigella sp.
VKRLQAFKFQLRPGGQQEREMRRFAGACRFVFNRALALQNENHEAGNKYIPYGKMASWLVEWKNATETQWLKDSPSQPLQQSLKDLERAYKNFFRKRAAFPRFKKRGQNAAFRYPQGVKLDQENSRIFLPKLGWMRYRNSRQVTGVVKNVTVSQSCGTWYISIQTESEVSTPVHPSASMIGLDAGVAKLATLSDGTVFEPVNSFQKNQKTLARLQRQLSRKVKFSNNWQKQKRKIQRLHSCIANIRRDYLHKVTTTVSKNHAMIVIEDLKVSNMSKSAAGTVSQPGRNVRAKSGLNRSILDQGWYEMRRQLEYKQLWRGGQVLAVPPAYTSQRCACCGHTAKENRLSQSKFRCQVCGYTANADVNGARNILAAGHAVLACGEMVQSGRSLKQEPTEMIQATA

SEQ ID NO: 26581 - protein, 236 aa, unknown
  TnpB Polypeptide
LPDVPDWFEHKYPERSLNAATLVLDPDGHSASIRLTYRLPQSTLVEQGDVLGVDLGQHALATDSRGGEISYSHMQGVKRRYAHNRKTLQEKGTRSAHRRLQAMGQREKRFIRDTNHCASKQLANTPNISVIAFEDLTHIRRQAEKGTKTSKTRRNMLNQWPFSQLQEFTAYKAAQGGIRTVMVNPAYTSQQCNRCGHVDAGNRDRARFDCLTCGHSDNADHNAALNIRDRAIQNLG

SEQ ID NO: 26582 - protein, 395 aa, unknown
  TnpB Polypeptide
MSKKTHKIALNPNNKQRKWFAQQCGYARFAYNQALADFKNHYDATGEYLSAGKLDKRFNVYKKEHAWTADMDQVVSSQSIYKHLGAAITNWRKKIARFPKFKKKGIRDSFSSTNQSAEIKGKQLRLPKIGWVKMFEELRFDGKISSVTISRTAHRWFASITVETENTIAVDKTSTHPVIGIDVGINTLATCSDGSKYENPRPLKRYEKKLARFQRRLSRRVQGSKNWYKQKDKVARLHYRIACIREDAHQKATDIVNRVSGIGVETLKVSNMLKNRKIAKALSDSALGGFLSMLKTKAEACGIKPKEADQFFASSKTCSSCGHKKEDLTLSDRTYHCGVCGISIDRDINAAINLRNVAVGHTETQNACGDPVRRQSDAKVVEAGKVVWQQKPLPI

SEQ ID NO: 26583 - protein, 445 aa, Lachnospiraceae sp.
MNIFSSYKVKIKNYNKIFEETVRIYREAVSFFIDICDKEWDMLEPLKNLERCRKIEELSLHTKKNLNPKYDFNSKFYKMPSYLRRSAINTAAGCYSSYRSNLKNWEGNQLGRKPRLQLDRNVMPTLYKDNMYIRTGDDTARIKIFHRNDWIWLDIRLNNQDVRYIKSHCAFKKEYVPTLKKQGKCWYLVFPFEDKVKFEDVDIQDQTICSVDLGLNNNATCSIMQSDGTVAARKFINLATEKDHLYKALNRVKKVQQNGVRKTPILWKHVNDINTDISRKTAKQIIDFVVLHNADVIVFEHLDTSGKKRGSKKQRLHLWRKQEIQKIVEHRAHILGIRISRICAWNTSRLAFDGSGKVERGEYYQNGERKYNYSICLFKNGKQYNCDLNASYNIGAKYFIRGLLKSDSVRKRLPSQTKDSDYGTGTTRTLSTLIRLNADLCRKTV

SEQ ID NO: 26584 - protein, 413 aa, Halorhabdus sp.
MEYSYRYQAYPTQAVAERLEHHLDVHRQLYNHVRWDYENRPADDKPSEYEQNNKLPEWKRKWPLFRDLHSKAAQATVARFHHNLTVLSKLKERGYNVGRLTRQAPSDYRSVTYNQSGFDLDEKRGHDKDAYVRFSKIGWVKIRYSRPIPDHATIKEVTVKQETTGEWFVSFGLEIDDATLPEKPDVDSLDASNSVGIDLGILNYIHTSDGTTVEWLDLEDEYERLRREQRTLSRKEKGSNNYEKQRKQVATVKRRIRRKVLDYQHKITKYLVREYDAVFVEDLNVKGMLQGDGNARNKQNAAWRQFITLLEYKADLHGTHVVQVEPEGTTKECARCGVETAKPIWIKEHSCPSCGFETDRDANAAMNVLQRAFQELGLGWPEDTPVETVTATDTIQFESVSASHVVETGSLPS

SEQ ID NO: 26585 - protein, 450 aa, Halorhabdus sp.
MKRTNTFAVRSLSPTGEQLLRDLLDASAALWNETNYERLIRYDDEDGYKNEDVWDADTGTLEGKYKATLGASTAQQVIRKNSEAWRGFFRNKEKYHDESDTSVTEHPTPPGFWGNKDDGRKLHTVIRNTSYTVEWGERSRLEILVGSELKDRYDHTGRLRLEIAGEPHWPEYETQGRLDLWFDETDDTFRASQPVTVSADARATPLADETAALDIGANNLVACTTTTGSQYLYDGIRPFERFRATTERIAELQAKLDDQRRTSERIDHLYDTMYARRDHAQDALVRDLVERLYDEGVSTVYVGDIRDVLETHWMPEVNRKTHNFWAYRRFIDRLECVCEEYGIEVVEEPESWTTQECPECGEREDTERNGDLFRCVCGFEGHADLKASQLFLERETGMIVGLMAQPVCFEWDDHEWSERSSSPARASPKEDHTDRSTHRTVGKVASVESA

SEQ ID NO: 26586 - protein, 417 aa, Halorhabdus sp.
MNYNYRYRLYPTDDQREALAWTLDTCRQVYNHFLNRLNEADDVPSEYAQKNTLPDLKREWSDLKQIHSKVLQVVVERLYNNLRTLSGQKENGYNVGALRWKGAGWYKSFTYSQSGFKLIGTDTRRDRLRLSKIGEIPIAYHREIPENATIKQVCIKRNASGKWYATFGIEIDEQPEKPAPETIDPEDAVGIDVGILKYAHDTDGTAVESLDLSDERERLRREQRKLSRKEKRSNNYEKQRMVVARWHDQIANKRRDFLHKLAHYYVETYDVVAVEDLNVRGMMEQDRNSRNTAHSAWRTFIEILRYKAESAGTHLVEVNPRGTTKECSNCGVETEKPLWVREHSCPSCGYEDDRDANAAKNILQRAFSELGMGQAESAPLETATATDTRVVSASRVIERGSPALNERGRQTERSRTG

SEQ ID NO: 26587 - protein, 415 aa, Halorhabdus sp.
MEVRRTLPVKLKVSDSDRGALLDTIDQYKHIANETCDHCWNENDYKQTAKYAVKDELYHDLKDEYDLTANLVQQAIFQAVEAVKAGVERLEKNEDTSQPEFTADTARYDKRAATFHDDHVSLSTVDGRIMADYVLPEDETDTPFETYLDGEEWEFRTSTLHYKPFEDEFWLHIGFKRIEADTDSRQSDADVPEHNNTVLGIDLGVENLAVASTGRFWTGDELDHWHREFQQRRGDLQQAGSQEAHRTLQRVSKHETAYYKRHLHIIANEIVEEAVEHECSVIAFEDLTDIRKRAQGATWHHRWRFNRLYEYVEYKAKAYGIDVEELERSPQAQTVPAYYTSQRCSSCGFTHEDNRPTQEHFECQKCGYENRADYNAAKNVAVRCCRRLLRRNQNGGDGGAPVNVALNGGTMTVNV

SEQ ID NO: 26588 - protein, 373 aa, unknown
  TnpB Polypeptide
MYNRTISIIINPSEKVKLLILKNGIANQCLWNIMLKDALINTAKNETNIIEPFSHYKSKMKLFSAIDPNGLLNTYKKFVNTFESQGTKTKYKLVDYKTSFQINNLNNFIVKNNKISINRFLNIKVNYLKDIPNYYKIKYANFIVNNNKIKLFLYFDVYLDIKRKYLDFNNSIGLDFSLKHLYVDSNGNKADIPIFKNEYIKRLNYLKSKLKRQVKNSHRYLDTIRKISKINQRISNKKINFLHNLTNELSNKYDVIFVENLSLKQIASSNRNDEYNKNLKFGSRIEDLSYGRFLFMLEYKMKNKGKKLVYIDRNYPSSLVCSNCGYRNDAYKNIKLKVYKCLNCNCEIDRDVNAAINIKKRGIYLFINCISKK

SEQ ID NO: 26589 - protein, 520 aa, Vulcanisaeta sp.
VIGMPPQTTTNETRKPLRRSIAVELETTKELNKLLHSIETAYLNIVRDVAEYAVVNNVTSATQLQGLFYSKYRGEYQGLHSHLVIQAIKQASEIAKSFIARRRKGLASKPYPEVKAVSIRFTEFTWGYEQFVKSIAPVRLELSLLGGRREVWLRLHKRFWLYWWRVLTGEAELASTLLIKRRLNRWYAVFIFKLKPRQEVPQSVVAFDINENTVAVGRIDIKTTVGKVVDWNRRYATPQLYEIRTDFGRLARRYEKIRNAIIERLKPHFTLPNGKYVNVTNTREYRKRVKMLREGRRKDGRIKHVANELTKTPAIIVTEELGEEPQDEMINGVGKGELRHRIKQIPFKAVERAVGDKTLERGSRIFHVSSYRNSRVCPVHFVRLRETNDWHILYCPLGHYVNRDYASVLNMMWKVTPEGWVKGVWWNMKSLSRNMNWRKHKGKSNPIIPHPIVNYIHAVLKTFTARLERCPAMLAQGDPMTRHRMQNEGGGEETSQKREEASPSQIEQMVTEGRVGIFAR

SEQ ID NO: 26590 - protein, 494 aa, Vulcanisaeta sp.
MLCRAVAVELEVTRELNKLLHSIESMYLSIVREVVEYAVENNVTSANKLQRLFYRKYRLEYSSLNSQLIIQAIRQAAQIAKSFVERRRKGLAQKPYPEVKAVSIRFTEMAWSYGKFINSTAPVRLSLSLLGERREVWLRPHKRFWLYWWRVLRGEAELASTLLIKRRLNKWYAIFIFKLKPREEEPKSVVTFDINENTVAVGRIDLLTTVNEVTNWNKQYLMPQLYTIRTDFGRLARRYEKVRNAIIERLKPRFALPNGKYINITNTREFRKHMKRLRERVRKVGRVRQIANELTKTPAIIITEELGEKPQESMINEIRRNETRHRIKQTPFKSIEKAVGDKALERGSKIFRASSYRNSRVCPIHFTRLERTDDWHVLKCPLGHLVDRDYASVTNMLWKITPKAWTKGVWWSLKGLSRNMNWRKYEGKSNLIIPKYIIQHLYAILKTLTASEEWPAMLARAKPMNHHQMQNEGGGEETSHTLSRQGGGQCTLFI

SEQ ID NO: 26591 - protein, 201 aa, unknown
  TnpB Polypeptide
VYAEIWEELSEIKNLQKRFNEAEHLVHETKKNHARFPFDRYFPKMPSYLRRAAIQHALGAVSSYQSRLSLWEKGELRGKPKLVCENHAMPVFYRDVMYREAEPGEDVAHLKLFDGREWKWFQVKLLHTDMEYLRKKWSGKKASAPTLERKHHKYFLRFSYTEEVTLSKTAVKQQVICSVDLGINTDAVCSIMRADGNYSGT

SEQ ID NO: 26592 - protein, 244 aa, Escherichia sp.
  misc_feature (13)..(13): Xaa can be any naturally occurring amino acid
  misc_feature (55)..(76): Xaa can be any naturally occurring amino acid
  misc_feature (145)..(145): Xaa can be any naturally occurring amino acid
  misc_feature (175)..(175): Xaa can be any naturally occurring amino acid
  misc_feature (221)..(227): Xaa can be any naturally occurring amino acid
VKRLQAFKFQLRXGGQQECEMRRFAGACRFVFNRALARQNENHEAGNKYIPYGKXXXXXXXXXXXXXXXXXXXXXXFRYPQGVKLDQENSRIFLPKLGWMRYRNSRQVTGVVKNVTVSQSCGKWYISIQTESEVSTPVHPSASMXGLDAGVAKLATLSDGTVFEPVNSFQKNQKXLARLQRQLSRKVKFSNNWQKQKRKIQRLHSCIANIRRDYLHKVTTXXXXXXXCPGKIRFKPFDTGSGLV

SEQ ID NO: 26593 - protein, 362 aa, unknown
  TnpB Polypeptide
MKQTLMIKLSPSEEQYQTLLETMERFNEACNYASNVAFETKTFGQFYIHRLIYHELRGRFQLSAQMTIRAVAQVSESYKADRKIQHSFNPHSAMVYDSRILSWKGLDKVSILTLQGREIIPIRIGAYQEARLDRKVRQSDLILRDGIFYLAVVVDAPEPTPDDPNGYLGIDLGIVNIAADSDGKTYSGNQVNGLRKRHSKLRGKLQAKGTKACKRLLAKRSRKERRFATNINHTISKSIVAKAKDTGRGIALEDLSGIRDRITVRKSQRRQHHSWAFNQLRRFIEYKAKLAGVLVELVDPKNTSRTCPQCGCVDKHNRPSQSLFSCVSCGYSAPADTVAAGIIAGRAAVNQPNFSPALSGAG

SEQ ID NO: 26594 - protein, 375 aa, unknown
  TnpB Polypeptide
MLIYEYKLDGAQAQYTAIDEAIRVCQFIRNKCLRKWMDDHATKNDLQTYCAVLAKEYPFASRLNSQARQASADRAWFAIQRFYDNCKQKKPGKKGYPRFQKDNRSVEYKTSGWKLEPDGKHITFTDGCGIGRLRLVGTRDIETFPIKQIKRVRLIRRADGYYCQFAVQAERKIEHISTGAPVGIDVGLKAFYTDSNGNAVENPRHLRKAEKRLKHLQRRLSRTKKGSQNRKKARQRLAKAHLKVQRQREDFARKEANALVSSHDLIAFEDLKITNLVRNHHLAKSISDASWGRFLAWVQYYGSLHAIPVVKVAPHYTSQNCSGCGTLVKKSLSVRTHICSTCGLVMDRDHNAACTILNKALSTVGHTGTGTPVSV

SEQ ID NO: 26595 - protein, 441 aa, unknown
  TnpB Polypeptide
VGILPGFNREMKASFLCYSFVFVREFEYICDMLRAYKYRLYPTAEQAEFFAKSFGCVRVAYNRTLDYMSMYWIGGGNSVSRFAAQAQLVMLKEVYPWIGEVNSQSLQYAVKQCADGFRNWWERRSDHPVPKCKDARQSFHNPQYCSVDWTHRTISIPKCKDINAVLHRPFHGTVKDITVSKESGDRYYASILVDTAIRELECDAVVDEKTSIGIDLNCGDIVCSDGRRYVIPKALKHAERRLHLQQRSLSRKQPGSNNRARQKHIVSKCHARVRDKRHDFLHKVTHELTHDSQVRTIFIEDLNVRGMVRNHHLAKSVSEASFGEFVRQLTYKGRWYGVNVIKIDRWAPSSKTCSYCGHVNSVLKLSQRDWTCICCGTHHDRDYNASVNIKLFGLMALPPGRREVKPVDCPTVDERRSLNALRSSGRLNQEKIRGVTDAPAL

SEQ ID NO: 26596 - protein, 495 aa, Okeania sp.
LIKINGRPSATGFHPSLFLTRKILYVNLKARRWCKLYGCQQHLIQEAPEIMAILEYICLEANRLTNCGIYYCRQMLFKAGIFLTRGALDRELKSNIHFKAMRSACAQQTLHGVIESFNSYKALLKLYKEEKLHFRPKPPSYRKKGGMAVVSYPSRWVKLIDGSVGMRSLGETHPQPLQGGEDSPWSHRYLKFPLGNQVKAWFGIDHFLLPMPSNLDYKSIKQYRILPRNGCFYIEFVYQQPEIEPIEANNNVLGIDPGLNNWITGVSNTGKSFIIDGKKVKSQNQWYNKQVAKIKRGKPQDYWDEELAELTEKRNRQMRDNINKAARLIINWCLANNVSNIVFGWNQFNKDGINIGKKNNQEFVQIPTAKLKERVSQLGQQYGINFIDTEESYTSQASFLDDDFLPKYGEKPERWEASGRRVERGLYCSSNGSLINADCNGAANIIKKVRTQLNLDLTKVCRGVLTLPKRYFLDSLSKKYCKHSERVETALGISA

SEQ ID NO: 26597 - protein, 383 aa, Paenibacillus sp.
LLTHKAYKFRIYPTVEQQIQIAKTMGCSRFVFNHFLNQWNEAYRETGRGLTYASCCSELTNLKKEIDWLREPDKFSLQNALRNLDDSFKRFFKKQNDAPRFKSKKNPTQSYQTNFTNGNIALVGNKIKLPKLGLVRFAKSREVEGRILNVTLRRNPSGKYFVSVLVETNVEPLQQKNKEVGIDVGVKDFAILSDGTVFGNPKFFRTLEAKLADAQRILSRRQELALTQKRPLAESKNYQKQKKKVARIHEHITNARSDYLHKISTEIIKSHDVIGIEDLSISNMLKNGNLAKAISEVSWSQFRRMLEYKGKWYGKQVVVVAKNFASSQRCSSCGYKNKDVKNLALREWDCPECGSHHDRDINASLNLKNEAIRLLTVGITGIA

SEQ ID NO: 26598 - protein, 313 aa, Crocosphaera sp.
MFVLEYKIYPKQNQIDAINEAIKTTQFVRNKVLRFWMDNHGVGKAEMFRYNTRLRKEYSFVNELNSHACQAAVERTLRAITRFYDNCKNKVKGKKGYPRFKHNTRSVEYKVSGWRLEETKKHITFTDKKGIGMLKLVGSRDINYFQPEQIKRVRMLRRADGFYVQFCIKLDPRYTIKPIEPSGKAVGLDVGLKYFLADSQGNIEPNPRFYRKAEKRLKKLNRRKSKKFKKGKKQSNNYHKARQRYALQHLKVSRKREEFVKRVALRLVKSNDLLFCEDLSVKNMVRNAPPLSTADPAGFEIQQERGSAFHALN

SEQ ID NO: 26599 - protein, 295 aa, Streptomyces sp.
VPCPHGPPRSPWSRTRPDGTSPPSSSTPTRLPTPPACPTPVQTVGIDLGLTSFAVLSDGAKIDSPRFLRRAEKKLKKAQRELSRKQKGSRNREKTRLKVARAHAKVADARREFLHQVSTKLIRDNQAIGVEDLAVRGLARTRLAKSVHDASWAQFIGMLEYKAARYGRTLVRIGRFEPTSQVCSTCGVNDGPKPLDVREWTCTACGTTHDRDHNAALNIKTAAGLAASACGAPVRPGVIPARREETGSHGIPTGNRAAQRHGNRSGKAGILALQGKEHVKPPMTPPASTCTSARH

SEQ ID NO: 26600 - protein, 224 aa, Hadesarchaea sp.
MWRSRVMLSYKFRLYPSKTTEHTLNHQLELCRWLYNRLLSELTLAKEKGIKLKRGDTQSLIVYLKKHEKPELNGVYAKVLQMVNYQLWSNIRALAGLKRNGRKVGRLRFKGAGWFKTLNYNQSGFALENGRLILSKVGEIPIKLHRKIRGKVKGVIVKRERSGKWYAIFQVEDEPEPLPRTGRAVGIDVGIRHFLTDTRREADREPEILREDTGKDKEEAERPF

SEQ ID NO: 26601 - protein, 470 aa, Okeania sp.
MRTAYQYKLRPNKEQITTIELWLELLRRQYNYRLGERFSWWSENRCPVNACPLVMPIPQLRDNPDYYSQKKDLVNTKDKFTEYKLIHSQVLQDCIKRVKLAFDRWLKVDKNGQKLGKPRCHFSYQLSVISYQLSVISFKLSVFSTSSCSFGIKNTEYSFFYPLKRGDFRPQFFGKGKGRYRSFTYPQIKLDCIEENQINLSKIGKVKLIKHRPIPEGFIIKTVTISRKADGYYVTLSLEDKSVPALTTEVEPTLKNTLGIDMGLNKFLVTSEGESVPIPQYYRKSQQRLKTLQKRLSRKKKGSKRWLKAVKAVAKQHKKVADKRKKFHFKTANELLSKAEFIAHENLNIKGQAKTRLSKSINDAGWGQFLTILTVKAENAEQKTIAVNPKNTSQDCSNCGEKVDKELNIRTHYCPHCGVVIDRDLFAQHDLGNAAINIKNRAVGHSVLKAPGPRCNDRARKREARTIMQA

SEQ ID NO: 26602 - protein, 420 aa, unknown
  TnpB Polypeptide
VKRAFKFRLYPTSKQRDALGQMCAAHAELYNAALQERRDAWRMRGTSVGVYSQMLQLTEIRAAHPDQRAWSARSQQQTLRRLDKAFAAFFRRVKAGETPGYPRFRAAARFDSVDLTHGAGIKFLPEEKRLYVMGVGHIRVRQHRPLPVGAVLKTVTVKREGSGRRARWFVVIPLEVAPTPLPPSGAITGIDMGVASFATTSEGKFLPNPRFGKSAAVKLANAQRVLSGCKRGSSRRRKAAESVAALHGVVRRQRLDHAHKTALKLVQDHDVICHEALRIRNMTRRAKPKPDPDNPGQYLPNGRAAKSGLNKAILDAGWGLFLNVLTAKAEKAGRETVPVPAANTSRTCVECGHCEAANRPSQATFVCQRCGFTGHADVVGAINILRAGTALRQAGSRGLTRSSALTGGRFTPTSCLTPAT

SEQ ID NO: 26603 - protein, 485 aa, unknown
  TnpB Polypeptide
MANKNYIETLIDKTNLARLKIKLYYLQIKLNKANNKLNKLVKIDKTGNPKLCFGSNKLFRQQFEINKPNNLTQFKSHEQWKKEYIASRNKSFILVGSSDEALGNDNCQIKHISDNNYELKVNVNPKAIKLKDRFINIQIKVHNDDKNLINQVMLNNNQALTYRFYKTKNNYRILISLDKAKQQPKVISNKLLGTIGIDINADHLAISEVDRFGNLIKSFEVQLDLKGKTSEQSTNNIALAVKEITNYAVKVNKPIVIEKLNFISKKKDLKDSYNKKYKVMLSSFAYSKIIELIKSRSFDKGIEIIEVNPAYTSKIGKFKYQNLYKLTTHQAASFVIARRGLFSYEKNIKVNVKRKIKEEELIKIIDNKLNRNGGIINLSKNKKNEFVEEVIEDKIITIINKEKKISDQLSKYYCFELPVRNIQRNQNIYWKDLEHNYLKAKKHRVDQKRKILIPGKQDLPCEITQVVDNYGANRGSYPNLLFQPF

SEQ ID NO: 26604 - protein, 364 aa, Beggiatoa sp.
MLVLSHKIQIKNPTVKQERYFRQACGTSRFAYNWGLAEWKRQYEAGLKPTAFKIKKAFNAIKPVDFPWVFNVTKCAAEQAFANLGTAFKHFFNGSGQYPQFKKKGRRDSFYLSNDQFKTEGNRIKIPKLGWVKLTESIRFEGKILSATVSSNADKWFISISVQLKTSPVKISENQTDVVGVDLGVKSLATLSNGETIEGQKPLKKLSRRLARLQRKQASLTKGSKRNDRQKLKISKLHYRIKAIRQDGLHKLTHHLCQDFKIICLEDLNVKGMMKNSRLAKAISDMGFYELKRQLGYKAGLYGNWISIIDKWFPSSKTCSNCGDKKELFKLSERVYHCETCGYEMDRDLNAAINIEREGIRLLA

SEQ ID NO: 26605 - protein, 250 aa, Halorubrum sp.
YLHARMRRTTDEQERSATASEDAKHRTVLGVDLNVDGSLAVTSTGVFIRNADEMNHRRREFEKTRGSIQQTGTRSAHLSIQSMNDREHSWIQDELHHASNQILDEGRDHGCTHVAFENLTDIRDRMAGAKRFHAWAFRLCEYVEYKLEMFDIEVEQVSPAYTSQRCSKCGFIYETNRRSKHQFVCQKCEYELNADYNASKNIARKLLKKLHSGQKSSGGGAPCQCALTSGTLNLNGDFHASVIDGRRGVH

SEQ ID NO: 26606 - protein, 231 aa, unknown
  TnpB Polypeptide
VVFSCEVETQPHVPYTDNAIGIDLGLLHFATLSTGDTIENPRYFRCGEAKLQRAQQHLSRCKKGSHRREKARKQVAKCHRKVKNQRQDFLHKQARQLVNTYETIVFEDLAPSNMSRAPKPKQDEQGKYIPNGAAAKGGLNKSILDAGWSTFVNMCTFKAECAGTVTILTVDPKYTSQVCSGCGTVRKKEISDRWYSCECGTELDRDHNAAINILRLGSSQRGATLVEALAL

SEQ ID NO: 26607 - protein, 416 aa, unknown
  TnpB Polypeptide
MYLTVKQQVKHFSKEDYKNIKHLCHIAKNLTNQAIYNVRQYYFNEGEYLNYEKNYALLKTSNSYKMLNANMAQQILKEVDSSFKSFFSLFKLAKKGKYAFKDCCLPKYLPKDGYTTLVIGLVRLNGNKLILPYSNAYKKTHKCVEITIPPILIDKKVKEIRIIPKANARFFEIHYIYEAECIQRNLNIQNALALDLGINNLVTAVSNHGQSFIIDGKRLKSINQWFNKENARLQSIKDKQHFGKKPTNRQKVIARNRNNKVNDYMNKTARTIINYCIANDIGTLVVGYNETFQKNSNIGKANNQTFVNIPYGQLRFKLEYLCKLNDIVFVKQEESYTSKASFWDKDNIPIYNNDNPRSYIFSGKRIYRGMYQCLNGKCFNADVNGALNILRKSRVVDINILYSRGEVDTPIRIRIA

SEQ ID NO: 26608 - protein, 423 aa, unknown
  TnpB Polypeptide
LKIVFYTYKIRLEPTEDQIVKLNKHFGSVRWSYNYFLNQRKEYYQENKKSLNYNKQSSILTQLKQNEDTLWLKEINAQSLQYSLKCLDIAYNNFFRGSARFPRFKSKKGKNSFVIPQYTKIKNELLLIPKFREGIKMILNRKIEGIIKHSSISKTPTGKYFVSILVEKEYNPVQKTNKTVGIDLGLKDFLITSDGTRTKNHRFFKKYQKLLKINQKHLSRKQKDSKKKERQRLKVARIHEKISNSRLDLIHQTTSDLIKNYDIICLEDLNIKGMSHRCKPKQDENGNYLPNGQSAKSGLNKSILDVAWGKFVETLEYKAEWNDKKVVKISRWYPSSKTCNCCGWINQDLILKNRTWTCQKCNTVLDRDINASKNILKEGLKIISDGTSDYGHGDQIRLDLSSTVYEVSKEMDQFDPETITSLV

SEQ ID NO: 26609 - protein, 411 aa, unknown
  TnpB Polypeptide
MALARKSIKQRFHPSAQLLSVMECFRQMTNDCIRAGLQFEKENDRTPSLKKLSLLSYAELRRRYGGYSQYALCAISKAASILSTRKKSMRRGFPTGAPYVSKRGLVSCYGFKVEGGFLTVHLDGEAFESIPLNAHTRALLSDSTLRVSSFTLTEESVSLCVSKEVREMGAEEVAGVVGVDRNLRNLTVGDKRQVVIYDMTDVVGIGERTREVVSSFKRDDVRIRRQIASKYGRRRSERTRQLLNLVSKKIVRDAKVSKRAIVFEEITGIRKLYGKGNGQGRSFRARMNSWPFYEIKRQIQYKASWEGVPVITLTGGETRGTTMDCPRCGERLQVPIRGDVHHHRQLWCEKCGRWTDRDVVAVLNISRRGRLRFDRSQRKEGEAGEAVKGNAGRDGEPLILRVDASKLRHGQ

SEQ ID NO: 26610 - protein, 399 aa, Bacteroidia sp.
MLKAYKYYIKPDIDQQKLLQNNFDAARAIYNRSLALKSYAFKKFGIQLGLKELKGRLPKLRKRHQWLKDAYSAVLQQSVINLDNAFKRFFKKQTKYPCFKSKRDRQSIQYPANVTVDVHNKTIHLPKIGDINLVLHRELGNGKIKTVTISKTTSGKYFASILIDDGEAPVTKLTVINEDKVIGIDAGITNIIHSSNNTSIANPKYLKKYQRKLAKAQKSLARKTNKASKRRAKKKQEISKIHEKITNTRNDFQHKLSASLVDENQAIGVETLMIKNLMKNRKLSKSFADASISSLYTKIQYKIEQKGGHLIKIDKWYPSTKRCSNCNAIKEKIQLNERTYNCNTCGVSLSRDYNAALNIKREAINILRATGHVVLRRGDTGRPQFIVAGADEASRSLTL

SEQ ID NO: 26611 - protein, 470 aa, Chloroflexi sp.
MQIIKAITHIRILEANTGKLETLDALSQVYIPLVQQYINYFCGCGITDNVPIIGYFPPNKFGDLLFESELSKRWQRVAIQQAAGVARSWLTNRENAYRAYLQELEDYEKDQLEPEPNPKLKLPVWKDWNSPILRATVIQANVNVVSALEPEDQAVLKLERAHGQSQSNSQFDYWLKVATLDKGKPIYLPIKLAKYHKQMLEGHVPSTSTTLSKRQDGSWWLTLTITEEVEAPVPNASTSAEKVVGVDVGIKNFITSSQGRCYGSFSGKLATQHKAERQKRKRKAKLIACLKKKGLPKSKEKLPSTSSHSGQKLSRRVKQSINRAVNQLLDELPPEELKDVTIVYEELNVASMRFKARAMNAYLYASNLGHIPKQLAWACAKRGIATLTVNPAYSSQQCPKCNLACRDNRKTQETFSCKCCGYTALADYNAACTLANRANDPELLQCLGKEEIKALLAHRHQKWLLVRAQA

SEQ ID NO: 26612 - protein, 417 aa, unknown
  TnpB Polypeptide
MKITSSYGVELRKQNIPIRQTLDVYRSAVSYLVEIYAQVWEELEGILEAKKRFNEAEHLIHTTKKNQARFDFDIRFQKMPSYLRRAAIQHALGSVSSYKTRLGLWEKTGQRESKPKLVYENHAMPVFYRDVMYREDKEGKDAAYLKLYDGHDWKWFHVRLRHTDMEYLRKNWSGKKASAPTLEKRHRKYFLRFSYTEDVILAKIPAKEQIICSVDLGINTDAVCTIMRSDGTVLGRKFIDFPSEKDRMYRVLGRIRKFQREHGSVQAKSRWAYAKSLNIELGRKIAGAVTKYAKENRADIIVFEYLETKGKISGKKKQKLHLWRKRDIQKRCEHQVHRNGIRVSRICAWNTSRLAYDGTGTVARDPKNHSLCITGGTAYGKKKEPESNCKEDQKNGNYTDSEQEVQRYGVPDAVFGS

SEQ ID NO: 26613 - protein, 400 aa, unknown
  TnpB Polypeptide
VGFCFTLDVGVEVEVRLGRWAGASRVAYNTLLAQVKAGLDVRAAERAASGAATTKVAWSRWDLIRGASRLRRELSWGEEVPAAVFECAAVDLAAGLSNWAASRAGRRRGKKIGFPHFHTKRRTVPRFRLRHPEQLRVDGRRLGVSCLGWVRVREDTRRLRRLLGAGRFHPYSTTISYRRGRWQLAINGTAAPFHPEHRRHDRCPVPVGVDLGLRHLATVADATGRLLEVREGVNPYQHAKRRLRRANRAWARTKPGSAGRRHATRRLARLHGRVANQRRHQLHELSTALVSRYETIVIEDLHVAGMLAQHTLAARVADQGFGELRRQLTYKTDWYANQLIVADRWYPSSKTCSSCGHHHHQLGRQARFACPSCGRDVDRDHNAAINLARLAPTPTSSRSG

SEQ ID NO: 26614 - protein, 560 aa, unknown
  TnpB Polypeptide
VGPAGLDELDQDPVGVAHRGHDDRSLRSGLLDAAGCATEAEMVQAGQGVVDRHEERQEEEPGRGRPGGRSRVGAAVEGDELDDTGVGCGRVAEEHGPQRSRPGVEQRRPVAVEAVVHQHVEAEPVAVEAQAGVDVAHAQRGMMERSRHMPDATFGSAVTLRVGVCLSGVGRCRAFRFLLSPTVRQRAALEALLDVQCELYNAALEERRGAWRWEHRSVSYVDQCRTLTTLRESRPEVLASGVTVCRGTLRRLDWAFQAFYRRCQEGQRPGYPRFRSRQRWDSLQWEDRNSWYLDGAQRRLHLHEIGALRVRIHRPLRGTPKAITVCREGRRWWVSVRCVDVSAEPLAPTGRQVGLDLGVTVLVATSDGDLIANDRFTQRAAGRLAAAQRAVQTKQRGSKHRRRAGERVGAAHRHIRNCRRNRAHQLSRRLVNDYDLIVHEDLTIPNLVRRPRPRRDGQGGYQPNQAAAKAGLNRRIHDAGWGQLLAMISYKAESAGRSVIAVDPRNTSRTCADCGHVSAGNRRGAVFQCEACGHRAHADTNAAINVLRAGRAQQHHAAQG

SEQ ID NO: 26615 - protein, 490 aa, Clostridiales sp.
MPYCTISLKLLSPTAKKRQQLDDAMERYAAAFERLLRCVRPGIEGHVSSKTEIGRQIGLYMPQVDQLGVQPFKDALKRDVAKTLYLYTAQKQKGSPRRYPMQQSCDADLAYLLSREEAIAPRTLDYWLDHYQRKRPLLFCRYSETRNYALLYDETQDRYYAKLYLFNAEQARKEMPRRQGKLRYLASGRMLKQSKRPYCYQLYPLEIGDWQRQHLQWLESKTAAAKSAELVQRGGKYYLHVRLWIEPQPAQSARTTLGVSRGIEHTLCYALCGEQGAVLRTGYLQEEPGLQRERKLSEQVLALAKEHKARIVLANLITRNDSLDTFTTPQMTARSYHQLAERLRYRTEICGMPPAVVVSARGLFSRCPECGVVSQGNRMNERIFLCISCGHVEQLETVGAENLAGKLAQYRKEKLTVYYEIEERQITFTLPQISFCHCTQNGPQAKESCLRAICAWMETQKAPRDSVQKNIYQKLKHTVPMEDALQFVHI

SEQ ID NO: 26616 - protein, 415 aa, unknown
  TnpB Polypeptide
LWDTAGLHTDINTCNYIQISMLQAYKYRLYPNTIQMESIEKHIDTCRFVYNLFLEKKIKHYTEHSKTLSCFALNKLLPSLKIEFPFLQDVHSQPLQMASRNLDNAFTKFFREKKGFPKFKSKKNPVQSFQYPQGVKLNWELGKVYLPKVGQVKCKLHRFFEGDIKTCTVSRTSTGKYFVSILVDNKERVPDSDTFSSETTIGIDVGLKSFAILSDGNKVENPRIFKKKSEKLKKLQQSVSRKVKGSNNYKKAKLKVAKCHEAIANQRSDFLHKLSFKLVSENQAIAIEDLNVSGMVKNRRLAKHIADASWSNFRSMLEYKCKRYGKTLLTIGRFEPSSRICNHCGYYNRDLTLKERSWFCPSCGSDLDRDINAAINIKCFALMKQNTGQELSGVPVEIVSDIIDASINEAGSQRF

SEQ ID NO: 26617 - protein, 239 aa, unknown
  TnpB Polypeptide
MDTTTAKRAYRFRFYPTPEQEQTLRRTLGCCRKVYNMALDARSEAWTVRHESVSYEDTSRMLTDWKKTKEYAYLREVSSVPLQQSLRHCRRVQELLRQDGRLSPVQIQEERRSRHLCRIRVHLGLGQTGIDFGEDARTPSHPLVAHTAEESPAVHRHRVPGPVRTLAREHPRRRGSETSTRLPKQGRRRFGHRTLRHPQHRGENSPTHATSTVTRRSLNKPNKLSPESRKEATTIAKPV

SEQ ID NO: 26618 - protein, 317 aa, Lactobacillus sp.
MAKTMAQLPYHYGVKVRVFPSTEQKRLIKRNSDASRFIYNKMNGMNNDLFWLKKVKTPIALVLKRITDLTERLKKPSTAISNIHGWLNHPDFDSLMKANAIKNYRTAWKLFRQVHQAGTPKFHKRGYTQTYQTSCLYSAKVIAPTMENGSVRLTDNRHLQLPKLGHLRFKGLPLKILERANDIRIGTTTVSMDAVGHYFVSMQIGSEHPFAAKQPIVKSKVGIDLNLDNFLTDSNGQVIENPRYYRMIKGKLAKAQRKLSRRARRAKKSQRRLSESKNYQSQRLLVAKLQLRVTNQRKNFFAPRLYDLNQKPRFSRS

SEQ ID NO: 26619 - protein, 375 aa, Thermoanaerobacter sp.
MIVIQAKLIFLNQQDKQIVLDLMRRWSSCMRFAYKRLLEGYDRNTLKRDLQGTFDLNSRYVDDAIMKAESALESVRELGNNPKKVIFGGKKLFKKLQKRHINGKAYKKLKNRWQEKRKGNLYSRGDKSKKGNLNTRIEAKENGTFLRINVGERKYVYSRIEAGYKKNKRREELLQEIAKSNIPYSVELKLKNGSMYAYFAIEEEYPKIKITKEKGVIAIDINAYPDNISWAETDEKGNLISYDKIPMPELASGNKDKKEYFRWQYAHKIVKIAKEKGKAIVIEDLEIKEKGKRRDFSGRKSRRIRHSFSYKSLLSKIKALAKREGIEVIEVNPSYTSIIGMLKYAPQYMITKDIAAAYVIARRGLSKEKKYQAII

SEQ ID NO: 26620 - protein, 457 aa, unknown
  TnpB Polypeptide
VSSPGQFLGNEERRLIPPAIPGGGIKEIKHNNKRTIVVRLLPNGFQERKLRRLADTSAKLFNEVNYERRQEFFHEGRVDFKGTYDKYYEKYRGELGSANAQQVLNKNNEAWSSFFSLLKLRREGKLPPHMDRVSPPRYWKNETGERKPLLVVREDNYVVDEKNHKLILKYFNMKISFTGRLRWLGKQGRLEIYYDEVRNAWYASIPVEVGVEKTKTGRRSKHVVRGERKSIQVKSPKGSKMASIDLGINVLASVVIDDGTWLLYKGVRAKEDYFYFGKRIAEAQSSADKVKNLGEYEAYYELNRERRRLFKKLTRRLLHLYRNFASHLLRELHERGVSTIYLGYPFNIAQDKGNKFTVNLWSYRKLMEVIELKAQEYGIRVFEVVEYNTSRICAYHGVEVVRGPRGVVNCPKGHKLHSDLNGALNILKKATGIVISAIKKPLSFIVDHNRVAPVKGA

SEQ ID NO: 26621 - protein, 395 aa, unknown
  TnpB Polypeptide
MLKAYRYRIYPTTEQKVLLAKSFGCCRWFYNFALNLTNETYKATGKGLSRNEIINKLPELKKELEWLTEVPSQVLQQVALDLSRAFLNFFEKRAKFPNFKKKGNRQSIRFPQGIKLDGDYLTLPKLKKVYCKVSRLPEGELKSITVSVNPSGQYFASCLYDDGKETTSPNSDGKTIGIDLGLTHFAITSDGSKHGNPKYYRKYEQKLAKKQKQLARKQKGSNNRHKARKAVAKVHEKITRCREDFLHKLSRKIVNENQVICVENLAVKNMVKNHKLAKSVSDCGWGQFCTMLKYKAEWEGKIYLEVDRFFPSSKTCNNCLHQIDKLSLDIRSWKCPKCGTIHDRDINAAINIRDEGLRILKAVGHIATASGERVRPSKGTAFTRHLSVKEESSRL

SEQ ID NO: 26622 - protein, 599 aa, unknown
  TnpB Polypeptide
MSRCSARPSTATPVTRSVWWRRWRRWPSNCAQTSRRPRSLWRIAAYTARRTSPVSRRRECAGSAGSRRPPRRRARRWRSPTAAGSRRGRCSGPECPRRLPGNAGWWCARPMASSGHGRRCSGRSSRRTRRGRSASGISVPSASPANQMRRRPLPSSSRNAPRGSSYTAASSPIRNSTDRDAHAPARPPTGPSGRSRRAWRWMPRPSPTPCNARRPSWSPPMCSTRRSSRIRTSFRPTKSNTAWSAGSVFSKIRCFWPPRSSSKSPVGSSRSASSWCCVCWCTGSRSTDCASSSLPPGRRCPTSSNSRRIVPPCVGCSSVSKASAWWDSLYPTGHRTGASLAWSRFMSKWSPYWERTVRNSTKSLIEAAESGLKLSKIGRLPIRPSPHLVASAPARHTQGSHDRAAVTIAREADGWHACVSCADVPTASLPLTGKETGVDVGLQVFLVTADGVHIEHPRHLRTADRRLRRVQRCVSRRKKGSQRWRKAVGQCGKKRQQVQRQRSDFHHKTALALVREYASTTRSIWKTYTPHEPPPQGETRRRRRLSQDWGQGKDGTQQVDQRRRMVGVPAYPHLQGSMGRQASGNNPSRVHHAGWQWMR

SEQ ID NO: 26623 - protein, 413 aa, Geitlerinema sp.
MINLTYQYKLQLTQQQQQTYDEWLETSRRVWNYALAERKDWYKSRACPIDRCSLRGEYVIRADAPRPSFSSQCKALTQARKVYPELGTANAQMLQQRCDPAPSHGARERAPREVLRRLEKAFVSMWERGHGFPRFKKPGRMRSLLFPQLGKDPVRGNRVKLPGVGLAKMRLSRPIPEGFVVKQAQVVKRASGWYVMLTLQCDVDVPEIAPHGEALGIDVGLSHYLATSAGELVPNPRFFVDLQRKLRLLQQRASHKVKGSNNWRKAHHKVAKLHEYIRNGRQDFFYKLAHHLCDGVGMVFAEKLNFKAWARGMFSKHTLDAAHSEFLRILKWVCWKRGVFYAEVDASGTSQACPSCGTNTGKKDLSVRVHQCPECGYTTDRDIAAAQVVRQRGLAAVGQTVKMLGEGLSVGSP

SEQ ID NO: 26624 - protein, 412 aa, Lactobacillus sp.
VKGGERNMEQTVNIKVKLNILEPNGGMKFSKTMEQYRLACNYVSKYLFDNHFPLNKNEVQKAIYNTIREKFNLKSQMTISCIRGVIARYKTVKAQMKRNSYKYQDINTGEWYRETRDLTWLQKPIIFNRPQVDLQRNRDWSYLSNGQLSINTFDGRVKVNPVCHGFDQYFDGTWKFGLAKLLKTGGKWYLHISATKTVANFDNQTVKHVVGIDRGLRFLATTYDEQGKAVFFDGKAVMRKRAKYQKLRAKLQAKGTKSAKRRLKKLSGRENRWMNDVNHRLSKTLVQKFGANTLFVLEDLTGVSFERTDLPKALRNQNKSWAFYQLEQFLTYKAHLNNSEVIEVSAKYTSQRCPKCGTIKKSNRNHDLHEYHCSNCGYRSNDDRLGAMNIQLLGTQYISGEAQPKFELTTNA

SEQ ID NO: 26625 - protein, 427 aa, unknown
  TnpB Polypeptide
MIAHKIRLDPTDAQARLFDVWAEASRRAWNWALSEWERQHFDRAGGQRFKRVGKAGRVPVGEPWSPDPERPAPSAAGLSRLLTEVRREAPLGAVRWMRPPIPARVYRQPIRDLAAAWSAYHRRRALGQRRGGPSNPFGGPVPKRTDTPRSFYLSGQDIEIDGGYVELPFGHRVRLREAPRFRGRVVGSTFSERAGCWSVALTVEFERKRQEPPAGTHAGVRLGEATLATVGTRTAAVSPDGAGAGRALLAVNGPTAYARDLRRLRRLSKDVSRKVRGSHNRRKAIQRLRRHHARLANLRRDALHKLTTAIVRRVASVGVEDAADVLGGEATSRAVADLGFYEFRRQLEYKAAEAGVEITVVEKLFPSSRICSACGETHQRAKERWRGVGRWTCEHCGTEHDRELNAAVNLDPVSFGAGAGGPELPVR

SEQ ID NO: 26626 - protein, 264 aa, unknown
  TnpB Polypeptide
MTDWDGNRICFPNVTFPYGQTWIESWLKERKGAIALEIVDCGNAWQIRCILTEEAENMNNYYGDGTIGIDINYDHIAMTETDQSGNLLHHEIFRYDMEGKRSGQIKHQISESLEKIFQYADQQHKPVTAENIKSIQRKKFYDKHRKRHWHISMFASACIRELMISKAVKHHIGVKFVHPAYTSKAGKMRYLRRYGLTVHEAAALCIARRGQGYKESIPSYLKPYLTNKKVRALIPQQWGSLTKLINKVTTQDLLTYQDPVLHRN

SEQ ID NO: 26627 - protein, 357 aa, unknown
  TnpB Polypeptide
MILTYKYRIKDSTVGKRLDRHSRACNFVWNYCCQIQREAQSRWVAGRAVRWPSAFDLIKLCTGAAADLGLHSDTVQTICRQFAASRDARHKCPRFRASFGPKRASGWIPFIPRAVKVDGTHVVYLKRKFHFWKSRDLGGEFKAGCFTQDARGRWYAAFQCDVADDLPTGNGEIGVDLGLKHLATCSDGRKFPALRHYREYEERLAVQQRAGNKRRVRAIHARIANARKDNLHRISSMLAADNSLIVVGDVNASKLAKTRLAKSVSDAGWSMFRSMLAYKSARHGAVYIEADERWTSRTCSRCGAIPDSSPKGMSALGVRHFECSDCGATHDRDVNAALNILRVGRERSPPAVEIPAL

SEQ ID NO: 26628 - protein, 539 aa, unknown
  TnpB Polypeptide
MEQLEYNKQLKKYHKISPRHVLVLETNLSVQEKGRIFHYSKLEKNSNNELTHIMSKRLEQLTRTKKYRNLKRLYGKYVKEDLKEKMRGIALELNRMQQEYNVTWNYCRTYMIKLSKKYHLDSIFALTIAENVWRGVEKCLYSDGTKLHYLKKEDFPSIRAKQINRGIILFVKDNQLNFKFKDIKFGVKIKDRFENDEVCAVVNYLENSNNLDKLAVETMENTGECISTYRPCYATLVCKKIRGKLRVYVHITTEGTAKPKCDKNGDLKHKLGVGKVGCDIGTQTIAYTSFSKVGLKNLAERGSSVSKNERKERLIYRAMERSRRINNQENYNEDGTVKKGPKIWHYSNRYKKLRIKHQKLNRVNKINRHLAINEDVNILRSLGNIFITEPKNAKKLQKRAKITTINFKGKINRKKRFGKSIKNRCCGYFQSQVEKKFKNTGGAYIEVPNNYCASQYDHTADLYIKKKLSDRMLKLEDGTEVQRDWYSSYLLYNINLEDRNIDKVEVKKNFENMYLKEQKLIEWIKNNRIKILNSGIKFA

SEQ ID NO: 26629 - protein, 437 aa, unknown
  TnpB Polypeptide
MNKKINIGCQQNLLRPDKDLGAILEYLCGEANKVFNCSVYYARQIWFKENRFVDRVELCRQMKSNRHFRAMYASSAQQICNGVVEALVSFSQLLKLFKEKKLENKPRPPKYRKKGLFSVSYPKKWLKLTEKGIRVPLGKSVKAWFGLENFYLPMASNLDWEKIKEIRILPRHGCFYVEYVYQRESTLEDTQGVDHEKVLGIDHGLDNWLTCVSNAGTSFIIDGKHLKSVNQWYNKQIATVKEGKPQGFWSKRLANITEKRNRQMRDAVNKAARLVINYCLLNGIGRIVFGWNKGQKDGINIGAKNNQKFVQVPTAKLKERIKELCEFYGIQFIETEESYTSQASFIDGDIIPVYGEKPGNWKASGKRIKRGLYRTRNRVLINADCNGAANILRKVAATLGLSLKGVSSGALTTPVRVHYWATCEPPSMQERGESKYI

SEQ ID NO: 26630 - protein, 400 aa, unknown
  TnpB Polypeptide
MKSYKTELDLNNKQKTACLRHSGVARFAYNWGLRRKIEAYQAGEKTPSAIDLHKELVVLKKIELPWLYETSSKVPQHAFRHLDKAYQNFFRKCKNGSVKKGFPKFKSRKQGIGAFTLNGYIRCFEKGIQLPHLGTLRLKEANYFPTNITVISATISERAGHWFVSILTKEEPFRQSGTETIGVDVGIKTLATLSDGTIFENPRALKKAEKKLKFLQRSVTRKQKGSNNRKKANLKLAKQHLKVSNVRKDSLHKVSDAIIKRSALIGIESLNVQGMMKNHCLAKALSDAAMSELHRQIRYKASWARVPVVEADRWFPSSKLCSECGSVKSVLLLSEREFVCDSCGSVIDRDLNASVNLRNLAVSSTATNACGGFEGQTQPMKQELDTTFKVDKFQRTVLNG

SEQ ID NO: 26631 - protein, 380 aa, unknown
  TnpB Polypeptide
MLTPTPEQGDILAATAREFTDAFNLVCAHGWQAGEKNGITLHHATYREAQAVCPALPSNLHIQARVKATEAIKSTLTRQRQGRRVSCPHSIACPPRYNERTYRLDWASRTMSLSTVEGRLHIPFRVPPYAARYADHPTATADLTYKRGRWYLHVVVSMPAPEVEPTATVVGVDMGVTRAAVSSDNRFHGERRWRELEARDFRLRRALQKKGTKSAKRHLKRLSGKTARRRRDHDHVVSRRIVDGVPQGATIAVENLTNIRSRVKARKANGGQRRLHSWSFASLRAMIVYKAEERGIRVEGVDPRHTSQTCHRCSFQHRSNRRSQSEFWCRSCGYRTNADRNGALNIATKLRASRGMTAAGGPLSIGLSCPTPVEAQAVCF

SEQ ID NO: 26632 - protein, 257 aa, unknown
  TnpB Polypeptide
LWYFFGFQCVKLPCNKKIKKYKSFTLKQSGWKLNEADNSIIIGKQRYRYAKSRKIDGKIKILTIKRDALGDIYLYFVCETSENEVLARTGKSVGFDFGLKMFLNASDGKDIASPLFFKQNANAVKRANKNLSRKVKGSNNRQKAKLTLARLHKKIANQRNAFHWQVAHRLVAEYALICLESLNLKAMQKRFGRKISDLGFADFVDKLKYLSNKTGSTLPAKYVQHADTRTPKSKIWKSESGFVLNVAALIIGTGTLR

SEQ ID NO: 26633 - protein, 543 aa, unknown
  TnpB Polypeptide
MIRPLADCFLLVLYRDKMYNLMSGLQEQQQRGLFVQVPRRVVPEVPASRAGQARRCAAESSDSRDSRGSPVRSDRTGSDARSCPPSCGSGPAVWRPSAGPGDEGSKLPRAAQGVSFAGHAPAYPLDELVFRFDGWRFAACRGQAIHREPEAERTMTHRKVFRFRMKPTAQQRESLARMAGSRRYVWNWALAQRNTHYRETGKGLPAAELSARLTALKQQPETAWLGDVDSQAMQQTLADLQRAYVNFFEKRARFPRFKSRKRDRARFRIPQRVRIADGRVYVPKVGSVGIRQSQTVDGETKSATFKRDATGKWDVTLVSEFTMPDTLLPSADPSCVVGIDLGLKDFAVLSNGERIPAPQFFRKAERKLRRAQRVLSRRQKCSTRRLRAKHKVALVQRKTANQRKDFLHKLTTDLVVKYEGVCIEDLSIKGLVRTKLAKSMTDASLGEFRRQLEYKTIWNRRYLAVIDRWYPSSKTCHVCGAVNAALTLADRSWTCECGAHLDRDLNAARNIRAEGLKILAAGNAESKRTGSRYKTSAVGGARC

SEQ ID NO: 26634 - protein, 543 aa, unknown; identical to SEQ ID NO: 26633
  TnpB Polypeptide

SEQ ID NO: 26635 - protein, 334 aa, Microcystis sp.
  misc_feature (47)..(80): Xaa can be any naturally occurring amino acid
VRYGKSLFLPILPNTRTRVAIAAHFGLCKISLQQSSPCQNTSMVRKXXXXXXXXXXXXXXXXXXXXXXXXXXXXXXXXXXPDGCEPSTVTVRLHPSGRWHISIRFDDPTIQPLPPTDKAIGIDLGISSLVITSNGDKVSNPKHFKKHYRRLRKAQKSLSRKQKGSKNREKARIKVARIHAQITDSRKDNLHKLTTQLVRENQTIVVENLAVKNMVKNPKLSQAISDVSWGEITRQLAYKCRWYGRNYIEIDRWFPSSKRCSNCGHIVEKMSLNVREWDCPDCGTHHDRDVNASKNILAAGLAVSVCRATIRPEQSKSVKAGAEPRKGKKQKPKS

SEQ ID NO: 26636 - protein, 366 aa, unknown
  TnpB Polypeptide
MDAEAYEKLKATQDSFRKACNFLAGIVRQDEKREKRLWQRYNLHHEAYYQVREAVPELGAQLTCNAVRAVSAMYKSLLSNSPKLAMNKGEPLPEIVFKNIGIHLDARTLTFSADRQSASVFTTQKRVSVRLCPGAFQKEILDSGKWAECELVFKKDGNGRRWCQLHIAVERKLDVPNLSRLKEEEVLGVDVGENNLAATSDGHLFKAGKLKNDRDKFLSHRTRLQRNGSRNAKRTLKRISGRERRHVEQVNHVVSKQIVKEAKAKGKRLIVLEDLTHIRERIRATLRVRARLHRWPFRELQQMIVDKACRVGIRVMLLTPNTQARPVRHAVPLESVKSTGSNATVVTVRTATSMQVEICRVWVTGW

SEQ ID NO: 26637 - protein, 425 aa, unknown
  TnpB Polypeptide
MERELRKIVELNILPLSGVKKDRLDTLFSTWQSACSTLFDAIEYWDGFAYDLPLTSVNLHHQTYNGMRVDTGLPSQLLECARREVFARRKQTRTVNVPIRYDNRTMRFGSTENGNPIVAVTTMVKGRTAIPLKQDGTYKRYLKFRTDGWNCNSVLMLKRNKSFVIQIVFTKTVTLKEPSAFKNIVAVDIGSTNLATVVVYSPAEKRVLRSFYLGRDVAPRQRAFENRRAKLQSYGRIKELRHDQNNFTKTRVHQIAHQILDIAKQYNGCLAVEDLDGFTDIHYTVKANRKIHRIPTRLGEVIGRVGIENGVPMLVENPAYTSQDCPKCGNRHKVSGREYHCPKCGWTVNRDRNAGENIALRATNHFSRQDMVFGQKPRSRVAVTPPVRSDEGCVVMVSQTYRPPVECPAPEALTRGFASATFRAR

SEQ ID NO: 26638 - protein, 525 aa, unknown
  TnpB Polypeptide
MKRAKTPTFLLELPLQVDWSQERHVRAHLEAARCLYNALLSQAMKRLRCMRNDPAWNKARAIPRSHKQKRAQAFSALRTKYHFSEYEMHEYAKSARVSWIADHIDSTMAQTLATRAYQAANRVCVGKAKRVRFRSKGRGIDSVEGKRNDAGMRFVLDPNAGDGGFLIWNEQVIPVIINWLDPVIQHGLRHKIKYVRLLRHKTSSPSAQGADHDGNRYDVQLVLEGHAYVLPKHEEVGKQTIGLDIGPSTLAIVPREGKADLVTFCEELAPDARRKRRLQRKMERQRRANNAENYDEKGRVKKGKGRLKWKESKRYQATRRQHANTERQLAAHRKSLQGNLAHRIASVGNTITIEKTSFKGWQKQYGRSIGLRAPGMFVAHLTRIVAKTGGTLHEASAYQTRLSQYCHQCRQYHKKPRSERWHQCPCGFGPVQRDLYSAFLLTYLEPQQTIPSITQPVWEGAEPRLQAVMEELQQRANEGQHLPRSMGLVARRKSGAARAGARRLKSPAYLHQEPVSPSGEAGNGG

SEQ ID NO: 26639 - protein, 181 aa, unknown
  TnpB Polypeptide
VRQKKGRNSRKTKRKIVRLHRYIADSRRDFLHKTSTKIAKNHSIVYVEDLKVSNMSASASGTKESPGKNVKQKSRLNRSILDQGWYGFFQMLSYKLEQRGGKLIKVDPKSTSRTCPRCGLVSAENRKSQATFACIGCGFRSNADEVGAINVLRSGRAQLACAMSGAVRPLSAGTRRDPLQH

SEQ ID NO: 26640 - protein, 217 aa, Thermocladium sp.
MWGVEETKTGKKSEYVVRGERKSIQAEAPKGNKIASIDLGINVLASVVVDDGTWLLYRGVRAKEDYFYFQRRIAGGVQSMAGRAKNVGEYEAYEELAREKRGGAFKKLYSRLLHLYRNLASHMVRKLYELGVSIVYLGYPFNIAQGGKGNKFTVNLWSYRELMEAIELKAQEYGMKVFEVVEYNTSRLCAYHDVEVRRHPRGGVVSCPRGGISCTAT

SEQ ID NO: 26641 - protein, 436 aa, Escherichia sp.
  misc_feature (86)..(111): Xaa can be any naturally occurring amino acid
  misc_feature (360)..(363): Xaa can be any naturally occurring amino acid
VKRLQAFKFQLRPGGQQEREMRRFAGACRFVFNRALARQNENHEVGNKYIPYGKMASWLVEWKNATETQWLKDAPSQPLQQSLKDXXXXXXXXXXXXXXXXXXXXXXXXXXFRYPQGVKLDQENSRIFLPKLGWMRYRNSRQVTGVVKNVTVSQSCGKWYISIQTESEVSTPVHPSASMVGLDAGVAKLATLSDGTVFGPVNSFQKNQKTLARLQRQLSRKVKFSNNWQKQKRKIQRLHSRIANIRRDYLHKVTTTVSKNHAMIVIEDLKVSNMSKSAAGTVSQPGRNVRAKSGLNRSILDQGWYEMRRQLEYKQLWSGGQVLAVPPAYTSQRCAYCGHTAKENRLSQSKFRCQVCGYTXXXXTSQRCACCGHTAKENRLSQSQFRCQVCGYTANADVNGALNILAAGHAVLACGEMVQSGRPLKQEPTEMIQATA

SEQ ID NO: 26642 - protein, 457 aa, Microcystis sp.
  misc_feature (152)..(185): Xaa can be any naturally occurring amino acid
LSHRPSVSLNRKQSFFLFATDLTLLTDLVRIEYRHTHLNPMKARYQYRIYPTDQQKRLLSQLFGCVRVVWNDTLAYCQELYRQGEKKPKYTELSKRLTQVKKTEEKQWLTEVSSIPLQQSLRDLETAYSNFFTSCKGERKGRKVKPPKFKKXXXXXXXXXXXXXXXXXXXXXXXXXXXXXXXXXXTKKRKSKQSARFTDNGFTINQYHVTLAKIGDLRIVWSRPLPSKPSSVTVIKDAADRYFLSFVVEIHPETLPNNGESVGIDLGIATFATLSTGEKIDAPKPLKKRLKRLRKAQKNLSRKQKGSKRREKARKRVAKIHAKIKDTRTDFLQKLSTRIVRENQTLILEDLNTSGMVKNRKLSRAISDLGWRSFRDMLSAKSGKYGRDFRIISRWEPTSQRCSCCGNIGGKKALNIREWECLFCGTFHDRDVNAGLFSTLCDNFCLWNREMLIGQDF

SEQ ID NO: 26643 - protein, 305 aa, Bacillus sp.
MAQSVMKTVIARYKSVKTNGHDWAKIRFKKPEYDLVWNRDYSLTKGLFSINTLNGRVKVPFETKGMEQYFDGSWSFGTAKLVNKYGKFFLHIPMTKEFPEISEHTVSKVVGVDMGINFVAVSYDSNGKSLFFNGRSIKDKRSKYKHMRKQLQRLGTASARRKLKRIGQKENRWMTDVNHSVSKALVERYGANTLFVVEDLTGVRHATERVRVKDRYETVSWAFYQLRQMIEYKACIVGSKVIAVDPSFTSQTCPKCRHTEKASRNKKKHVFCCKTCGYTSNDDRIGAMNLQRKGIEYIAEVTAQA

SEQ ID NO: 26644 - protein, 248 aa, Bacillus sp.
MKLPKLGLVRYAKSREVEGRILNATIRRNPSGKYFVSLGTEAEVSEWPKTRSAIGVDVGIKDFAILSDGTTYSNPKFFRSLEEKLAKAQRIMSRRTVGGANWHKAKKKVARIYEKIANARRDFLDKVSTDIVKNHDIIGMEDLSIANMLKNHSLAKAISEASWSQFKTMIEYKAKWYGKQVVTVAKNFPSSQLCSNCGYQNKDVKNLGLREWDCPSCGTHHNRDINASLNLKNEAIRLLTAGTAGLAY

SEQ ID NO: 26645 - protein, 419 aa, Bacillus sp.
MSVGDSQNLPHYDIIRTNVPKGSEVNVIIVHKAYKFRIYPNKKQMELINKTIGCSRFVFNFFLAKQKEKDAFWYICEEMVQNGQLPINNWKGKYFNKKETKKSLPELKKQYEFLKEVDSIALQKSVENLADSYVRYYNKQNKQPRFKSKKNPVQSYTTKHVNGNITVEGNYFKLPKLGLVRFAKSREVEGRILNATIRRNPSGKYFVSLGTEAEVSEWPKTRSAIGVDVGIKDFAILSDGTTYSNPKFFRSLEEKLAKAQRIMSRRTVGGVNWHKAKKKVARIHEKIANARRDFLDKVSTDIVKNHDIIGMEDLSIANMLKNHSLAKVISEASWSQFKTMIEYKAKWYGKQVVTVAKNFPSSQLCSFCGYQNKDVKNLGLREWDCPSCGTHHNRDINASINLKNEAIRLLTAGTAGLAY

SEQ ID NO: 26646 - protein, 424 aa, Halobacteriales sp.
MANQTVTRTHVASIRNQRQVRDDLDSLGFAASKLWNVARWTAERIWSETGYIPGHAELSSYLKSHERYADLNAQSSQRVMQELAEAFKSWYGHRQNGNSKANPPAYRKRGDEHPRSTVTFKQDGFKHDAENGRVRLSKGRNLKDGWSDFILCEYDADPDVDIENVQQVRAVYNRDEWRLHFVCRKTIDPEPSGDKTAGIDLGICNFAAVSFGGESLLYPGGALKEDEYWFQKERAKCDNSASTEAERLDRKRTDRRTHFLHALSKDIVAECVGRGVGTVAVGDLSGIREGEDTGAPRNWGDSGNLALHGWAFDRFTQMLEYKAEAEGINVEQVDERGASKTCSACDTENGSQRVERGLYVCESCETVANADINGAENIREKVLPSLAPDGGDRDNGWMAQPAVRLFDKTTGRVRPQEQVVDREP

SEQ ID NO: 26647 - protein, 350 aa, unknown
  TnpB Polypeptide
MIDEMWQIHVHILLLERRYYRMFGKNVSAYRLNRHVAKLKKRTKPHWADLPSQVVQDVVLRYGKSQDAFFQNKKDRKAGKTNRKVGKPKIKPRHKYNSMTFTQTGYALEENRIKINCIDTWFSFHKHREIKGLIKTITIKRDRCGDYWIYFSCENVGDSKPKSKTGKSAGFDYGNKTFLTSSEGDKIESPQFFKQSLKTLQSLNKALSRKVKGSNNWYRACRALARHHRKVARQRSDWQWKLATELCAQFDTLCFETLNLEGMKRLWGRKVSDHAFYQFLQILEQKCAKHGKNFVQIGQWTATTKPCSDCGYHNKELSLNDRQWTCPECGSHHDRDINAAINIKQAGLAA

SEQ ID NO: 26648 - protein, 436 aa, unknown
  TnpB Polypeptide
MKLTGDLKALEMSISIYRQTLSYIIPIINNKWDVIKDCQYTNQKSNIIEKWIHSTKNNQARFDFDVQFPKLPSYLRRSAISKALGVVSSYRSNFENWEKEPNGQAPKLSLTHYDYPAYYKDNLFRKFDPISQTIELKVFKNGDWVYDVYRLKTSDCTYYQKHLANKKQNVPIIQKRGRCFYATFSYEEETVLIPEEFIHKICAVDLGLGTDATCSIMNEDGTIYARKFISFSEEHDRLHTQIGRIKRNQKRGSRHNKMLWRKVAGLSQDIADKTVKEILEFGNAYGVDAYVLEYLDFKGKNIVKRAHFWRYKRIYKVLTQRAHQFGLRIARVNARNTSRLAFDGSGLSKRGREITPKTPYALMQFTTGKTYNADLNASYNIGARYFIRRILKTVTATQRLALEAKVPQVAKRSTCTLSHLINLRSELAALTARIQA

SEQ ID NO: 26649 - protein, 448 aa, unknown
  TnpB Polypeptide
MPNLTHKITLIPTKEQKEYFAKAAGTSRKVWNWALDEWNKQFAQGKKPNAMALKKQFNAIKYELFPWLKEIHRDAHAAPFEHLGIAWTTYFRELKRGTFRPKPGKEFNPDKGKPNFKNKGRCTDSFYVANDKFSINDRTVRLPKTGKVKMTEALRFTGKILGATVSRQADKWHIAVQVEVSNETYSLKRVKNNTNGVDLGITSAVTLSNDQTFQSPRPLKSALRRLKIRSRKLSHKFETAKVLAGFDPKKPLPKGTRLDKSNNHNKLARRIARTHVRITNIRSDFTHKLTSILCRENQTLVIEDLDVKTMQKNHRLALSISDIGFNRIRSQLEYKTKRYNTELIIADRYYPSSKTCSTCGYKVSELPLSVRNWQCPSCNTNHDRDINAAINLKRLVTKTTLPLASLSGNGSTDSEMVSVSVGKVTPVIYEYGFQSDSGQEQNLDQIHI

SEQ ID NO: 26650 - protein, 402 aa, Escherichia sp.
VKRLQAFKFQLRPGGQQEREMRRFAGACRFVFNRALARQNENHEVGNKYIPYGKMASWLVEWKNATETQWLKDAQSQPLQQSLKDLERAYKNFFRKRAAFPRFKKRGQNDAFRYPQGVKLDQENSRIFLPKLGWMRYRNSRQVTGVVKNVTVSQSCGKWYISIQTESEVSTPVHPSASMVGLDAGVAKLATLSDGTVFEPVNSFQKNQKTLARLQRQLSRKVKFSNNWQKQKRKIQRLHSRIANIRRDYLHKVTTTVSKNHAMIVIEDLKVSNMSKSAAGTVSQPGRNVRAKSGLNRSILDQGWYEMRRQLEYKQLWRGGQVLAVPPAYTSQRCACCGHTAKENRLSQSQFRCQVCGYTANADVNGARNILAAGHAVLACGEMVQSGRPLKQEPTEMIQATA

SEQ ID NO: 26651 - protein, 500 aa, Rhodococcus sp.
MRTTAVLADRTVDVAAPDRSRLVIRAFVYVLDPTPVQVEALRSHCGAQRFAYNWALSQVKTNLDQRTAERSYGIPDAELTPSMSWSAYSLRKRWNTVKDDVAVNPETGKVWWPENSKEAYSSGIATCAAALSNWSDARSGKRNGSMGFPRFKSKRAVLSCRFTTGRFGLVTDGGDRRHVLLPRIGAIRTFESTRKLARKTIAGSARIRSATLSYRRGRWQVSFSVEITLPARALPPVAAGPRSVVGVDVGVKHLAVLSTGEMIDNPKHARKRAKRLRRLGRRASRRVGPDRRTGQQPSRRWQRTQDQIRAVHTRIADARRDHLHKLTTALVRDFDTVVVEGLNVAGMTRSGGAHKRGLNRALQDAAVAEIRRQLTYKTDWAGTGLHVADRWYPSSKTCSNCQVVKVKLPLNVRVFLCDACGFRADRDHNAALNLAALAAVVDGGASSASCGRDVKEARQKPTIRPATRRADGIAAGTPHSGERGRGNPDTHAECDKQHSA

SEQ ID NO: 26652 - protein, 415 aa, unknown
  TnpB Polypeptide
MKIIKYTYKFRLEPTDEQKILLNKHFGSVRWTYNYFLNQRKDEYLNNKKSLNYYDQAKELTQLKKTNEWLKEINSQTLQYSLNCLDIAYQGFFNKRTQFPKFKSRKSKNSFTIPQNVRYNDNKLIIPFFLEGIEMIMERKIKGIIKRANISKTPTGKYFVSILTEQEYQPLQKTNQSVGIDLGLKDFLVLSNGTKIKNHRFLKHYERILKLNQKYLSRKTKGSTRYEKQRIKVARIHEKITNSRQDLIHKTTTNLIKNFDIIYLEDLNIKGMSHRCKSKQDENGKYLPNGQSSKSGLNKSILDTSWGTFINILEYKVSWNDKQVIHIDRFFPSSKTCSKCGWINNGLTLKDRTWICLKCGEKHDRDFNAAINILNEGYRLNNISVGTTDYERGAKIRPKKLGTSNETLKEKELIS

SEQ ID NO: 26653 - protein, 435 aa, Acinetobacter sp.
MKINKAYKFRLEPNAEQEVVLNNLLGSARFVWNQILAVSFEMLAKNERITKDNLVKKIPDLRKKPECAFLEKSSNGVSLQQKVRDLGSAWDKFFNPKEQAKLKQKPFKAKKPRFFKLPDGSELQLRSLMPRFKKKSDGYDSIRIVQFDRYCGIDGNRVKLPNGVGVVKFRKSQEIIGTIKNVTISKVLGRWYISFGAEKELTEMQVHPSKTAIGVDLGIKKLITTSEGDVFKPINSFKSNQVKIAKLQRKLRKKTKFSQNWKKLNLKINKLHHHIANIRHDYLHKVTTTLSKNHAMIVVEDLKVANMSKSAKGTIENKGKNVKAKSGLNKSILDQGWSMLVTKLEYKQQWRGGLLVKVDPKYTSQTCSSCGHVAKENRQTQAKFECVECGFSENADINASRNILSAGHAVLSVEGGCGKGRPTKQKASEIREEVT

SEQ ID NO: 26654 - protein, 427 aa, unknown
  TnpB Polypeptide
MRSTRVEKHVIHENNKFFHMLDEYCFLSKNLFNHANYIIRKNLSDTNTWIRYFELDKILKQDEEYPDYKKMCYSAAAQQLLRILDDAWASFFTAIKDWKIHPEKYLGKPEPPKYKNKKKGRCPIYLTNQACKIRENKYITFPKSFKGMKFEAMFLQKEEYIKFLQCRIVPRGNHIVIEFVYEVEVPPRLEDNGRYIGIDVGIDNLAAVCNNVDLPFYIADGKGLKSINNYYNKLISHYKSKLSECNTDKYDPNVVCKQKTSKRIKRITSKRNAKVDDYLHKASRWIINFAKDNDIHTIIVGKNDLWKQNVNLGKKTNQKFTQIPHQRFLNMLAYKAEAYGISVIEHEESYTSKTSFLDDEFPTKHEEYKGKRTYRGLFKSSDGTKVNADSNAGLQIIKKFNHNYNIDKSSARILLQRPKRINVSGTC

SEQ ID NO: 26655 - protein, 417 aa, Oscillatoriales sp.
MKRDAGAFKRRHLAFLICIQLVNIYDIIRNMIKVTRTIKLKFVNLNRCKAQMFEQMTEENTRIANKLLSLPIKERRKMTTAKIMSELKSSLVNQVIRHTTSPTGRKTNNYKVLPVEVNNQNWKLTHKANTYSISFPTLKGEKRIPIEVISSYWQSILDGLLEGKIEGGSFKLIKHRNKWYVYLSITEDVPEVKTEKRLGCDRGQNNLAVVAPKKGFGKFFNGQSVKHRRRYFQQRRKQLQEAKKFRALKKWNKKEQRWSEAINHTISRRIVRYSWSYYSLEQKLGYKLALKGLKLIKRPAPYTSKSCSTCGVIGKRNRHDFNCPNGHYHNSDLNAAKNLAQWDGFSCDLNLQKGVSVMDSSGLNYGALGTPPNSMNTVQKEYIQLSLFDGARSENPTPKRVSVGVGVSTIRLPKNLG

SEQ ID NO: 26656 - protein, 485 aa, Paenalcaligenes sp.
MVILTVELYQFCLKVRTDARKEVTQVVKNFFGEHTTAVLCHKDQVNVHVKNTVSTASNGVVFLHRLSIILSMKRLQAYQYELKPNGAQRRDMRRFAGACRFVFNRALAWQKDRYAADSTTKFSYTVLANFLPAWKKDKETEWLKHAPSQCLQQTLKDLERAYKNFFAKRAAFPCFKKKGQSDRFRYPQGCQLDQENSRIFLPKLGWVRYRNSREVLGTVKNVTVSHKAGKWFISIQTERDVEPPVPQGTSAVGIDMGVARFATLSDGTYYAPLNRFKRHETALRKAQQALSRKIKFSHNWKKAKARVQRIHSRIGNARRDYLHKATTAISQNHAMVCIEDLQVRHMSKSAAGTADAPGRNVRAKSGLNKAILDQGWFEFRRQLEYKMAWVGGWLVAVPPHYTSQTCPECGHCSKANRLTQAAFACVQCSFEEHADVVGAINVLRAGHAQFACEVSGAVMPPAAGTHRSDSGGSMPPLSAVGIPGL

SEQ ID NO: 26657 - protein, 493 aa, unknown
  TnpB Polypeptide
MGRAQAGRQQRRTAPAHSWPRARCAARSEAARQNMDSCSGWQARSSSFRAGYPGVQAGEESTLPSGVELLRERMQNIDMDVHRAFRYKLAPTAEQEVLFRQFAGVCRLIYNLALEQRRDWWRHYQRQTGCRLNYVAQARDLTVLRAEYDWIAAVSQTCQQQALRDLDKAFANFFAGRGRYPTPRRKGVNDAFRFQGREIETRRLNAKWSAIRLPKIGWVKFRDTRPMEGRLLNVTVSLDALGWHISFAREIEHVAPVNICPSVGIDRGIANTLTLSTGEMLSVPADLEAIERRHRAAQRIVARRKKGSRRRLRAIQRCTRLSAKRARIRRDWHHKASRSIAGRFGVVVMEDLRIASMTASARGTADAPGRNVRQKSGLNRKILDQGWGSFATILGYKLEERGGTLVTVDPAYTSQTCSACGTVDRASRKSQAVFLCQHCGFRAHADHNAAINILRRNTAFMDVEEGHWFSDEASTGSGFAPAENPPASAGGRC

SEQ ID NO: 26658 - protein, 228 aa, unknown
  TnpB Polypeptide
MNPRLTYDGLNWYLSIAVEIEDEIKPNLNNLSIGIDVGVKDLAILSNGIIYKNINKSKKIKKLEKKLKRMQRKSSKKYEKNKQGNKFIKTKNIIKLENKIRKIYKRLTNIRTDYIQKATTEIVKIKPSQIVMETLDIKGMMKNKHLAKYIQEQKLFEFKTLIKYKSNKYGIKFIEVDRWYPSSKTCSECGHIKSKLSLKEREFICEDCGIVIDRDLNAAINLSKYIVI

SEQ ID NO: 26659 - protein, 409 aa, unknown
  TnpB Polypeptide
VLVALRFRLYPNGKQETKMLQTIETTRHLWNDALAHRKARWESERRSTSYNMQASILTLEREENVELSSLHSQVGQDVLRRLDKAFKSFFAHRARYPRFKRRSGIGSFTYPQCYNGSVRPDKSRRRLYISKIGNVKAVFHRPLPKEALLKTCTVTREPDGKWFASLVFEDIVPLQDLVTNFVSPVGVDLGLKSLIVTSDGLEVAHPRFLRKAERNLKRLQRMLSHKKKNSKNRFKARQRIASQYAKMRRQRTDFNHKLSTALVRRHDFIAFEDLRIRNMVKNHCLAKSIHDAGWGQLVRLAEYKAVAQGKRVVRVDPAYSTQECFHCGSHNKISLDVREFDCVGCGRNLRRDHNASCIVLKRGLAKVGQDMPELKPVETRPLLVATTRGAGQVEEAGTIRPRGLEAHGL

SEQ ID NO: 26660 - protein, 366 aa, unknown
  TnpB Polypeptide
MVSVRKTIRCKINNPTKLKVSMISSELDRINELMQFQSVGLEYSDLYLNLKKKVNSGNLHEAERKLKKYKHSCMPLIIRKDLIKVKKTSNKLSKYWIRIPVKAKRGGIWLPISSQPFDFESYEICESKIYRKGKDWFVNITVQKDIELSDTYTSTLAIDLGEKYMGCSVNSSDTSLKPTFYGKEVRGIRRKYSYIRNKLQKKGLIKEVKRLGNIEKRKVTDTLNKISSRIVKEALTSNSLIVLGDLKGIRNYAKGKGRRFNRIVSNMPYYQLTSMIEHKANWNGVRVLKIPEAYTSKTCSKCGSRNTSRQKQSLFKCKDCGFSLNADLNGSRNILKRSNEYILSDGVSVNMPKTELINSEAYLLQR

SEQ ID NO: 26661 - protein, 340 aa, Planomonospora sp.
LPLSPPGVEDQDGAGFSVVLQQALGDLNTAYRNFFASISGTRKGPKAAAPRFRSKRDRRQAIRFTKNARFSVTAGGRLRLPKIGDVDVRWSRPLPSAPSSVTVIKDAAGRYFASFVVEVGDEPLPQTASEVGIDLGLTHFAVLSNGRKIDNPRFLRRAERRLKKAQQALSRKAKGSNNRKKAVVRVARAHAKVTDARRDFGHKLSTQIIRENQAVYVEDLCVNGLARTTLAKSIHDAGWSQFVGMLAYKAVRHGRTLTRIDRWFPSSKLCSACGVVAESLPLGVRSWTCSCGAVHDRDVNAAINILAAGRADRLNACGGRVGPPLAVAQADEAGSLRGAA

SEQ ID NO: 26662 - protein, 440 aa, unknown
  TnpB Polypeptide
MGWAKNKGKKQNNRLYLTRVVPLSPDVWLPVFEGPMLAATKIWNSCVWHSREARKKGEKYPTESELKEKFKSYESWKQLHSQSSQAVVEEYFEAVRSYVKHRDNGHEEMRPPGFKHKTILRTITWKRQGFDYQEGQLILKLSRKLDNMTVHLPEGSDILKLPDGTVLKGVPVEVKVKAVYRKKKVIGLELHVTWDLGLVPVVLAGKVSAYDLNSPLVARASTEGSQQLIICRELLALIQYRNKIIAEFQQKMSRCKEGSRKWRALLAAKRDKLKKLDRRIKQLTNALTKLMAELDHDEDITFSVLGDLTDIRRKARTGDKNKKASQKINQLPFSQIEQQHAYKSLLKQVCPDKISESYSSQTCSRCGVRNKSYRVHRGLWRCRSCGAIIHADLNGVNGIIKNYLFGRCDMRQVLRLKPPEVYRWDKRYNKFVKVSPRAAA

SEQ ID NO: 26663 - protein, 403 aa, unknown
  TnpB Polypeptide
MERLQAYKFELMPNGEQRRNMSRFAGTCRYVYNRAIALQQESQKAEGGYIRYEEMAKCLPLWKRDTDTAWLKEPPSQALQQTLMDLNKGFQKFFKKQAGYPKFKKKGQHDSFRFPDAKQLKLEENNKRIFLPKLGWMRYRKSRGIEGSIRNATISLRGGKWYISIQTQREMDEPIHPSQSVLGIDLGITLLAALSTKEAILPISSFRKMEEKLAHLQRQLAKKKKGSRNARKIRHKIQKCHVRIANIRNDHLHKATTTLCKNHAVLVVENLQVKEMSQSAKGTIENPGKNVKKKSKLNKSILDQGWGEFVRQITYKQQWMGGYVIKVAPQYTSQRCSCCGYTAKENRPTQAKFRCLKCGHTENADINAAKNIEAAGRAVLACGEMAIAVSKKQEPSEVIQALA

SEQ ID NO: 26664 - protein, 401 aa, Symploca sp.
VLVIEYKIKARLLQYQAINEAIKTVQFIRNKCLRYWMDAPKEAKIKRFDLNKYSTELRSKFTFVKDLNSMACQASAERAWLAISRFYDNCKSNKPGKKGFPRFQKNNRSVEYKTTGWALHSTKRRLTITDNKGVGELKLLGKWDIHTYPVSSIKRVRLLRRADGYYCQFCIDVECIDIQPKTGNEIGLDVGLESFYTDSNGHQEPNPRFLRKAESSIKQAQRRIYNKHIGSTRRRKARARYAKIHLRVSRQRREHALRLACNVCKSNDLVAYENLRVSNMLKNHCLAKSITDASWYQFRQWIEYFAKKFEKLAVAVPPQYTSQECSQCKQMVKKSLSTRTHICQCGCTLHRDTNAAINILHKAKSRGGHPRSNAKGVATSTLVGATLVEQVATMNLESPRL

SEQ ID NO: 26665 - protein, 271 aa, Microcoleus sp.
MYRAVKIRIYPTDEQESYLAQCFGNTRWLWNYMLNATTTAYKETRKGLSKAAMDKLLPGLKKEYEWLGLAYSQVLQRVTFNFSSAFVNFFEGRAKFPRFKSKHGKQSIQYPQNVKLMAQYSVIKFPGNLGLIKAVVHKDLPDAKFTTVTISRNADGRYYASILFNQEDTPVVAIRQAIGVDLGLKNFAITSEGSQYNLPKKQLAKLEKNRKRKQKKLARKTDKTSNKRRKAKLLVAKVSSKLARVREDFLARAISQDSIRKPSYLCRRFGS

SEQ ID NO: 26666 - protein, 410 aa, unknown
  TnpB Polypeptide
MKRMQGYKFELMPNGEQTRLMRQCAGCSRFIYNKALAWQNQQYQADNSFKFSYTKIANLLPQWKSELPWLKDAPSQILQQSLKHLESGFRNFFAKRADIPRCKKKGISDSFRFPQGFKLEQHNNRIFLPKLGWIRYRNSREVIGTVKNITVSQKCGKWYASIQTERKVEQPIHPSTTAVGIDVGIARFATLSNGDIFATINSFKQQQEKLARYQRALARKIKFSHNWNKQKGRITKLHSTIANIRKDSLHKATTMISQKHAMIVIEALQVRNMSKSAKGTIEAKGRNVKAKSGLNRSILDQGWFEFRRQLEYKQAWAGGRVLAINPRYTSQHCSCCGHIAKENRQSQAKFSCVSCGYEVNADLNAAKNILAAGYAVLACGEMVQQDRSVKHEPAEGIRKSSREPERIPAL

SEQ ID NO: 26667 - protein, 371 aa, unknown
  TnpB Polypeptide
MKLVAQVKLISTPEQKELLKHTLEMTNAAANYISGLAWEKYTFHQFSLHKIAYHATREKFPLTAQIVVRCISKVADAYKVGKAGMRVFKPFGSISYDSRILSYNLTASTVSIWTLEGRKTIPFVCGDRQRDLLQGQRGESDLCLVEGKFYLMAVCDIETPETKDIDGFLGVDMGIANIAVDSDGEIFQGKSMKGVRYRHRQLRQKLQKKGTKSSRRLLKKLSGKEHRFATWTNHNISKSIVAKAKDTGRGIAIEELGGIHDRVTFRRSQRATLHSWSFFQLRTFLEYKARLNGVKIVAVDPRNTSRACPACGHIDKANRPSQSVFSCVSCGFSGLADHIAAVNISGRAVVNRPNVSGAQSIVQRQGQSPRL

SEQ ID NO: 26668 - protein, 382 aa, unknown
  TnpB Polypeptide
MLMAVKYRIYPNKQQASLIHKTIGCSRLIYNLMLHDFYENDLIKTPAKYKNEHPFLKEVDSLALANSQMNLKKAFRNYKNNKEHFDKPKFKKKSHSKLTYTTNNQKGTIRIENNKLILPKFKSGIKIVLHRLIDGVIKSVTIEQVPCGYYTASILYDVPDTNKKPTLSKENIVGIDLGLTHLAITSDHKKYENPKYFHKLQAKLRKEQQTLSRRWEQNIEKYIYDNEGKVVKTIYKKPLRDCKNYQKQKRKVAKIHNKIKHQRLDNLHKVSHKIVKNHDYIVVETLKVKNLMQNKKLSKSIADVGWSMFINMIAYKTKRYSKELIQIDQWFPSSQICSHCHQNEGKKALSIREWTCTSCHTKHDRDINAAINIRNKGLELIS

SEQ ID NO: 26669 - protein, 358 aa, unknown
  TnpB Polypeptide
MAKAVIRIAKNQLKLLKESARYQFNNLYKRKYSLYKKITKLKALLSLSSTSLKQRKLTKLRLFWTQMKLNKINQLIANGVKLHLTFGTKHLLKTNKQKFFAKRDNQVVYIGDKHETCGNQQFQVTFNSKYNRFKYKLRLDNLWISGYEKYIYGSFVLKNKEAKLDILKTLSEKGSNPLTYRILKRQDALYLQIMYRRETTEITRSSHGVLGVDFNKGFISVSEINSEGRLQSLNRYNYLHQGKATKTKTSILELVSELVTQAVSIGKDIVIEDLISLDSNKKQKKTTSKDYNRMINSLKFGLFKRCLLSKAMKEGVSVHTVNPYNTSKIAKKSYTDSMKLNIHDAASYVIARRFYKYD

SEQ ID NO: 26670 - protein, 623 aa, unknown
  TnpB Polypeptide
VAKTQTLSFPMRLPDGQQAEALRLLDASRPAINQMLMELWPSLDLFAAERTGLAWKQVEKQLVSRSGHGSRQERCEMEQAGRILRAQATRKQVFLRVLPLLSEGLIRPAEGKRPAKKDYRAIKEQVHQLREASEDADAFMAMTNVVEQACNVFLETGIFPTTYEELQRVPVLAVGQLTFAGDDGMHAGQTYQARIEVSKFCDVATRQVHEQATLFLKLRAPTAQGKWAWGEWSEPIALPETVFQYLDQGAAPLAPTLREIHSADGSRVAILDLILEVPAKYVSALEQEQRVLGWDWGVRSLITVSILEQAEGDEPYRQISRPIFLDTGGLDGRQARLRREIDRLKACKERYGTLVSQAVKANAEHQTPLPLHFAHWQEQLRFYETRIKTCWKKYERRNRELAHLASNLLILLALLYDCRLICGENLTTLKTEGRGRGVRGRFRHWRNNTTVRGELWRVLKYKCHLLGIRARQVEARGTTHTCPHCHQPAKTYLSPALADRKKASDWAPWLCCSNPACMWNGARDYAASLNIARLGMTFLLTYHQTQRYQAYRMTDSSVKPASYSGAGATLLLPSQGITPRPPEGKHVCYAGWSYAISLRTSQKKPLLSLLSTSRLRKRVLRSA

SEQ ID NO: 26671 - protein, 558 aa, Mycobacterium sp.
VKPVAAPSGVAVSTRLRTTLVEDQILDQVAEHLGRLRRADLAAVCRPVPLDSGAEADERRQVRRTRLNTRKKRLTAQSSSRWASATIAGNDDQYRLARDAQYRHIAGLRAAIATIEARLAAPTTDLLTVTERKAQRKARRDVKTPKGYATQAERFQKQRRCQHLRGELAAAERDRAAGVIHVVEGGKRLATTRHHLEAAGLSADQWRHKWDAARWRITANGSPDEPFGNLTITVTPDGQVSIRLPKPLEHMANAPRGRFVLSGVAAFAHRGEQWAERITGANSISYTLTRRPGRSGVYLSGAWAIPAVPYWAGSESAGPGDDMYAVGPVIGVDLNDGHLALRRLDEHGNPVGAAERIDIDPTGPASRRDARVRHAITKLLHYTRRHGINAIAVEDLNFVDARTTGRESMGRGALGKRFRRTVSGIPTAVFRNRLAAMTTAAGIELFAVNPAYTSVWGGQHWQRPYKNVTRHQAAATVIGRRAQGFTARRRKGVTPQRPEDRSVRATNQTGPNSPTATGSRHEPRTRGTTSRRPNSTRTRQPGRATVTPALANNGQLQL

SEQ ID NO: 26672 - protein, 324 aa, Ktedonobacter sp.
MSRTNDMAKSLILICRRWWSIRRSNVSIAPSPTSFAVSKKVVQSVSLASRRHLDNGRFKAPGQCGGRIRVIVHRPLEGTFKFARLVLRPSGWYLQCVCETEPAPLSQKVNSVGLDMGLHYLVADSSGHIIENPKHAKKSAKKLARAQRKLARCKKGSHRRKKAQHHVARHHERMANQRKDTLHKAARHYVDGYQVIAIEDLQVANMVRNHGLAFAITDASWGMFRHYLEAKAESAGRQVIAVRPHYTSQKCSSCGKSVEKSLSVRTHVCSFCGYIADRDENAARNILQRGLQVMARTGPSSSRREGPEPSGESPSALKREAAGL

SEQ ID NO: 26673 - protein, 263 aa, Proteus sp.
MKRLQAFKFQLRPNGQQEREMRRFAGACRFVFNRALARQNEDHEAGNKYIPYTKMASWLIEWKSDTETQWLKEAPSQPLQQSLKDLERAYKNFFQKRTAFPRFKKRGKNDAFRYPQGVKLDQSNSRISLPKLGWMRYRNSREVIGEVRNVTVSQSCGKWYVSIQTEHEATEPPHESTSIVGLDAGVTKLATLSDGTVYPPVSSFKVNQRKLARLQRKLSRKIKFSANWQKQKRKIQTSAFSYCPISGKTTFTKSPSESAKITQ

SEQ ID NO: 26674 - protein, 386 aa, Proteus sp.
VTKTKWTCIRNTQCLPRRILVSFFIDQSIIGNMKRLQAFKFQLRPNGQQEREMRRFAGACRFVFNRALARQNEDHEAGNKYIPYTKMASWLIEWKSDTETQWLKEAPSQPLQQSLKDLERAYKNFSQKRTAFPRFKKRGKNDTFRYPQGVKLDQSNSRISLPKLGWMRYRNSREVVGEVRNVTVSQSCGKWYVSIQTEYEATEPQHESTSIVGLDAGVTKLATLSDGTVYPPVSSFKVNQRKLARLQRKLSRKIKFSANWQKQKRKIQRLHSHIVNIRKDYLHKVTSEISKNHAMIVIEDLKVSNMSKSAKGTTERHGRNVKAKSGLNRSILEQGWYEMRRQLEYKQLWRGGQVLGNTTCLHQSEVRLLWSYSKGKPPVTKSIRVP

SEQ ID NO: 26675 - protein, 233 aa, unknown
  TnpB Polypeptide
MPHSCAIDFGTDNFAAIVCGDQSSVIYKGGAVLSSCQWFHKQRARLVGILTKGSAYKNACSRQLSSLSYHHANFIKDQCHKISRSIINYCLEHQAGTLVLGVNKLWKQGSRIGNQNNQSFVSMPVTLLRELITYKALNAGIRVIEQEESYTSKADVTAGDYLPTYGVDDGNASFSGKRLKRGLYRCHDGRLVNADCNGAANILRKVFPDIWNQTADFGFLATPEVVGFHQLNP

SEQ ID NO: 26676 - protein, 283 aa, unknown
  TnpB Polypeptide
MSLDFKKQYGNITIKIPSNLKNKTIKEIRIIPKYNARFFEIQYVYEITVEQRNLKYNKALAIDLGVNNLTTCVTNKGKSFIIDGKKLKSVNQWANKENARLQSIKDKQGIIQTTKRQQNIWTKRNNRVNDYLNKAAKYIIDYCIKNNIGNIIIGCNSDFQRNSNIGKSNNQTFVNIPYSQLISKIQYLCKRYNIVFKKQEESYTSKASFFDKDNIPVYKPNNKSSYIFSGKRISRGQYQAKNGYIFNADCNGALNIMAKSKLVDMSILQCRGYLDQPKRIRIA

SEQ ID NO: 26677 - protein, 334 aa, unknown
  TnpB Polypeptide
MLNDLWKNKRYFPYTVELKIRGNDIYGYVTFGFPVPSTYITKNNGVIGIDTNASPLHLALAEISRDGNLVSYERHELHNFLLYEKNRKEYEEWILAHKIVNTAIEKQKAIAIENLNKVNKGYRGDGKAKLRKRLTKWNYKSLLSKIESVAIQKGVEIIKVNPAYTSVIGALKYAPILNIDKDIAGAYVIARRAMGFKERIPINYKKLLKDENYINYALERLNNEIQKLKEKIKQEKDKYKQNPLKQELNRILNDVKKLESFQSESSFCKGANGRNLEQTNKAWQVLRVALVIPVLGKVFTRDFSSLKTLLVLGDVDRVASRLVPAQADGATLRK

SEQ ID NO: 26678 - protein, 172 aa, Lactobacillus sp.
NLDNFLTDSNGSMVANPRFYRKAKKKLARAQRVLSRRQRRAKKEGRNLRLAKNYQKQRLSVARLHDKIRRQREDFLQVLSTALIKNHDLVVTEELRSRNLLKNHALSQAISDVGWRSFLNMLAYKADLYDKEFLTIDPKYTTQRCHACGSIMGQNGYKKLTLKDREWTCPIC

SEQ ID NO: 26679 - protein, 407 aa, Streptomyces sp.
VHRAYKFLLRPTVRQTQALSEMLRDHCSLYNGALRERRDAYRHSSKTSIKYGDQSAQLKEIRAFDPERQGRWSFSSQQATLRRLDKAMQAFFRRVKAGEKPGYPCFRGVNWFDTVDFPKDGDGCRWDSAPHDPVTRVRLQGVGHIRVHQHRPVRGRVKTVSIKREGRQWYVILACDEVPAEPLPATDTATGTVTGSDMGVAHFLTTSEGEHQPNPRHGRRNAEALADAQRALKAFPRRKRENRTEKHRRAVEKVAALHRKVRRQRTDHAHKTALAMVRDYDVIAHERLSIANMVRAPKPKPDTENPGAFLPNGAAAKAGLNRSIHDAGWGVFLGILAHKAESAGRVLIPVDPRNTSRTCPACGHVSGENRPTQEKFECTQCGHTANADQVGALNIAIRAGLVLPDVA

SEQ ID NO: 26680 - protein, 303 aa, Streptomyces sp.
VGTPRFKSRKDNRQSIRFTANARWSITSSGQLNLPKIGAVKVKWSRTLPTPPSSVTVIKDAAGRYFASFVIDTDPAADATAMPDSDQIVGIDLGLTHFAVLSDGRVIDSPRFLRRAEKKLKKAQRDLSRKQKGSKNREKARLKVARAHAQVTDARHEFHHQLSTKLIRENQAIAVEDLAVKALARTRLAKSVHDAGWAQFMAMLEYKAVRYGRTLVKIGRFEPTSQTCSACGVKDGPKPLHIRQWTCPACGTVHDRDHNAAKNVKTAAGPAVAACRAQVRPGPVLAQRDEAGSHGFSPEPRAA

SEQ ID NO: 26681 - protein, 372 aa, unknown
  TnpB Polypeptide
VLLSIKTKLKLTSAEKQLMSKHAGIARFTYNWGLATWQNLYQDGLKPNKYILKKFFNNHVKPELSWIKEKGICQKITQYAFDQLGNAFDRFFQGLGDYPNFKKKFQHDSFTVDAGGKPIPVGGVRTKLPTIGWIRTFEGLPNVTTSKITISRIADDWYLSFAYEQPEQISIKEHKVVGVDLGIKTLATLSTGVVFENPKHYYQEAAKLKRLQKQLSRKEKGAGRVTRLASNRRFKARMKVARQHNRIANLRNNTLHHVTTFLSKNHAKVVIEDLNVSGMMALHKLAKAIADCGFHEFRRQLEYKCQKFGSKLTIISRWYPSSKTCSSCGNIQDMPLKKRTYDCNSCGISIDRDLNASLNIAGRVTRAASRLA

SEQ ID NO: 26682 - protein, 473 aa, unknown
  TnpB Polypeptide
MAKTFAAQVNRLPEDRELSAALEYLCRESNKLYNCTLYLARQLYFKADKFSNGRWLSTEMKRNPHLKALYTSAAQQTCISVGEAFKSFKELLKLWRKGELAEKPKPPNYRTSGGLFQISYPKRWLKLVEGMVRVPMGTACKVWFNLPEIFLPFPSNLDWGKVRELQIVPRAGYFDAVWICEGSPVDRVDLDPNKALSIDPGLDNWLTCTTTEGTSFIVDGKHLKSLNQWYNKRVASIKEDKPQGFWCNLLDRITGKRNRQMRDAVNKAARIVIDHCLEHGIGTIVFGWNKGQKQRSDLGRKTNQKFVSVPTARLKKRIQQLAEQYGIIFIEQEESYTSKASVLDLDEIPVFGEKPEGWNPSGKRVKRGLYRSADGTEVNADANGSWNIGRKANVTGMQGTPARGVLTSPKRLRLWDLPHVDPIRSAETPSGESPSRDSRGVVKPPNYQQVLNGLNSWRLSGLSPNSTLTKPDL

SEQ ID NO: 26683 - protein, 485 aa, unknown
  TnpB Polypeptide
MFKEVGKPMKSKTSSYIVEFELITTFQDRYVINKKMKVAKSIYNACLNECLKRLKAVKADKEYHTLVKTESSKQRNIRLKEIELYYGYSEYSIHSYVKDINMHFKNHLGSFEVQKLATRAFKAVEKYHYGKAKKVYFKTYKDDMSVENKSNKTGLRLKDFKIIWDSLSMSFKVKKNDKYAQLALLDRTKYVRVLKREIRGKERFFVQLIQEGLPPKKHQTSTVENRVGIDIGTSTIAVVSDNKVFMNELATIKTPYKKLRRLDRAMDRSRRSTNPQNYNDNGTVKKGFKEWNYSKRYLKLKYRRKELFRKIASIRKQNHEQTANFILSLGLDVRVETMRFQSLQKRTKKTTRNKKNGKINKKKRFGKSIANYAPAMLLEIINRKLKYQDLELKKIDTYAVKASQFNHTTGEWTKKFLSNRWNNIDDKLIQRDLYSAFLIQNTTKTLDVVDIDLCNLKFDNFVKLHDIEIQRLKNLNNKKLNWFVA

SEQ ID NO: 26684 - protein, 366 aa, unknown
  TnpB Polypeptide
VIRSHQIRLYPNKEQAIMLAKTAGTVRYCYNWGLAKWNEMYKNGEECSKYTLSKLWTNERPEWAKEVARGAQTHALMNLGAAFSAFFKKRTKHPTFHKKGRKDSFYVQNDKGWLKDGKRIHLPNIGDVRMAEELRFKGNILRFVVSKQADSWYVAITVELEEEIMPTDSETAVGIDVGIKHWAIASDGTVLDKPKAIPRLEKSLKHAQRELSRRQKASRNRAKARMRVARIHQRIRNVKRDAVHKFTSRIAKNHGVICCENLCVKGMGRSVKSIRKAVHNSYMGELRMVLSYKAAHYVEIDRFYPSSKKCSKCGNVKAELGLSERTYRCEACGNMLDRDYNAALNIRDEGFRIFTEGHSESACGGR

SEQ ID NO: 26685 - protein, 439 aa, Gemmobacter sp.
MRKLKAYRFRIYPTAEQEEMFRRISGCCRLVYNLGLEQRRTFWRQYRDTQGRHISCAGQRREIKDLKAEAAFLKEVPAHCLQMALVDLDSAFQRFFSGAGGYPRPRKRLRNDSFTFPDPEQIRVDVGRGVLILPKFGRTSRDNGPIRAVFHRQLEGRVRRVTIGRDGTHWYASVQVAVRVRRALKPEGITEADVVAADRGAVVPVVTSDGALLGAPVTTERDRRKLKRLQKQLARTQRGSKRHLKALGRLRAKTAKLTRRRRDMTHQITSTFAKNHRVVILEDLKVQAMTASAKGTVAEPGRNVAQKAGLNRSILDVGWGEIERQLRYKLAWHGGVLLKVPAANTSRTCAQCLTVDAASRVSRDRFRCTSCGHESDADVNAAIEIRRRGLIALGLRPRPGLPGLPVEPSAPSTAPCETREKEKSGTQPRGAIAPETVRA

SEQ ID NO: 26686 - protein, 522 aa, unknown
  TnpB Polypeptide
LAKNQTYRAFAARPSHILDLNGELLDSAPVLASLVSEIRDVSAYATYVVRNDVELGCELARVTATAPAEAGRQAGVTMPDFLATGKSGRSRKEKLLQYNVVTSCRSWQERDKVANGESSKYVSQGWKRTANGSAPSYGEDYVNLGAVDKWYAAIENNPFADGEIVLRMVIQGSWHWLIFEFDNTRFTEGKVTLPIIKVEDGQPVFIFAVVTDNPVVQFSGDYTIGVDVGINNYVTVVVRSTATGRIVYETTLSQRVHSLWNSVRASEQQVRDLRRKAATLLHDRQERMSALDEAQLHREAASRKKRELAILAAQEIAYLSHLWENAVVAVEDLSWVRNTMQNGRWNRGALVQWLTHYVSQNGGWVVSVNPSNTSQQCYKCGVKVSHPTHELSVCPEHGAMDRDVNAAVNIAARATPRVVKARVTRAKNRKLRPQRPLRTPVARNSLKYPGRGRTKNKPTPKRKNRRRVSREVILPICPARAQTYSLEARVLADQDTRGALGTSEAALKRGNVAYECRLCSLI

SEQ ID NO: 26687 - protein, 418 aa, unknown
  TnpB Polypeptide
MMYSPRFRLLPTTVQREAMDWTRNTVRQVYNHGLREFNNIPDDAGTLRQRVWSVRDTLPAMKDWWSDLKHVYSTVLQKAIERIRDNIQNLGKLKAKGYDVGSLKWKKPREYRSFTYRQSGFELDKKSGPDGRGLLVLKKLKGKTREIPIRLHRDLPDHEQIKEVTLKKEPTGAWYVSFCIKTDEPEKPDVEDITPDDTVGLDLGVLNFVHDSNGCSVGRLDLSKDRERLEREQRSLSRKQEGSNNWKKQRRQVATVYARMTAKKQDFKHKLAHFYTTQYDAVFVEDLNVRGMLEGPENARNKAEVGWRDFITILEHHGDKNACHVKEINPRGTTKECSSCGVETRKPVWVREHSCPSCGFELDRDWNASLNVLARGLSKLGVVHSEETPVKTVTAVDTQNVSASRVHQTTSGGLSDAV

SEQ ID NO: 26688 - protein, 422 aa, Methanosaeta sp.
  misc_feature (327)..(329): Xaa can be any naturally occurring amino acid
MIISYKYPIFPNKITQWKLAENLDACRWLYNRILQDLNDAKEKGIKLKTYDTQNKIPSLKLENPKLNRVYSKVLQMVNYTLWSNIKGLAASKKNSRKIGHIRFKGYGWYNTLNYNQSGFKIDQDHGVLHLSKIGDMRIKIYRKIEGCIKAVIVKREGERWFAIVQANQEPQPLSETEEAVGLDVGLTSFVVDSVGNEIENPRCAKQSADKLARLQRRLARAVRGSNNYKSLKYKIAKLHKRINCQRDDFLHKLSRAYVNNFDIICVEDLDIKGLKEKGHNNGMHRSIHDASWSKFVFMLSYKAQSAGRKLIKVDPRNTTQRCSACGXXXCFQEHTNHRDGTARSAHRTKTATSHIRDASFGDDVGSRALQDAVVHSLESRIRAARWDKDSHSGSGGSHPPFSPSHPIFIRPTAATDENGHKP

SEQ ID NO: 26689 - protein, 400 aa, Oscillatoria sp.
MKAFKTELKLNNSQRTMMAKHAGVARHAYNWGLAACIEAHKNGEKRPTAIDLHKCLVAEVKSANPWYYEVSKCSPQQALRDLDKAFKNFFTVQGRGFPRFKKKGRNDSFYLEGSIKISGNRIKLPRIGWVKTYEKHLPPILVKKTSNVTISLKAGRWFISLKVDVDPRPIEHPHGCVGVDLGVKTLATLSDGKTFPAVKAYRKAKRKIARLQRSVSRKVKGSNNRKKAVRKLQKAHHRVACIRNDATHKLTTYLAKNHSEVVIEDLNVSGMMKNHRLAQAIADGGFYEFRRQLEYKCQWYGSLLTVVDRFYPSSKTCSHCGHIHKELKLRDRTFICPNCGFLLDRDWNAAINLQKAGSSPVSACGASKSAICLGGSDAQKQEKNAPLRTVQLGLDLSNFG

SEQ ID NO: 26690 - protein, 412 aa, unknown
  TnpB Polypeptide
MSFVSYQFRIYPSASQCQSLIDHFGCTRWVFNRYLSEADNCYKRTGKSLRCNDFIVRLVNLKKQYPWLKEVNSQSLQMAARNADRAFANFFEKRAKRPRFKSKHSGRQSFQCPQHCKVLFPVVGTKGQIVLPKIGPIKAVLHRRFSGTVKTVTVVREATGKYYASVLVDDAQPAVAADTVDFERTAGIDAGIKTAFTVVSQSGTEKIDNPAFLKKHSEQLKKQQKRLARCQRSVSVKETEKGEKIKEVTVSKRYEKVRKELARTHEKIRHCRKNWIDQITHRLVNDNQVTSYVIEDLNLRGMLKNHRLARAVSDVGIVNFYRTLKYKLEAVGKNLIVAGRWYPSSKRCPECGAKKESLTLKERSWSCAQCGHKHDRDEAAAKNLRDWVKLSDEDKHRYGRNGRALKKEAIPF

SEQ ID NO: 26691 - protein, 478 aa, Xylanimicrobium sp.
VARHTTFQLTADPTAEQARVLARHVGVSRFAYNQGLRLHLDARKHAAREGSDSVAVPWTGFDLINAFNAWKRSEAAGRRIVVDRTGHADIEVTGLAWRAEVSAQVFEEAVVDLGKALQAWTNSRRGKRAGAAVGHPRFKRKQPERGSFRMRCRVLKSKSGERATIRIGEDGPRSVTLPGIGAIKVRDDTRKVRRMITNGRARILYATVSRVNGRWRISLNVEAADLHPATQHPTQDGGTHSGWVGVDRGLHAPVVAGTAGGAEALRVAAAPRALKTAQPVLRTLQKAVARKTKGSANRREAASRLAREYGRVRDRRHHFLHQVSNVLVKTHDRLVLEDLNIEGMLANHKIAAAISDAAWGELARKVRYKQAWRGGQVLLADRWFPSSKTCSACGGVKTTLTLADREYECDRCGHTLDRDLNAAVNLAAWGERHSFQVPDLEARGRVNNAHRREGSGRCSRAGETGPDDVGTEAATPAD

SEQ ID NO: 26692 - protein, 450 aa, unknown
  TnpB Polypeptide
MKRSNTFTVRPLTDDGEQVLRDLLDASAALWNEINYERLMRYNDEDGFEGDVWDADTGALEGQYKGVIGASTAQIVIRKNSKAWKSFFKLKEKYHDESNTSVTEHPEPPGFRGNEDDGRVLKGVIRKDDYTLEFGARSRLEIIVGEELRDRHNSPKSRLRLEVIGDPNWSDYKDQSRLELWYDETDDVFRASQPVTVKDSQQETPLADETAALDIGANNLVTCTTTTGQQYLYEGRELFDRFRETTQRIAERQSKVRREEERDTSKRIQRLFEKRTGRRDHAQNALVRDLVECLYAEGVSTIYVGDLTDVLETHWSPEVNAKTHNFWAFKQFTERVGCVAEEYGISISLQSEAWTSQECPGCGSTDRTTRNQDILTCSCGFEGHADLTASETFLKRHTEQAVRPMARPVCLKWDDHEWSEISHSHERPNEEHTNQSTVHHDGNLASGELA

SEQ ID NO: 26693 - protein, 254 aa, Bacillus sp.
VELVVDVPSEQQSVEENGRYMSIDLGIDNLATIVTNTSMKPVLVKGKHVKSINQYYNKMKSHFTSVLRKGKQTKEGPFTSKRIEKLHQKRYLKIKDIFHKASHHIVKLAQEEEVCKIVLGQNKSWKQETNMGKKNNQTFCHISHSVLIQMITYKANAVGIQVIVTEESYTSKASFLDNDFIPTYGTNDQNATFSGKRMKRGMYRSAKGIEINADVNAAANILRKVVPNAWTNGIEGLGVKQLASVLTPLTLIVR

SEQ ID NO: 26694 - protein, 392 aa, unknown
  TnpB Polypeptide
MKTYRAIKYEIAPTAAQRETLKRMLGCTRFVWNKLLALSVTRYELERKFIISVLELNSTLNCLKREFEFLCEAPSQALQQVYFQQQKALRDFLTHRKTDHHFGFPKFHRKHNGDSFSIPVPCHVDFENWKVKLPKIGTVKIFKGSNKAIPVKQIKRYTVSYTPTGRFYVSIIYSINKEGIPNNGKAVGIDLGIKHYCVTSEGEVFENQKYLSRNLKRLRVMQRSLSRKYKVGKKREEQSNNWKKTMKKVCKLYEKIGFQRKDFLHKLSTYLAKKYHTVCAETLSVKNMVKNRKLSRVISDAGWSMFLSMLNYKCGNFVEIDRFYPSSQTCSVCKEVNPKVKNLSVRSWVCPNCNTFHDRDLNAAKNILREGLSLCEHKVSQKTMPAPRTPRL

SEQ ID NO: 26695 - protein, 391 aa, Crocinitomicaceae sp.
MFKAFKYRLYPSESQKELIAKHIGSNRFVYNLALETKITAYLGSKHNFSPFDLIKQLPELKKECGWLKEVNSQSLQQSIQNMDIAFKKFFKGAGFPKFKSKHKGKQSFSIPQNVIVENNLLIIPKFKEGIDIALHREIKGTIKSATISVTPTGKYFVSILVDTNNEIPIKVPITESTTIGIDLGIKDFAITSDGEVFENPKHLKKTQSKLKYVQRKYSKHKGKRTKQRLALLHEKVVNKRKDFLHKTSTKLIRENQTIAIEDLAVNNMVKNHNLAQAINDASWSTFVSMLEYKADWYGKNILRIGRFAPSSKTCSCCGYINKELTLRDRKWTCPKCNSVLDRDVNAAINIKSFALKNHLSGEHTLKNQGKLPTLVGALTLEAQPIGSAVGG

SEQ ID NO: 26696 - protein, 224 aa, Ectothiorhodospira sp.
RPAENQGSVGVDLGVSALATLSTGDTITGPKAHTALLKRLRRVSRSLSRKQKGSSNRNKAKAKLARLHARIANIRSDALHKLTSDLTRRFHTIGIEDLNVCGMMANRHLARSIADMSFHECRRQLEYKADQRGGQVVVADRWFPSSKMCSVCGAVQKAMPLSTRQWICPDCGVHHDRDVNAARNLAHYAVSSTVSACGEEGAGSGRKTGVKPASVKQEISTEPV

SEQ ID NO: 26697 - protein, 333 aa, unknown
  TnpB Polypeptide
VVHRNARAGLRLTCGQRRRLVGLLVSAGDVWACVLELNAWRRARQDVPLVSYQGLCRELAAAGSACFGELDSAGARSVLRRYSDAWFAAAARRKKGDASARFPRRRRKMMPVRWYHGTFALEGRRLRIPVARGCPPLRVRLDRDLPYPAESIRAATLLYDAGRLWVDVTAEVPVAAYPPDGEPDPERVAGVDLGIIHPYAVAGPGGQALLVSGRAVRAEHHLHLKDTKARRRAVARRAPKPGQRGSRRWRRYRRRQRIVEVRHRRRVRQAQHEAARTVIGWAVARRIGTLAVGDPRSVLNLAAGRRHNQRTRDRRVGHLIAVLRDKASRPGSP

SEQ ID NO: 26698 - protein, 411 aa, unknown
  TnpB Polypeptide
MINLNYEYRIYPKSSQEEILLRWLFACRGVYNYCLAERKDWIKSRRSPIDQCSLVSEYIIPAQTKYPDYYYQKRQLTEAKKTNPELKEVPSQVLQEVIGKVDKAFRSFHHRGYGFPRFRKRIRSMVFPQFKTNPIVGNQIKLPKIGDIEINLHRQIPEGFVIKQVQVVNQASGWYVICTIQSEGNIPDPIPDLSYSSLGIDLGFSSLIATSRNEIIDRPKFLISLQSKLTSLQRELKDKVKGSNNWRKTCKKIAQLHEYIHRVRKDYHFKLSHYLCDQAKMIFIEAIDFKSWGRGMLRKHSLDFAFGAFVEILTLVAKKRDVYLLKVDKDYTSQTCPNCNILTGKKDLKERIHSCPECGFTIDRDVAAAMVIEQRGLIAVGQTVSQSVEDHGIGAVEKSTARASLRSRKAK

SEQ ID NO: 26699 - protein, 411 aa, unknown
  TnpB Polypeptide
MTMGTVCLRFKFRPTREINEVLRKVKVMEQRAVNWMIANKKTALNSVHHAFYFPLRQQFPDLHSHWVISALKTATSIVHTFNKRKRKGQAKRPRLKKSFVTLSPHLFKVAFDGKWLKVTIFKSANDLEPIVRWFKPHHKYRRLLDRWKAGECTLGQITLTESSISIPLKFPDVPVYQPKSVIGIDSNENSLDYCVIEAKDGGQTEGHLGTIDTSEVTRINRDYDRRVQRATKGKQNPKAKGKIQRKYGRIRRERTKAVWHLIALMFIQMASQQQGALVLERLNGMKARIKGASKRLRRRLLNHWSIMTLHRILETKAKAYGIPLVFVDPQGTSKTCPICGECLRGQGKMCPSCGLSRHYVAAINIARRGIEKFPSLSRLGQGLVGSPRCPSSDGTAMWSAVRHHDGKLRKS

SEQ ID NO: 26700 - protein, 361 aa, Vulcanibacillus sp.
MESWDESAGGEIMEQTVKIKLLPTKEQEYHLINISREYIKTVNTLVADMVQAEKILKLSSKDVHVSMPSAVKNQAIRDAKSVYRKVKKLKRVPILKKSVCIWNNQNYKIKESVIEFPVYINGKSKRIAVKAILTEYQHNLLKNQLGILRITKKSNKWIAQIAVKIPGPTQNNSDIVMGVDLGLKVPAVAVTSTGKTRFFGNGRQNKYIRRKFKSQRRELGKSKKLNAIRKLNDKETLWMKDKDHKISRTLVDFAIKNNVSVIRLEKLSNIRNTARTSRKNEKNLHTWSFYRLAQYIEYKAKLAGIKVEYVDPKYTSQICPMCGKRNHTKDRKYQCSCGFKTHRDRVAGINIINAPVIDGVA

SEQ ID NO: 26701 - protein, 459 aa, Mycobacterium sp.
MARFEVPEGWTVQAFRFTLDPTEDQARALARHFGARRKAFNWTVATLKADIASWHATGVESAKPSFRVMRDRWNQVKDQVCVNADTGQVWWRECSKEAYADGVRGAVDAYWNWQRSRAGTRAGKRVGFPRFKRKGRDQDRLTFTTGAMRVEPDRRHLTLPVIGTVRTQENTRRIARLIAKDRARVLAISVRRNGTRLDASVRVLMQRPQQPKVAHPGSRVGVDVGVRRLVTVADADGTLLEQVPNPRPLDAALKELRHASRARSRCTKGSRRYRERTTEISRLHRRVNDVRTHHLHVLTTRLAKTHGRIVVEGLDAAGMLRQKGLPGARARRRGLSDAALGTPRRHLSYKTGWYGSQLVVADRWFPSSKTCHECRHVQDIGWDEKWQCDGCSVIHQRDDNAAVTLARYEATVSVVGPVGAAVKRGADRKTRPSRAGGREARKGRSRKAAEQPRDGVQVA

SEQ ID NO: 26702 - protein, 364 aa, Clostridiales sp.
MKMYQHIGSARFIFNYMLEMQNNQYIETGKHLAFNDLMKRLTLLKKEDEYVWLNNVSRVTLERSCRDMDRAFYNFFQGRARLPKYKSKKHSKEVFATREDRMYFNEDTVKLEKIGRVKYQTNYDIPKGPGCKFVNSRISHINNKWILSFGMEWENQPPVLTDIPMGIDVGIKTLATVAFGDDKIVFQNINKSARLRNLEKKRRYIQRVISRKYRTNGSFENTKNIEKYMRIYKKLSYRIYCIRHDYLHKATHTLVSLHPSVVCIEHFTSAQLLKSKETRLLHRYLQDQAIGEFLRQIKYKCEWNGIPIVEADKYFPSSKTCSSCGEIKTDLKLSERTYRCPHCGLEMDRDYNAALNLMKYGVQH

SEQ ID NO: 26703 - protein, 317 aa, Trebonia sp.
LPCRDSFGLTGTLRCGRGTVTLPRLGVIRTHESTRKLARRLEDGTARILSATVSRTAQRWFVSFTVEVDRAVPARHARPGTAAGVDLGVKALLTAVDDTGTVITIHGPKPLRAGLRRLRRAARAHARKKPGSAGRRKAAARLARLHARVADIRGDALHKATTMLAARYETVVAEDLNVAGMTRNRRLARAVADQGFGTARRMLAYKTAWRGGTLVTADRWFPSSKTCSGCGTVKAKLGLAERIYRCDGCGLVMDRDVNAARNLLSLAASGAERRNAGGGTVRPRRARHDPPNPEPGPRTGARPGPPPGNRRLRHERP

SEQ ID NO: 26704 - protein, 431 aa, unknown
  TnpB Polypeptide
MNTFTPPRVILISSENCARAMGARVVRSLSFPFEEMPAPLRWLLEEFRLLVNKSIRIALRDDIRSRFRLARIAYRTLSAEHDVYKQYIPSAFEVALATLKAYRRRVRRGRKTDVPYLRRLMLKAENQSYRLDRETGRLRIPIRGTEGVQVHLPLSKWHRSFLGDPTWGLGSLTVVPGKIIIAVRKEAPKAYGPKAAIALDTNEDSVDGVTAVGDQARLVTLPFCGVRQIQATHFRRRRRLAMKKAHDRRVRRRLLGREGRRERNRVRQRLHIVSKGLVRAAKDWRSAIVLEDLTLHGAGGRSRRMNRRLSSWPRGELHRQIEYKAALEGVPVIKVNPAWTSKTCPACGARRRDRVGEDFVCLVCDWEMDRQHNAALNILKTALASNEALARAVRFQPGALRHDVVSPLYDLPAREGAREEPSGVESQSGVA

SEQ ID NO: 26705 - protein, 164 aa, unknown
  TnpB Polypeptide
MLPKIGEVKVVLHKYFEGTLKTATISKSSTGRYFISILVDDRKEIPDEQEIFESSTIGIDVGIEDFAVISTGEKIENPKYLKNSLQRLKCLQKRVSSKIKGSNNRNKAKLHLSKIHETISNQRNDFQHKLSFKLISENQAISLETLNVKEMQKNHCLAQSISDA

SEQ ID NO: 26706 - protein, 164 aa, unknown; identical to SEQ ID NO: 26705
  TnpB Polypeptide

SEQ ID NO: 26707 - protein, 390 aa, Bacillus sp.
MKVKKAYKFRIYPTQKQEIFIVKTIGCSRFIYNYFVEKQKQQDAYWYIVNEMVQNGQLPRNNWKGECFNKTESIKALPELKEQYPFLKEVDSIALQKSVEIVHDAYTRYYKKQNNGPRFKSKKNPVQSYTTKYVNGNIAVLDQYIKLPKLGLVRFAKSKEVDGRIMNATIRRNATGKYFVSILVETEVQPLDKTGSTVGIDVGLKDFATISDGTVYENPKFFRTLEEKLAKAQRILSRRQINSSNWHKQRVKIAKIHEKITNARKDRLDKISTHIVKNHDLIGIEDLSVSNMLKNGNLAKAISEVSWSQFRTMLEYKAKWYGKQVVTVAKSFASSQLCSNCGYQHKDVKNLALREWTCPSCKSHHQRDLNASINIRNEALRLTAGTVGIA

SEQ ID NO: 26708 - protein, 433 aa, unknown
  TnpB Polypeptide
MKKVIHGEIYNPDFNKLNQLVSDWSSAYRFAFCRFQKDELSFNEVRKQTKIKYQTLNTRQISDALMLAQGLHSRVKDKKVIFGGKKNWDKLVKKELSNQEWKNKRDNQIYARGDITKKGNPNIRLLNRNGDFYLRVTVGNRQFEEYKLFIPAKFGEQLISLFGSGNSYNVRLLKKNAQHYRVIIDYEIETPKTTVDFSNGAIGVDINPDRIAISNISPDGNLIKSFTIVNNRMFFASTNKRNYEIGCIIKQIINYALESQKGIVFENLKFKKEFENQGRKFNRTKSNFLWKKLLILLERKCVENGIMYKKVNPAFTSVIGKLKYQKMYKLSIHESASYVVGRRGLGFNEKLSLYKYPSEIVKNVVLDLVGDRTKRIHSWSLWRKLRDNLKASLTVAQSRMQSLKEGCGNLCCVGENPTGKVLFQELVGRGVNV

SEQ ID NO: 26709 - protein, 393 aa, Thermococcus sp.
MPSETIKLASKFKLKETPEGLNELFSTYRDIVNFLITHAFENNITSFYRLKKEIYKSLRKEYPELPSHYIYTACQMAASIYKSYRKRKRRGKASGRPVFKKEAIMLDDHLFKLDLEKGIIKLSTPNGRITLKFYPAKHHEKFKNWKVGQAWLVRTPKGVFINVVFSKEVEVKEPEDFVGVDLNENNVTLSLSDGEFVQIITHEKEIRTGYFVKRRKIQKKVKVGKKRQELLEKYGERERNRLNDLYHKLANKIVELAEKYGGIALEDLTEIRNSIRYSAEMNGRLHRWSFRKLQSIIEYKAKLKGVEVVFVDPAYTSSLCPVCGEKLSPNGHRVLKCLNCGFEADRDVVGSWNVRLRALKMWGVSVPPESPPMKMGGGKASRGDVYELYTNYG

SEQ ID NO: 26710 - protein, 393 aa, Thermococcus sp.
MPSETIKITAKFKLKETPKGLDDLFSTYREIVNFLISYAFENNITSFKRLKKENYENLRGEYPELPSHYIYTACQMAVSIWKKHRKRKRKGKAKGKPVFKRDSIMLDDHLFKLDLEAGIIKLSTPNGRVALEFHPAKYHEKFKDWKVGQAWLVRNSKGLFINIVFSKDVEVEEPENFIGIDLNENNVTLALSSGEFIQIITHEREIRTGYFLKRRKIQKKLRAGKKKKELLEKYGERERNRLNDLYHKLANKIVELAGKYGGIALEDLTEIRDSIRYSAELNGRLHRWSFRKLQLIIEYKAKLAGVKVVFVNPAHTSSLCPVCGCRLSPNGHRVLKCSNCGFEADRDVVGSWNIRLKALKMWGVPVPPESQPMKMGGWKVSRNDIYELYKSYG

SEQ ID NO: 26711 - protein, 320 aa, Geobacillus sp.
  misc_feature (187)..(187): Xaa can be any naturally occurring amino acid
  misc_feature (197)..(197): Xaa can be any naturally occurring amino acid
VKSQKKNQKTKKFRTLWCCFNNQNVKVEKKGEFYTVSFPTLEKRIGVPVVTRPYQEAWLNRLLNGTVKQGAAKLYKKRKKWYFAIAITVEVQQREETKVMGIDLGLRYIAVASIGTKSLFFKGSQCAFIRRRYAALRRKLGKAKKLHMIRKIGRKESRWMKDRNHKISRQIVRFALANGVGVIRMEXLTGIRKRATXAKEAGRSLHSWAFHQLQTMIAYKAEMAGIRVEWVKPTYTSQTCRCGHREKANRNGIHFQCKKCGYTIHADLNGAINIAKAISGLSAEPSALVTGAPPIGVHLNPMGRGDDTPPNLGVVRTRNG

SEQ ID NO: 26712 - protein, 410 aa, unknown
  TnpB Polypeptide
MLTGRRYQARLTPAQEVLVEQFAGTARTVWNTGLDQRRTYRQRRAWINYHQQVAELVEAKADPDLAWLADVPGHCLQQTLMDLDKACRTHGTFKVHWRAKHRWSPSFRFPEGRHMRPVRLSAHVGQVNLPKLGQVRFRWSRPPGGNLRSATLTRDGVHGDWYLSFLVEDGLPDLTPGVEDVPAPDVSAVGVDRGVVVALACSDGAMLDRTFTTPAEQAGIAALQARAARQHGPRAPGARTRRAPSKRWLRTQATIARKLARQRRRRDDFTAKAAHDLARDHGLVAVEKLRVAQMTTKAAPKPDPDKPGAYLPNGARSKSGLNRAILDKGWGKFLLALHHQARYTGTFVVTVPAAYTSQRCHQCSHTHADNRNSQAEFRCTRCGWHDNADTNAALNIMTAGLAAAGCVRPS

SEQ ID NO: 26713 - protein, 365 aa, unknown
  TnpB Polypeptide
VEKAYKYRIYPNEKQKEIIAKTFGCCRFVYNKYLEQKNELYQTNKENLSYFKCAKAMAELKNELEWLKEVDSTALQSSLKDLDNAYQKFFKERAGFPNFKSKKTHRYSYKSKCIHNNIKYLGKYIKLPKLGLVKTKNKLIPQGRIANATISQEPSGKYYVSLCCVDVEIKALPATGNAIGIDLGIKEFCITSDGELINNPKYLKNSLDKLAKLQRELSRKPKDSSNRNKARIKVARLHEKISNQRKDFLQKLSTNIIRENDVICIEDLQVKNMVKNHKLAQAINDVSWSEFVRELEYKARWYGRLVIKVDKFFPSSQTCSVCGYKNEETKDLKVREWDCPVCNTHHDRDINAAINILNEGLKQLA

SEQ ID NO: 26714 - protein, 408 aa, Alteromonas sp.
MKKTLRYNYRLNPTPEQEAKLIEFGATARGIWNLLLSETMRRYEFDTTFLFYKDMASLLKELKAFEEFAWIKAFDSAAAQQVARDLETALKNAFSKGRLQHFPKHKVSYKQKKLHNDSFRAVNNSNCIRIENGAISIPKVGKVPIILHRDLMSQIKTVTIQYRHGKWECSITQEVECKTALRVLNSITGFDINSKQTVVGSNGFTADNPKFLKRSKEKLTHLQRQLARRNKGSNRWQKTKQRINKLHGKISRQRLDFAHQISRQITNETDILVFEDLNIKAMQQFNGSMVADNVMGLITQLSKYKAELKGKLYHEIGRFEKSTGICSECDQQHALSLNERYFTCTACNTYQSRDLSAAKSIAKTGELDLVATGIVARVMPTSQQKSIIKMKVFELSKLVEGSEKKEAA

SEQ ID NO: 26715 - protein, 416 aa, Moorea sp.
MIIYEMKLQGTESQYGRLDEAIRTGLFVRNSIVRAWMDGQIKSRNDAYSYCKVLSDNPEFPWVSKLNSMARQAHAERAWASIERFYRNCKQKIPGKKGFPKFKKYQVRASVEYKTSGWKLSEDRRYLTFSDKFKSGTFKLWGSRDLHFYQLKQIKRVRVIRRHDGYYAQFLIDQTREETKELTGKQTGLDVGLNFFYTDSFGEQIDNPRFLRSDERRIKKLQRRLSRTQKGSQNRKKARNRLGRAHLKVSRRRNDWVCKLAQHVIRSHDLVAIENLRIRNMVKNHKLAKSISDAAWYRFREWLEYFGRIYGVPVIAVEPAYTSQNCSNCGEKVIKTLSTRTHECPHCGYLADRDHNAAIRRSRRYANNILKSALKQLSNTVGQTEINASGEIGHYLSGETQPSKPARRNRKRKPKS

SEQ ID NO: 26716 - protein, 493 aa, Methanosarcina sp.
LTKYIRDIESGAVPWMLLTYKIKHNRDFSEELRKARKVAEFCIEHRTRNCTLDPPPIQGSGSSDPQLFPSSLLSSSLSPSSASPSSFPLSASSAKSPNDSSIHSSTPPFSDSLPGTDSFPGKDSLFPADVRHIGLRSTISGQIIRKYSRNRDLKSAKNVKLIVPSKAVSVDREEKTLEIPCLKLLLNYNFSSNFKRISQIEIDNVYAYVAVVFQDEKPESTGRYIGVDRNTKGHIAVVADPESGKVWKLGKMRYHTHKKYENIKKRLYTKGKYKCLKAVKKREKNIVKDLNHKISRKIVDLALYSGCGIKLENLKGVKKLNSKAVSAGKCRNNKRVEKKKNQNGGRNRSKEMNKKVIKTEKHIWSNEYSLNSWSFHQLQQFIEYKSRLQGVEVVYIDPHATSKRCSRCGLTGNRRSKHFECPHCGHVDHADVNAAFNIALTPKGTGQFSAERDAGKGSPDTPQKILARTLLSKRKASEKTSQYFAWEVCQFLA

SEQ ID NO: 26717 - protein, 399 aa, unknown
  TnpB Polypeptide
MSRYRLYPTPAQEAVLREHCSHARYVWNLAVEQQAHWRPGRVATPGYLEQCRQLSAARKEHPWLAAGSQTVQQQALRDFAQARTAFADPSNPARRPRWRKAGRDEGFRITGRRGRHWEVRRVSRRTGQVRVPKVGWVRFRWSRDVPPGVKSYRVTMDRAGRWHVAFAAIPDPLPAPVNGQVVGIDRGVAISAALSTGEQLRIPGLTAREARRLRRLQRKLARARRGSNRRAQVRHAIARLRARETDRRKDWAEKASTDIARRFDVIKVEDLRIGAMTRSPRGTRDSPGRNVRAKARLNRAILRSGWGLLVRRLEEKAPGRVEKVSPAFTSQRCSACGRADRESRESQAVFRCTACGYACNADVNAARNIAAGHAVTARGGYREAGPVNREPQLLASSRT

SEQ ID NO: 26718 - protein, 418 aa, unknown
  TnpB Polypeptide
MEVRRTVPVKLDVDSDDTALLEDTVDTFLWSAQYVVDHAFHGEYVTTSKTTLDDETYDDVREATDGFNGGLVQAARNKAAEACKSVVARWKNGKKASKPRFTSPHVVYDHRTATFHDESVSLATVDGRIEADYVLPDEDSDTPHSEYLFSDEYETTGAELHYTNGNWMFHIHCKKDVESGTPKQASTGNGTVLGVDLGVTNLAVASTGTFWTGDEFDHWRREYEKRRGDLQEHGTRWAHENIRSVGRKEEGRFKQTLHRISNELVAEARNDECSVIAFEDLTDIRDRTGASWGHKWAFNRLYEYVEYKAAEYGIDVEQVNPENTSRRCSHCGFTHPDNRESESFECLKCGYENHADYNAAKNIGLRYLRRNQTGGDGGAPVGVRLNSGTLNVNGAYEPPADDSARAGVHAESHRFSGG

SEQ ID NO: 26719 - protein, 402 aa, unknown
  TnpB Polypeptide
MRVLLKAFKTEIAPTRAQKEKIIRSIGIARFLYNQYIAYNRKIYKMYQRGLLDNRQKHFVSAKDFDKYVNHKLKLELPWINECGSKARKKSLVNAEAAFKRFFNNLSGFPRFKKKSRQDVKLYFPKNNKGDWVIWRHKLMIPTLKQVRLKEFGYLPVGARITNGTVSYMAGRFYVSIVVDIDEKSKYNKDLKASYHATTNGIGIDLGIKDLAIVSNGQTFKNINKSSKIKRLEKRLRRKQRCLSRKYKFKKKKGGKIATTSANIEKQKLKVQKLHHRINKIRENYENKVIHEVVKQKPRFITVEDLNVKGMMKNRHLAKAIIAQRFNRLLTKLKRKTEIIGIEFRMVDTFYPSSKTCHACGNIHKGLKLKDRVYVCPECGYTEDRDFNASLNLRDAKQYRVI

SEQ ID NO: 26720 - protein, 437 aa, unknown
  TnpB Polypeptide
MGSYEAVKVRLDPTPKQERLMASHAGAARFAYNAGLAHVKEALDSGEPPEWSHYGLLRWWNANKDTLAVNRDTGVVWWSQNSKESYSGALRDLARGFSNWSQSHKGKRKGKRVGFPKFKSKNTTMRFAYSTGFTVPTSGDPYGLKLPRIGRVHCMENVHERVAGAHVVRISVSRRAGRWYASLTVERESAASSSVSAPKGGAVGVDLGVKHLATLSDGIVVPNPRALGARLKALRKAQQALSRKVMGSARREKAKKHVARLHARVADVRADAIYKATTMIARNYSAVCIEDLNVAGMVKNRRLARSVSDAALGEFRRQLEYKTARSGAVLRTVGRWFPSSKTCSNCGTVKAKLSLSERTFNCDACGLSMDRDLNAAINIKVAGSAPETLNARGEDVRRNQHTVGNADLGEARTKRAQKSAVRLGAGLGNEAMQPRIN

SEQ ID NO: 26721 - protein, 326 aa, unknown
  TnpB Polypeptide
VSLNRIVTDWKRSEFPWLGDSASCTLTQALIDQDKAFKNFFEKRGKYPKFKSRYDRQAIRYQLDQRQIERTYQAGECLKLPKLGVLKLRWSHVPAGTPKMATVSKTPDGRYFVSFACAVAINPLPLTGQAIGVDLGIKDVAVSSDGWKSGNPRHLKSQLKHFKRQQRALARKQKGSHRRHRQRLKVARIHARIAAMRQDFLHKITTALVQRADVIAIEDLNVKGMLKNHHLAGAITDVGMGEFRRQIDYKAAWYGRQVIVVDRFAPTSKTCSHCGSYQQKMPLSIRAWTCPDCHSRHDRDINAANVILKLATAGNAGPNARGGGTN

SEQ ID NO: 26722 - protein, 498 aa, unknown
  TnpB Polypeptide
LILSYRYKLKPNQAQSKKMSKWLDMVRSTYNWCLKDRIDGWHQQFIMGEYCDLRTQVQASPLCCAVVKGTQLANPWKDGAGKAKKEGEKDKSPKRNPSLMQDANLQELKAARPWYQDIDGGVLQLMTARVDEAFNKFFKGAGFPKFKRRHDLKSFSYKPGRVKINGSRIYLPKIGWMRFYNSRPIPEGFEIKTVTVRQKADGYYVSLRIEDKSVQDFPIIADGDVKTITGCDMGLGKLVYLSDGSAVDNPRFATNKKTRHLMRVRQKRVNRKQKGSKNKLKAQLRVNQLHNKIEQKREAYQWNAANRIVKKADAVAVENLQIKNMMKRCKPVSSETGRFLPNGQSAKRGLNRSIADASWYSLTQKLEYLAAKSVKRLYKVNPKYTSQTCSKCNHVDAASRDGEKFICTNCGHIDDANLQAARNVKAKAIETYQLNIVKRIKSKMVRRDSSKPVQLSLKEAQLYERLPDNTLPQKGKRRVGKNPKDIQLSLWDIKEVIS

SEQ ID NO: 26723 - protein, 374 aa, unknown
  TnpB Polypeptide
MKLTLQIKLLPERDHARKLQETIERFNEAANWLAGEAFVRQLSNKIILQRLFYKELRQRFGLSAQMAVRCIAQVCEAYRRDKSKRPQFRSHAAMPFDQRLMSFKSTDGVSLRTLKRRVEVAFVMGKYQAEKFTNAQGQADLVLRDDGKWFLLATVDVPDGNKTAASDFVGVDLGVINIAADSDGEKHTSAEIEAKRVQYATRRRRLGKATNGAKRSTRRHCHKAVSRTKKKEARFRRDTNHRISKGLVAKAKGTGRGIGMEDLKGIRDRTQFRKQQRARTSGWSFFQLRSFVEYKATLAGVMFVAVDARNTSRTCAECGHVDKANRKSQSQFECQACGHQAHADVNSARVVAIRVRAAVNRPMGSEQPSVASVA

SEQ ID NO: 26724 - protein, 374 aa, unknown
  TnpB Polypeptide
MKLTLQIQLLPERDHARKLQETIERFNEAANWLAGEAFARRLSNKIILQQLFYKELRGRFGLSSQMAVRCIAQVCEAYKRDRSKRPVFKPHAAMPFDQRMMSFQSADRVSLLTLKGRVEVAFVMGKYQAEKFTNAKGQADLVLRDDGKWFLLVTVDVPDGTPIEPSDFIGVDLGVINIAADSDGEKSTSAEIEAKRVQYATRRKRLGKATNGAKRSTRRRCHKAMSRTKKKEARFRRDTNHRISKGLIAKAKDTGRGIGMEDLKGIRDRTRFRKQQRAQTSGWSFFQLRSFVEYKATLAGVMFVAVDPRNTSRTCAECGHVDKANRKSQSEFECQACGHKAHADVNSARVVAIRARAAVNRPMGSERPPVASVA

SEQ ID NO: 26725 - protein, 247 aa, unknown
  TnpB Polypeptide
MLPDINTGAAKFKNDSVFFNGKYYRIWDSYGLSKYTFRTASFNEDSRGRWYFNVVVSFEADKSTGAQSVGLDLGCKESVTDSNGEGIKGREYRALEQKLGIAQRARNKRRVKAIHAKIRNRRHDALHKYSRKLVNENAAIFVGNVSSQKLIKTKMAKSVLDASWAMLKTMLDYKCANADVVFEEINESYTTVTCSVCKKRTGPKGLEGLRIREWVCECGVTHHRDINGAKNILALGHQRLAGEKVAA

SEQ ID NO: 26726 - protein, 376 aa, unknown
  TnpB Polypeptide
MIKSVKIRLKPSKEQEILMFKSCGIARFTYNWGLNRWNELYKQEIKPSKYVIKKEFNNTIKKDEDFKWLNEVSAKVISQAFGDLDQAFKNFFKKIGKHPKFKTKRKSKKSFYVRYDNIKFKDGKVNLEKIGKIEYKTNYDIPNLSKYNNPRCNFDGKYWYLTFGFEHNENQVELNKDLSIGIDLGVKDLAILNCLDKPIKNINKSVKVRKLKKRLKRLQRQVSRKYEANKNGNKFIKTNNIIKLEKEIKLIYRKLSNIRNNHIHQSTSKVIKLKPYRVVMEDLNVSGMMKNRHLSKAIAQQCFYEFIRQMKYKCRFSGIEFIQVDRFYPSSKICSSCGNVKTELKLKDRIYICYECGLEIDRDKNASINLGRYKLA

SEQ ID NO: 26727 - protein, 404 aa, Paraburkholderia sp.
MQRLQAFKFELMPTGEQARKMRQFAGACRFVYNKALALQQENHKAGEKFIGYVPMAKRLTEWRNGTDTPWLKDGPVHTQQCALKAIERAYVNFFEKRADFPRFKRKGMGDGFTYPDKKQIKLDRENGRVFLPKLGYMRFRKSRDVLGEVRSATVSLRAGKWHVSILTAREVETPVPHGPAVGIDVGVARFATMSDGSFIAPLASFRKHEKRLAKYQRRMARKVKGSSNWKKAKFRIQRIHARIADTRADFLHKASDHISKNHAMIAVEDLKVRNMTKSASRTAAAPGRNVRAKSGLNKSVLDQGWGEFRRQLEYKTAWRGGYFVAVDPKNTSRTCPCCGHISAENRKTQALFACIRCGHEANADHIGALNVLAAGHAVIACGGMAQSGRSSKQEPAEAIQALAA

SEQ ID NO: 26728 - protein, 206 aa, Chlorogloea sp.
MLKAFKYRFYPTSEQETLLRRTMGCARLVYNRALAARTEGWYERRERIGYADTSTMLTFWKKQEDLQFLNEVSCVPLQQGLRHLQKAFANFWTGTAKYPNFKKKHNGGSAEFTKSAFKWKDGQVFLAKCREALPIRWSRQLPKGCEPSTITVKLDASGRFHVSLLVDTFVEPLPKSNKSIGLDVGISSLIATSNGDKIANQGTLNG

SEQ ID NO: 26729 - protein, 333 aa, unknown
  TnpB Polypeptide
METYTLGYKFRIYPNRTQENLINRTLGCARFVFNHFLAVRRDEWKANHNSLTYVKISKLLTDLKKREETAWLSEADSMALQESLRNLDRAFQNFFAKRARYPRFKSKHSHSQSYRTRNQTNGIRIIDKRIKLPKIGLVKIKQSRDFDGRILSATVSRAASGKYYVSLCVEAEKGSLFCPNNGKQIGIDVGLKVFYSDSNGDTVENPHPLKKLQRKLRREQRRLSRKMPKSVNRERARVRVARVHERIANIRRDFLHKISTRLARENQTVAVEHLNIKGMLRNHKLAKSISDVSWSEFFRQRRIRQNDMAANCSKSIPSTRRVRRVLLVAIRTH

SEQ ID NO: 26730 - protein, 456 aa, Moorea sp.
VKTPTKVIRTDKWQLNPTPDNKMLLGETVKVYRRACRYLVGIIYTHWSELGELTADQLTPAVEKLMHQTAKRPNVKYPQFNKTFYKFPSYLRRAAIAFSAGQVSSFVTRYREWQSGNRKRKDALAPRLNADTGCYPSLYKGQCYKLHGYDQVEIKVFNGSDWLWTTIQITGLRERHLVANNKMMSPSLVFNERVCHLSVPFTCKPEKRKPEANVTAVDLGINTTATIAVVTHSGTVIHREFLHPGRDIDRRDKRLKSVSMRASLTMGKGGKLHKGFCSKTYQKCRRINHQIGHIVSKRIVDIAKEFNSVRVAWPTALAIVFENLKGWKPKGGKKRSKLRQKFHGWLKSKIRDFTEMKWAELGGKLIEVVAAYTSKLAYDGSGTVKRNSKKYSLATFPSGKYFNADLNGAYNIGARGVFKLTRRNDGEGRSSKSTGRPPRGWACLCDLWVRGNPKLA

SEQ ID NO: 26731 - protein, 382 aa, Escherichia sp.
MRRFAGACRFVFNRALARQNENHEAGNKYIPYGKMASWLVEWKNATETQWLKDSPSQPLQQSLKDLERAYKNFFQNRAAFPRFKKRGQNDVFRYPQGVKLDQENSRIFLPKLGWMRYRNSRQVTGVVKNVTVSQSCGKWYISIQTESEVSTPVHPSASMVGLDAGVAKLATLSDGTVFEPVNSFQKNQKKLARLQRQLSRKVKFSNNWQKQKRKIQRLHSCIANIRRDYLHKVTTTVSKNHAMIVIEDLKVSNMSKSAAGTVSQPGRNVRAKSGLNRSILDQGWYEMRRQLEYKQLWRGGQVLAVPPAYTSQRCAYCGHTAKENRLSQSKFRCQVCGYTANADVNGARNILAAGHAVLACGEMVQSGRSLKQEPTEMIQATA

SEQ ID NO: 26732 - protein, 472 aa, unknown
  TnpB Polypeptide
MGLIKAALGAAGGVMADQWKEYFYCESIPENVMAVKGQRRVSGRSSNTKGSENIISNGSVVAVADGQCMIIVDQGKVAELCAVPGEFVYDSSTEPTIFSGELGTSILDTFKNIGKRFTFGGEPPKDQRVYYFNTKELIGNKYGTPSPVPFRVVDQRAGIDIDIAIRCFGEYSYRISDPILFYTNVCGNVSEDYTRDRLDGQLKTELLTALQPAFAKISDMGIRYSALPGHTMELAEALNEVLSGKWRYLRGLEIVSFGVSSVKASEEDEQMIKELQRNAAFMDPTRAAAYLVGAQASAMQSAASNQSAGPAMAFMGMNMAGQAGGMNAQNLYQMGAQQQAAQPAPAPAAAEGWNCSCGQSGITGKFCPNCGSKKPEPKPAVESWKCPQCGATASGKFCPECGTKKPESQANGWTCSCGAVNKGKFCAECGKPKPAGVPQYKCDKCGWEPADPTHPPKFCPECGDPFDDGDLK

SEQ ID NO: 26733 - protein, 419 aa, Deinococcus sp.
MSKKPRRNVQRFVRKVALPKSDLLDKLSHAAGQLYTQTLVAYWRILRKTGTGKNGRTPVFLSPYGMEKLLPSDPDKLLHSHTCDAVVGNFYASIKSANERKKQGCKDAKYPRRRKWFYKITWKSSGIRLKDGYLTLSTGKGVENLVVPWVHDLPTMVEIGWKKTGGYELRAVYEVGAIQALGDGVAAIDQGELRTATVYDGEKATIYSGRLVKSKSRYRAKVIAKLDAKIARTRKGNGKQPSSRRRKKLIRAKRRVTRQIDHQIRDIQHKQSSHLVSTLHNQGVQTVVIGDIRDIRKSMQYGPKANQPLHNWSFGKFRQMITYKAERLGMQVTLMDEAYTSQTCPACTNRKKPSGRLYACKCGFVCDRDAVGSMNIRAKYLGTFGRPVVGVMSPPVRGVRYRPQFSRHLALNTPRTPCL

SEQ ID NO: 26734 - protein, 431 aa, Burkholderia sp.
MQRLQAFQFELMPSGERQRDMRRFAGACRFVFNKALALQKENHEAGGRFIGFVAMAKRLTAWRNGSETPWLKDAPVHPLQHSLKDLERAYQNFFAKRAAFPKYKKRGQRDSFRYPDPKQIKLDQANGRIFLPKLGWLRYRNSRTVQGEVRNATVSLSAGKWFVSIQAAREVEQPVPQASRAVGIDLGIARFATMSDGSYLAPLNSFRRHEARLRRAQRAMSRRTKFSYNWKKAKARLQRIHARIGNARRDYLHKATTTISQNHAMVCIEDLQVRNMSRSAAGSADAPGKNVRAKSGLNKAILDQGWFEFRRQLDYKLAWRGGWLIAVPPQNTSRTCPACDHVSAENRRTQARFACMACGFEENADVVGAINILARGHRVAACGEPAQSGRSVKQEPAEAIWDGQHRFRRGRNLLPLGTRDGCQVAFLESVM

SEQ ID NO: 26735 - protein, 370 aa, Escherichia sp.
VKRLQAFKFQLRPGGQQEREMRRFAGACRFVFNRALARQNENHEVGNKYIPYGKMAFWLVEWKNATETQWLKDAPSQPLQQSLKDLERAYKNFFRKRAAFPRFKKRGQNDVFRYPQGVKLDQENSRIFLPKLGWMRYRNSRQVTGVVKNVTVSQSCGKWYISIQTESEVSTPVHPSASMVGLDAGVAKLATLSDGTVFEPVNSFQKNQKTLARLQRQLSRKVKFSNNWQKQKRKIQRLHSCIANIRRDYLHKVTTAVSKNHAMIVIEDLKVSNMSKSAAGTVSQPGRNVRAKSGLNRSILDQGWYEMRRQLEYKQLWRGGQVLAVPPAYTSQRCAYCGHTAKENRLSQSKFRCQVCGYTANADVNGARNI

SEQ ID NO: 26736 - protein, 400 aa, unknown
  TnpB Polypeptide
MISAVNRSYRYRLKPTRRQARALMAWLAMTRELYNAALQERRDAWKKCGVSVSMYDQSRALAEVRDARPEFRRVPVVVLRGALRRLNGAFGAFFNRVKVGEKPGFPRFKGAHRFNTISIDDLRKRNPLDTDRRRLAIPMLGKVKIDIHRPMEGAPKTMRLTLDNGRWYASIQCVDVPTKPLAPAGHEVGVDLGLRSFAVTSDGEVFENPRVLRRAENAVSRAQRRVSKKRRGGRNRRKAAQRLARRHGQLCNTRREHHIQVARALVATNDLICVEALNIKGLARSRLSKSVYDVGWGSFLGWLRTKAEEAARVVVEVNPAGTSQTCSACGDEVRKSLAVRVHRCPCGLVVDRDENAALNILAAGRAVRREALRSKGTSATREVRVRTTRSVHASNGSGVT

SEQ ID NO: 26737 - protein, 402 aa, Escherichia sp.
VKRLQAFKFQLRPGGQQEREMRRFAGACRFVFNRALALQNENHEAGNKYIPYGKMASWLVEWKNATETQWLKDAPSQPLQQSLKDLERAYKNFFQKRAAFPRFKKRGQNDAFRYPQGVKLDQENSRIFLPKLGWMRYRNSRQVTGVVKNVTVSQSCGKWHISIQTESEVSTPVHPSASMVGLDADVAKLATLSDGTVFEPVNSFQKKQKKLARLQRQLSRKVKFSNNWQKQKRKIQRLHSCIANIRRDYLHKVTTTVSKNHAMIVIEDLKVSNMSKSAAGTVSQPGRNVRAKSGLNRSILDQGWYEMRRQLEYKQLWRGGQVLAVPPAYTSQRCACCGHTAKENRLSQSKFRCQVCGYTANADVNGARNILAAGHAVLACGGMVQSGRPLKQEPTEMIQATA

SEQ ID NO: 26738 - protein, 363 aa, unknown
  TnpB Polypeptide
VNKSFKVRIYPNQEQKVLIDKTFGCARFIYNFMLNLKQKLYEYHNISLGFYDLSKILTEIKRHKLWLKEVDKWALQNALKDLDSAYKRFYNGGGFPKFKSKKQGKNSYRTNHRIQLIVDNKKVKIPKVGSIKFRDKSRFDGITKIYNITISRTSSGKYYASISAEVNIEHFEKTNQECGIDLGLKDFCILNDGIKFENPKFLVNNEKRLRLLQKSLSRKDYGSKNYMKAKIKLAKFHEYIANSRKDYLHKISIFLVKNYDVICAETLRVKNMIRNHKLAKAISDVSWYEFIRQLEYKCLWYAKKFVQISTNFASSQICSSCGYKNSEVKNLNIREWTCPECGVHHDRDINASINILHEGLRII

SEQ ID NO: 26739 - protein, 402 aa, unknown
  TnpB Polypeptide
VKGSAVAVENVVAKKETVKLTVKLKLDIPAVDHARLEEMGRQYIVAFNAVSEAGWEERHINANELHKKTYYSLRERLALPSQLVQSARNKAVEALKSARTLKGSRPEMKRPSIRYDARTYTLDWKVQTVSLTAVGGRRVQASFKFDKHSKKFKGLKTCSADLVRTKHAWFLHVVVEKEVKDAVPTGKVIGVDRGVNKPAVTSEGQFLGSGKWRDIEHKYLSLRRRLQAKGTRSAKRHLRRLGVRLGRFRNDCDHVLSKRMVQSAKPGDRLVFENLTHIRSRIKARGRMHRRRLHAWSFHRLGKLVEYKARLKGILVDYVDPRDTSRRCPECGWIDKKNRPDQAHFRCAKCQYSRNADLIAAWNIRDRYRGLWSPVSRAPGPVNDPNVSTHSSYSQAPHFSAG

SEQ ID NO: 26740 - protein, 406 aa, unknown
  TnpB Polypeptide
VQKVITGTIHQGDFEALLRLMRDQSSCRRYAYQRIHKDDLSRANDIVRACKPLYMTKLNQRYIQDAVLRAKAVPKEHAIFGGHKLWNKLLKKEITKTEWHSIRDNELYSRGDRTQQGNPNIRVIKTSTGYKLRVGLPGARQFITFILYVPEKFQEKLDLYSECYDVRIKHKEDKFYVFIGLTIPDARPYYTFQSGAIGIDTNPDGLAVVEIGQDGNLLEHKYLHADRLQFARFEKRKNDIEELSKQIVDYAIIKEKGLVIEDLKFNNGKSSKCRKFNRMRHNFIYAQLLQAIERRAIKYRVEVKKINPAFTSKVGILKYQEQYSLNRHTAAALVIARRGLGIMETIRVKVEPGENKKLNLEGRGFKIALTVKAYSYLKHLYKVIEIKAPGLTAPCLTPSLGNYGTS

SEQ ID NO: 26741 - protein, 374 aa, Bacilli sp.
VFDVQVLRGYVFRLYPNKEQEILINKTFGCTRFVYNYYLEKMLQKKISYGYIKDLPRLSLEYPWLKEVDGSALTSCLFDLDNAFKRFVKHNFAAPRFKSKDRNKSYKTNNFFKTYTKEYSIKINLEKMLITLPKLNGVKIRGYNKLKEIPGTIKNAVIRKLANKYYVSILVEEEKTVPDFRPNSIVGLDLGIKTLIVTSHNEKLENTINVNEKRIKGLQKKLSRCQKGSKNREKVKIKIQRAYLKIKNARKHLIHDLTNKLIREHDIIVVEDLAVQQMKQTHSIAKCLTNNPFSEIIRLLKYKTLWNNKKLIQINRYYPSSQICNHCGYRNKLLKDLNIREWKCPSCHNELNRDLNASINIMFEGLKEYMRGLA

SEQ ID NO: 26742 - protein, 537 aa, unknown
  TnpB Polypeptide
MISEKDYKKLLKQFHKLSDRHILVVETDMSFSDAQKVVILSDKIRKAGNELVGLMRKHYDQLMRTKRYRKLLNLYGNTENKSRRKDLATQLNDMQKQYNVTWEFCRTSMIPIGKKYGIDAVFALTKAEDIWCGVEKCLYDDGKTLHFSKYEDLPCVRAKQINRGIVMSVKDDKLQFKLGKSIFGIKVKDRFQNDEVSAILDYLSKSEIKDKLAIESLQTEGICISTYRPCYATLVPKMIRGKYRIYLHLTIEGKAKPKYDRFGNPRHKFGKGIVGCDIGTQTIAYTSDREVGLKNLSERGNSIQTSERKERLYYRAMERSRKATNPQNYNEDGTIKKGHKTWKYSNHYKKLKNKHSELCRINAINRQLAINEDANHLRSLGDVFITEPKNASKLMKRAKETIVNSKGKFNKKKRFGKSIKNRCPSGFQTTVEKKFKVTGGTYIEVPNNYRASQYDHTADDYIKKKLSDRMYTLTDGTLVQRDWYSSFLLYCYDFKTRDIDKNKCISEFKSCYYKETALIEWIKTNKIKILNSGIKIA

SEQ ID NO: 26743 - protein, 394 aa, unknown
  TnpB Polypeptide
MQLTERHIIKDDRFTDWCIKAKNLYNQMLYYWRQSIFGEIQYFSEYELIGLMQKYNEDNFRALPANTSQQIIKNLFNNIKSWQKGRKEYTKNPSKFLGKPKLPKYKKELSELYFTSTQVKLKKGFVHFPKMIGIAPMKTKITNINCCRVIPKSNHFIVEFIYTIPDVIQKAYNDKAIGVDLGLNNLATNVSTTGVSFIINGRPLKSINAFYNKKKANLQSQLNSEVFTSKRIERLTLKRNNKIKDYVHKASRYIVNEASKLNVTKIVIGNNKNWKQNINLGKRNNQNFVSIPFSHLIEKIEYKAKMVGIETIVIEESYTSKCSSYDLESIQKHDNYVGKRTKRGLFRTKENKYINADANGATNILRKVVSNTVYNHIDEIRSCVVQPNKIKTFY

SEQ ID NO: 26744 - protein, 395 aa, unknown
  TnpB Polypeptide
MWYNVNGMRTYEYRARPSKKQEAQLMAVLIASRRLYNDALQELVEHYKATGKHMNLFEQDKRHGAKEHPDLPAVVVDTTLKRLHRSFANFFRGRKEGKRIGFPRFKSADAWNTIQFRDAANCLEGNYLKTPKISGGKLRVNVHRPLDGAFRFARLVLRPSGWYVQCITDYDGATAPDGERLASSDKAVGLDMGITYLVADSDGGFVRNPKSFRASAAKLASAQQRLAKCKRGSHRRRKAKKQVARVHERIVSQRKDKLHKVSRSYVNKCGLIAIEDLKPANMVKNHSLALSISDASWGLLRFYLSYKAESAERRFVAVPPHYTSQRCSRCKELVQKSLSVRTHVCPYCGYVADRDTNAAVNILKLARTEPSLRDAEGRAQARESSVSLKREAPGL

SEQ ID NO: 26745 - protein, 291 aa, unknown
  TnpB Polypeptide
LLFPQFKQSPVVGDNLLLPKLGLVKVNLHRPIPDGFIVKQVRILKKADRWYASIALQCDVNVPDPTPHGHGIGIDIGLEKFLATSDGILVKPPKFFKSLQSRLKVLQRRLSRKQKRSKNYEKARIKVALAHHQIDNTRKDFHFKQAHALCDSADMVFMEDLDYTVMAKGMFGKHMLDAGFGAFRTIVKYVCWKRDKFFGVVNARGTSQECPECGATVKKDLSVRIHSCSECNFTTDRDVAAGLVIRNRGVTLISTGGQPGSQNACADGLPGAEETKPRSKSKPRKGKNQEV

SEQ ID NO: 26746 - protein, 502 aa, Streptomyces sp.
VGGLREVTAPFVALGPSGVAVRDRLKHLTAEDEKVLRLVGAHLGSLASKDLKARCRDGLEHCADTWAARKRELTALSSSRWAGAITKATHDQWALARRGQAAHVQSLEAGIATIRHRLSLPVGEKGTKHAPGGYRCAREWFSKSRRLHVLEDRLNRVRAERDSGVVHVVRGGKRLLGTRRHLDRAQLTETQWRTRWEGGRWFLAADGESGKRFGNETIRITLDGEVSIKLPAPLAGLANAGHGRYVLAAKVRFPHRGQEWADRVEANRAVAYHIHYDTGRGRWYMTASWQIPPVKTVPFEAALAHGVIGVDTNADHLAAWRLDPHGNPVGRPRRFFYDLSGSADHRDAQVRHALSRLLNWAKSCRVAAIAVEDLDFTAEKTREKHGRKRRFRHLISGMPTGRLRARLTSMADQTGISIIAVDPAYTSKWGAQHWQKPLSTPTRKTTRRDAASIAIGRRAQGHPIRRRTTPPRAHQSDVHGHRTVQARPDTLGREGPRPRIPQ

SEQ ID NO: 26747 - protein, 260 aa, unknown
  TnpB Polypeptide
LTVKWQGKPKWVGWTKQGQLTIHYDNVTGKWYARQPVEVEPPHQPLSHRRAFVGLGVINLLTVALDGARQTLVYSGRSVLADWWYLSHRIDRLKSLAKTINHRKSTHRIRRLFRRRRLRLRQYVNTVVRRAVADLWAHGVSQLVVGDLTGILAVKSGGRKAHAMTHNCWSHRYLMQRITEVAEEYGIVVERVDERGTSSKCPRCRSKRVTRLGRLFKCQECRLEAHRDGVGVVNIGLAQGAAFPGEVVNGAVACPLEVSG

SEQ ID NO: 26748 - protein, 551 aa, Mycobacterium sp.
MIVGMRTRAQAAKVATATGGAHLAGTPKPDGAPRFSRYVDLGGADFESHRTAVESVSVLFDLYDGDADCYAQTGSPGAKLPTGWTVTAAKFEVEWPAEPQRVGLVRSHFGARRKAFNWGLAQVKADLDAKAVDPGHESVGWDLGSLRWAWNRAKDGVAPWWAENSKEAYSSGLADLARALDNWSASRNGTRRGRRVGFPRFQSARRDAGRVRFTTGTMRLEDDRRTITVPVIGPLRSKENTRRVQRHIASGRARVLNMTLSQRWGRLFVSISYALRTPVTVRTVARPTVVAGVDLGVRTLATVATLDTATGEESIVEYPNPAPLKATLAARRRAGRELSRRIPGSRGHRAAKAKLTRLDRRCVHLRREAAHQLTTELAGRFGHIVIEDLDVAAMKRSMGRRAYRRAVSDAAMGLVGPMLAYKTSRSGAVLTVADRWFPSSQIHHGCTTPDGTGCRLIGKGRIDKLLICPHTGEVVDRDRNAALNLRDWPEYASCGPVGTTAPSVPGPTTAVGTGHGADTGTSGAGGASIRPRPRGAGRGEAKTQTPQGDAA

SEQ ID NO: 26749 - protein, 420 aa, Lactobacillus sp.
MKEDKRTFDTISLEHKEVDRMPVKTHKIRCYPNAEMRTVIAELMDYNRFCWNQGLATWNDMYEASLIMNDKKIRPSERSVRNELVQNKADWQYQRSARVLQTAIHRLRQAWQNFFNPNMPDARKPKFHSKRDPKQSFTTDRATVNGKFLTLDRPHGSKHRFTAIKLAETLRFSGAIKTVTITKRGDKFYASIAVSVADMPRPAFYESWDIAGIDLNVGHINWNDGEVNTFTPRMAVLHQRIKVYQKRLARKRRDNPRHFRSKNYQRIQAKLNRTYQKINALQDDLIHKFSQQITQSYAVLCIEDLNVRSMKMAKNKVKNLQRSLFRRLRTAIEYKAAWQHRHVVIADRFFPSTQRCSNCGFIKTADSHGGKMTLRGDSIYHDHDTYRCYECGMVMNRDENAVQNLIAYAAGLSPERVTVH

SEQ ID NO: 26750 - protein, 383 aa, Bacillus sp.
MVVQKAYKFRLYPNQAQRTLIHKTIGCSRFVYNHFLAKWQDTYTTTGKGLTYSTCSSQLPSLKAEYEWLKEVDSVAVQTSVKHLSDGFSRFFKKQNKHPRFKSKKNPVQSYTTKQTNGNIAVTGNKVKLPKLGLVTFAKSREVEGRIVSATERRNPTGKYFVSLLAETEVEELPKTGSTVGIDVGLKDFAVLSDGTVHKNPRFLRTLEKQLQQEQRKLSRRYEQAKKDNKPLREAKNYQKQRRTVARIHEKIKNTRTDFLHKLSTAIVKNHDVIGIEDLQVANMMKNNKLAKAISEVSWSEFRSLLEYKAAWYGKEVIPVGTTFPSSQRCSSCGYQNKDVKNLALREWTCPTCHTHHDRDVNAGKNVEAEALRLRTEGTSGIA

SEQ ID NO: 26751 - protein, 370 aa, unknown
  TnpB Polypeptide
MKKTISIKLITSKEQNDSLLDTQKSFAKACNEVVPFSVENRCWNRVALHHFCYFKVRDIVPGIGSQMTCNAIKNVCQSYKVLKIKKSQEVPKISFKETGSVHYDKRTYSIKGNSISLFTTNGRIKASFDICDFHREYIENGVFKEAKLINKNKTWFFNVVIELEDTPPRGGNKIIAIDVGENNIATTSNGTIHGGGELRHKRDKFLNRRGKLQSNGSKSAKRCLKRISGKERRHVKETNHIVSKKIVQEAIENNCDIIVLENLKNIRKRIKGNKRMRSRLHRWAWHELQRFIDYKAESVGITVKYVNPAYSSQVCSQCGSLGSRCKHLFKCLNCKSYQHSDINASLNLRKLGESVVSSMASINTPMVTAV

SEQ ID NO: 26752 - protein, 551 aa, unknown
  TnpB Polypeptide
MKHTFAIQVPIKWDKMSRSQQLRYRRMQKRDSNITKKYLGIIKKEHDNLVTLSNRNKYQIDAGLLDRLTLTTKSRRKVMYDLKSKYPRISTDELQECRESAISTYKSYLELSKIQNSKLSIDKPRKEQGSLSRTILYNGGARGRFSINNAVLSVRDSMDTNWSIVNGVKKKLKHSKLKIPLKLSKYHVEQISKGNIASLRLSKKLSERDEMHYANFSINSQIESQEVKGKPKAVMGIDLGIKKTAFTVVMTDTGIQHRKTWHSDNKFKELSRLEDQIASLQREYYHRLNNSIDRGNISKKLTELRNSRKIISLEYDRILIKELVEHIQSISQTFNLQIGIGKLKGIRKNGRKGNGKGKKFRKKLNSWAFFRFTKLLEHKLSEIGLKNKLFAIDEYWTSIFCYKCNNKGKRPTQSFFKCLNTQCGVRNNADFNGAMNIAKRTVKYRKLAPKSTWSKVGLGRFLRPYQEKGTKTTPKAHSRMRRRSPNTVKKNLAISVPVSVVTSHHKSSNDINFDIIDDIENDLAMVKKYEKAILVKPASLNTPSGRKRPSL

SEQ ID NO: 26753 - protein, 532 aa, unknown
  TnpB Polypeptide
LARRGASVRDRAQDGGVPPRQSQPEGVRPHHAGRLARPRQHGGRLLLPFQARHLRHRDGKPAAPSPPGQPQAPAPLCPANVSVRRRRARVPLQRAQARCYRAHRVLPDRASRTPSAAGVVRLTEPVMQAAKGRLYGAGLAGVARTGGQCRAVWNLFVAENADRYKAEGKFVFYAEMSARLPNLLREDPRLAGLPHRAAQMTVQRLDRALRDCGKAHGNRRKGFPRFKRHADRSDAFSFVGRECGFEAGRMRLPKVGWLRVRGLTLPDGADAKVVAVTQEPNGWHVSIQFQAPPKAYAAPSLPMVGIDGGLAHLATLSDGARIAHPRLARKAAKRLRRLNRQRDRRRKGGTNRRRTVARLGRLHRHVADARRDHMHKATRSLVDTYAGFAVEDLSLRGLMRTRMAGSLADAGLGTFLRVLRYKAEWAGRAWHVHARFKRSTRVCPWTGLAGPKLPLSMRSWTCGCCGIRHDRDVAAARVILGDTVPRASREPASDTKPKRGLAVRGGVRAKARASHGGPPANVAGRHNFDERQ

SEQ ID NO: 26754 - protein, 357 aa, unknown
  TnpB Polypeptide
MIRTYKRKLILTKAQESRLKSWIGACRTVYNLGLQVRIETYKKIQKSTHKYELMKQITDLRKDVSWINDVNADCLQKSIESLDKAYNSFFKGGGFPKFASKKTFNYIQFKHIKVINNSSIKLPKFGIINIFNDESILGYPKTATIKLEPKGFFITIQCENVPQRFASENQTIGIDMGIAKFCIDSNGKTIENPRHFAKYERKLRIENRSLSRKRKGSNGWKKQAKRLSLLHHKIGNVRLDFLHKESTKIAKVNNVVYVENLNVAGMSKNTNLSKHILDAGWAMFRQMLSYKTNVIAINPAYTSQTCFECKHVAKENRVSQYEFVCANCGHADNADVNAAKNIKRIGSSLDRQREAVA

SEQ ID NO: 26755 - protein, 290 aa, unknown
  TnpB Polypeptide
LLFKLFFRRVKAGEKPGYPRFKGKGWYDSITYLQSGFSLNSNILGLSKIGDIKIKLHRPFEGNIKRLTVKRTSTGKWFVSILTDFDYYTPLKHSDKSVGIDVGILSFATLSNGTYIPNPRFYIQEEKALAKANRRFSKTEMGTLERKKCLKTLCRVHERIANKRENFTQKLSKNLVDHYGIICFEDLNIKNMSRNHNLAKHILDAAWSKLVTYTSYKAENAGRKVVLVDPKNTSKMCSNCGMLVEKDLSERTHNCPFCGLSIDRDLNASINILRLGLQSGRKTGRCPSLQ

SEQ ID NO: 26756 - protein, 705 aa, Bacterium sp.
MPEIVSCPSCKERTSVRGSKNPMQCKECNASFNLIIRSVPIRLEFDENGHKNANQFLAEYHIMGDYFSRSIWRRHNYLIKGSNWQIVPKPEGKIACSLCAYEFGAKAKSAVQMNGQYSCAKCSVDDIYGKRAKASIYPGKSASDFQDFKNKLGIEMPYKTYASQAWEQACSAHEKWIDDNWVVFLRRTPLLEELRLCKQRNVDFCDSTENNELCVIRDKWRAILAPMSPLWFFYLYYRARDINQRNRPKRRERIKQLGNKVTSTAYRIAKPICDNCEHLEQHDWGWECKLDSKLGNVRPYTGIPAEAKLSRLPKFTKSTVKIYAKSYHIDLETREAKINMMTKGQQQKARILGADFLRKRYGAKFFKDTSRYPTLFRGDDTLLHSRKTKHEQQFAPYMSDPYWSAWHYDEEEMPLHQSQAGKEELTPFGIYWIAWNSEGKPMIYEIPYYLLYPFSETAPFIPGDWYHIIAYGPIFTCILSILGDKQKVKFFNHGQLVSYKEYFTAQRKKMQKEQDALKKAAQKEDRKISLPRIRIKKESRKIKNNLHKETFKIAQYLLKMPGMALVLNMQKTKLGRGVDERRELNQKLAYWADSNFRMLIGYKLLRVGFIVEEQNFQVAVKKQHNNSDDDLSLEQIIENVPGLAKCPYCETEVGGSWQEIVVFSWQRSIFCSSCNKETNVMLAIALCFWNENKKKMIQKKERAVQ

SEQ ID NO: 26757 - protein, 489 aa, unknown
  TnpB Polypeptide
MSVAVQLPVKTEYIRVRRYRLAATEKLAQKFEQNIAVENDLHQYAVKYLEKTYGYKHLERLYPSTRTDKMYVIKDEIEKRYPKLRRWDLEKIGLHSQAAHQFLMGLMTNFGEYRKVLKKAAKMTDQEKEDYRNNIHGNNPQHRSWYRKGSLAYLRNGKSHSTVSLPSNGQIEVLSAHHIKIQDYGDLQTIDNIKHLKHQNIVASKIKRKGDGTFELQLVLKDQHRRRKPTKKIGADWNMKDNKIFHTSENQRIYLDSKISIKADKYECIINGLKSQRSHLEKFLNPNCQRLVKLTELIRYYNVRRTNVLTEAYRHMAKKLFEGHNLIAIEQLDAKEMRRESTAFNKAGNHAKNRKLAKIKPYEFSQLLTQVADREGKTLIKVDSYKTSQVEYGTDYQEKHDPTEREWVSKYTGKKIIRDLNASQNILAWALEPKKHIKYRERQAAIRQAKEAGVDEAELPKKIKPNWLIEINSKKNRKHKKTIRISLVI

SEQ ID NO: 26758 - protein, 212 aa, unknown
  TnpB Polypeptide
MKYNLAFKYRIYPNKDQELLINKTFGCVRFVYNTILYTANKFYEETGKNKIITPASLKSENQFLKEVDSLALSNAQLKAKISKLHEYIKNCRRDFLHKLSKKLSETYNVVVVEDLNIRGMSQALNFGKSVGDNGWGMFLRMLEYKLMFLGKQFLKIDKWFPSSKTCSKCGNIKEELKLSERSYKCECCGIEIDRDYNAAVNIKNIGKLMLEY

SEQ ID NO: 26759 - protein, 394 aa, unknown
  TnpB Polypeptide
MSNQLYTYKLKLKPSKLQTILLNKHCGAIRFVYNYFLNARKECYLKETKSINYNETSSLLTQLKKDVATGWLKEVNSQSLQAGLKNLDTAFDRFFKKKAHFPKFHNKYRQASFKIPQKTKIVNNKLVIPKFLEGIRFAENKEIQGEIKFSTISREPSGEYFVSITVEKNIEEFPKTGKAVGIDLGIKDLVICSDKKVYKNPKNTYKYEVILKRAQQHLSRKVKGSNNRDRARIKVAKIHKKITNCRKDTIHKTTTDLVKNNDLIMMESLRVKNMVKNNKLAKALSDASFGEIKRQLEYKCIWYGKVLIKIGTFFPSSKTCSNCGHINQNLKLSDRDWICSQCATKHDRDHNASVNILKEGLRQISLGTSDYTCGANISLDLVKLMALKQGASGL

SEQ ID NO: 26760 - protein, 391 aa, unknown
  TnpB Polypeptide
MLRRQGYQFEAMPNSEQLRHLRRFAGSCRFVYNKALALNQRRYEVKEKRLGYADLCALLPQWKLAHPWLADTPSQALQQSRRDLERAYTNFFEKRAEFPDFHKKRRKDSFRIPQGFEVDNQNGRIKVPKMGWMRYRKSRDIAGEPKNVTLSLVTGKVFVSIQTEREVERVMHPSTSAVGVDWGVVHLATLSDGEVVNRCSPLQQHAKRLARLQCRLARKKKFSNNWRRLKAKISKLHQHIANVRKDFVHKASDRISKSHAVVVVEDLQVKSMSKSAKKNVKAKSGLNRAILDASPFELRRQLEYKALWRGGLLIAVPPQNTSRSCPECGHISAENRKRQAKFICVECGFSANADFVAACNIREAGLASLACSYSSGDVSPSWQEPTEGIPA

SEQ ID NO: 26761 - protein, 418 aa, Shewanella sp.
VKIEKAYKFKLEPTPEQAERLAQMAGCGRVVFNDSLELILSIARKQSGIIDRKALYKHLNSLPLAERKALNNLFPSSASLNKQLTSWKKLDNRLWLSEAFNACLQQRQRDLVDKGIKRWVKGKSGFPVFRTRKLAHHSTMRFPEPKKQLRINHNHIKLPNKLGLVKYRNSREVEGELRNATVSLNAVGEWHISIMCLVDIELATHVQGGMAGIDMGIAKNMTLSTDFCGDNGVFEGVHSFRALQGKLAIQQKKLSRKVLGSANWKKQKLKVSKIHQRIANIRRDYQQKATTEICNNHAMIVCEALKVANMSKSAKGDSENHGKMVKQKAGLNKSILDEGWGELRRQLKYKMLWKGGVYAEVNPAYTSQICCCCGHKAKENRTTQSNFVCVDCGHSLNADKNAANNILNRYLSELEQAA

SEQ ID NO: 26762 - protein, 233 aa, unknown
  TnpB Polypeptide
MTDRQKMIFANAKLGTMRIVCKGNKIVAQVVYEAAELQYSDDGNVMGVDLGIKCPAVSYCSDGSVKFYGNGRRNKYMRRHYKYLRKKLQKAKKPAAVIKINNKEQRIMKDIDHKLSHDIVATAAAHNVSVIKMEQLQNIRSTTRTSRKNNHSLHTWPFYRLAQYIEYKAKLAGIQVEYVNPAYTSQRCPICGNIHHANDRNYTCKCGFHTHRDLLGARNICNSTEYVGNRHTA

SEQ ID NO: 26763 - protein, 442 aa, Hydrocoleum sp.
  misc_feature (339)..(339): Xaa can be any naturally occurring amino acid
MKSIRTKLKLNNKQKTLMAQHAGYSRWCYNWGLSLWNQAYKNGYKPNARKLREVFTNHTKPLYPWMKNLSSRVYQYAFINLGEAFKRFFQGLGKHPKFKKKGRSDSFTIDNCGKPIELNGWNHKLPFIGLVKTYEPIEATTKKITISRLAGDWYLSCSWEFTPTPTSKTTEVVGVDLGIKTLATLSDGKVFESVKSYRKFEAKLSRLQYINRNKIIGSANCKKAQLKIAKLHTKIANIRKDALHKLTTYLAKNHGSVVIEDLNVRGMLANHKLAKSIADQGFYEFRRQLEYKTLAYGSELVVVDRFFPSSKTCSNCGHVQDMPLNVRTYDCPDCGISIXNHKLAKSIADQGFYEFRRQLEYKTLAYGSELVVVDRFFPSSKTCSNCGHVQDMPLNVRTYDCPDCGISIDRDLNASINLRNAVGLTVNACGRSAADGSGGSRK

SEQ ID NO: 26764 - protein, 375 aa, unknown
  TnpB Polypeptide
MRTYRFRVYPSKKQEELLNTHLWLAKNLWNELLEVCKQMYEDFDYFPTKNTLQLLAKNYGLYSQTQQEIARRLHDSIMRVFMLRKKGVKCGFPRFKSFERMKSLHYPQSGFWLEKKLRVTPFGEIAIKKHREIKGKIKTLTLKRESSGKWFAIFCAETPKEVPKENKGEAIGIDLGLSTFAALSNGKVIKGPRYLKRYEDRLAFIQRRLSKCPKRSSSRKRAKVKVAKLYEKISDCRRDFLHKISTKLVNDYSIIALEKLASKEMVEEDYGKQINDAGWNMFANMLAYKAEGAGCKVVFVDPENTTKECSNCGSMTEKTLQDRIHNCPCCGLIIDRDLNAARVILIRATEGHSGSNASGNATIVASMKEEAYTYS

SEQ ID NO: 26765 - protein, 238 aa, unknown
  TnpB Polypeptide
LLKDGKFILKIYKRLFTPAKYSPSGVLAVDFNEKQIVVGNRKSEYRFKTNIERALHYKQLAENLQKRYSYPKYNAWLRRRGIRKRVRYFYGKARNIIEDWAKKTSHEIVALAKQYQYEVTREDLTNLVENLRKLPKEHKVSLLILSYRRLEHWIDWQCEKQGVPSIIINPKGTSSICPICGSKLVENGYRKLKCNKCGFEANRDTIAVLNIEKKAYKKMGGSLTTPTAPQMTDVIPNR

SEQ ID NO: 26766 - protein, 311 aa, Enterococcus sp.
MCVLKAYKFRLYPTEEQRQFFIETFGCVRFTYNMLLKQRHIEQPAGKLTPAKLKEDFPFLKKTDSLALANAQMNLERAFRNYYEGRAGYPKLKTKRSVWQSYRTNNQQHTIYFQEGKLKLPKLKTLIPVNIHRRVYGHIKSATISAKNGQEFYVSILCEEKIEPLPQTNQVIQLHFSPETLVESSELSFDVPIFLSENDQIRLKKAEKKLATRAKAAQKRKVHLSDAKNYQKQKHKVATLYTRYYDRKKAYLDELSIGIIRQYDVIHVTNLCQMEEKGLFSESDWLHFIQKIKYKSTWYGKTMLLSEGPSS

SEQ ID NO: 26767 - protein, 374 aa, unknown
  TnpB Polypeptide
MLRTEQGTVMQLTTVVKLQTTPQQFAALVQTLRTCNAVCDRISQVAFHTQTFRQYDLHHLTYHNIKAESGLNANHVVRAIAKVADAYKLDRDTLRTFHPLGAVELDKDLLTWYVQEQIVSINTLHGRLKMHFLCSAEQKQCLRGKKGQADLLLRDGVFYLSCAFAVDESEPFPPQGVIGVDLGIVNVATDSEGNIHTGEQVQRVRRKYHRLRQLLQPKKTRSARKRLQKARRKESRFVKNENHRISKELVRIAYHRQKALACETLQGIRQRGNGLNRAMRTQLHTWAFHQLKLFLAYKARRAGVPLIEVDPRYSSQTCSTCGHCERANRKSQEWFECLCCGLKLNADYNAALNLKARGELSAALMFRQEAIASE

SEQ ID NO: 26768 - protein, 487 aa, Moorea sp.
MTMPKKVEVTKKISTQIVPVVGMDQAVEIELLSTMKKLGIVRSESYNKLGSINYWDIDWKKAYPEVRSFRTPESLGLPSKLMEWTVNDVGKAITASQAACKDAVIKEIYKRFPGKEEQNKRKDLCKQLKTLALLDNSLLHRIVRKEFKRGHSWVKNQIVYQQNGYKCKRLSRNNYQLELAGLKRGKRNKVVVRSNRKIKGQIRLIYNQVLPRFEIHFLVDHGTVEISFERRSIGVDKGYTEAFYDSEGQAHGEGLGKVTTKKSNRICVKNRHRGKLWALHRKLEKIDPAKSARILENNLTRKTENRRYRKNQSELTAIIGAASKSLFKRESLKVFAEDLTQPIRNKRQSSAVSRKLNSWMKGVMRDSLQKWANWTGSVVTEVQPSYTSQIDSRNGTLLGKRTGDNFTGFDGVVLQADHNAAQNILARGTDKEITRYMSKTEVQAVLLRRTARFLEGMGLSLVDGVELGWIDSKHTKTKAFKQLLSGI

SEQ ID NO: 26769 - protein, 303 aa, Okeania sp.
MYCSIKDQKLGRAKMIIYECLQRRNFVFKVKAKPEQYQAIDEAIKTSQFIQNKCLRYWMNNKKVSKYDLNKYCKVLAKEFKFASELNSMYVANPTAPLRQSAAERAWSGISRFYDNCKKKIKGKKGYPKFKKHCRSVEYKTSGWKLSENRKAIYFSDKKNIGTLKLKGTYDLNYYQLNQIKRVRLVKRADGYYAQFAIQIDLKIESQPTGKAVGLDVGIKYFLADSDGNTIENPQFYRKSQKQLNRANRQKSKKYKKGAKPQSNNYHKARCRYARKHLRVSRKRKEYARRVAYCVIQSNDSIA

SEQ ID NO: 26770 - protein, 379 aa, unknown
  TnpB Polypeptide
MEATKTVVCKLDCTEEEFKKLMDTVKAFRDACNYISEVAWERRCFNPVALHHLVYYETRERFKLPANLAIRARDRVAKSYKADRKKQHKFKKLSMDLDKRLFTLLRDKERVSISTIYGRVKPKLAIGDYQQELLKNPVRDAKLVYRRDSGEFYLHITVLVKVPEPEGNNPVGVDIGINNILVASNGFRVNGKPIEHRRRHFRKLRSSLQSKGTSSARRKLKRLAGRERRWINTVLHQISRAFVNSLVAGRDFVVMEKLDGIRDNTKHRKSYNATFHSWAFRRLQQMIEYKCLERGIPVVYVEPKYTSQRCPRCGTVDKRNRNEQLFRCVSCGYQHNADYVASVNLSELARRGWAVVNQPNVGVASHETTYKPLPLGRSG

SEQ ID NO: 26771 - protein, 395 aa, Ardenticatenales sp.
MVIHKAFRFKLKPTREQEPQFWRYAGASRWVWNELLAYRQQVYGETGQAPSLKEQMARLTVLKGEADTTWLREIHSQVLQEPLKHLADAFGRFFKGISGFPNFKSKRRTTPSFSYPQSVQVHENQVYLPKIGWVRFRKSREVVGLIKRATVSHKASGWYVSILCEVEVADPALPHIAHETTVGIDLGLIDFLTPSEGEPIPAPRLLRRLEKKLAQAQRALARCQRGSTRYQKQARKVARLHERVANARRDFLHKLSSALVAENQGIFAEDLSVKGLARTRLAKSVHDAGWGEFLRQLEYKCAWQGKLFHQVDRFFPSSKLHWEQADSTPCGHLNTLSLSDRVFVCQGCGELVGRDRNAARNIKRQGLFDVLAAGQTDSLNARGLEIRPVSAGALE

SEQ ID NO: 26772 - protein, 371 aa, unknown
  TnpB Polypeptide
MKSNKAYKFRLYPNAEQQKLIDKTIGCTRFIYNKMLADKIDCYNINKEKLNNTPAQYKKEFEWLKEVDSLALANAQMNLQTAYNNFFRNKSVGFPKFKSKHKSKKSYTTNNQKGTVALIANNKKIKLPKLGLVNIKCHKTIKKSELIKSCTISLTPSGKYYVSILVEYEQEVEKVKPINVLGLDYSQPDFYVDSENRKPNFPKPKRNLQDKLSKEQRKLARKIKDSNNRNKQRLKVARLEERITNQRKDFLHKLSNRLANEYDVVCVEDIDLRAMSQCLSLGKNISDNGFGMFRTMLEYKLKDRGKYFVKIDKWFPSSKLCNECGCVNSELVIGQMSWVCPSCGETIDRDYNASKNIKEEGFRILSEELAC

SEQ ID NO: 26773 - protein, 276 aa, Carnobacterium sp.
LKEVDSIALQSSLEHLADGFERFFKKQTKYPRFKSKKNPVQSYTTKQTNGNIAISGNQLKLPKIGWIRFAKSREVAGRIVRAAIRKNPSGKCFVSLLCEVDIHPFHKTGSAVGIDLGITDFAILSNGKKRDNQRFTAQMDKKLKREQRKLSRKYEQAKKDGKELWKAKNYQKQKQKTAKLHEKVANQREDFLNKLSTEIIKNHNIICIEDLNVQGMKRNHKLAKSISDVSWSAFVQKLNYKANWYGKKVIKVSRWFPSSQICSACNHRDGKKPLNI

SEQ ID NO: 26774 - protein, 435 aa, unknown
  TnpB Polypeptide
VLKFLPWKFFSRGKEVCPGTLIKQEISSIVMKVKRAWKYRVYPSRVQEKVLISYLHNCKKLWNSLLEYSKKYYEETKKFPSKAQLCQFSKKAGVFSQVAQNVADRLVKSLRGVVTRKKAGRKVGFPRFKSIDRMKSFTYPQFGFKLSDSLELSGVGRIAIKKHREIKGKVKTLTLKKSASGRWYAIFTTETEIEKPEEKQGLKTGIDLGIEHFAYFSDGTVIENPKHLRHAEERLKETQRRLSNKKKGSKNRRKARFRVAIAHEKLANRRRDFLHKISRNLVMNYSFIAMENLNVAGLAEGFLAKSVLDCSWAEFTSMLRYKAAEAGCEVVFVNPAHTSQRCSCCGLVQKKSLAERWHRCLCGASMHRDLNAAINILTRAIANSQERVRQSESTGDSATSGQGGSNAWGEDRNSILEEPRSPASPRGDLERSESL

SEQ ID NO: 26775 - protein, 375 aa, unknown
  TnpB Polypeptide
VRKAFKYPLYPTKSQSLALDTMLETHRHLYNRALAERRDAYQQEQRTVRYGEQSAALKEQRVANPYLAMTNFSSCQATLRRLDRAFHAFFRRVKAGEKPGYPRFKGKDRFDTVEFPSHGDGCKLAGDRVYCQHVGSVKVKRHRLTEGAIKTLSFKREAGHWYLIASCDLGDAPAVRSTTRTVGIDLGLKAFLTTSEGEQVAPPKFYRKAQATVRRAQRHLSRCQDGSNRRKKAKQRVARLHQHVAHQRRDWQHKVALRLVARYDLIAHESLTTKGLARTRLAKSIYDAGWTQFLGILTHKAEGAGVTVVAVDARNTTQLCSGCGALPLVPLTLRDRWYHCATCSLSLDRDSNAALNIQRLGCSRQSVTSTMVGVG

SEQ ID NO: 26776 - protein, 602 aa, unknown
  TnpB Polypeptide
MPVETVAYRYGLLPPLDWGEDVESQLRAQNDLWNKLVEIDRAFRERVRAVAAADAEVITLEAQRAPLLDGLVQLKDQRARERQRLRTRARTPELDAAIAEKVAALRDLAPITKEARKRAYGSARMTLRAIEDERIGVVKAARQEAANKGLWWGNYNAVIDSYETARKRAAKEGADLHLHRYSEAEGRLTNQIQGGMTVKELFSGGHSQVQVVPHHESPTRTGRRWRNHVQQVALRATAFTSAGNRRMVTWPLIMHRPLPEDARIQMVTVHRRKVADRNSWHVVFVLRAPVRERAPTEDAVAVNLGWRKTPTGLRVAAILRHGAEYAESITLPQRMVDGVVAGERNRGDIDRELNAMRAWLSKLDAAQAGDETQRVVAALRNVPHPGARGRHFEWLRTTWERDCPKWRAADLEELRKFGRRWRRYLRDDACGRHWFRDARRDHFRTQVKHLIGNAAVIIINAHDMSETAESDALPGPVQHNRAIAAPSECRLAILNHARKTGAKVVVYGGAHDRCGCHGLPFGTRDRTTLRWACPASHLGVDQDEDYCRLMLREQRGVGETDGGARDEETVELKRSYRPNRKSDRPRGAAEAGSGTTRSNPSP

SEQ ID NO: 26777 - protein, 367 aa, Clostridium sp.
LTGVARFAYNWALGREQENYKNGGTFLSDYDLRKEFTKLKSKKEYKWLNDYSNNITKQAIKDACLAYKRFFKGQSAFPKFKSKRKSKPSFYMDTDKIQFTDKTVKLEKITLSRKKNKQKLNWIRLAERNRIPIDSKYINPRITFDGISWWISVGIEYADNTQTPVNDGVGIDLGIKDLSICSDIDKPYKNINKTQKIRKLKKKKRRLQRKISRKYLINKKGDSYCKTSNIIKAEKKLLKLNHRLTDIRHNYLHQTTTEIINRKPKFIVLEDLNVKGMMKNKQLSEVVAEQCFYEFYRQIEYKSLWNNIKFIIADRFYASSKICSCCGAVKKDLKLSDRIYKCDNCNTVIDRDKNASINLYNYGKSIA

SEQ ID NO: 26778 - protein, 406 aa, unknown
  TnpB Polypeptide
MRILKAYKFRLEPTEIQRQSFAEFAGCRRFLWNKMLSMNLQRLRDKQPIMRYNESAWWLTFWKKSDEFGFLKTAQSQVLQQCLKDLDRAFKDGFDRKQPLKRMPKFKKKGTGDSFRFPQGIKVDGSSVFLPKIGMVRFRLSREVEGSIRSTTVSRRGKHWFVSILTAIEVAEPIHESSTATGIDRGVVNLATLSDGTVFKGPKPLKRLAKKLAREQRNLSRKTRFSNNWRKQRDRISRLHIKIADARNDAIHKATTTISKNHAVIVLEDLRTKNMTASAKGSVDEPGSKVRQKAGLNRSILDMGWFEFGRQLEYKQRWRGGQVILINPRNTSRKCSDCGFTDKLNRQSQAQFSCMACGHTENADVNAAKNILAAGYAVEACGGIGHQTPDEAGTGGAAMRPLPLAA

SEQ ID NO: 26779 - protein, 219 aa, unknown
  TnpB Polypeptide
LRTRIEQCYKQKTGKTVGVDLGIKTLATLSDGMIVENPHFLRENQAKLKRMQRHLSRKKLGSNRRNKCRLKVSRLHCDIANKRSWYMHNLTTMLVNNYDVICIEDLNVSGMLQNHKLASSVSDTSFSMFRNQLEYKCRWYGKELIVIDRFYPSSKTCSRCGWKNKDLKLSDRTFVCKDCGLEIDRDLNAAINIQAVGVDAAIRTQSSRVAGCVEASKME

SEQ ID NO: 26780 - protein, 408 aa, Bifidobacterium sp.
MVSMSIQTVKRAYRFRFYPTPEQEHLLRCTVGCCRKVYNMALAARTEAWTERKERVTYDDTSAMLTGWKKLDEYSYLNDVSSVPLQQALRHLQTGFKNFFAKTGDYPVFKKKTSGGSASFVSSAFTWDWKSRSLTLAKMRDPLPIRWSRTLPRHAKPSTVTVSLDAAQRWHVSILVEDEVETLPDTTGQVGADLGLESLCILSNGEKITNPRWYRNAETRLARAQQELSRKQKGSNNYRKARLKVARAYAHVRDMRTDFLHKLSTRLIRENQTIVLEDLAVSNMSRTCAPKPDPDHPGQYLPNGQSAKSGLNKSIMDAGWREFRMMLEYKARWYGRQLVIIDRYYPSSQICSTCGRNTGKKPLDIREWECPYCGTRHDRDVNAAKNILAAGLAVIACGDPRLQTATIR

SEQ ID NO: 26781 - protein, 484 aa, Acidilobales sp.
MSSGGNPRDVSARDPDPLQSFRELIEKRKKSSKRTVRLRLLPEKHEEEILFDIGLTSVRLWNELNYEKRQLFFKNDLTPEKRIEINRKYYHKYKNFLGVNAGQIINKNEEAWESFFELLKMKKHGRLPPHIKKISPPGYWKDKITGEKKIHILIRNDRYYLEPVNESEGRLVLKDFKLSIRYVGRIKWEGKQGRLEIIYETGRWFAYIPIEVGEKPSKSNPKGYIKPNYRDEKDRIVDPKSIKQRDPVGDKKAFIDVGLNNLFAVVVSDGSALLVKGGVIKSEYCWWKREIATYQSIRDLLRNAGFSTWIKYHEKYLKALYKRNERLRHLYRTAIRFLAEMLWSRGVRKVYIGYPIMLSQHNGNEYNTNIWWYRKIILWIIDVFIEYGIDIEIVPEDYTSMKCSICGEIHKNGRIYRGLYICRKTNKKINADINASLNIARRIGYKITITRKIESYLITHNGVKPLIPHQRANTRDPEVRNLAL

SEQ ID NO: 26782 - protein, 365 aa, unknown
  TnpB Polypeptide
LNKSFKVRIYPNEEQKILLEKTFGCARFIYNYFLNLNTKLYEFYKINLSYNNSSKVLTELKKQKTWLKQIDCVSLQQTLRDLDRAYQNFFTGKSKYPNFKKKQGKNSYRTNRNIKINNRYITIPKVGMLLYRDTYKLEECNISKIYNVTISKTPSGNYYASISAEVDIIAFEKTNRSCGIDLGLKDFLIFDTDEKINNPRILKHLEKKYRKLAKAVSRKQLKSNNRNKARIKLAKFHEKIVNTRKDFLHKLSTNLVREYDIICIEDLCFKAFMRTDKAKSYQDVSQSEFVRMLEYKAKWYGKTISKIDRFYPSSQLCSNCGYKNPDIKNLEIREYDCPICGTHHDRDVNAATNILNEGLRILNSI

SEQ ID NO: 26783 - protein, 352 aa, unknown
  TnpB Polypeptide
VAKDSLKNFVKITLQSYFPYTVELKLKNGEVYGSVSFELPTPEVRYTKENGVIAIDTDASPIHLAIAEVSKTGELLSYQTISLHHFLELSQNSKDHQEWILAHQIVDLAVEKGKAIAIENLKKLKKGVRGDGKATLRKRLHQWNAKKFLQKLKRVAMLKGVEVVEVNPAYTSVIGMLKHAPQLSIDKDIAGAYVIGRRALGFKEDMHENYEKLLKDKAYLEFALKRYEEREKELRELIEKESNEYKRNALKSELRSVENSKKLLINLLQSLQSEPSSCEGADGRNPERGRGSKASSSAWRVLKVALLFPILGRVLPRDLSPLKPVLVEGVWDRVRSRLVPFEAGGTVPIRDF

SEQ ID NO: 26784 - protein, 424 aa, unknown
  TnpB Polypeptide
MAKVARTVIVPSIVLTKKKYEVLKELEEMYKQMVMELVEHGFRHGIKSFTGLKKHMYRILRDRYPQLPSHYVHTACQDAATRIKSFLELKKRGRVYTEKPAVREVSIWLDDHLWKPLGYTAIRVATHKGWIVIELQPHKLYWKYINTGWRLRTQPKLKLDHRERRIYVYFVFEKDVEEYKPRGWIAVDVNENNVTVLVDGKAYKLVTMLRKTIERYHEHRKRFQEKLCIQLNGKKYPLYTLWRRKMSRLRERDRKTDWRRKVAVAIVKTAESLGYGIIVEKLPKRVAEKMINGVRNSELRRRIYQAAFRGTVKAIRDVAEKHGVPVVEVDPRYTSQTCPLCGFRPMTRRAGRVMVCPLCGFSHDRDVIACMNLLMRLVDEGAVPLPLRPMSPRPEVAVLPMRAWAEANPLEATLKETKLTGMTL

SEQ ID NO: 26785 - protein, 409 aa, unknown
  TnpB Polypeptide
MIKSTAFSTKFANQDKRTRLDEFLHDYRNAVEFYVDYLWTNLNKSFEIPKFISTKDIYPTSTYLSQRALKCASTQACGMVRAATEKRRKQLFVLKKLMREGANTRQLQRKIDTTALVKPSVPKKLPAELNSVCATLHVSENSFDNWFVLRSLGKKYGKILIPVKQTRHSRKLEKSGTEMTSFLVSRESINCRYEIKKPAKRTNGRVLGADQGVTTCLSLSDSQVTKRCMHGHDLHSISSKLSRRKKGSKGFRRAQAHRTNYINWSVNQLNLNDVKEVKLEKLFQMRKGQRTSRFLSHFSYKQIHTKLSDRCESSGIIFTEQSNVYRSQRCSDCGFVHKSNRKGKEFICRECGVVHDADINSALNHEAELVELPFGFRHLKLNKTGFFWNTQGVFDLNGQEITVPVGSKQ

SEQ ID NO: 26786 - protein, 358 aa, Ktedonobacter sp.
MSKTTLSVRLYPTPEQGRLLMSHCQEYISTVNVLVAAFASGVLEGKVSTKDFTASLPSAVKNQALRDAQSVFKRSFELGCLPLLKKPICQWNNQNWRIEDGMLVLPTCRDGKTHQIRLPCASGAMSGKAGILRIKKKRGKWIADITLSMEDAFPSDGQAVMGIDLGMKVPAVTHVSGKGTRFFGNGRSQRYMRRRFYSRRKHLQKAKKPRAVKKSKGKEARWMKQINHQLSRQIVNHAHEQGVGTIKVEALAGIRKGTTRTSRGANARKNNRMKNTWSFSQLSMFISYKAAQLGIRVEQVDPAYTSQECPACRARNKAQDRTYVCAECGWMGHRDGVGAINISRRTGLSDQRVGATGS

SEQ ID NO: 26787 - protein, 499 aa, Lachnospiraceae sp.
MRNTANFYIRNLMTGLKKVPSARTENEAFVIETVSGAVPGINRQLLEKRDRKVLRIMGDKSLSEEARAKKAAAVKYLQFTVPTVEKWFASYGLLDAVFKHTGNRDYRAFHAHVMQNAVRDCCEAWLSYFEGLKAYAPGSGHTGKPKIPGYKKSGGRSTAVFSNLACTVRHGTLFFPYGVDGGGKKSRCSVRVSRLPHSSKDKLIEVRAVPYFGSFQLQVVTDDGVPEGSLLPDIKDIINADGSPAGVMTLDPGLECFAAIADNMGNTPIVIKGGALKARNQWFNKRLAALKSEQMRGHDPESFHPVPTRQMQRISRKRAAFLRDTFYKYAHYICRTAEGRRIRYIIMGYNKGQKQGIRIGRRNDQAFVQLPFAKFRRILACTAAKYGIRVIFQEESYTSKACFSARDPIPVFGRENGTPSFSGERVSRGLYRQPDGRVINADINGSLNIGCKYDSRIFPEGKDYSYLYGTVKSNPRGEPQKERFPDVAYDHKSSPGQTG

SEQ ID NO: 26788 - protein, 421 aa, Fischerella sp.
MKTTYQYRLRPNKRQAQIFESWLELCRKQYNFRLDERLSWWSENRCPVNSCSLVSCSIAPPREQPNYYEQKKDLKTSKQLFPEYGDVHSQVLQNVVERVKKVYERYTVPDKNGKRSGKPRYKKVGRYRSFTFPQMKVDSIQGNRINLPKIGLVKMIVHRPIPVGFQLKTTTIVKKAEHWYISLVLEDVSIPEFIPDIIPTAENTVGIDVGVNSFLVTSDNEVIKNPRWYRKSEKRLALLQQNLSKTKRGSRRRRHLGKKLSKTHNKIANQRRDFHHKTAKLLVDNHEVIAHEDLAVKNMSKRVAPKIDDEGKYLPNNQSQKSGLNKSIIDCGWSQFLSILTVKAAKAGRLCVAVNPSGTSQKCSNCNQDVPKKLKDRWHSCPHCGASLDRDLNAALNVKQKLIQRRSVGRHDRNAQAVLNS

SEQ ID NO: 26789 - protein, 562 aa, Desulfovirgula sp.
MRKESTKNKFSVTVCGEFFPESYPAFRSSRWSRGEEDPLVTEMRLFCSCVRWAFNRLLEGVSRDEIKKRGQELFGLNSRYVDDARLKAQALLDSQRELLVLEIEETEAKLGRARKKLGLAATKLAKAEKKGAAPAELENLRLVVKGRQMRVASLEGRLAELEAYRRSGAIPKVVFGGRKLWRRICKGRATREEWRAARKNRLYARGDETKGGNPNMKVFFRDGEFRLAVTVSHLSEQVGLDALGRPKMTRAPRVEGKLWLPEKHRDLVRIWLAAKLPYTVELIRTPQGCYLVHLTFDLGEVPEPDFAEGCLALDTNPDGVALCNVDASGQPELWPEDFSIPYPGNLGKYEGEFQVITYPNGFLYIRIPDLAYVSGFRRDYLIGVLAKVVVDVALFLGKPISLEDLDFGKDRLDTNRKFNRMASNFPFAKVVEAICRRAVKEGVPFRLVPPRHTSTIGYWKYMRRYAVSVHCAAALVIGRRAMGYREHVTRELKQLVAQIKENLAQKVSPDKPREGEGMTRRVGALLKRLDRKMTTHNGLTLEQQEVFYSVWHDFRELALALR

SEQ ID NO: 26790 - protein, 357 aa, unknown
  TnpB Polypeptide
MVITKRVKLYFPTQEMESLFKNRADKVTKCVNYWIDVIRSKESTKLKDLQGKPYFKARNDFNLDSNTTQLAEYFAIRMVRRGKKRRMDSPYLSKNLLLVKSLKIIDSKIGFLVGDKKRYWVRFSGEELPKGILRESIVKKRNKEWFCHLLFKIELPKEKKYKRCLGVDLGIAKTAVIADWNGNNTRFFNGEPYRFKKNHYYQLRKKLQSKIKQGNVYKLLKRISEKEANWVKNENHRISKEIVQMAVKNKRNIALEKLTGITGRLKVNRKTRKMLKGWSFSQLDTFIEYKAKLAGIKVVYVDPRETSKTCPKCRYSSRSNRRTQSVFKCRKCGYESNADRVGAMNIALRGTELLASQ

SEQ ID NO: 26791 - protein, 418 aa, unknown
  TnpB Polypeptide
LKIRRAYKTELKPNASQRKALANHCGAARFAFNWGLARKIGSYELTGNAPSAIDLHRELNILKKTDHPWLYDVSKCAPQEALRDLDRAYANFFRRFELKKQGKHRGKVGFPRFKSRRKGLGSFRLTGSIHTEERRIKLPRLGWIRLKEKGYLPAESETINILSACVSERAGRWFCSLQVEEERGEPRPASGPPVGIDLGVKTLASCSYGEDTRVHYENPKALAKALKKLRRLQKKLSRQEMGSNRREETRRQVAKLHYRISCVRSDAIHKATSSVVAKAKPPEMRPCLVGVEDLNVSGMMKNRRLARSVADASIAEFRRQISYKCSWCGVELVVVPRFEPTSKVCSRCGCAKDDLTLSDRTFACEACGHTADRDENAADNIRLLAVSSTERINGRGGDIRPADSGGRTPMKRQSEEVA

SEQ ID NO: 26792 - protein, 375 aa, unknown
  TnpB Polypeptide
MIKAYKYCLSPTTNQKEQFMQHIGACRFTYNWALEQKIKSYEKNKTNLSRFDLQYMVVHNLKKENVWLTEVNSQSLLNSLINLESAFTKFFREKKGFPKFKSRKNRVQSFHVPQYYTVNFENNTIKFPKIGLVKAKLHRKFEGTLKTATVSMNNVGQFYISISVDDGKEIPTKQPFDESTTVGIDVGIKHFATLSDGTKVENPRYLQNSSQKLSVLQRRLSRKQKGSSNRNKARIAVAKQHLKISNQRNDFLHKTTSKLIRENQAIAVETLNVEGMLKNYNLAKSISDVSWSEFFRQLEYKAEWYGKTVLRIGRFEPSTKICSVCGYYNREITLSVREWKCPECNTVHDRDINAANNIKTFALQKQNLLTVGTTG

SEQ ID NO: 26793 - protein, 332 aa, Lyngbya sp.
LQQSLNDLEQAYNNFFKSCKGKRKGKKVRPPKFKKRNTKQSARFRVGGFKLKEDKISLSKIGKLKIIWSRPKPNPPSSVTVIKDAANRYFLSFVVEINQQLLPESPNNVGIDLGIKTFAVLSTGEKIDAPKPLKSKIKRLRKLNRNLSRKQKGSNRYERARVRKAKLYARMKDTRKDFLHKLSTRIIHENQVIVLEDLNVAGMVKNRKLSKAISDLGWRQFRTFLEGKAEKYGRDFRVISRWEPTSQKCSYCGFVGGKKLDLSIREWTCLNCGTVHDRDSNAAVNILVAGGHSETLNGRGGKRQTFVKEAAAVEASTHLEKPVQLSIFDILQ

SEQ ID NO: 26794 - protein, 260 aa, Anabaena sp.
LSPDYEIKAILEYLCQQSGKLYNSGVYFARQTFFKTGKLLTGKFDLAYEPSVAKTMIAQSMPSTPAQQTLLSVIEAFKSFKGLRSLFLNGQLPFKPKAPGYLTGSKLFKVAYPNSGGQKPTLINGQLRFSLGLTVKRWFGISEFFLPMPLNIDISKVKEFTILPKNGAFYLEMSYEVEKQNHVLDINQALSIDLGTADNLAACVDTLGNSLLIDARAMKAMNRNLGIDLSLLGRRCLTNAARIRVWVLPKSILSVESQSL

SEQ ID NO: 26795 - protein, 401 aa, Okeania sp.
MKVVDRHIIRRTHNFWQVCDELAFKSKNLYNLANYHCRQHFFCTGKSLSLTKLYHATKDSDAYRALPTKVSKQIIKCLVATWRGYFQAIKEWLKYPGKFLGKPKIPKYKNKTQGRNVVIYSKESVYKAPLKDGICHLSMSDIKIPVVVDTVIEVRIVPATACYIIEVVYEKTLQPQIHSTYVAGIDLGIDRLVALSTNKPGVKPLLINGKPLKSVNQLYNKRKAKYQSNLKGNRKTSRKIEALSYHRNRFVENYLHNTSKLVVNYLVKSNIGTVVIGKNDNWKQGANIGKINNQKFTQIPHSKLIEQITYKCQLAGIKVIETEESYTSKTSAVDLEKPICHENYVGKRVKRGLFRSGTGIVINADVNGSLQIIRKKFPGAFTAEGIVSCAVQPVLVNPISR

SEQ ID NO: 26796 - protein, 505 aa, Okeania sp.
MSRATTPSFITELPLKVSSQQNRELEARFNAAMRLYNACLNEAKVRMELVKNSSAYQQAKSLPLFVTRNNKQLANPERKQLFNEARKQYRFSDFGLQAFATLTANRAKWIAEKIDSNTQQKLATRAFNAVEKVLFNKAKKVRFKITTRFRSIEGKSNKQGLRWKSSLVVWGKLKLLPIIPKNNPVIEHGLNSKVKYVRLVWRELNGKKRWFVQLICEGQPYEKPQNYVSSGTIGLDLNISNVAIVADDYAGLLPLADKVPTYQKEIRQLQRKMERSRRANNPDKYESNFQKRVGRKIVTKKGQLKKGQQTKWCHSKHYYKTAIKKRELERKKAAYTKSQNRRLVNDILRHGSTIKTENVSVKAWQKIWGKAISNKSPGFFISELHRKAENAGGQFIKFSTQKTALSQTHLTGNRVKKTLSQRVHTDETGVVMHRDLFSAFLARHINEDELSLHDALQEYQRLEPVLQEAWEHYQINCKQVSLSESRSAHSPSEQFSCYLKKLSTR

SEQ ID NO: 26797 - protein, 370 aa, unknown
  TnpB Polypeptide
MIQRAYKFRIYPNPDQEIQIIKTFGCVRFVYNNCFAKRQEVYKTDNKTMGKTACNNYVNRELKFKFIWLKEVDKFSLTNSVFNLDTAYNNFFAGKSDFPKFKSKHNNKHSYTTNITNNNIEVNFEEHCIKLPKLKWVKAKVHRIFSGKIKNATISKAASGKYFVSILVEEEEQGLPKLDTTIGFDLGLKDFLVDDKGNCVKNPKVLNDYLNKLARCQRRLAKKIKGSKNWDKCRIKLARIYEKIKNVRRDFQNKLSKKIIDENQVIISEDLDIKAMKDNPKLARAISDAGWAEFMRQLEYKARWHGRIYHQIDRFFPSSQTCSFCGYKNSEVKNLYIREWICPKCENIQDRDINAAINILKKGLEELNML

SEQ ID NO: 26798 - protein, 160 aa, unknown
  TnpB Polypeptide
MLEELMMKMIEFDCGDPKRIQHFIKVHSFSQLIGEKEGLDAHTLFVLEDLSGIRNVTERVRIKDRYVSVSWSFYDLEQKLIYKAKQNQSSVIKVDPRYTSQCCPICGHTEKANRNKKIHLFTCKNCGYKSNDDRIGAMNLYRMGINYLIDSQVPNTVVTE

SEQ ID NO: 26799 - protein, 398 aa, unknown
  TnpB Polypeptide
MRQYMNMAQRTIKIKINCSEEQKGILYTTLRQFTDAFNRACSVGWEQPRVNGVELHNLTYKDERNISDLPSQLVCSSRVKATEALKSAKTLAKKKRKVSCPKSALCPIRYDARSSSIKLNASKASLASIKGRQHVTFQIAPYYKKYLHWDIGSADLCTGKKGQLFLHVVVKSSDPQFVSSGETIGIDLGINRPAVTSDNIFLGERHWREVENRVFRLRRKLQAKGTKSAKRQLGKIGRRTNRFREDCDHVLSKCIVGSVKPGATIVLEDLTDLRTRTRVRKKQRRRHHGWSFARLKVFVGYKAAAKGVSVAYVDPRYTSQKCSKCGHISRANRKSQSEFKCKRCKFSLNADLNASRNIRSNHLASIAMSETGGLPVNQPIVGACSHVTHKPPDLSVGS

SEQ ID NO: 26800 - protein, 399 aa, unknown
  TnpB Polypeptide
MDSPLIFKYLFAKISLMARRGNKAIRATVSMKIAVSDSLLVLVNNYVKALRFTLFWLKENVPNPNEKGVISKVHEELYTRLREEYNLPSKVAEDCYRDALSVYKGWYNNPKKGRFPRVYKPTVWLTPKASYNANFEAMTVRIASVGELPILGYPRNLKDYMSWKMREARLVVKDGKAFLKVVFEKPGEENVELKESIAVDVNMSEIVVGKDDKNYVRISTRLHEVHHWKSLAENLQKKYPRRWMGNKRILYRVRSFHQRARRVMEDFARKVGKWVVEIAEDFGANVIKLESLKNLVKNVDKLPKEFRDKLYLMQYRRLQYWIEWQAKKHGVVVKYVNASYSSVSCPKCGRKMEEKGYRWFKCSCGYENDRDVIAVVNLNRRGSLTLSTAPQMRDVNPNR

SEQ ID NO: 26801 - protein, 266 aa, Nonomuraea sp.
VRTAYKVRAYPTTEQAAVLNRTFGCVRVVWNRILAWRHARYHGERVTTSFTQANAHLTAMKASDELEIINPRHLAKREHNLARYQRRMARRQRGSANRAKAKAKVARAHRKVRSSRTDFLHRTSARLVRDHDVIVIEDLAVKNMVRNRKLAKAISDSGWGAFRRMLEYKAAKNGRHLIVIDRWYPSSKTCSACGHLLAELSLSTRTWQCQSCGTRHDRDINAAKNILAAGLAVSACGGDVRHSGSSRVQSPVKQESQPVMAGIPRL

SEQ ID NO: 26802 - protein, 398 aa, Nonomuraea sp.
MRRSFKFLLRPTSKQAAALAHCLEDHRQLYNAALEHRRIAYRKAGVTVRYGDQSADLKHIRADDPGGQARWSFSSQQATLRRLDKAFAMFFARVKAGRTPGFPRFKGRGWYDTVEWPKDGDGCRWDSQPHHPVTIYVRLQGIGHVRVHQHRRVLGNIKTISVKHEASRWFVVLSCDDVPAEALPATGAMAGIDMGVASLATTSDGDHLEHKRHFAASAGLLAAAQRGLARKKRGSNRRRKTVARVAALHAKVRRQRLDAAHKAAKALVAGYDLIVHEALKVTNMTKRAAPKPDGNGGYLPNGAAAKSGLNRSILDAGWGVFLTILSHKAESAGRELIAVNPANTSRTCAECGHCARENRVTQAEFRCQQCGYEAHADVNAAINILRAGLALRRVARAA

SEQ ID NO: 26803 - protein, 400 aa, Nonomuraea sp.
LIGMSRYRLTPTPAQEQALAEHCGHARYVWNLACEQHALWRPGRKSAPGFAEQCRQLTEARAESEWLRAGSIIVQQQALKDFAQALANFFGGTHRRPTWRKRAQGEGFRIVAVKAGDVRRLSGNVGAVKVPKIGWVRFRWSRTVIDGVKSYRITRDRAGRWHVAFAAIPEPIPAPDTGEVVGVDRGVAVSAALSTGEMLNAPGLRDPEKVRLLRLLRKLARAKRGSNRRGKVKQAIAKLKARETHRRKDWVEKTSTDPARRFDMIAVEDLKIRNMTTSAKGTIEAPGRNVRQKAGLNRSIMAAAWGRLVQRLEHKAPGRIAKVNAAFTSQRCSACGIVDAKSRESQADFRCRSCGYACNADVNAARNIELAAGHAVSAREGPRVAGPMHREPQRDLLLVG

SEQ ID NO: 26804 - protein, 399 aa, Nonomuraea sp.
VRTAYKCRAYPPPEQAGVLNRTFGCVRVVWNRTLAWRHDRYRTQRAKTGLIQANAHLTAMKATDELAWLNEVSSVPLQQTIRHQQTAFANFFAGRARYPRYKSRTGRQSAEYTRSGFRYRDGRLLLAKMDRPLAFVWSWPEVDPASIDPTTVAVSKDPCGRWYVSFAIDVPAPDQLPVIGAMVAVDLGVKDFAITSDGERIPNPRHLARRDRNLARYQRRQARKIRGSSNHRKARAKVARAHRKVRASRTDFLHKTSTRLVRDHDVIVIEDLAVANMVRNRKLAKAISDCGWGAFRRMLEYKAARHGRQLIVVDRWLPSSKTCSACGHLLTQLPLGIRTWQCPSCGTRHDRDVNAAKNILAAGLAVTACGGDVRHSGALRVQSPGNQEPQPVKVGIPCP

SEQ ID NO: 26805 - protein, 395 aa, Nonomuraea sp.
VAVRRSVKFLIRPTSKQAAALAQCLEDHRQLYNAALEHRRTAYRKAGVTIGYGEQSAELKEIRKTDPDGQGRWSAGSQQQTLRRLDKAFAAFFRRIKAGHKAGYPRFKGRGRFDTVEWPATKNGASWDSQPHEPATRVYLLGIGHVRVHQHRAVKGRVKTISVKRDGARWYLVLSCDDVPAEPLPATGAVAGIDLGVASLFTTSDGEHVAGPRHLLTTADRLADAQRDLCRKERGSERRRKAVARVAALHAKVRRQRLDTAHKAALTLVRGYDVIVHEDLRIANMTRSASGTIEQPGRNVAQKAGLNRSILDAGWGVLLRVLAYKAESAGRELIAVEPRNTSRTCSRCGHCARDNRLTQAAFRCLGCGHAAHADVNAAINILRAGLALRQAAEAA

SEQ ID NO: 26806 - protein, 482 aa, unknown
  TnpB Polypeptide
MEKGKQIFIYTRKLNANKSHKEQFAKRFRMAEDIYKKTLITLLKRYSKMKKDPLYKKAYKFPKGKERNAILKELGVKYDLVGKFTAGTFANDYRNARNYSDYIPSDVAIKLGFRAWDAFSKVMFAKGAEKVNLKGTLTSFEGKRNSGLIVTDNIFTFSTRKKKVSCTIRNENDAFEEEVLRNTLKYNRLVRRFEFGKWNYYVQSIFEGTLPTKYTSELEGSVGIDIGTSTIAVSSYYQTELEELAKDVMIDEQEVVRLNRKLDRQRRANNLHKYNEDGTIKRGVRKPWVDSKEYLKTKAELSELHRKATEQRKLAHKTLANRIVRMGSTFVVEQMSFKGLQARTKETKVSEKTGKYQSKKRFGKTLLHKAPAMLIEQLRYKTMYQGKTFILANTREVKASQLNHLTEEYTKTSLGTRAKMIGDDLVQRDLYSAFLLQHVGLNGVTVDLDGCKSDFDTFLRNQEFTMSQLTTDLKSVGKEYFN

SEQ ID NO: 26807 - protein, 412 aa, unknown
  TnpB Polypeptide
MRSQKLRLKLTNEQESLAWWYSKVSRNYWNLLVDIDKRNNKGEFDEILSRNGNKTYYSKFYDREVYRLNQSDYINLAKIVVAKNYGDDSETWSWYYQPNQSFIYTSLSKEVVTVRRQNKGRLNFRGINKVQPSFNVRCDVSTNKKRPSRIYLRDKGKLQIPSLGEVAFGSTRRDFDLSCKKQVATISFDGKYWYLSYTEDIEVQVTDLSDYTDGIGVDLGIKTLATVSDGTVLPNIKTFRRVRILNKRLKRLQRKVSRKYLINKCNKHNKTKNIIKLERQIKLIHCSIKNIRINHIRKFVSDLVKKQPQYIAIEDLNVKGMMKNKHLAKDIINCSFYTIREYLIRKATERQIAVRLVDRFYPSSKTCSNCGSYKKDLKLSQRVYHCDNCQEKIDRDFNASLNIARTDRYVLA

SEQ ID NO: 26808 - protein, 347 aa, unknown
  TnpB Polypeptide
VQRLVYNQAIQHYNDKEFDVRNWMKLYDFVAAELNMDYVKEVPHQIKKIAVKDAYTAWSVNRRQAKKSGTPFSLKFKSRKDKVQSCYIPKTAISILGIYHTKSGRMKFSETDWFANSEICASRLICDHGRWFISIPKKITTQQTPETQGGAVAVDPGIRNFGTYFSTDGRFGWVGQRAFERILKLNIRIDKMRSIIATTEDKLYKFRLRRAIDRLYHKIRDLVDELHWKFMNFLTKEFSVVIFPPFNVSEMNKVSNRKIRKVVVRSMMALRFYEFKERLRNKCKERHVLFIEQNEAWTSKTNSFNGEVMLNLGGREFFNYQGMKINRDVNGSRNILLRAMRDSSANS

SEQ ID NO: 26809 - protein, 615 aa, unknown
  TnpB Polypeptide
MKKKKKSDSPLKVIKTSLKSICLDKETILTINNYCKNLNLIVIHTYQFLRLFILHKYHQKETLPKIDEKFIEHIIKTIAFGDKRGRKFVNEELAIFYETHYKPTLSKEEKLSYSKYGNTIGYTATAILTCLETNIKTHFTKHLRRFINIQFENDKQTTEKQTKEEKQQLYKQTKILFDDIIYNTDKSENEYKAWKTTHKSFLIPEKIKKNVHYDLECSPQHYLSPMIYMSLKLEEQEKKLFQFCPLRRTLIPKYMTIDTKTLITMLFNTKKHETTQGKLLDNLNDSKELIWKTLFNMEKINTLMNVDKYTFNHMFSTDGVGCSLLFTRVDATDTNLPPPKNTGNKEYDYITELTNEELNHLKDYNKVAIDPGKNTLMFMTDDNGNTLTYTKMQRRIDTYAKKKRQIMMKSFEENNIKKLEEPLNQTCSMSCNYEKFIAYLKLRNQINQELQTYYEQELFRKLRWRSHTYTQKSESILINKIKRTFGKKIVIGFGSFQQTQQMKNCMPTPNKGLKDLLAKHFKLYIVDEFKTSKMCSFCLEGETGYYKQRENPRPFRKGMVNVHGLLTCTKCSKSSHSHLINRDLNGSRNILYLMKEWIQYRKRPTQFCRKPFFIS

SEQ ID NO: 26810 - protein, 383 aa, Microbispora sp.
VQLRYNFRLYPTPGQRQALARAFGCARTVFNDGLRARQEAHAAGLPRISDGELSKRVITQAKKTPERAWLGEVSAVVLQQAPADLNTAYRNFFASISGKRKGPKIAPPWFRSKRDNRQAIRFTRNARFSVTPGGKLRLPKIGDVPVRWSRDLPAEPTSVTVIKDAAGRYFASFVVKTSNQPLPESAAEVGIDLGLTHYAVLSDGRKIDNPRFLRRAERRLRKAQQNLARKAKGSNNRKKAVVKVAKAHARVADARRDRAHKLSTALIRENQAVYVENLAVSGLGRTRLAKSVHDAGWPQFVSLLEYKAARYGRHFAKIDRWFPSSKMCSACGAIQPSMPLAVRSWTCPCGAVHDRDVNAAINILAAGRADRLNACGGTVRPAA

SEQ ID NO: 26811 - protein, 441 aa, unknown
  TnpB Polypeptide
MPQAITAKLKLNLTTEQKTLVSQTALAYRDALNYTSRVAFDAGKTSNGAKLQKVVYNELRVRFGLGAQMACNVPRQVSATYKTLWSKVKQNTNAIAKGYTKKRYKGLDKAPKYVSRTCTLNYQRDYSFKTNQQVSVITLEGRIVVDYDGYNKHLALIANGSKIGAAKIVYQRSSKTYYLMVSLEVTTPEVDPLTITRVSGVDVGMRYLAVETDLNNKSKFYSAQSVRHKANRYHKSRQTLQRKGTRSAKRRLIALSGKERRFIADVNHQISKQIAKPNSLIGLEDLTEIRDRTQSRSGKKASKKQREAHRNKAKWSFAELHGYIDYKAILNSSLATKVPAQYTSQSCPKCGHTSKANRPNKGLLFRCECCGHELHADLVGSRNIAMRTLLVRQDWTCTGALSVRPNVSSVETKAEILRRFSELRWSSDTSPHQIGTPIDGG

SEQ ID NO: 26812 - protein, 307 aa, unknown
  TnpB Polypeptide
MENAYAAFDRFFKKQSKFPRFKKKNKSDVKMYFVKNNPKDCLCERHRIKIPTLGWIKLKEKGYIPTTKDGYVIKSGTISYKAGRYYISVLIDISDTERPQLNDFGLGIDLGVKEFVVISNGIVKKNINKTAKLKKIEKQLKREQRCLSRKYEGLKKRNNKIKGEATRQNIKKQVLKVQKLHHRIDNIRTDYINKCVNEIVKTKPSYITIEDLDVKGMMKNKHLSKAVASQKFYEFRTKLETKCKELGIELRIVNRWYPSSKLCHECGCINKDLKLSDREYICKCGYHANRDYNASLNLRDAISYKIA

SEQ ID NO: 26813 - protein, 445 aa, unknown
  TnpB Polypeptide
MKIVSSYAIKLFGDLKALENTIVIYREALRFVIPVVDTYWDGIKDFKYVKQRMSYVERLIHSTKENEAIYGFDKEFPKFPSYLRRAVLNRALGIVSSYRSNLENWEKEPKGQAPRLSLKHYAYPAYYKGNLFRNFDPIHKTIELKVFKNGDWVYEDYQLKTSDCNYYQNHLTDKKQNVPIITKKGRRFYATFSYEEETVLVPEESISKVCAVDLGVGTDATCCIMGADGTVYARKFIHFGKEHDQLNTQFGRIKRNQRRGNKKNTRLWKRVSGISQDIADKTAQAIFEFGNQHGVDVFVLEFLEFKGKQTVKRAHFWRYKRIFSVLEMKAHRHGLRISRVCAYNTTNLAFDGSGKVKRGWEISKETPYSIIQFASGKVYNADLNAAYNIGARYWIRHHLKSVPETERLVLEAKVPQVAKRNTCTLSHLISLRSELITLNVKRTQA

SEQ ID NO: 26814 - protein, 360 aa, unknown
  TnpB Polypeptide
MFAKGAEKVNLKGTLTSFEGRKNVAVSVKDSIFTVSTLKKKVSCTIHNENDAFEEDVLRNTLKYNRLVRRFEFGEWNYYVQSIFEGILPTKYTSELEGSVGIDIGTSTIAVSSYYQTELEELASGVELDQQEVTRLSRKLDRQRRANNPHKYKEDGTIKKGVRQPWVDSKNYLKTKAELSELNRKATEQRKLAHKTLANKIVRMGSTFVVEQMSFKGLQARTKETKVSEKTGKYKSKKRFGKTLLHKAPAMLIEQIRYKTMYQGKTFILANTREVKASQLNHLTEEYNKVSLGTRVKMVGDDLVQRDLYSAFLLQHVRLDGVTVDIDGCKSDFDIFLRNQEFTMSQLTTELKSVGKEYFN

SEQ ID NO: 26815 - protein, 408 aa, unknown
  TnpB Polypeptide
MSDILILCERHIVKPSSPLFLECDHLSFLAKNLYNSTLYYQRRSFFDYDFKNYYAVNREFTHTNQPDYRALPTKVSKMVQMLVDKNFKSYFALVKKKKTEGYSPKVKPPKYLDKTDGRCTVPYPKGALSLKVKGYVKLSKTSIMIKTNVPKEDIQGARIVPKGNHYVIEILYRVVSKPLRSELPKRIAFIDLGLNNLMTVTSNCFNPILVNGKPLKAINQLANKEIANLKSKLSAQGLYTSPLLQSVYNKRARRITDMLHKITTQLVNHLDSHNIDTVIFGHNVGQKQDINLGQVTNQNFVQIPFTQLIAQLQYKCQLKGIKFILTEESHTSKCSFLDKESVKHHNKYKGKRVKRGLFKTSKGILINADVNGSLNIGRKYFTKLGLYTSELHQSLIQFMVNPQVVKFS

SEQ ID NO: 26816 - protein, 444 aa, unknown
  TnpB Polypeptide
MRKRKYTVVTQLHEQNNKDLIEYVEVARHAYAQAVRETFYCIKNSEGFNKSSFNTYLQNSYGIAKRTASSIISDAQGYTNKLSGLKVYEKTQLERKIKHLETSVIPKLEQKRDDNSTMLRLGLPVSLVSQRNLRRKIVAKKQKLNCLKQKLVNLTYQIETSSFKLCFGTKHLLQRDYIAFAERRDSQMSFVGSKSEPCCNQQFQLRYNSKNNQFELKLRKDFGGFKDIKGHDRYVFGKVYFRHHKDKIISILKEKNSPLSFKIIKRNNRFYLYCTFEVQLGSDDFLTRSTYGTLGLDFNKGFITLSETNQHGHLVRTQLLPYRFKSGNKTKTDLQQVIAKVVSLALSEGKDLCIENLNFNSKKAQTETKQGKKYNEMIHSLAYSQFIDLVESIAYRNKVFIRKVNPAWTSWIAKQKYCPQMKLNVHVGASFVIARRGQGYKDTV

SEQ ID NO: 26817 - protein, 546 aa, unknown
  TnpB Polypeptide
LPYFSLIDALVGVDITIVKPRPFRVGLLHCVERLSIRFIKPCLAGWLVPGLVPFSSLDEPVGRLPTVFTTPGTESSKSKGKGKHASKDENKRTVRLRLLPNGAQERLLRRIADAVARLWNELNYTRLVQYRESGEIDFKGTEHEFYYKYNSVLGVNAGQVINLNNQEWDSFFELSRLYRQGRLPKFYRKPSPPGFWKDKLLGKRRLIILVRNDRYYIEPINGGEGYIILKDWGLRIRYAGRIKWSGKQGTLVIKLEDNRWFAYVPITVGEKPARSNPRGYVKGVYEKIQIEKPKGSNKAFIDIGLNNLFAVVFNHSDTAILIKGSTVKAEYYWWKREIGTYQAIRDWLRNHGFESWRKYHTYYLHAVFKRRERLRHYYRTVIRFLAKTLWQMGIDEVFVGYPYLVSQNNGNEFNTNVWWFNKITRWLGDVLEEYGIRLHVVNEYGTSKQCSICNMEHEKGRVKRGLYVCPVTGIKINADINAARNIAKKAGYEVPIPKKILSYIITSNGVRPLTPKEGATTKTPKIKPRHSRREGVIRLVLVLPRV

SEQ ID NO: 26818 - protein, 380 aa, unknown
  TnpB Polypeptide
MGFVRSYKFRVYPSKTQEKQMLQHLWLAKNLWNELLEHCKKMYEEFGYFPTKGTMQLMAKNCGLFSQTQQEISHRLYASVIRVFRMKQQGKICGFPRFKSFDRMKSLHYPQNGIGFHLEKKLRVNPFGEIAIKKHREINGNIKTLTLKKEASGKWFAIFCAGEPKKRPAANSGKPVGIDLGLLNFAALSTGEIIHNPRHLRRYEQKLAVFKKRFSRKKKKSRNRHRAKLKVARIYGQIANSRSDFLHKLSKRFVSDYSLIVLEKLASKEMSEQNFGKSINDAGWIMFANMLCYKAEEAGSRVVFVNPIDTTKECSSCGTKTSKSLAERIHVCSFCGLNLDRDVNAARVILKRATAGTAGSNASGNETIVSSMKEEAASVS

SEQ ID NO: 26819 - protein, 341 aa, unknown
  TnpB Polypeptide
MYGEFGYFPTKSTLQLMVKNAGLFSQTQQEISHRLHAAVVKVFRMKQHGKICGFPRFKSFDRMKSLYYPQNDVGFHLSKKLRVNPFGEIAIKKHREIKGSIKTLTLKKEASGKWFAIFCADEPRKQPKPNSGKPVGIDLGLLNFAALSTGEIINNPRHLRRYEQKLAVFQKRRSRKKRKGRNRQKAKLKVARVHERVANSRSDFLHKLSKRLVSNYSLIALERLTSKEMSQQNFGKSINDAGWNMFANMVCYKAEEAGSRVVFVNPIDTTKECSTCGTKTSKSLAERTHACPFCGLSLDRDVNAALVILKRATAGTAGSNASGNETIVSSMKEEAAPFRVQ

SEQ ID NO: 26820 - protein, 408 aa, unknown
  TnpB Polypeptide
MSLKSFKTQLDPTTTQAESFVKWAHARTGVFNWARSMRKAGWERYGLRHTREDLDGMATEKKNRGGFGFDVQSPPRRVIFYAIKDCDRAFQNFFRRANKQGKKPGYPKRKYKGDDMRFSVYGSDCKYFEDAIGLPCLENPVSYEETGYVPTDADKYSRVTVSKDEDRWMVSVQCHVEMPIDPDRLRPEKERPAAVALHPGVRVWLASQTLPREGGKHPMETHALPIDRIFELWSRQDRQHKALSRRQTGSSGWESMRHNLSKTSSKLANIREDKTHKSTSHFCYDVRPYHLLIQDWDMSYLMEHGLNGVQRKVERKIKRRMQNANIGAIKSQLKYKAEWAEIDVLLIPEEVPVSRRCSKCGWIDEDLGGSPVFHCEECGYKVGREKNAIENYWIEYEEGNTIHIEDLG

SEQ ID NO: 26821 - protein, 385 aa, Oscillochloris sp.
MQRAIRLKLTPSPAQAVSLKETSRLFTEAFNQFVRLGWDAGVSNATKLHYLAYYAVRESLPTLNSNLINTARAKAAEAIKSAFALRVQGRTVGRPMSGACPPRYNLHTYKVDWESQTVRMSLVGERQTIRFAVPAYCAHYAGYPVDTADLINRDGVWWLHVVVTVPAPVVEPTDEVIGVDLGLAQPAVTSNNRFLGKRVWKDVEGRLFFLKRKLQRKGTKSAKRHLRKVRGKQARFRRDCDHVLAKQIVQAAEPGATIVLENLTDIRKRSKIRKHTKTSRRVHSWSFAQVKGFVEYKAEERGCTVVAVDPRHTSQTCSCCGHVARNNRRSRGRFVCRVCGFELHADLNAARNIAAKYHASVARRDAGGLSVNQPIVPTSTPLALE

SEQ ID NO: 26822 - protein, 411 aa, unknown
  TnpB Polypeptide
MQAFKYKLYKTKRTKHIDDMLREAAFTWNKALAMQKRYYSLYGKYINRCHLQKWFDKRYKRHYLGSQVRQEIIERLDTAYNRFFKKLAQRPPKFKKTAEFVSIVYKQAGYKLYGNELILNRKFRFKFSKSREYEGNIKRVIVKRSRVNEYYVVIVTDANPKTYRKTHNGASVGIDFGLKMYLTISDGREYSNPLFLKQHLSEIRKKSRNLSKCKNDSNNRKKKRIELAKLHEHLHNKREDYQFKLAHELCRKYDYIFIENLCLTGMTKMWGRKMNDLAHAAFINKLEYVASKYGVVVHKIDRWYASSKTCECGYVNKSLQLIDREWVCPECGSINHRDLNAAKNILRKGISELDSMSKTSSEASALYPRIPLALAVGVCQSQSDFKSLMINMVANGITERVEANDQQRRNI

SEQ ID NO: 26823 - protein, 563 aa, unknown
  TnpB Polypeptide
MSRQGKRPKSFKSQKRRSETGIKTGKYEQLELLRVIDGMISIPSSVQVAIQESESSTPESVLISRSQRWCDKPTTCNPCLPMENLSRKSGQDLITSAKVFYPFWDKSCQEMSEKLWSATKTDSSGLVLTSSNGSVNKKTANSWFSTEVTYLQSERWLRIFLPSSMSSVVDCMDSESTSLLSKKIRVYPETALAKIWFQWISASRWCFNQAIAILKAQKIGKYDLRKTVMGLAPEWVSQAPYNPRQLAVFQAYEAHKAAKKSGGDAKFRSVREPVKSIRFQKDNWKKKTFYPTQTKGLSFKVSEPIIDKMHHEPTLVLDRGRWFICYAVDEPKPKPLNSQLAIALDPGVRTFLTGFDGSEIWEIGKSDMGRIYRLASHLDKLMSRVSLSKGRRFKRLRYRLRKAAQKIRVKIRNLVDELHKKAANYLCTKYKVIFLPTFEVKNMVKRGKRRLNTKTARKLVTWSHYRFKQMLKHQAAKYGCVVVDVTEEYTSKTCSKCGHIHTKLGGNKKFTCPSCGHTIGRDINGAFNILLKALRDTSTSGVIASFQIVPHSETSGICQIFPG

SEQ ID NO: 26824 - protein, 418 aa, unknown
  TnpB Polypeptide
MKRVNKFRLRPAKEQEKALFNLCEMSAVLWNKLNYIRRQAFFEGRFDWRGGIDELYGEFKRILGSATAQQIMRKNNEAWRSFFSLLKLKKRGKLPSHVCKISPPRYWKDRLTGRRKLMTIIRNDCYRIEGVGKKYLVLPKGLRIKITGEIKWRGKQGRLEIHYDDLTGRWYAYQSVEVNQPSTTFSKRAYVDLGVVNILTTWIEGEKQAIAFSGRQLLSDWWYWTGKIAKYQSKLKRVNNKHTSKRLRKLYNKRQHRFRHGINTIVHRFAKLCLYRGVGEVVVGDITNIRENNDKGHKINSMIHNFWSFRYIVDRLKITLENFGIKLKLRSEAGTSSRCPWCLGKVVKYKRQIKCFSCGRIAHRDVVGVLNIALLHGEGFNRVMAHPLLLRVDNALESKSSMWMQMRMKPLEARISWL

SEQ ID NO: 26825 - protein, 504 aa, Kitasatospora sp.
LQCAGLQSGGEAVLGPVLAPLVGTWGWTWSPLPGRRGVGADAPRDRFGLGGVPVGGHFVAVLGHEGRACGRVLTGRVVAASGRGPGDYGAVVQLRYSFRVYPTAGQRAALARAFGCARVVYDDALRVREDARAVGLPFPRVGDLSKVLITGAKKTPERAWLGEVSAVVLQQSLRDLEAAYRNFFDGLKGKRPRMGVPRFKSRKDTRQAVRFTANARWRITPGGKLSLPKIGDLTVKWSRTLPSTPSTVTVVRDSAGRYFASFIVETDPAADLALMPDTDTVVGIDLGLAHFAVLSDGTKIDSPRFLRRAEKKLKRAQQALARKAKGSRNREKARSKVARAHAQVADVRREFHHRLSTRLIRDNQAIAVEDLAVKALARTRMAKSVHDAGWSRFVAMLEYKAARYGRKFVRIGRFEPTSQVCSHCGVKDGPKPLHVRMWTCGGCGAVLDRDVNAAVNVAKAAGLAVTACGAQVRRAPVPAPRSEAGTHPKRSTQPVWEQAGIPGL

SEQ ID NO: 26826 - protein, 538 aa, unknown
  TnpB Polypeptide
MNPGMPKGAAPKLYLGVHARLVFLKKEDEQAVLDLMRRFSSATRFAYNRLLEGQDRKELKREDGPLCTLFGLNTRYADGAIEKAQAALDSARELGQDPRKVVFGGRKLFEQLKRKHLSGKARERLRREWKERRRGLLYSRGDATKKGNANLHLEPQGDALWLRVNLGNGACVHARVRTSHPQLKALLQRAYASLPYNVTLRLEDGKVYALFTWSERLPPPVHTKANGVLGIDVKGDPYHLALAVVGRDGKLIRHLTLSLEEADRAPNKGAKELALWKVVHQVVAVAEEHGVAIATERLKYLRKSRRGDGSGRRFRRREHRFAYRSLLEKILSLARKRGVEVLEVNPQDTSTIGMLKYAPGLSLSKDVAAAYVIGRRALGFEEKLPKGYEALLKDDAFLAHVQGFYGNRLQELQKLREAEKNPYPRRRLSREMGKAREALSLLLSFPGPQRGRKASLQGSPGSQKGITKGRNPSGAHPWRVLRVGLFLPLLGLEAPRDLSPLKPILHFTSLTHGSWEGWKVGLGPHPGGGPKCTNVHFC

SEQ ID NO: 26827 - protein, 366 aa, Prevotellaceae sp.
MISIAHRIELKPNNKQKTYFRKAFGCARLAYNWGLAEWKRMYEAGEKPSGRKLRTQFNAIKKEQFPFVYEVTKCATEQPFDYLQKAFDNFFRDLKQGKVSYPQFKKKRDNEGSFYIQADKIVLSETNKSSKALSKIAHNESGKHQYIHLPNMKRGGWVKMTEHIRFNYAKINNVCISQSGGKFYASFSLEITEEEYKRTHPNVELVDANRKVGVDMGIKSALILSDGIAIENPKPLKKNQRKITRLSRQLSKRFHPKTKEERQKGVRKSNNYMKLSVRLAHAQGRVANIRRDFLHKVTTILTTHYGEIAIEDLNVKGMTKNHRLAQAVNDISFGELRRQIEYKAETNVVKVTKADRYFASSKTCSV

SEQ ID NO: 26828 - protein, 344 aa, Shigella sp.
VKRLQAFKFQLRPGGQQEREMRRFAGACRFVFNRALARQNENHEAGNKYIPYGKMASWLVEWKNATETQWLKDAPSQPLQQSLKDLERAYKNFFQNRAAFPRFKKRGQNDVFRYPQGVKLDQENSRIFLPKLGWMRYRNSRQVTGVVKNVTVSQSCGKWYISIQTESEVSTPVHPSASMVGLDAGVAKLATLSDGTVFEPVNSFQKNQKKLARLQRQLSRKVKFSNNWQKQKRKIQRLHSCIANIRRDYLHKVTTTVSKNHAMIVIEDLKVSNMSKSAAGTVSLPGRNVRAKSGLNRSILDQGWYEMRRQLEYKQLWSGGQVLAVPPALRVLWSYSERKSPVTK

SEQ ID NO: 26829 - protein, 441 aa, unknown
  TnpB Polypeptide
MKFSPNRIDTNKPLKEGDRVTAPLEVIKQYVENQKMSDQKRGIKGRVYLTPEEVSPAAQAFGCDRFVYNHLLEFEQNRYATDQTKTNKKDRNIEFNRLKQEFPWLYDVNAQMLQQSTRKLDTAWDNFFATCKTTKHWRRPKFKKKTNRQSARFTKGSFKFENGVLTLSKIGDISIPWYRRVKGEPSSVVLSMTPSGRYYASFQVEQPLRVVGSAINQVASVDINTKTFNFFNGRTYSHVALPRPLLGALSRLRTAQKHLSRCTKGSKNREKARLKVAKIHQRVSDIRTDFLQKLSTQLVHENQVIVVETLRTKNMLKNRHLSRAISDAGFGGFLRMLEYKCKWYGRMLVKVDTFFPSSKLCCICREKNADLKLQDRWQCPNCKTEHQRDENAVVNIFVEGLRILAEGRSVSACGGTARPNRKIRRVPVKQETSLETSSNAA

SEQ ID NO: 26830 - protein, 393 aa, Archaeon sp.
MKRTNRFKINPPKEHESRLFKLADNCSRMYNEVNYKRRQSFFDGKIDWNTAQLYIKYTGIVGSATAQQIIIKNNEAWKSFFFLLKRKKQGKLCKNIKKIGVPGYWKDRKTGKRDLRILIRNNCYKLRGDILELPFKFEIKWRGRNKWHGKQGRLEIAYDKLSHRWYAFQPVLVTPAHQPAGNKKTYVDLGVKVPIMAWIQGERIFGYKANSMLSDWWYWNHRIAEHQAILKEVNNKHTSKQLSKLYRKRQRRFRTKINWIVKNFVETCWFKGVSEIICGDLRNIRDSAKFNKKANSMIHNFWSIGYIVKRLTEKSKEYGIKVTPVDEKGTSSVCPRCHSKHIMKRKRLFKCLDCKLEAHRDAVGSINIGLAQGESFAGAINRAVTRPSLINVA

SEQ ID NO: 26831 - protein, 405 aa, unknown
  TnpB Polypeptide
MKTLKFKLYNHKRNRYLKRSINAAGVIYNHCVALHKRYYRMWGKHLNCAKLQAHIAKLRKRNQFWQFVGSQAVQDICQRIEKAYQLFFKHHNKAESCQGGFPTPVACGGKPSFSTGSPSKLFKRGVRPPSFKKVKKYKSFTLKQAGYKFLGGNRVKIGSRVYQYWNSRPIEGKVKTLTIKRSPLGELFMLVVVDNVAEPQIKSETGKTAGFDFGLKTFLSCSEGFNIESPLFFKQSIKSIRRASKEHSKKQKGSVNREQARKHLVRMHEDVVNRRTDWFWKLAHNLTNQFDVLSFETLNLKAMQRLWGRKVSDLAFREFLNILKCVAGKKDKQVAFIDRWYPSSKTCSNCGHILESLDLSVREWRCPSCQNTNDRDENAAINIKAVGNSTVGVGDVRRALPAVSA

SEQ ID NO: 26832 - protein, 460 aa, Acidimicrobiia sp.
MARFEVPDGWTAQAFCFALDPTPEQTACVSRQFGGRRKARNWAVATLKADLRRYHETGKETEKPSLAGLRKRWNRVKDTECVDAETGEVWWPEISKEAFADGIKGAVDGYWNWQTSRAGTRTGTRVGFPRFARKGRDRDRVTFTTGAIRVEPDRRHVVLPRIGRVRTHENTRRLERLVSKGRARILAATVSRKGTRLVVAFRVLIQRPQQPRPSAPEARVGVDVGVRVLATVANSHGQVLERVPNPRPLEAALKELRHLCRERSRRAKGSARYRETQKKITRLGRRVADIRAHHIHKLTTRLAKTHGEIVVEGLDAAGMLRQKGLTGARARRRGLADSALGEPRRQLTYKTGWYGSTLVVADRWFPSSKTCHKCHNLQDIDWAEHWICDGCGVHHQWDDNAAINLARYESPSGDSAVGPVGAAVKRGADRKTGPRPAGGDEARKGSHRQVAEQPRDGVLV

SEQ ID NO: 26833 - protein, 376 aa, Streptomyces sp.
LQPRLSPVPSSVACGDSRPPWDRTGRAPIARQTTHGVRALEPGGPGGGPEASGGPPGRRTTAMHRPCHPEPGAVPEPGPHRNHRTKRSVRVRGFRVPSRWPGEGARRRRGHRPVFNTRRRTKKHRAAARKVAGLHAKIRRRRLDHHHKAALDLVRRHDVIGHERLNTAGMTKAPAPRPDPEQSGAFLANGAAAKAGLNRSILDVGWGQFLRILAGKAESAGRRVVPVDARNTSRTCPPEIGGCGHVAKENRVTQAKFTCVNCGLVAHADHVGALNVKHRAGLVLCAGAQPPTQEARDFSRGWSHDLRVASCPPELSGIAAAAGGRYGEHTSRSTTRSGLGGSHHWPEIACTDGRSSRSERITFSFAPASPSIPSAS

SEQ ID NO: 26834 - protein, 410 aa, unknown
  TnpB Polypeptide
MKKTFKYRCYPSEKQVKRLSTQMFLAKIIYNLLLEEAKKHYKEKHETLSKFDMNSLIKKIKEEQPVYKKVHSQALQNVSDRLSKAFQNFFRRVKQKKLGGKVKVGYPRFKKFVSSLTYPQTGFKLTDSKVLLSKIGGVKIVKHRELEGIPKTLTIKQSKSGKWFASITVEIEDKPFKSNDKPAVGMDLGLKELAVLSDGVIIPNNHIKKKLESKEDKLHRRVSLKKKGSVNRLKARLKLSKFSEKMTNKNNDFLHKLSHFLVNSYSFIAYEDLNINGMIRNHRLAKSISQASWGKLIQLLQYKAESAGCVTVGVNPKNTSQTCSNCGNKEELKLSDRVFNCVKCGLTLDRDLNASKNILKKALEGTAGRAGSNAFGDSVRPFAKERLLSLKEELYLKSLEKGFSLEAHPL

SEQ ID NO: 26835 - protein, 521 aa, unknown
  TnpB Polypeptide
VTTVRAIVAPSSAIDCQLSELASAYGRQVAYFLCQFASRKWRRYCIGNEYRKLRNQLVAGFNAGEKPVLVYGLQARQWKMALQQASSIVSNDWRLTQQRAKERIERSAWFGRLDDLERHYVRLLLCRLDDAFFEFLDGRTPTFTWHKRFGNEKVRNPRGLCEAVRRVIRAVRSKRIRHREHRSVWFDSSCYKTTTVLRNGRSVQSVELMTLEPRKRVKIELLGTKKITGTIKLVTTLGGWAIHTLEKPALKVLPESLKAQNGRLVCAAMDMGLTEVFTLQDGSQYGVELGRALRAKAEQINRLLVERNRMFAKAQNTPDRSKRRRIEKYNLGSQKFDRLLARHKAHVRDIVNQALNRIIKKHPAQVYIIEDLGHRFNLDGFSKAVNRLLSGWVRGFIRERLFFKAALFGRKIVKVPAAYGSQRCPFCGCVSRESRHGDKFQCVHCGAKRHADELACLNLLCRAHDERFGARMSKEEVLRLELEEHEKACAQRGTMPHKYQPRPSKSRAVRSAKQAAVGAAP

SEQ ID NO: 26836 - protein, 219 aa, Acidobacteria sp.
VTARRTADFRLLRRNFCAATARDKSSVGIDLGLSSFATLSDDAEIENPRLYRQAQKKLRRAQRRVARRKKGSKRGRKAVVPLHKIHQHIFNQRNDHHHKLARMPVQQFGKIFVEDLNIQGLSRGMLSKAVHDASWASFIAKLAYKAEEAGRQLVKVDPRGTSQRCPCGARVPKKLSDREHVCTACGLIGKRDHVSAVEILRLGLSLQDVTEPDVRVCVS

SEQ ID NO: 26837 - protein, 364 aa, Nostoc sp.
MINASGVIYNHCIALHKRYYRMWGKHLNCAKLQAHIAHLRKRKEFWQTVGSQAVQDICQRIEKAYQLFFKHNKKGVRPPGFKKVRKYKSFTLKQAGYKFLGGNQVKIGSRIYQFWKSREIEGTVKTLTIKRTPLGELFMVVVVDVRSFFVSEREGGKPEVEIKTGKIAGFDFGLKTFLTCSDGTTIESPQFLKQSLRLVANASRHHSRKLKGSANRERARKNLVRKYENIFNQRRDWFWKLAHELTDKFDILCFETLNLKGMQRLWGRKISDLAFGEFIQILEWIAKKKNKLVVFIDRWYPSSKTCSNCGHVLEKLDLSVREWRCPSCQSVNGRDENAARNIFKVGASTVSLGDVRQASPAIAV

SEQ ID NO: 26838 - protein, 416 aa, Anabaena sp.
VLHKVVQVRLYPSIEQQIQLAQAFGCSRWWWNYALNKSIETYKETGKGLTRAALNALLPDLKKAEDTCWLADCYSQVLQATTLNLTTAYKNFFEKRAGFPKFKSKHGKQSIQYPQNVKIVDGNVKLPGNIGIIKAKIHRPIEGKIKTVTVSKTPSGKYLASILTEVEEQRGLLYETLREGLCPSGATAGEKPAITEGKIYGIDLGLKHFAVVSDGEKISKYDNPKHIAKHEKNLKRKQKKLARKQKGSNSRNRYRKVVAKVYERVSNSRQDFLHKLSYKLVSDSQAVIVENLHLLGMVRNHKLAKSISDTGWGTFTNFLAYKLERKGGKLVEIDRWFPSSKLCSHCFYQIAEMPLDVREWTCPSCGTHHDRDGNAAINIRAEGIRMIKAEGSAVSAVGGEVSPKLGRSRSVPLGKV

SEQ ID NO: 26839 - protein, 428 aa, Streptomyces sp.
MSRFRMYPTGEQERRMLLHCAHARYVWNLAVEQHACWRPGRRSAPGFAEQCRQLTEARRENAWLAVGNADVQQQALQDFAKARTARFASGFGEPTWRRKHVHEGFRVIGTDRVPESNPDGSPKLNAKGKQVMGRSVVVQRLNRRWARVKVPGCGWVRFRLTRTELPQAKTFRVTFRTGRWHIAFAIVPDPIPAPEPGEVIGIDRGVKITAALSDGRRLNCPQLTTRERAQIRKHQRRAARAPKGSDRKRAEYAKVARLKAREADRRKDWCEKTSTMLARTCRLIRFEKLNITTMTRSAKGTVEQPGTRVRQKAGLNRGILAQGWGLLRRRTGEKAPGRVEDVPAPYTSLRCSACGWIEKDSRKSQAEFACVSCGFTCNADENAAVNVAAGQGGIPRPRRAAGAGGVTAATSRSSAREPQPVRVEIPLP

SEQ ID NO: 26840 - protein, 475 aa, unknown
  TnpB Polypeptide
MVKTPSYILELEIRPSQQEAKMIDKKFEVARQIYNASLSYALKALKRVQHDKIIIELLKEPGYKERNRKIRDRQMQLGYSEYQLHHIAKNFRNYFQNMIGSQECQKLATRAFQTVEKMHFHQAKQVHFYRYDEFPSIEGKSNSTGLRFDGEYVCWFKMKFKPVIKRNDRYAMIALNDRTKYVRILTKIIRGKKRYFVQLIQEGCPPQKHIITKGTVGLDIGTSTLAYSSDSNVGLVELAPDIIKDSKKLARIERAMDRSRRAANPDNYNSDGTVSKGKHKWYKSKRYLKLQAKRQELNRKLTDKRKQSHEQLANYVLSLGDDVRVETMSYKGLQKRSRKTSKKKTNGRMNSKKRFGRTIGNRAPAMLLEIINRKLCYINKTVQKIDTFKVRASQFNHLTGSYEKKDLSERWNYIDNYKIQRDMYSSFLIANTADSLDIIDVDKCNNNWHDFVIMHDKEIQRIKNSNNKTMLWYIA

SEQ ID NO: 26841 - protein, 213 aa, Enterococcus sp.
  misc_feature (152)..(188): Xaa can be any naturally occurring amino acid
MEQLKAYKFRIYPTEEQEIFFAKSFGCVRKVYNLMLDDRKKAYEEVKNDSSKKMTFPTPAKYKKEFPFLKEIDSLALANAQLNLDKAYKNFFRDKSVGFPRFKSKKNPVQSYTTNNQNGTVALIDSKFIKVPKLKSLVRIKLHRQPKGIIKXXXXXXXXXXXXXXXXXXXXXXXXXXXXXXXXXXXXXGVLYWLKIKVPIYLKLKIIKNKNAK

SEQ ID NO: 26842 - protein, 419 aa, Streptomyces sp.
MFMAMQLRYNYRAYPDAAQRRALAQAFGCARVVWNDCLRTRKEAYAAGLPYVKPAELSKTHITEAKHTPERAWLAEVSAVVLQQSLRDLDTAYKNFFDGLKRKRLAMGPPRYKSKKDTRQSIRLNTNAFSLQSGGTVYVAKVGNLKVKWSRPLPAAPTSVTVTKDSAGRYFVSFVVDMAPETLPELETEAGIDLGLSAFAVLSDGRKIAAPRFLRRAEKKLQRLQRELSRKAKGSNNRAKARIKVARQHARVADRRRDWHHRESTKIIRDNQAVYVEDLAVSGLGRTRLAKSVHDAGWSAFVSMLEYKAAKHGRHFGKIGRFEPTSQVCSACSIKDGPKPLHVREWTCGECGTVHDRDINAAHNILAAGRADRLNASLSAGKTMAKVPAQRVEAGSPRKGQMTQAGIPALSGGEHVKTR

SEQ ID NO: 26843 - protein, 459 aa, Bacillus sp.
MVDAVTQTIETFNGAKRFAFRTIVREKRWNRKMHADSLHLVLKRNYQLNDYYANSAVQEARALFTGLMALQKRYEKQTQEKLKKLKKKLKQERTNLRKIKQSCVKGKLTFPKNTRFAKHNNLISLSRKKDTLIWLNEYLFEHQYLDVQIKRIQAKIGLLTHRQYRLTQKLTTYKMNVPSSVFGSKKLFRSQFTIDEFVRNHDKWKALFSRARNKQLILSGRKDAKHGNFVFQYVPETKGLWMTTSSGKTLMFPAVTFPYGQEVIEKVITTQLQCKHKKKHGKPIAWSVEDYGPYCIVKCLVDVPENPHTNYSRSDGAIGVDCNLEHFAWANVTKDGNYKGSGSLHFSILGKSTGQITKIIEVEAIRLVDLAERYNKPIVIEKLDTTQSKTGYRYGNKRANRMKSMFAYEKMTSAILGRADKRGVAVFQVNPAYTSISGKMKYMRKFGISIKVVQLNNYC

SEQ ID NO: 26844 - protein, 468 aa, unknown
  TnpB Polypeptide
MFFKRYTHMSHRVVQCQVARGNFIYDYCDSNARLAKLLYNSALFRIRQVFTGYDRNCLSDNQKQVFTEIAVLKEVFPSINVSRVISYTHLEKLMRATHNPDFFAGLPMQAAQAVLKQAVSDFKNWLSALRDYRKNPSKYLGKPKMPHYQKNDSMTFTFTNQDAVLYFTDNGTLLKFPLLKERLFLPNIEKGSVLKEVKVKPFYDRYIISLTLETNASVVRTDSKMPNICAVDFGVDNFATIVCNDNSSRLYKGGAVLSNCQWFYKSRAKAVRIITKGHKSVNVSSRYINALSVYHYNFVHDQCHKISRSIVRYCLEHRAGTIVLGTNKHWKQNANIGKQNNQNFVSMPVAVLKDMIAYKASEEGIRIIMQEESYTSKADITSMDYIPTYGVDDDKADFSGSRIKRGLYKCANGLIINADCNGASNIMRKAFTDAWKDTHDFSFLAEPEVFGFHELNPQSNPVKGIVAV

SEQ ID NO: 26845 - protein, 311 aa, unknown
  TnpB Polypeptide
MAISVVRAVIARYKTILKNQGEWIQPDFKKPQLDLVWNRDYSLNKDYFSVNTLQGRVKMPYYSGGMEKYFNPDIYKFGTAKLVNKHNKYFLHIPVTYEVSESKISDICNVVGIDRGINFVVTTYDRNHQSGFVSGKTIKQKRANYSKLRKELQMRQTPSARRRIKAIGQRENRWMQDVNHCVSKALVEQNPKHTLFVLEDLSGVRNATERVRTKDRYVSVSWSFYDLEQKLIYKAKQNQSTVIKVDPRYTSQCCPICGHIEKSNRNKKIHLFTCKNCGYKSNDDRIGAMNLYRMGINYLEDSQVPNTVTSE

SEQ ID NO: 26846 - protein, 356 aa, Thermoanaerobacterium sp.
MTQTITIKLKLYRPTHEKEKMYQLMTDRVTAFANKYISLEKKDRPKTSKQAKQYSEPLPSAVLTQAIRDINGKKDPKYFKRLWCNFNNQNFKVEKEDGNWKVSFPTLEKRIGVPIETSERQNDCLEKLINGEVKQGTAMLVKRRGRWYIHLSFEVYIEEKKKEKEKIMGIDLGLIDILVAETEGQTLFFSGGKLAYMRRHFKSLRSRLMKARAYKKLKELGDKEHRIATDINHKISRAVIEFAKEQGVAKIRMEDLTGARWEMKQRKKQKQDSGRSLQSWSFYQLQEFIEYKATLTGIEVEYVNKDNTSMICSVCGHKFTSRPKGRMFECPSCGSIRHIDANAARNIAEAISGIAS

SEQ ID NO: 26847 - protein, 546 aa, Thermoanaerobacterium sp.
MPMSDNTKSVFLYGKPTKVKINELSIMQKQYSQLINSYIECLLNNPNIYLYIFQNNKKDSNVRKFEKEIRHKKLNYLGSALGQNAFDHAFKELYNHFTRIKNYMYGLYIDSGDIQHFVSSVCLLNASILNLDPFVELNKLIDVNKNKMLKIEKADVKKKYENNIKHYNDLINMLQKHTHKEIYEIMSMVRTTFFEELESRKVPFVKDAPIQLDSRVCEIQEANHIDSDYVIRVKTLQRGKWMDIPLKVSRHGKWRLDNYKKCSPTIQILKNRLIKVSIPVEKKTDDYEYTEIIGVDIGETELIHTSDDISYGSFKEMTALYDNIVLPKLGNRSKLKALMRKYRKELKKTTSEERKHKLRKKIGNINKMLQGKKSLNRVLRKYSHAVECEISCAVKSFVNDIKDRNVLVSIENLNILEFDRGRKNNRRDSNWARGQLLEKIKEKLTWIGKKIVEVEPAYSSQECPVCHYTDRKNRNGKHFKCQYCGYEDDADHVGAINIKNRAEDEEIKEIVKKYQYNKEKRHSHLKKLLNARHKAYLDSAVAGATI

SEQ ID NO: 26848 - protein, 546 aa, Thermoanaerobacterium sp.
MSAKTKSVFLYGKPTNIKLTEILTMQKLYTQLVNTYIDLLINNKNLYLTIFLNNKKDSEIRQFEKNQRNKCGLNYLGSALGQNAFDHALKELHNHFIRIKNYMYGLYVNKGDISNFISSTTLLNASLLKLNPYAELNRLIDVNQKIIDEKNGKCTKEYENKILFYKELLAMLYKHTSEEIQFMMSTVRTTFFEELAARKMPEIKDAPIQLDSRLCKIEKADHIKADYVIRVKTLKKGKWIDIPLKTSNDSARRLNQYKNGSPTIKVLKSGLIRVSVPVEKKTKEYKYDKIIGIDVGETELIHTSENKIYGSFKQMIEIYDLTVLPKLSNRSKLKALMRKYRKEIKKANDENKKQKLREKIGNINKMLQGRKSLNRVLRSYNHAVNKEISSAIKGFINDVKGKEILVSMEDLNILEFDRGRKSNRRDTNWARGQLLKKMQEKLEWHGVKFVGVEPAYTSQECPICHNANKKNRNGKQFKCICCGYEDDADHVGAINIAKRAEDKEIAEIVEKYKYNKKYRHNKLKMLLNERHNKYMDSVAITQIIAI

SEQ ID NO: 26849 - protein, 395 aa, unknown
  TnpB Polypeptide
MKINKTFRYRIYPNKKQEILLAKHFGAKRFVYNYFLDQRKKTYLESKKSLNYYDNAKVLTQIKKTPEYIWMKEINSQSLQSSLRDLDTAYNRFFSKQGMFPRFKSKHDKQSFRIPQFVEYKDGELWIPKCKKSIVVKEDRPLIGEILFATISKSSTNKYFVSITCHTDYEPYTKNNNSVGVDLGIKELAICSNGKTYENIKSTNKFGKILTYEQRQLSKKQKGSNNKNKQKVKVAKIHEKIGNTRLNHIHNITTTIVRENQTICVEDLSVKNMMKNHCLSKSISDVAWGELLRQLKYKSGWNERNLITIGKFFPSSKTCNKCKFINQDLTLKDREWVCPNCGEKLDRDLNASKNILEQGLNNFNSGYGIQSESKQKLGEALPIKASLRAKKPKHL

SEQ ID NO: 26850 - protein, 407 aa, unknown
  TnpB Polypeptide
MKEKKNILYRTKVYYIVPNQELINEARLSNNLYNQALYVLRQAFIDGEKIPSKFDLHKILLHKEYEYEEYDNIHKMVSSNAQIICQLAAQNFKAFLNGIKELKTFKKNKSGFTGAPKIPNYNKKEQEFMLIIGAQQCAIKDGMMRFPKKLNLDKIYVGDLNIAHVRIFPGKKKYKVEVVYKVEALPKRKKGNIAGIDLGLDNLATVAINKRSIRPLLINGRPLKSMNLHFNKKRNKIQSKLKKCNDKYMSYKLETLYRKRNNRFNTYMHKASKEIVDYCLEHNVSQIIIGHNKLQKQESKLKNFVAIPTFKLIELIKYKAEYQGIEVIETEESYTSITSYLDKEEPIKDNADRFRRIHRGLFISGKGKRINADVNSAYQIMKKVIGDKVIKPIGKGSVFIPKKVTMV

SEQ ID NO: 26851 - protein, 417 aa, unknown
  TnpB Polypeptide
VYLTIKQQVKHLTKEEYNILKELCRTAKNLTNQAIYNVRQHYFQEKQYLRYESNYHELKNSNNYKLLNSNMAQQTLKNVDAMFRTFFALIKLAKQGKYNFKHIKLPNYLPKNGYSNLIIAQFRIKDDNILTIPYSNTFKKKYETKIQIKVPKILEDKKIKEIQIIPKFNARFFEIQYIYEIQKEDIQLNTNNALAIDLGVNNLCTCITNTGKSFIVDGRKLKSINQFFNKQNAKLQSIKDKQNIKRQTKQQYLISRKRKNKIDDYINKTCRYIINYCLTNDIGTLVIGYNQSFQNKTNLGKKNNQIFTQLPFGKIREKLEYLCKRYNINYILQEESYTSKASFFDNDELPIYNADNPQNYEFSGKRIKRGLYQTKDNYCFNADCNGALNILRKSKAVDLTVLCRRGELDTPKRIRIF

SEQ ID NO: 26852 - protein, 229 aa, unknown
  TnpB Polypeptide
VSSSLKEVRIKSYYGNFLVICVYETETIDLLPENGNAYGIDFGISNIVALVSNTQKCVPYKGGALKARNQWYNKQRSYYQSIAMQGHDTKEAKRLGLLHTKHLEQLNRDCKQFFHNALHKIASDVVTFCLKNDIRTIILDKNKDWKQNSNLGRKNNQTFVQMPIATLSSFIKYKVKANGLLVVEQEESYTPKASLVDGDQIPVYGESTSTTFSEKRISRGRCSRLSLPE

SEQ ID NO: 26853 - protein, 392 aa, unknown
  TnpB Polypeptide
MRKTFKYRIYPNKVQQALLQSTFGCCRFVYNRMLDIKKTAYETDKTKLFKFDLIKQIPQLKNDFPWLRDVPAVCLPQAVGALDDAFHGFFKSGNGYPKFKSKHRSRKSCRFPSSHCAVLQDTSCLKLSKLGLVKYKKDREFVGVLRSITVSQDSDGKYYASCLVETGVEAPKPQPVEASTTVGIDLGLKDFIVTSDGRKIPNPRFYATIDRRIARLQKHESRKTKGSKRRARIRLKINKLYVKKRNLIKNYIYHVANTLLRESQTLVMEDLNIVGMVKNHKLAKSIQNICWGVLRRVLEYKSQWLGHNLIFIDRWAPSTKTCSHCGFHNSTLTLSDRSWTCPGCGTHHDRDVNAALNIKRMGLATLSPTVGGFNGCGEVGCGFDEASICASY

SEQ ID NO: 26854 - protein, 521 aa, unknown
  TnpB Polypeptide
MFVSLQFKLELKKEDREKLTKLMRKQSFAIRTAYNMLKELEKEKTKNPHAQIYQRLRQFFPELPTKYIDSAIYKAKQYPTDKSVVFGGKRLFEKLCKNHLSRKAREKLKKQWRELRQGTLISIGSKSDKGNRLTRFENINGQLHLRITTGNREYIFAKVLREPSNSKDKWLTFMAMLLESWQTQSYFPYTVELKLRDGEVYGSVSFEIPTPKVKYTKNNGVIAIDTNASPIHLAIAEVSKTGELVSYQTISLHHLLGLSQNTKDHQEWILAHQLLDLAIQKNKAIAVENLKKLKKGNCGDGKAKLRKRLHHWNAKKFLQKLKRVAMLKGVEVVEVNPAYTSVIGMLKYAPQLSIDKDIASAYVIGRRALGFKEDTPENYERLLKDKEYLEFAIGKYEDRQKELKELIEKETNQYKGNALKCELKEVENAKKLLANFIQSLQSESSGCEGAYGRNPEQGETKKVSQVVWQVLKVALLFPILGRILPRDLSPLKPLLVEGVWDRVRSRLVPLEAEGTLPIRDF

SEQ ID NO: 26855 - protein, 318 aa, Haloquadratum sp.
MHYAYRYRLHPTEAQRETLDYHRDTCRKLYNNALTKFNKIAKSVGTLNQRVRQVRDQLTDLKDWWTDLNDLYSTVSQAAVMRIEKSIKAFSGLKQNGYNVGSLNWKLPSEFQIFTYVQSGFEFDKKNGQTVLSLSKIADIPITVHRDVPEDVTVKEVYIKKERTGEWYASFAVEGKKEPKKLDNPDRCIGIDLGILKYAHDMGGRAVGSVDLRGEQERLKREQRSLSRKQQEQGSNNWEKQRLRVAECHQRVKRKRHDFLHKLSNYYATEYDLVAVEDLDVKSMLESAGNSQNTASAAWDTFTTLFEHKCKREGTHFG

SEQ ID NO: 26856 - protein, 380 aa, unknown
  TnpB Polypeptide
VKRTVTLLLHPTADQHAALMATMRAFNAACQSISDAAWEAREFRRVPVHHLTYYAVRERFNLPSQLAVRAIGVVTDSYKADRERRHSFGQRSAVVYDERLCKVGSATVALRTLDGRQSINWAGGGYQKSQLAAAVRIGECDLVYRADKDRWRLAVTIDLPDVPRTPAIDAIGLDQGIVNVAVTSDGDMYGGAPMLGVRRRYFHLRRKLQKKGTKSARRLLKRRAKRERGFQSDVSHTITKRIADHARATGRAVGCEDLKGIRSRTGHVKRAQRRTHSNWAFGQFTAYLAYKCHERGIPFVLVDPRHTSQTCSRCGHCEKANRHSQSSFLCRSCGFAANADWNGAKNIRAKALDVLGAGSRSDAHTLGATHRVAREQANGL

SEQ ID NO: 26857 - protein, 525 aa, Streptomyces sp.
VAVRDRLKHLTDVDDKVLRLVGEHLGRLASLDLKTRCADGLEHDTDTWAARKQGLTASSSSRWAGAITKATHDQWALSRRCQLAHTQGLEAGVRTLTHRLSQPIGEKGTGRAPGGYRSRGEWFHKSRRLATLEHRLDVVRAEREAGVVHVVRGGQKLLNNRHNLQAAQLTETAWRERWEAERWFLRADGESGKRYGNETIRVTPEGEVSIKLPAPLAHLANARHGRYALASKVVFAHRGTEWRDRIEGNRAVAYRIHRDVERGRWYLTASWQRPVVKTVPLDTARAQGMIGVDTNADHFAAYHLDRHGNPIGNPRRFFYDLTGPAGHRDAQIRHAISRLLHWTGRCGVKAIGLENLDFTAEKTREKHGRRKRFRQLVCGIPTGRLKARLVSMAAEHGLSIVAVDPAYTSMWGAQHWAKPLTSKNRKMSRHDAAGIAIGRRALGHPVRRRTAPPHDDRSDRRGHRTAQADRGGREREGTRPPVTERAHDARRRIGEQRTREPSASNTVRDARSSGSWHQMSLPDTV

SEQ ID NO: 26858 - protein, 413 aa, unknown
  TnpB Polypeptide
MVGFKTKVGTNNRQNSTLLHWSNARRYAFNYALGLCFIDQETLSPDEKWKLAKINDYDKFFNQGKYPLGFKKPTKSGVMLGSGIHTWLNGIPGSVGQIAIKYDLKEAWQRCFKKLGGRPKFQSKHRRKSFKLSNTDFKKEKNLDDVGAYILHNRLGKMKLGDKIPARILNGRLMNTTFSKTAGDWYVAFIFEIPDEDYYQISNKREMCVGVDLGVAQYATCYDSESGTAWHEEYPKGPLKAIEDRIRILQRKQAKCQKGSVRYKKLGEMITTRKAKQGNIRQDACHKFTKKLTTKSYKIVLEDLKVSNMTKSSKGTTEEHGKNVKAKTGLNREILNMSLYSVRMQLAYKTIRYGSELMLVNPAYTSQTCSECGHVAKENRKTQEKFLCVSCGHTENADINAAKNILNKGMTQK

SEQ ID NO: 26859 - protein, 221 aa, Lactobacillus sp.
VPLESIQRVVGMDRGLINILTAYNDETGETEFVSGKKLLNRRRYGKQQRKHLQQKKTSAARQRLKKIGHRENGWVTNMNHQLAKALLDFYGPGTLFSIEKLNDIREALEKSPKDKKYERVSWPYYQLEQFLLYKAQQYGCIVIKVDAHYTSQRCPKCGTIDKSARNHQLHEYHCKQCDFRTNDDRVAAMNLAELGRRYLAGDKEPSFDSKKQKKANRSGMA

SEQ ID NO: 26860 - protein, 259 aa, Halorientalis sp.
LHVTVTNETAEVDAKTATETVVGVDINEGCVALAALTESGIEDSIVIDYPEIKEERHRYFTMRKRMQKAEQTAFNDVFRDKEQRFVHDQLHTVSRRVVEWIQRFDSPVIIFEDLKDIRDDIEYGPRMNRRLHSLPFAKLRDFISYKAAWKGIPSDDVDPEYTSQQCPLCGHTERANRNGKRFKCCECEHQDHADRGAGVSVAQKWLRTQDDRNVPALNTLPQVRKWELRRQASGSVDGPTVTSDTGRGNQTDGIRGVSD

SEQ ID NO: 26861 - protein, 439 aa, unknown
  TnpB Polypeptide
MKTTLSAKVKLHTTSEQFQALRTTQLAYRDALNFVSRYAFTHGKMSNKVGLQDGTYTDVRQQFRLPSQMACSVPRHVGATYKGLWTKVKHNAQARRDKRTKKRYKGLDQAPKYVSPTLTYQYGKDYSFKRDTHVSLLTLDGRVSIPYTGYSKHVALLQEGAEIGAAQLWYDKPKKQFYLIVTLEIETADPTPESHTGVVGVDVGIRYLAVTSTTKGECTFYSGKRIVPKANHYARLKKRLQHKGTRSATRRLVAISGRERRLKQDANHVVSKRIVERYSQTLLGLENLTNVRERTRRRRGKKASVKQRKSNARHSKWAFAELQSMIAYKALLNNSMAIKVDAHYTSQACPMCGYTSKANRPRKGLLFVCQQCRYTLHADLVGARNISLRTLLIRQDWMSTGVLSVRPDVSDDEAKALRLQRYSELRWSPDTSPRLPDVG

SEQ ID NO: 26862 - protein, 298 aa, Shigella sp.
VKRLQVFKFRLRPGGQQECEMRRFAGACRFVFNRALARQNENHEAGNKYIPYGKMASWLVEWKNATETQWLKDSPSQPLQQSLKDLERAYKNFFRKRAAFPRFKKRGQNDAFRYPQGVKLDQENSRIFLPKLGWMRYRNSRQVTGVVKNVTVSQSCGTWYISIQTESEVSTPAHPSASMVGLDAGVAKLASLSDGTVFEPVNSFQKNQKTLARLQRQLSRKVKFSNNWQKQKRKIQRLHSCIANIRRDYLHKVTTAVSKNHAMIVIEDLKVSNMSKSAAGTVSQPGRNVRAKSGLNRS

SEQ ID NO: 26863 - protein, 340 aa, unknown
  TnpB Polypeptide
MILTYVIKHNRDFSEELVKAKQVAEFAIKNRTISSKNVKHIGLKSVISNQILRKYAKNKKCKKISKVNLVIPSQGIKVDKEDRKIRISCLRLEFEYRFPNTFSKVNQIEISKDSIHISATIQEEKAYTPQSYIGIDRNATGHCVVAANESTGKTLKLGRQAKNTHNKYKNMRKKLQKKNKRNRLKKIKRREKRKTKDLNHKMSRKIVQFAKDNKAGIVLEDLKGIRKTKKQRKSFKYVLHSWSFYQLEKMIKYKAKLLGIPIFKIDPQYTSQQCSRCGLLGKREGKKFYCSCRTIVEDADVNAAFVIALRHKGILQSPVDRDVGEGSTDTPKGATTRKAS

SEQ ID NO: 26864 - protein, 537 aa, Micromonospora sp.
LQPIQAEVHGRSNAWAPAVAPPGTGRSSGPGFPPHPAARGLLCRRWQACCGAVGRFTAFRFTADPSPSQVMVLVRHTGAARFAFNQCLALVKGALDARHRGGSVVVPWSGFDLINAFNSWKISAQAGRRFVVDSAGSAEIAATGLSWRAQVCQQVCEEAAVDLGRALTAWADSRSGKRPGRRVGFPTFKRKSRTQPSFRIRCKTKAGRASIRVGDPMAGPRSICLPRIGVLGVREDTRRLRRMIRGGRAHIRYATVSCRAGRWTITVTVEAADLHPARQHPPRPDADSGGWVGIDRGLTALVVAADTTGRQRLRVTDPPRPLRTALPRLRRLSRQVTRKRRGSRNRAEAVTRLARAHHRVAHVRRHFLHKVANQLVKTHDRLALEDLHIAGLLRNRRLAAAISDAGWAELARIIGYKQGWRGGQAIRAPRWYPSTRMCSACRVTGPALPLSVRVFRCDECGHTADRDVNAAVNLAVWAEQHHARTRDPEARGPITNASRGTGSGQRSRAGATSPDDGGTPPPRTPVTAGTPEKGGVS

SEQ ID NO: 26865 - protein, 215 aa, Sharpea sp.
VLFEFDKGKNAYIVDKTNAIRLDYASDGLYVDSNGNAGTNHKYYRESHDKLARAQCRLSRMQGSKKHEDKSNNYIKQLRKVNRIHRHNANQRLDNLHKISAEIANQYDVVCVESLNMRSMANRGFGNGKATLDNGYGMFLNMLEYKLSDRNKYLVKVDKWFPSSQICSCCGTLHPEMKDLSKRKMICDCGLTISRDQNAAINILNEGLRLLSEAA

SEQ ID NO: 26866 - protein, 366 aa, unknown
  TnpB Polypeptide
MSNKLKSYKFRLYPNKTQETLLNKTFGCVRFAWNQNVANFLSYDKETNPKPEFKTSTQLRNEIEWMQEVSAAAIQQKEIDFKEFKNQLFNSKRKTKLGFPKFKKKSNRQSYRLPNQKFKIIGDRIQLEKIGKVKFVKDRDFPEFYKFMSVTISKNPSGEFYISVLVEQEINSKNKTNKDVGLDVGIKSFSVQSDGIEVDNPKYFSKSQAKLKRLQQHFSRKQKGSKRRDKCRLKIAKLHQKIVNQRDWFLHNYSTYLIENYDRIFIEDLDVKGLLEKKQLSKEISDVSWSKFFQMLQYKADWYGKEIIKVDRYYASSKTCSCGVKNENLKLSDRVWTCGSCGTKNNRDELASQNILKEGRRSLVDL

SEQ ID NO: 26867 - protein, 460 aa, unknown
  TnpB Polypeptide
MQTLKIKYSVIDEELLLIKQYQEQYSHTLRFAYNRAKENCTDKYIEPLTKQINNVNLMDSFFIRSAVKESIAMVKTGQDKVIFGGKKNFIDRCQGKISKDDFLKKRLSPIYSMGEANQKGNRKFQINEDCNSFIFKPSKSTHINLEIAGGYRRYKKILLTLYKLQELKELPISYKLDSEYAYISFDETKLNKPLEFKKIENRVFAVDLNPNYVGWSVIDWKSSSDFEVIKTGVISIKEINDKEFKLKKSKKNPNGYSSEHPKRIYLNNKRTYEVFQISKNLVNIAKHYQCSLFSMEDLSIESSDKSKGRKYNSLCNKMWNRDKLVQNIEKRCNIIGLKILKVPSNFSSFIGNFLFRDLGLPDMILASIEISRRGYEFYNQYILKKKEIKKNIVQPLIEDFVDRYAKSLEEFGIEGEGRSFSDLYYHFFKNSKRRYRVSLEDLNLKFLRCFSRASLIMQNV

SEQ ID NO: 26868 - protein, 258 aa, unknown
  TnpB Polypeptide
LVDGDLMKQVKESKHCIGIDLGVKDFVITSEGEYFENLHFKKSETNKIKRLQRQLSRKVKGSNNRNKARIRLAKEYKKITDRKQYYLHSVSNSLIDENQVICMEDLNVKGMLRNHKLAESIAEVNLGEFRRIMEYKCKWYGRQLLFVDRWYPSSKTCNHCGYIKKDLKLDDREWICPECGEMILRDENAAKNILDEALRFFEKSNNNCIFENKNKIGSSTTEFTLVENPPMDDRLINEGLRSSDSLKQENYNEHFVQV

SEQ ID NO: 26869 - protein, 516 aa, unknown
  TnpB Polypeptide
MSQKPTPSFVLALPLRVNSQQATHFQAHFECARQLYNALLAEAMKRLTRMKADPAWQTARTIPRSDKSARRQAFARLRTQYGFSEYGLHEAAKRLRTSWLAEHIDSLMAQKLASRAYQAANRVCVGQARRVRFRGKSRGLDSVEGKTNSSGLRFHLQAGADGNQGWLSWNGDQIPALIEWEDAVVHHGLQQRIKYVRLIRHRASSPQAQGADCHGFSYSVQLILEGHPLQKPKNLPGKGTVGLDLGPSTVAIVSGEGTARLLLLAEELAPDGRKSRRLQRHLERQRRANNAEHYDEKGRIRTRCKGQGRRMWRESQGYQRTRRRLATTERRLAAHRRSLHGKLANEIIRLGDDVRLEKVSYKGWQRRFGRSVGMRAPGRFVDAVKCVVARTRTAQLHEIPTGPTKLSQYCHRCELYTRKPLAQRFHDCPHCGLGSDRSIQRDLYAAWQASMLDPIRLTFPSRGQLDIHWQSMEACLTAALEETRQHASAQGFLRRFGIPGVRACRPAVLSAQHKSR

SEQ ID NO: 26870 - protein, 311 aa, Brevibacillus sp.
MMLRFKAFQFRIFPNHKQEVLISKTLGCSRFVFNRFLARWNETYKQMGKGLSYHSCVVQLPQLKKELPWLYDADSTALQSSLQNLADAFTRFFKKQNEAPRFKSKKNKVQSYTTKHTNGNIRIDGNQMILPKLGWVKFAKSREVEGRILNVTVRRNPTGKYFVSVLCEVAYSSYAAVDKEKSIGIDLGLKNFATFSTGEKISNPKYLRMYEKKLIQWQRKLSRRQKGGKNYDKARSKVAILHEKVANTRKDFLHKLSTELIRENKVICLEDLQVNDLIKNHKLAKSITDVSWSTFVPYLPTKRNGMDEHSL

SEQ ID NO: 26871 - protein, 445 aa, Cyanobacteria sp.
MYGCQQTLIHAPPDVQAVIEYLCTESNKVWNCSVYYARQIYFKTGKIIKRAEICAEMTRSKNKHFGAMYVSSAQQTCNNVAEAFKSFQELTKLWKREELQDKPSLPKYRKSGLFTVTYPKRWLKLTDDGIRIPLGNQVKAWFGIDAIYLPMPSNLKWEDIKELRILPRNRCFYAEFVYPVEDVNSHATCFKPGNPSNPVAQLDTNKVLGIDHGIDNWLTCVSNVGTSFIIDGKHLKSLNQWFNKRVSRLKENQTQGFWSKQLAAITEKRNRQMRDAVNKAARLVINHCLKNGIGRIIFGWNQRQKDSANMGRKANQKFVQIPTAKLKERIYQLCQQHGIDFVETEEANTSAASFVDGDSLPKYGEKPSWCKSSGKRVKRGLFRTANNWYINADANGAANIISKVSATLGINLSGVTRGALTTPLRVRLWTLKNPPTFCLNERSEI

SEQ ID NO: 26872 - protein, 351 aa, Halorubrum sp.
MVGRPLGLYSKVLQTVVERLFDNLKALSKLKENGYGVGQLKWKPPREFRSFTYSQSGFKLDKKGGQTVLSLSKLADIPIRLHRAIPDDAELKQVTVKKEPTGEWFATFGVQMDREILEPPENPEKCVGIDVGILKYAHDTDGTAVGSLDLSDERDRLEREQRTLSRKQHGSNNYEKQRRRVAEYHADLRRKRRDFLHKLSAYYAQEYDLVAVEDLNVKGMMESPSNSRNTASAAWRTFLSLLEYKCKREGTHFVAVNPRGTTKECASCGVSTDKPLWVREHSCPACGFEADRDANAAWNILSRGLDKVGVGHSESPPVETALPVDTPVSAKRVVEAGSPTLKERTASAVSE

SEQ ID NO: 26873 - protein, 490 aa, Erysipelotrichaceae sp.
MRKQPKPCFIVQFPLKAVNACTAEKAQKRFRIGAHIHNVMVSHAIHCLNGLARDAEYQTLLKQYKKNKKFSPSEKKEMLEVLHKHGLSVSQFDAYVIKQKKLFEPEIHVHLAENISRDVWHGVEKILYSTGKNLHYKKMNDFQSFSAKTDTGIRYRSGYILWGSGKNELRFSVRIRNNDPYSPAVLGQPKYCMIVRRWHNNRRRYYVQVVYEGYPPERTVLANGGKVGIDIGPSTIAAVSRNNIVFAELGNGIDKAEREIARLNRKRDRQRRANNPQNFNENGTVKSGSRRWTVSHSEFKTKQKIRGLYQKRKNLLDYQHHCLVKRLLEMGDGFYAESMNWQALARKAKKTEVSEKTGRCKKKKRFGKSVANHAPYKLLSILAYKLKQAGCELHKVDTFSTKASQYNHITGEFKPAELNERWKYLDEDNLVQRDLYSAFLLQHVSHDSAIYDFASINNDYPDFKVMHDSVIAELKSEKANGMRFPPCMGI

SEQ ID NO: 26874 - protein, 405 aa, Lutibacter sp.
MNQFVPQNKNSLKTFCQSSTFSLADKWEKGDIKKKKIMGTRKIRICPTPEQQIILNKWINTSRYTYNKAIHKIEKEKQKINFYNLRNKLVPKKNIIKSKEWMLDTPKDIRANSIREVVSMYKSAFTNLKNGNISKFNMRYRSRKLLSEVISIPKTAIKISDDKKKFNLFTRYLKTPIKVFKELLPDINHEIKLLHDKKCNNWYICVPIEYNVNSDNQGGIVSIDPGVKTFQTLYDANGSVTQIGSEDMKFILVELYKKIDKYKSLRTTATGRRKKNITSRIFFLNNKYKNLITEIHNKTCVYIYKNYNNVLISNIGNIKSKNRQNNRCLLGWSHGKFIERLTHHMHKNGKKINIVTEEFTSKTCGRCGWLDNNLSNKDIFHCRSCGLHISRDVNGARNILLKHLQ

SEQ ID NO: 26875 - protein, 317 aa, unknown
  TnpB Polypeptide
VTVSRHGERIVAAVRVSIARPQPTGVARPDSAVGIDVGVRRLATVATTSDVISRLNNPRALEHRRSELRRLQRQRARRTRGSRQNVQTAAKIARLHAEVAHHRRHTIHVLTTNLAKTRGVIVVEELDVASLLQQKGLAGARSRRRGLSDAALGEIRRQLRYKCPWYGSTLIEADRFFPSSKTCHDCGHVQDIGESEHWTCEECSSSHQRDDNAAINLARWASLGSVGAPVKRGAEHQTESHSAAGEDTRKGTPALATANNSVRSAARVDSLEITRLQRCWRRSRARPTGRPSPGRRRPGPTRSGDVLSFSIVPLRIR

SEQ ID NO: 26876 - protein, 196 aa, Vibrio sp.
IKLPKIKPVEANNHREIVGKVKSITLSKVTGIDLGLFHFAIESNGRKTANPRFVKRAEKNLRRKQRQLSRKAKGSANRAKTRLLVAKCHEKVANARADFQHKLSRTLVDENQAVIIETLKSTNMMKSRKLAKHIADASWHSFVFKLEYKLKEQGKYLVKLNQWDASSKRAVVAVIKWKKCPYRFASGIVHQAALQT

SEQ ID NO: 26877 - protein, 455 aa, Lachnospiraceae sp.
MPVLTTETRLSAREANDIMEYVQKYRTDHGRIQRYVWLVIVRQNGAVNKSKLNTEVQTRFSVSKRTANSVIYDMKGRYKALKELKKTERSRLRNRIRHLEQQTEKIAVTVNMRKKDAAANRLGREQLVKYRDLKKKLYYKHQRLQKLRDRLAQLEKDMENGRYSLGFGGKKTFDDQYRLSENGYRSHKGWYNDYRKKRDSNIFYLGSRDETAGNQMFQLSPDAAGGYDVRIRKDGKYDSDGKYVHGKCHFKYLDDELRESLQNRDRPVSYRIKMRGRKVYLQAIVTLDMAKLAIMTTAVDGVIGLDFNDGHIDLAETDGKGNLTSMKQYRLRYHGTGGRAANEMRQVTAEIGRYALSKGKSIVKEDLSFEKKKALTERGSGRRYNKMLHTLDYSRYEDDIRNMAVRNGIDVIEVNPAYTSRIAKRKYCEIRKIPVHNGAAYVIARRGQGFKDKTV

SEQ ID NO: 26878 - protein, 648 aa, Acidimicrobiaceae sp.
MGDQPMATIVLNLDTSHPHTRRRLEVLYFTIYNLRRALQRDAQRLCREYWARQDERGALGWKFVAEDLGLNRKGFEALARDHARSSGWAMDHVSAALVSHMAVAVFEDVVRHLWSDNSGQRHGALHVTAPHQFTTIHGRARSHTTTNKWETFRLYGTLEGHLDAYAHSGLGEPTRARVAALPAGTPVLRQSKMTTPGPTKWSTYTGPLVMVFAGGPQSHESELQLPVRLPQGRGSWDRVVHFLGQPDIWHKIDLVRRPDSSQPGGWRYEMHLLVLREGYASRRNAGLLERAPTNRTACVDVNVSNLSVVSTSTDARDLASTVVRADAGERDRLASLAAKNRRGLRLVERSRRSTNTNQYLKSKAQTARDERRGAKGLRPVGTMTPGGGRVSRSDGTPLRAYWRDDLSSAYRDARRRQGEQARAQSLTKKTRAHEVAVQLVATHGVHWLIEDCNLTAWARRWGKSLHSFAPGMVTVELATLSKRHGGSFVKMATGRTALSSHCLCGHRASKDLSTRTHSCAACGFSGDRDLVSAALGTCVRHIDVTAPTSARVDFTKSAVLLAALSPSPLTNGHQDALTSQTCPLEPRRRIDVVVQGARPAGYSSRAARLNAGRTAQSTNGPGSARPAKVAHGPALGSSSPPGDLRRSS

SEQ ID NO: 26879 - protein, 392 aa, unknown
  TnpB Polypeptide
MKRAYKYRLYPNKTQQAMLRQTFGCCRYVYNATLDTKIKAYKTDKTSLSEFECINLMTGLKSEYTWLYDVPAVCLVQSVRDMYSAYQMFFKTKQGFPKHKTKHRSKLSCRFPGQSCTVDQDMHHVKLPKIGLVRYKQDRQFKGQLRNVTVSCDGCGRFWVSCLVETGVAEPKPEPLTSQSKCVGLDLGLKDFIVTSDGHKIPNPHFADVIDRRIARLQKIESRRQKGSRRRAEIRLKINKLYAKKRNLIHNFIHHTVNDILGENQAVFIEDLNVKGMMGNHRLAKSIQSVCWFEFVRVLDYKARWLGKTILKIDRFFPSSKTCGCCGYKNDGLTLKDRSWACPQCGTVHDRDLNAAVNILREGLSKILPSVGRFEGRGDGGYDVGESPIFAV

SEQ ID NO: 26880 - protein, 422 aa, Streptomyces sp.
MGRRYRLYPTEEQDKVLTKWGHTVRALWNVALEQRNYLWKQRRHTMRAIEQCKQLTAGRAELTWLAELPAQAAQQVLRRLDRAYDNYWNPEHPAGFPQLKKRANRVAVPLPGQSVEVRKLNRHWGEVKLPKLGWVRLRLSRPLGGNIRNATVSRDGLGWHVSFGVATGWTAAPPNGKPGCGIDFGVAASAYVSTEAAPRVKPDGLTKAEKNRLRALEQRKARQITYAKKHADGRYSNRLRATIAAIGKLRTREANRRQDFTHKLTTDLAKNHGFVGIEDLRVVSMTASAKGSAGQPGKNVAQKSGLNRAILDNCAGERRRQLAYKCPQYGSQLIAVPAARTSQTCAACGEVDSESRVGCGRLFACARCGHEDDADHNASVEIEARARRTGGSVTNSTRRHPAVPSPARMRRRTREAQPTASG

SEQ ID NO: 26881 - protein, 406 aa, Nostocaceae sp.
MQLVERHIIKKSHNNYAEIDQLCFLSKNLYNYANYLIRQTLFKTGEVLNYNQVQKLLQPEADYKQLPAKVSQQVLMVLDKNWKAFKEATKAYHKNPAKFLGKPKLPKYKDKEKGRNLVIYTIQALSKKGLDRGLIKPSQTGITLQSKQTAIAQVRIVPKLNHYVIEVVYHQEEKQKLHSNNRIASIDLGLNNLASVTFNQAGCTPFLINGRPLKSINHFFNKRKSELQSILKTGTSKRLQNLGSKRNLKVDDYLHQASRYLIDKLVELRIDTLVIGKNEYWKQDINIGSRNNQNFVQLPHSRFIQQLIYKAELEGLTVIIQEESYTSKSSFLDQDYIPVYKKGVKHSFSGQRIKRGLYRSANGFLINADVNGSLNILRKAIPNAFAEGIKGIVVSPVRVKTYKLVK

SEQ ID NO: 26882 - protein, 397 aa, unknown
  TnpB Polypeptide
VPIKNKAIKYRIHPSDAQWAVLYQTFGCVRKVFNDALEMQKGLYAAGFKTMSRNELNNYANRVWKEDYPYLREVDKFALTNAIYNLDTAYKNFFEGRAKYPQFKSKKSSRQSYTTNWTNNNIQIIPPAKKGTVRGQVKLPKLGLVNAVIHRLPPEDWVIKSATISLDCMGKCYASILFAYEQEEIAQVPIPDKERAIGLDYSSPLFYVDSNNKDAGVPHFYRKSEAKLAREQRRLSKMTKGSSNYQKQKLKVEKLHRKAAQQRLDFCHKLSREIANSYDAVCVEDLDLRTMSRTLNLGKSTMDNGFGMFREFLKYKLEEQGKYFVVIDKWYPSSKTCYECGHVYRELQLGDRVWICPHCGVLILRDYNAALNIRDEGLRLLWVQTLARLLGAQIPAA

SEQ ID NO: 26883 - protein, 566 aa, unknown
  TnpB Polypeptide
MSRWNKSQTTGSRCILTLPLVYNKPQREQLGKTFQMVNNIKNMTISWYDTQLHEMIRTRVWRENQQALRALHEEYDPDLKALQALQNEAKNLKEGKTLSKTKQRKLNHLLVRKEEFQGKQQPLIEVRNAIIKKYKFSRSEFEKRASIYRKPYAAYVGSMVSQRAADDAWVMFESYLYGKGKRITHSKAEEFLAIEGKTNATNIVFDRKAMTVSLGLGKHKISLKVKCSRKDPYGYEEEALSRRVCYCRIIRKAYPEGWRYFTQLVLEGPPPVKVKPETGELLHAMGEGRVGLDIGPQTLAYSANKSVGLVELAEGAQDLQGEIRRVNRAMDRSRRATNPGMYTKDGQIIRKNKLPPELRTKYGGRKWFKSTRYRELEMHRRHLYRKQADLRRERHRQLANKLLAAGNEFYVEDMRWRALARKSKKAKKNKKGKYISRKRFGKSIANKSPGSFLSILEQKVKAQGGSFKRLITWKARASQYHHMTGKYKKKKLSQRTDVLEDGSRVQRDLYSAFLIQHANKTLDGFNARLCKKDYANFLRMHNEVMEALARSDKKLPSSMGVRQKAA

SEQ ID NO: 26884 - protein, 402 aa, Actinomadura sp.
MARQVKRAFRYRFYPTDEQAAELARTFGCVRLVYNRALEERTRAWYGERRRVSYVETSAMLTTWKKTEELAFLAEVSSVPLQQALRHLQTAFTGFFAKRAKYPRFKSRKKSRHSAEYTRSAFRWHDGELALAKMSEPLSIVWSRPLPQGAVPSTVTVSRDAAGRWFVSILCTDTVARLEPVEQAVGVDAGITSLVTLSTGEKVTNPRHERRDRERLTRAQKVLSRKAKGSKNRDKARRKVARIHARIADRRRDFLHKLSTRLVHDNQVVVIEDLNVRNMVANHSLARVISDAAWRELRSMLEYKADWYGRELVVIDRWFPSTKTCSQCGTITQTMPLEVRDWECGGCRTRHDRDVNAAKNILAAGLAVSACGADVRPKRRKPGGRLVTKQETQPVMVGLPRL

SEQ ID NO: 26885 - protein, 364 aa, Azospira sp.
METLRQHTECFNAVCSYGWQHKERNGVRLPHATYRVLRERFPALPSQLVVAARERAREALRSALARARKGKKASQPRSRLCPIRYDARTYALRAANGHVSLASVAGRLKVPFALDPHAKGVLNHAVGFNSADLIYRKSRFWLHVVVTLPDVQFQPSGDVVGVDMGLARPAVCSNNRFFGERRWKEIERRYFRLRRSLQRKGTCSAKRHLRKLAGKVNRFRRDCDHVLSRRIVDSVQPGTVIVVENLVDIHSRTKQRGRESRRRLHSWSFAQLRAFLTYKAEANGCRVAGVDPRHTSQACSRCGHVHRSNRRSQSRFLCRACGFELNADLNAARNIARKYLASGGMPAAGGPLSTGLSCQLAQAG

SEQ ID NO: 26886 - protein, 397 aa, Oscillatoriales sp.
MEQVLTVACKIEVSPEVAPKLEATLQAFSDACTYINQTVDPKLTNKPRIQGLVYEQVREQFGLSANLAIRAIARVSSNRKTAKQKGNPVRAFKPTSVDYDARIFAFREKDWTVSLTLVGGRERFKLAIGNYQVGLLKGANPSSATLCKRQDGSYYVNIQIKSEATEPIPSKRVIGVDLGRRDIAVTSLGDQWDGKQITDVRDKFARVRSSLQQKASKGTRSTRRRARQILQRLSGRERRYQTWLNHNISKLIVLSALQHNAIIAIEDLTGIRERTNQQPRSKTERRRSNIWAFFQLRWFLSYKAVKYGVEVVAVNPAYTSQTCHKCLHIHPIKGKSYRSGKVFKCGHCGNHCDADENGSKVISIVGASVNMLGGSVLSCNLADCIRATESPRLKVVG

SEQ ID NO: 26887 - protein, 470 aa, unknown
  TnpB Polypeptide
MSYVFTYTTKIKNKNYNQSLCKYISDWTIIFNKIQRKVWQQIKAEYKETGEIKGKFITVLSDDEIELTARTKNSIFLNMAGRFQAIKELKNYELDNIDKRLERIEEDITEIKERIQELKYKHESDIFGLSDKEKEELKNTKHKLYWKLNRKNKLFQRRNNLDKEIKEGNFKLCFGTKYLLKNDYNKFVKQRDSELFFVGRTAETGGNNNFQLEYNSKKNNFRIKVRKEISLDDSKYEYGEIYFNQKRTKQVRQILKNKSSALTYRIKIKNDEIYLQLMFTLKHTVEDCLTRSSNGVFGIDFNKGFISVTETDKQGNMIQTYNLDYRFGSGNKTKNDLEIVTGKVVKEALEKGKDVVVEKLDFKVKRSELISKKGKKYNEMLSSLPYSIYGSIVKSKCAKNKVYLHQVNPAWTSYIGNIKYSIPRKMNIHTAASFVIARRGMKFIDSIGKKKMRLKRKKRKKYEKRKVNNK

SEQ ID NO: 26888 - protein, 312 aa, unknown
  TnpB Polypeptide
MIKTIRVMLLPNNKQRTKLFQYANTARFAYNWTLGREQENDKNGGKFISDSDLRKEFTDACDAYHKFFKGYTKHPKFKSKKHTIPSFYQDNIKIKFTDTNVKIEGFSTSKKKNKQKLNWIRLAEHDRIPTDGKYINPRIKFDGLNWYLTVGMEYEDSVSFPVKEGIGIDLGIKELAICSDEKTYQNINKTQKVKRLEKRKRRLQRFISRRYEKNKKGESYCKTSNIIKSEKKLLRLHHRLTNIRQNYLHQTTSEIIKQEPSSKLCSCCGTIKKDLKLSERIYRCKCGNVIDRDYQAALKLKRYGEMSLQSVT

SEQ ID NO: 26889 - protein, 211 aa, Mycobacterium sp.
MRQGAGHGVKQQRRLSNSLSRKKKGSQNRTDAAARLGRHHHRVATVRRHFLHQVSGELVRTHDRIVVENLNMVGMLANHRLARAISDAGWAEFARMLRYKQAWRHGQLVEADRWYPSTRLCPQCGVIDGAMTLVDRVFTCGCGHSADRDTNAATNLARWATPTTITFLEPRTPSRRPATNACRRDGSGQHPHVGETSPDDAGTDVHTAPAA

SEQ ID NO: 26890 - protein, 351 aa, Lamprocystis sp.
MIQTQLKLRINVTQETLLNSWLFMLTGVWNWAIRKIEHDAHGEVYYSAQAFQNLLAGHGQKIGIPSHTLQGILLMAHTAWNRCFKKLGGKPRLKGMRNKLNSIPFPDPLRAIADHRVKLPGIGSLRFHGQDIPAGKIKCGRIVKRASGWYLCLFIDAERAFIASTGRGMIGIDPGFIDLLTLSDGEKVPHPKELQLSLERLGKAQRGINRKLTARLHERIGNQRKDRNHKLSLRLVQENAVIVFSKDNTKAMARTFGKSVASSAHAQLRAMLAYKSHAGDTQYLEVASRNSTRTCSACGCLSGPTGLAGLSVRTWVCAECGTPHDRDQNAAINTLMAGVGTTLEWDLRLAA

SEQ ID NO: 26891 - protein, 336 aa, unknown
  TnpB Polypeptide
VCEDLDSLGFAASKLWNVARWTCDRIWDETGTIPDHGALKAYLKNNERYADLNAQSSQAILEELAEAFDSWYTLRGNGDKKANPPGYRKHGDDHPRSTVTFKEDGFKHDPDHDRIRLSKGRNLKDGRQDFILCEYAVDPDVTVQNVQQVRAVWTGTDWELHIVCNVERDDPDPPGDRVAGIDLGICNFAAVAVGDDALLYPGGALKEDDYYFQKQRAKCDDSSSRKAQRLDRKRGERRTHFFHAVSKDIVAECAARNVGTIVVGDLTGIRENTDWGDHGNLDLHGWAFDNFTQMLEYKAAEYGISVERVDERGTSKSCGSCGTIDDSQRVERGLYV

SEQ ID NO: 26892 - protein, 277 aa, unknown
  TnpB Polypeptide
MKSLNYPQYECGFWLDKKLKVTPFGEIAIKKQRNITGRIKTLTLKRESSGKWFAIFCVKTPKEIPKENKGEAVGVDLGLATFATLSNGMRVTNPKHFKRYEDRLAFLQRRLGRCRKGSTCRKRAKIRVAKLHEKISDCRRDFLHKISTELVNDYSIIALETLASRQMAEKDYGKQINDAGWNMFANMLAYKAEGAGCRVVFVNPKNTTQECSNCHEIVKKDLSERIHECPFCGLKLDRDVNAARVILMRATPGQGGSNASGNATIVASVKEEVRTYE

SEQ ID NO: 26893 - protein, 575 aa, Moorea sp.
MLRRRKPPQFKESTQKHLGDGKQKPGSKQSGSQRVKDATTLNKSRRQQQNPDQLSLFAMRGSQLIPSAMILKDKLNYYVQNSQKQNTYQKLAPDSILGGDNSSPFWTDFSEAISNALWLPTQTDCSDLPSNWLDGCVKKISANSWFGVSANSARSKNWSKICCPSSIASVIGFTDWENTKRNSGKRYKQTKRHSHSRKSTKLAPNSVRKIRLYPTAELHKVWKQWLAAYRQVFNWALEQLKNGFNLKDDLQKAYRSSLVIPDWVRELPGHQAQEACDEAIDAYRQGKANGGEAKFKSCRSKSQTIQFKVGNFKNGTWYPKKTKGLTFKASTPLPSQSEYGTELVYQRGKWYGCFPAHVETEPTKQERVIALDPGNRAFLTGYDGENFLEIGKGDIGRINRLCSHLDQLLSRASKSPFKRQRHKMRKAADRIREKIQCLVKDLHSKVASFLIGKYKLIFLPTFATSKMVLKSSRKINRKTVRNMLSWSHYKFAQHLTQMAARKNVLVVRCNESYTSKTCTNCGHRHNKLGGSKIFRCPECKMELPRDIGGGRNIMIRSLQAAAFTSNGDAILVQDA

SEQ ID NO: 26894 - protein, 421 aa, Moorea sp.
LTVDNKIAIIEGKEEKQMFNLTYEFKLKPTKQQSKIFDEWLEITRLVYNYALAERKDWYKSRSCQINACSLHSCYIIPADTPRPTYASQCKSLTAAKKQNLELKKIQSQVLQQTLKRVETAFTNMWERNAGFPRFKKKGRMRSFVFPQMKGKRLEHGLVKLPVIGWVKFRQSREIPNDAQIKQARIVKRVSGWYVMLTIQWNVDLPQPIPHGEAVGIDVGLTSFIATSSGLLIKRPRFLGDAERKLKLLQKRVSRKPIGSNNWRRAQKKVAKLHEYVANCRKDWHRKLSHHLCDHAGMIFVEDLNLVGLSRGILGKHCLDAGFGQFFEILAQTCFKRGVYFQKVDPRKTSQICPNCLTQTGKKELSQRTHICSACGYTTDRDIAAAQVVAIRGLTAVGHTVKMLAEGKFVGIPLKQESSRL

SEQ ID NO: 26895 - protein, 337 aa, unknown
  TnpB Polypeptide
MSSNKFRVWLNHEYLSEHPEYSWIKEVYSKAVTQAVNNGQTAFARFFNHESAFPNFKKKGKSDVKMYFVKNNPKDCHCERHRIKIPSLGWVRIKEKGYIPTTKDGYVIKSGSVSIKADRYYVSVLVEVSDNKTINHFDEGIGIDLGLKDFAIVSNGRTYQNINKSAKLKKLERQLIREQRCLSRKYENLKKGDATQRANIQKQKLKVQKLHHRIDNIRTDYINKTIAEMVKIKPSYITIEDLNVKGMMKNRHLSKAVASQKFYEFRAKLLAKCNESGIELRVVDRWYPSSKTCHCCGAVKKDLKLSDRMFKCSCGYVEDRDFNSALNLRDAITYEVA

SEQ ID NO: 26896 - protein, 432 aa, unknown
  TnpB Polypeptide
MFPLRKEVQVCVIGKVFKPNKGKVLALNRALSEYFRLVRWYLSFNSTSETFLHENCYEKAKEFFDLNTALIQTARDKAIEILKSFEENRKEGSVLRLKRVSIRFDKRCYKFFKTTNVLTQYWLTLSLNRKERVSLPIVFGERQRQRIEEAFKGEWQFTTVEMVKRNGEWYAHFNLKKVIEVPDEPETIIAIDRGEHNLAVAVAISINNPSKPMKGQFWRGAEIKRVRGLYNHIRRKLQKKKLLKKVKELKGRERRKVNQQLHIIANQIIAYAKQFLKPVIVMEDLRNIRDNFRKSRELNRRFHSLPFRKLQEIIEYKALLEGIDVVYLKKRLVKNTSKTCHRCGYVARVKGREFRCPKCGLIYNRDLNACINIAHALMRGMGWGSREPPKPANEAGSAKPQPNAGNPALKGGVAHLTNVLPELFLSFQEFVE

SEQ ID NO: 26897 - protein, 385 aa, unknown
  TnpB Polypeptide
LYQYFRLVNNYISINSTSKRFLHNSSYDYAKEHFRLNTALTQTARDKAVEILRSFNETKKEGSVLQLKRISIRFDRRCFQLSKTTNTLTPYWLTLSLSGGWGGRVSLPIVLGRRGKIIGRIFTGEFQLSTVEMVKRNGKWFAHFTITKQINLPDETETVIAIDRGERNLAVAVAVSKQNSFKPIKGLFWSGADIKRIRGKYGHIRRNLQKKKLVKKVKSLQNKERRIVKQLLHQTVNSVIQYTKQFLKPIIVMEDLYGLRGRMNFSKRLNKRLHQVPFYKFQRILEYKALLNYIPVKYLTKAQTKNTSKTCHRCDHISEVNGREYHCSSCNVIYDRDLNASINIAHRITRSMGWGISKSEHPKPANEAAMQNHCLTLETAVFKWW

SEQ ID NO: 26898 - protein, 492 aa, unknown
  TnpB Polypeptide
MNEECEKTLDKMMLQFCSAMRFSYNEMVRKLDDSKFKPHHLDSLVSSKYNLNTRQAKDAIEIARQTKQSQVELLDERIKNLESKVEGVLKALDNKNLSGFKRNGLISKLDKRLRKLSKFIYHKNNKTLPTVIFGGKENFYKRCRNEISNEEYNKNRNNHFVARGDATKKGNPNLRIVIDKGMTFLEITTLEKVLKKDGTPHSRNYKKIRTPLYIPVKKSKKTGKVNGFNYKAKLLEIVALESPYQVELIKKNNKIYAHITFTLDEPPKVATAHKYMIGVDTNPDGLALTMIDRQGNYVWHTYLKDSRLIHAKSSIRDNICGELACVVIRIAKTYGAGIAVEDLEFKDNVDVKKKFARIKNQFCYSKLISSLLSASYKYGVEILKVKPHFTSKIGLYKYCSQYGMYVHNGAAMVIARRAYGFIEKVPSIYKNMFKDVIKLNSENSLSIEKTKVYDEFSKWNHISKRFYELLRRDNVPRFFIENRKNIVELIAM

SEQ ID NO: 26899 - protein, 388 aa, unknown
  TnpB Polypeptide
MPAPGQEIILLRHCADARFVWNLGQEQRAMYRPGRGPTPGYYEQKRQLTEARAAEPWLAEGSVTVQQEALRDLDQAWKNFFNGTHRRPTWRKATDHNGFRIVGPQASRVEQVNRRWSQVLVPKVGWVRFRRSRPVPDAKSYRVTRDRAGRWHIAFATIPEPVPGPHTGEVVGVDRGVTVSAALSTGELLTCPQLRVTEQARLLRLERKSARQRIRGRKPSGRLKRTYTAIAKLKAREADIRKDWAEKTSTDLARRFDVIRIEDLQICNMTRSASGTLAEPGRNVRQKAGLNRGILASGWGLLARRLEHKAGERVQKVRPAYTSMTCNACGHCETRNRKSQAFLCLACGHRDHADINAAKNIAAGHAVTARGGRGKLSRPVNREPLVAA

SEQ ID NO: 26900 - protein, 355 aa, unknown
  TnpB Polypeptide
MNTKTLKLRIKDKHAPLLRQMAREVNQVWNFLNALSFRAIRERSVFMSAFDLQKYTNGFSKIEGVRIGSTTIQQVADEYATRRKQFKRSRLSWRVSNRVSPKYSLGWVPFKIGAAKYKAGQTQFAGHKLGLWDSYGLGQYSLRSGSFSEDSRGRWYFNVCVQVETTATCGTEAVGIDLGLKAAATTSDAEVLQGRQYRALAEKLGIAQRAGKKARVRALHAKIKHQRQDAGHKFTSQLVKRYGAVFVGNVSSASLVKSKMAKSTLDAGWGQLKTMLEHKCQRAGVVFEVVDERYTTQTCSCCGSIPVSSPKGRAGLRIREWTCVSCGTAHDRDVNAARNILAAGHRRLAVGIPVL

SEQ ID NO: 26901 - protein, 458 aa, unknown
  TnpB Polypeptide
MILKKERIKKVKGTRTYRFRITNPDDVDVKFPHVQEVQAHYFNYALKYMYQHYGVKHLDVRLPTGDQKKYFILKLVKFARKQAAKHKGFDLKKMDYSVQSIDKMLEGLYVNFDRYRKGQYKRIHYWSEKDTQKYLATHKCGLSGYGRISYKHSYDDVHSVTFKQNHDRIALMNNYCLKVPYFGKIKSEESLTAFKHKKIVEAKIIKRREHDYELQVVTKFEEQRQITKEMVKQAVGLDVNLKDNHFFVLSNKQIVSWGKDVEAYYRKADAKSRKLQRYLTKHNKGRDNSKTTRRVKQQLSRLQTKTAYKIDAWQLKTTISFATKYPVLAMEELHSFDIRVSKRAKNYKMRKNINHKLAMLQPSTFRKQMEYIYQDRHGLLLEVNTIDTSKTCNKCGFINHDLKFEKQWTCPHCHQKLDRDINAAYNIRDWAVTPKKHAALQQPDRFPYLNEKNIVTTF

SEQ ID NO: 26902 - protein, 301 aa, unknown
  TnpB Polypeptide
LVSLTDPHALRLPKIGRVHCMENVSKRVNGAKVLRMSVSKRGGRWQASLTVERADLPIPSPPKGGSVGIDLGVKELATLSDGTVVRNPHALKSNLRLLKKAQRNLSRKQKGSNRRRKARAQVARLYARVANLRSDALNKTTAMLAHTYADISIEDLNVAGMVGNHRLAQSIQDASFYEFRRQLTYKAARTGARLHVIDRWYPSSKTCSNCGMVKTKLSLSERVYRCEECELAIDRDVNAAINIQVAGSAPETLNARGGSGRRANASRRVTRHPAKREPSGGESRVRLGAGLGNEAMQMTSL

SEQ ID NO: 26903 - protein, 457 aa, unknown
  TnpB Polypeptide
MRVYTLAYKRLLDLAKEKETEIESVCRFKNTVSAKLIAGYLSRVFKPHAYLFPMHTSLKDSLFEDVAQTLASYFELKERAGQDTNVSPPSWPQAPDLGKDESVLLGEYSSLLDDLQKAETSDDAHRIEMQIRQTLKVQKPVPPLFARPDGNVRCRNFGLYYEPKTDTFWVRLFLLDGHDPRRKPLEGRKRCLLAVRDETPEADFSSRPASHLLLPLECGTWQREKFLRPALENPRMVRTARLCRKGDDFYLHVTFEYPCPSPVQPRTILAVVVDRRPLVEVSVTDLEGTEITQAVVPGDMWWREQRRQREVRREIQQRGKNCDFSFKGVNDNIMHLVANEIVDLAQTYKSQVVMLDSRPSVAPPQTVARKREAVNYTLHRRPYGRLRQLLEYKLPLAGLPEPKTVYPWQGMLKECVVCGRSAAENGAVCACGHRVDFTQERALKVARKWLDIAKSGG

SEQ ID NO: 26904 - protein, 457 aa, unknown; identical to SEQ ID NO: 26903
  TnpB Polypeptide

SEQ ID NO: 26905 - protein, 512 aa, Firmicutes sp.
VRTPSFVCELPLRATGRTLRAVLVRLDVGRQIYNACLQTALARLRTLRASPEWAKARALPRHTDKQRARRARAFARARKRYGLTEYALQRVALKHFRRSGWMGNHLGTHEVQKIGTRAYLAASRILVGHARSARFKGRGQFHSPEGKSNATGIRWRGDHVEWRGLVFPAVIDRKDPVVEHALKKRVKYVRIVLRRVRSAPRVYTQLVCQGRPCRKPKHRTGRGHVGLDLGPSTIAVAAPGTALLSRFCEPVVRDHRQIRVVQRHRNRQRRANNPDNYLPDGRVKRGVTRWHTSRRERTVRDRLADLFRRERAHRKTLHGQLANEILRMGSTIHLEKTSMRSLQRTFGRSVSVRAPGMFVQILRRKAESAGGQVIDIPAHVAKLSQICHGFCHGCGAIQKKPLHQRVHVCACGVEMQRDLYSAFLAAHTDAGGVLHAGRARRAWPGAEPLLRAAWSQAVQPARGRSVPSTFGRPPACRSQSGSLAAEGIANAEARGGNTPGEAAVVLLRTPRL

SEQ ID NO: 26906 - protein, 418 aa, unknown
  TnpB Polypeptide
MLLSHRTSVKIRPEYSNIIGHMCYAASKLWNICNYERHHYKELGLEKYPDWYYQKKAHKGNLWYRQLPSQTAQETCKQLDKAWKSFYVLKKTGGIKEPNPPRFKQDNIPVTYMQMGIRHEKGSDQLRLSLPKDLKIYMEETYGIHEKFLYLENKIFKDMDHIKQLRIYPPENGKCDLIVIYEIEEPEQLSQNGHYLSIDLGLHNLMTCYDSGNGRTFILGRKYLSLERYFHKEIARVQSVWYAQQSKKGIKYPKSSKHIQRLYRKKQNAVKDYLHKVTRWIAEYCRKEDIRCVVVGDIRNIRKEKDMGHKTNQKFHGLPYDRLYIMLDYKLKRYGIQLVKQEESYTSQCSPLSPEVSKRYAEALNRKERGMYITNGVRFNADAIGSFNILRKYLSVSGKQKKLSVTGLKNPEIIKVAA

SEQ ID NO: 26907 - protein, 184 aa, Streptosporangium sp.
VPEPAGTGGRLATAQQAYARTRRGSNRRRKAAHRIGVLHAKVARQRRDHAHKTARALVTNADLLVMEDLRTVNMIRRPASRPDGNGGHLPNGAAAKAGLNRSILDAGWGVFTSVLESKAEEAGRVLLLVNPANTSRTCAQCGHCDAVNRASQAVVACVACSHTTNADVNAAINILRAGTVRRSA

SEQ ID NO: 26908 - protein, 438 aa, Campylobacter sp.
MQITKGFKYRIYPNVEQAKALDHQCFIYNQAFNICLNLWKKDYEANKDLPKEQKKYLKAVEYDRLVKLALKQRELPFKSVTTQQARVNFLQAIKRALSKEILAERKRAIQKASTPKQKAKALNIGFPNFKNSKLAKQSFNWNNQGYQILESNNKHFKIFKLMNMPLKMRYHRDLPKEYKLNQITISKSNDKYYISLSITYKQEVKQLDKQNLDSNKCVGIDLNINDIALSNGELIKTLSKKINAKKYDTTFKRLQRKQSRRILKAKECKSKLGSNFKKTQKQLNKIYERSSNIKRDSYHKITTKLTKEFDLIVVEALKNKNMTKRAKLKNVKAKSGLNKWILNTSFYQFTQMLEYKQKHNGKFFVKVNPQYTSKACNVCGNIKDNLTLQDRVYTCEECQTTIHRDINASLNILERGLKSFGLGISLLDYKTSALQLQV

SEQ ID NO: 26909 - protein, 183 aa, unknown
  TnpB Polypeptide
MNHVSPPSYWKNENGRKLMLVVREDNYVVDEKNHKLILKYFKMEISFTGRLRWHGKQGRLEIYYDEVGNAWYASIPVEVGVEVTKTGRKSKHILRGERKSIQVKSPKGSKAASIDLGINVLGSVVIDDGTWLLYNGVRTKDYFYLQNRIAEAQSSADKAKNLEEYEAYYELSREGEEAFQETN

SEQ ID NO: 26910 - protein, 380 aa, unknown
  TnpB Polypeptide
VFVDVHRAFTYRLDPTVKQAQGLRRLMKLQCELYNAALEERTMTYEWLKRGLSTKKVPTKFDQFKTLTGLREVRPEFGPFGISVCRGTLTRLDEAFQGYFRRLKAGQAPGYPRFRSVCRWDSLSWCAVSGWKLEESSHRLYVQGIGHLKANLHRPLRGTPKTLTVRRRGRHLEATVFCADVPKTEHAPTGKSIGIDLGVGVLVATSEGIFHPNPRHRRQIAQGLSRAQRERSLHRRGSGRYRKATAEMARLKEKEANRRRDHLHKLSRRLVVDNDLIVHEDLKVLNMSRSATGTVENPGQNVAAKSALNDAIMESSWARLITMISYKAEDAGRRVVKVNPPLHEPAVLPLRSCRGREPGQGEVRLSLLWAPRARGHKRRP

SEQ ID NO: 26911 - protein, 380 aa, unknown; identical to SEQ ID NO: 26910
  TnpB Polypeptide

SEQ ID NO: 26912 - protein, 407 aa, unknown
  TnpB Polypeptide
VLKAYKYRIYPTEEQQLVLWKTINGCRYVYNWALEQRKKAYEADEKMPSCFTLNKVLTAMKQDNEWLYESSNPALQFAIQNMDSAYKHFFRRVKEGKEKPGFPRFKSKKNPVQSFQMINNYRVNFEKNLIKLPKLDTEVEIVLDREFEGKMKTGTVSVTSTGKWFVSILVDDGKELPEPEPYTSHSTIGIDMGLTHFAILSDGTKIENPRHLKNSEKRLACLQRRLSRKKKGSQNRKKAIHKVAKMHEKISNQRSDFLHKLSITLIRENQAIAIEDLNVKGMVKNEKLAKHISDASWSTFKNMLEYKAAWNGKTVLKIGRFIASSKLCSHCGYKPSEMSLSVRTWTCPVCGSIHDRDINAAINIKNIALGIDTGANRSGEPGESWSLDRAMNQEPYSIGRDIPTPAI

SEQ ID NO: 26913 - protein, 407 aa, unknown; identical to SEQ ID NO: 26912
  TnpB Polypeptide

SEQ ID NO: 26914 - protein, 273 aa, Streptomyces sp.
VIGVDTNADHLAAWRLDTHGNPTGRPRRFFYDLSGNARHRDARHRDAQVRHALTRLLHWAKSCGVQAVAVEDLDFQAEKTREKHGRRRRFRQLISGMPTGRLRARLASMADATGIAVIAVDPAYTSRWGAQHWQKPPAGPARKTTRHDAASIAIGRRAQGHPIRLGAPPRPSRHWGRTTPPRAHRSDVHGHRTVQADRRVPGGEGPRPRIPGPRTRSVPPDAASTRATRTSTTVRGVRSDQIWVQDSLLFTDQERYGNFPGPALSTVPVIHVT

SEQ ID NO: 26915 - protein, 397 aa, Ferroplasma sp.
MRAYKFRIYPNKEQIKKIDYILDLSYNLYNAMLEQRKMAYELKKDFYYNINVNYTYQQNQLPELKNEFPEYKYIYSQVLQDVANRLDKAYDNFFRRINEKEKGKKIKAGFPRFKSKKVYKSFTYTQSGFEILDKTHLKLSKIGKIRMFKHREINGEIKGLTIKRENTGKYYAIFTVNENNNINYSLIPDKPIGFDLGLLSLIKTSNDEDIEPPKYLRKSEKKLKKLHRSLSRKNKGSKNREEARIQLAGMDNHISNQRNDFAQKLSNKLIKEYNFIAFEDLNINNMVKNHKLAKSIEDASWGSLIKDIIYKAGSAGKSYLKVNPKYTSMKCSKCGNIKNDLTLDDRTYHCDVCGITIDRDLNAAINILNDAIDKIFKMFIIKHKKKSRHGLSPILCP

SEQ ID NO: 26916 - protein, 451 aa, unknown
  TnpB Polypeptide
MQAYRFALDLTPAQARDALAHAGAARVAHNWALARVKAVLEQRAAERSYGVPEGDLTPSLSWSLPGLRKAWNAVKGEVAPWWPEVSKEAFNTGLDALARGLKNWSGSRTGTRAGRTMGFPRFKSRRRTTPSIRFTTGTIRVEPDRTHVVLPRLGRLKLHESARKLARRLEAGTARILSATVRREGGRWFVAFTVEVERQVTTPARPGSVVGVDVGITHLAVLSTGDLVPNPRHLDAARDRLRALGREVSRKHGPDRRTGQRASQRWLRAAGRVGRAHARVANLRRDGLHQLTTRLAAEYGTVVVEDLNVAGMLRNRRLARRIADAGFAELRRQLGYKTVWHGGRLLVADRWFPSSKTCSGCGVVKTKLALSERMYRCDACGLTLDRDLNAARNLAALAAEFEFDTAGSGPVAGRGANRKTRHSGQEATKRQPGTTQVGKTGTVLPKDRTAA

SEQ ID NO: 26917 - protein, 450 aa, unknown
  TnpB Polypeptide
MSIMQKLKLTIVAQLHEGSNRSLIKYMKASRRDYGTALREAFYAVRRGGFNKSKYNTYLQYKYEISKRTASSIIFDAQGRFNALKELKEYERKQLERKIKHLEDTVIPKLVEKRKQNSTKLQDGVSVSLVQQRNLRLRVVSKRAKLNRLKQKLKTLEYQLKSGRLKFCFGTKRLLKQDHDKFVEQRDSQMTFIGAREETACNHSLQLTYNRRSNQFLIRLRKDFGGYKSAKGEDRYVYGKVYFNHHKGQIVSILRSKASPLSYRIAKKNGRYYFYCIFEFQVDSNDFVTRPDYGTVGLDFNKGFVTLSETNQYGHLVRTQFIPYRFKSGNKTKADLQGVATHIVRLAFQTGKDICIENLDFRKKKAKTEAKIGKKYNDMLHSLAYREFSDTMESLAYRNRVCLNKVNPAWTSWLAEKLYCKPMKLNIHTGASYVIARRGQGYKDRYKDAV

SEQ ID NO: 26918 - protein, 392 aa, unknown
  TnpB Polypeptide
MMDLLKSFKTEINPTPEQVTKINKTIGTCRYLYNFYLSHNLKRYEQGEKFMSGKSFSVWLNNEYLPTHPEYSWIKEVSSKSTKHAIECGCTAFTRFFKHQSGFPKFKKKDISDVKMYFVKNNPKDCHCERHRINIPTLGWVRLKEKGYLPTTKNGWRIQSGAVSKKAGRYYVSVLVDVPDLQVKSKEDQTEGIGIDLGLKEFAVLSNGKTYKNINKTSRIKKLEKQLRRAQRCLSRKYENLKKIKKGEPAQRANIQKQKLRVQKLHQRINQIRTDYINQTIAAIVKTKPSHITIEDLNVKGMMKNRHLSKAVASEKFYEFREKLMTKCREEGIELRVVSRWYPSSRKCHSCGCIRKDLKLSDRIYRCSCGYVEDRDRNAALNLKDAETYEIA

SEQ ID NO: 26919 - protein, 293 aa, Geitlerinema sp.
LRSFVYPRINCAKAGAHLQNGVLKLSKIGEMPVIVHRPLPDGFKLKTCTIVRKADGWYCCISLDDKTVPELLPLDEVKSPVGVDVGLKEFLTTSTGETVAIQQSYRKTQRYLARQQRKLARKQKGSKNAEKQKNHIARIHQRVGRIRVCFHYNTAHHLVKNHDFIAVEDLNIKGLARTRSSKSVLDAAWGQFITILEAVAVKRGIQVVKVTPHGTSVDCSNCGAKVPKTLSIRLHQCHRCGLEMDRDENAALNILMRALKAVGLIVSACGGQEGTQPLKQEAECWSGVQLALF

SEQ ID NO: 26920 - protein, 424 aa, unknown
  TnpB Polypeptide
MEVPRTESIWLGPDKDLGVLCHLSKNLFNEANYKVRQEKFATGRWVRYYELWTALKNSPNYKGLPAQTAQQTLRAVDACWKAYRMAMEDYLINPEKYLGMPRFPKYKKKDGEFILIFSNQQVRLRDGIFKLLKTIRLEVKTRLPKGTKLTGARIIPRGVGYMLEITYDKEVKEKRVQEKENPIDSEIVNDSKELAKPCRALGIDPGLENLLATVNNIGVPPIVFKGGPVKSINQYYNKRRAELQSQYARQGIDTGPKMQELSLKRNRKINCFFHLVSIRLILYCKMWEIDTIVLGRNKLWKQGIDLGKRTNQNFVNIPFYKLYQMIKYKAEDAGIRVIEIEEAYTSKCSFLDWESIEYHEVYMGKRITRGLFRSAKGILINADLNGAYNHMRNAIPESMEKLKAKVMADGIEAVGIHPVRAVLD

SEQ ID NO: 26921 - protein, 366 aa, unknown
  TnpB Polypeptide
VEKAYKFRIYPNKQQEELINKTFGCCRFVYNKYLAKRIELYENNKETYSYKQCSSDLTNLKKELVWLKEVDSTSLQSSLKDLETAYKKFFKEKSGFPKFKSKKTNRFSYKTKYTNGNIEYLRKHIKLPKIGMVKIRDKQIPQGRILNATISKEPSGKYFVSLCCTDVEVKRFENTNSNIGLDLGIKEFCITSNGETIENPKYLKKSLNKLSKLQRELSRKSKGSSNRNKARLKVARLQERISNQRKDFLQKLSTKLIKENDIICIEDLQVKNMIKNEKLARSISDVSWSEFIRQLEYKANWYGRKVIRVDKFFASSQLCNKCGYKNEEVKDLNIREWICPKCNAEHNRDINAAINILNEGLRNITI

SEQ ID NO: 26922 - protein, 493 aa, unknown
  TnpB Polypeptide
VPYAAFSKSGEPLDLDVVLDGARADAELVARYALREMTEQNLALVTYFDRFKPDEAGRRMNLKLPVEVKKRFRSGSSRLERMFREQVVTNLRSWAARAGVASGDYTGYVSAGWKRTVRDSKPSSMQPRLSLSAADKQYREMTVTPERIELMMVVQGQKRVLHFPTPPQLLEDGCEPGVPDIWIDSQNRVMFGFYGTMDPGRPEFSSRYVIGVDVGVTNPAAYVVWDTEKKQVVEQSLLGQRARSLNNKIKRTQTQVSALQRKGKDEEATPHREHLSHRRCELSILIAQEVADAAWRYGNAIVSFEDLSHIKNTMKFGRWFRGEVLRRTRDMVEADGGRVLKVNAAYTSRKCHICQSDLDVSDYSQPYCSVCGITHHRDLNAAANIAQRANHRKACQTRKRHATKAKRIRRSKCHSRPLKHPGTKNKPTPKAPQNRPKTHTPATPSREVSKGMCPADVRVSAVDHTEWFQTTSGTTNPKENLSANTVDWVYIKE

SEQ ID NO: 26923 - protein, 558 aa, unknown
  TnpB Polypeptide
VILWLCWRLSLVVSTVFEGGISSAACLLTLVTSSTKDPVRVPSVNRTYPCRPYACFDEDGKGVDLHDILEEVRCEATDCARQAVKHLTWKNMIRVADYKGLKPSVAGSRMGIRLPPGKRLRGRSRFERMVREYAVSQLRSWHERFMAYRGGSSKYVSAGWRRTVNTHSPETLAPRLALSATDRQYHSISIRGSTTVLRMVVSGRWVNFHFKTSRRFLDEGVRPIAPDIIVDDRGRVVFNWFAEIPVERAEFSERYVVGVDVGRNSAAFSTVVDVTTGDVVEASGGNRRIKTLENRISRTENQIRSLHRAGRHEEAAQHREGLANRRNELAILVGQEVADLSFRYDNTLVAVEDLSGIRNTMSHGRWVRGQMVRRATHMVEADGGRVMKVNPAYTSQKCHVCKTQMDMRDSRRPRCLVCKVTWDRDENAAVNIAKRAPHGKACATRKRHASSGRRRNSKGSAAPLKHPLSKGRPTSKAPQNRPQDSHMLEHSKRFRREKREGGAATRSTCAVGWSPVVKTDVSVPTVGSSCEDVQTTSRTTTPCSATSRDTACCRKTKV

SEQ ID NO: 26924 - protein, 380 aa, unknown
  TnpB Polypeptide
MNKAIKYRLYPTIEQEIMFSKTFGCCRKVYNLMLNDKIESYKATGKFISVTPAMYKANYPFLKEVDSLALANVQLNLQGAFRNCFDKSRKVKNGFPKFKSSKHSRKSYTTNNQKGTVAIIDDKYIKLPKIGKVKAVIHRQPDIDWFIKSATISQDSDGKYYASVLFEFSDTISTYVAGTTKVIGLDYASDCLYVDDKGNVGSNHKYYRESYDKLAKAQRKLSRMQGSHKGENKSSNYLKQLRKVNKIHKHLANQRLDNLHKISTKIANSYDVVCVESLNMKAMSNKGFGNGKATLDNGYGLFLNMLKYKLADRGKYLIKVDKWFPSSQICHECGTVHPEMKDLSIRTMVCNCGLNINRDQNAAINIKNEGLRLLNESLVA

SEQ ID NO: 26925 - protein, 297 aa, Nodularia sp.
MWERNHGFPRFKKSGRMRSFSFPQLGTNPLNNGCVRLPVIGAVKVRQSRSISDGGVIKQARVVKRVSGWYVMLTVQWDVTVPSPMPHGEAVGIDVGLTSFVATSNGLLVKRPRFFVDAECKLKLLQQRVSRKRLGSNNWKKAQKKVASLHEYVANCRKDWHRKLSHQICNDAGMVFVKDLNLVGLSRGMLGKHCLDAGFGQFFNILEQTCFKRDAYFQKVDARKTSQICPNCGIETGKKELSERTHVCSNCGYTTDRDVAAAQVVLVRGLAAVGHTVKMLAEGKFIGIPVKQESSHL

SEQ ID NO: 26926 - protein, 444 aa, unknown
  TnpB Polypeptide
MKITSSYAMKLTGDLKALENSIRIYRDALHFVIPIVDAHWDEVKDFEYSNQRMMYVEKLVHSTNKNQAHYSFDEEFPKFPSYLRRAVLNDAIGIVSSYRSNLANWEKGPKGQAPQLSLTHYAYPAYYKNNLFRNFDPVKQTVELKVFKNGDWVFEVYQLKTSDCTYYQTYLSGKKQNVPIIQKKGRRFYAAFSYEENVSLIPEESIRTICAVDLGLNTDTTCTIMGQDGTVYARKFISFSKEHDRLHTQLGRIKRNQKRGSRHNKTLWRSVAGISQDIADKTVKAILDFGNEHGVDVFVLEYLDFKGKNIVKRAHFWRYKRIYKVLAQKAHQYGLRIARVNARYTSRLAFDGSGWSKRGREIAPETPYALMEFPTGKTYNADLNASYNIGARYFIRHLLKTVTATQRLALEAKVPQVAKRSTCTLSHLINLRSEFAALTAKTQA

SEQ ID NO: 26927 - protein, 205 aa, unknown
  TnpB Polypeptide
LFCCESQTVEKRRAERFLGIDFAMQGMCVFSTGEKAGYPMFYRKAEKKLAREQRKLSHCEKGSRNYQKQKKKVALFHEKIKNQRKDSQHKLSRELAERYDAVCVEDLNLQGMSGELHLGKGVQDNGYGQFLSMLGYKLEERGKHLIKVDRYFASSKICSVCGHKKKELTLSDRMYVCECGNRMDRDVNAAVNIREEGKRIYKECA

SEQ ID NO: 26928 - protein, 365 aa, Cylindrospermopsis sp.
MLLSIKTKLKLNKTQEILMAKHAGIARFTYNWGLATWQDLYKDGLKPNKYILKKFFNNHVKPELAWIKEKGICQKITQYAFDSLGDAFQRFFQGKSKYPNFKKKGKNDSFTIDAGGKPIPVGGTSIKLPTIGWVKTYEGLPHTTCKSITISRTADSWFIAFSYEQECQPTIKDYDAVGVDLGVKELATLSTGVTFPNPKHYKQNLAKLERLSKIYSRKAKGSNNKHKAKIKLARHHARIANQRKDTLHKLTTYLCKNHAKIVVEDLNVSGMLSNHKLAQSIADCGFYELKRQLEYKAKKFGCQIIIADRFYPSSKTCSRCGHKKDSLSLSERIYRCENCGLEIDRDLNAAIMLSRLAKACKSTEG

SEQ ID NO: 26929 - protein, 479 aa, unknown
  TnpB Polypeptide
MLSLCLPGRRGSGDHAIRCREEAYPASNNTFTLLGSSISIISALSMAGKTLRKCIILNILELTSTKQDIIDNLFSEYLHVLNTTLDKLPSARSSLELHHLTYSTIRESSFLPSDIVEEARKDVWAKRKTIKNGFKKCSIRLNKRWFRFVNTDRGNPCFKITYSPKKTVSIPVRLNAHWNRLNSFLAGGWMFDNISLLNGNRIAVILEKISLPAVNNRRYILGVDVGSSTLAAVTVYDTQERKVVKQLYLGQDMAERQNWYLERRAMLQHLTKKGSDKDNARKHLRKLKHDQSSFVNTRSGQVSKEIMKLAQEYEASVAIENLNLRAKKKINKSSGEKKINRKARKKINRIPFGKLRDYLKSNCEKSKTPLDMIDAYHTSKWCPYCGSVNPGHDRSNYALYTCKTCGITVNSDRKSSLAVAVKSLLERNINQALTKPDSFQISWRRPPVTVVGLFRPCPSEARLSCAVHDIKPADGMPRT

SEQ ID NO: 26930 - protein, 576 aa, Natronorubrum sp.
MSSTHLSLPLRLPDEERERYNRLADLTTQTANTLIQQYWTPDYLTEINESSYQAWKYFDEQEAFEQFDIYLPSRYKRCLLQKVGETLRSHADKREAFQTVKPLLPDHKIRRIHTRRIKNRLWESEEYLSSGYVDLLIDQLNAYYNVHGTYPATYFDFQECPEYSSGVLPYSADDGPTSGQAVKYQYDESTKQLTVELKTPDTLEPETYGDWTWTEYTLDGYESFNEFVEHGSLSAPSFHPNTSKRGDEYHELSFPVEVEHADTSDDVDTVLSIDGGLRKDATAVVVDSDGEQLSTPYFIQNTERERMRNLNRERNQLNSKLADLRRQGRDHTDHFKHIQSEYERVNNKIRHKREQLVHDVANQILALALVYDVDAIVHEDLRSLSPPRGEGQLSWELSSWARRESIKSIEYRADIAGIQVERVYAGNTSRSCPRCGSTGHTTKSPDHYYEVWHGGHFRCDNTRCGFQADRDYVGAVNVARVFFAESDSLDSDFTSSYTGDFEIELASRSAGSCPMFGDSLIAYTGQSRVTAGGGSAFIAPAVTPTGTKNAVSSKSSVSSPATHSYSLFVRDTAVCC

SEQ ID NO: 26931 - protein, 353 aa, unknown
  TnpB Polypeptide
MELIKTIRVRIKDKHAKVFNTLARETNFVWNFCNELSLRHTQKTGKFMSGYDLQKYTAGACKEGLLLNSATVQMIGHELAIRRKQFKKVKLSWRKSSGSRRSLGWIPFRHDCISYKGGQIRYAGYKFNVWDSYGLSDFELGTGSFSEDSRGRWYFNATVKIQKHYNEATDSVGIDLGLKECAVASNGDRLIGRNYRKLESKLGIAQRANKKREVKNIHAKIKNRRKDELHKFSTKLTQEYGAIFVGNVSSTGLIKTKMAKSTLDAGWSSLKTMLEYKSAYAGVVFEEMNEAYTTRTCSCCGTISDSSPKGRVGLRIREWTCLDCGSVNDRDLNAARNILALGHERLAGGIPRL

SEQ ID NO: 26932 - protein, 371 aa, Cetobacterium sp.
MILSKKIRLKPDKTQESLLWKSTGTARFIYNWTLARQKENYENGGKFLSDNELRKEITILKKTELSWLNNVSNNVAKQAVKDACNSYKSFFKNQTGFPKFKSKKKAKPSFYNDTSKLKVKEFSVLIEKVGWVKTAEQVPIDVKYTNPRISFDGKYWYIAVGIEKQNNTLELNDASLGIDLGVKDLAVTSDGKVYKNINKKKVVKKLKKKLKRLQKQVSRKYEKSREVNNRYEKSQNIVKLEKKIRLVHRRISNIRNNNLHQITNEIVKTKPSRIVMEDLNVKGMMKNKHLSKAIAEQNFYKFITYMKYKAEFNGIEFIQVPRFYPSSKTCSKCGTIKKDLKFSDRVFKCECGHIMDRDLNASINLSNYRVS

SEQ ID NO: 26933 - protein, 384 aa, unknown
  TnpB Polypeptide
MIKIIAYKYRIYPNLKQQELLEKHFGCCRWVYNYGLQRKIEVYAKEKRIISRFDLQKEVALLKKKEDTKWLSVAAAQSLQESLVHLDKAYTRFFRDKKVFPKFKSKKENYKSVSFAQQTRVDFSTNKVFVIKFKEGIKCKLYREFTGRIKTSTISKVPSGKYFISILVEEEVEDIIQKPINVESALGIDLGIKSFIVDSSNREFDNPKFLRKSEKKLAREQKRLARKTKGGKNREKQKIKVARVYEKISNQRNDFLHKTSRQLVNDNQVNTFCIENLNIKGMVKNHNLAKSISDCGWGTFVKYLTYKSKWAGKNILMIGRFEPSSKVCNKCGFINDKLTLKDRKWECEGCGEILNRDYNAACNIRDFALSKQNLVGRETPELTL

SEQ ID NO: 26934 - protein, 400 aa, Megasphaera sp.
MLFEMCQYSNNLYNFGLYNVRQYFFHEKKFLRYEENYHHCKLNENYKLLQAGIAQQTLKIVNRSFLSFFNLLKKASHGEYRYHDIKLPHYKKKGGLFPLILSTNAMRFVDGYFVMPMSREFSKRHPGKIIRITFPKRLEGKKIKEVRILPLGNGKCFKIQYCYEQNIEKQDVSVDKVLAIDIGLENLATCITNTGTSFIMDGRKIKSINQYWNKRKAYFQTIASKQKLKSTNRLFRLTRRRNNQVKDYMNKTARYIINYCINNQIGTVVCGYNPEFKKGMNLGKKTNQQFTQISFGELRNTLSNLCERYGMRYIEQEESYTSKASCLDLDEIPVYNAEHPYEGKFKGKRIYRGLYQFQNGQTANADVNGAANILRKSKQNFNFEELCRGLLDSPLRIRIS

SEQ ID NO: 26935 - protein, 369 aa, unknown
  TnpB Polypeptide
VLWLLEQFRQMMNECIRIGLRENVTSMKSLSCRAYRELKGYDVPSCYRLCAISAATGILRNYRKAKRDGKRVKEPYAHRLRLTTCYRFKIEGGELMLPLRAGEHITFPLSTHVQETVNGFTVRSVTLTEDRLSLAYASDVQEIKPQGFVGIDSNLDNVTTVASGGTVTRLDLSKATQVKAVYREVRRHMRRNDVRVRRRISGKYGRKQRDKVQQIIHHASKLIVEEAKAKQYGIVMEKLTCIRRLYRHGNGQGRWYRGRMNSWSFGELQRQVKYKAKWLGLPVIYVPPHGTSSKCSICGQKMKPEENRMLRCPSCGYTVDRDVNAARNILEAGRLRFGLVERAGEAMKLSCSNEQVDARQLAKAGLPLT

SEQ ID NO: 26936 - protein, 417 aa, unknown
  TnpB Polypeptide
VPLITLKAQIHADPQTEDVLKDAMFCATKVYNGLLWHLRKEHKETGRVDISRKNLNRILKELPRAKGYYSMSVQLTRDEVREAYKSFFALKKKGLTQHEAPSFRRKGYFSPLKYVQSGFKVEGDKVTLSLGTNREDGVRQVSFRISHRPDIEYERVRELSITYDKDSGRIEARLVVEVKACENNGTGKAAVDLGETVLMACAFDDGMVMLYSGRFIKSVRRYWQKVRASLRQNSRRWKEIAHRERKQVEQLLHIATSHFIAECIRRGVKEIAIGDLNGIRQGIDYGDRLNQRLYAWPYRKLIDMLKYKGALAGILVRDNVDEESTSITCHACGKVVASNRRHRGLYVCSCGWRTQADINGALNIYERAYQVSPVKGSSGRVARPAVVSYLLGWHGVAEPKREGKPLRASVLGCPSIY

SEQ ID NO: 26937 - protein, 408 aa, Acidobacteriia sp.
MIYRGITFKLEPTEAQAALIRQHAGVCRLIYNICLEQRRDWWKRYQDRTGDNLNYVTQSRQLTTLRAEFDFIRDVSQTAEQMAIKALDVAFKNFFAGRAGFPAPHKKGVNDSFSFAGRQIDVKRLNRNKGAVKLPKIGWVKFRGFRPVEGRIMQATVSRTNLGWQVSVGCEIDRDIVHPPGAVGIDRGVAVPLMLSDGTSYVLPESVSALAQKINAARRVVSRRKRGSKRQAVAKARVSRLCARQARIRKDWAHRTTTAIARQYGTVVVEALRTKNMTKSASGTIEKPGRNVAQKRGLNRVILNVGWHQIETMLTYKVGCLIKVNPAHTSQTCASCGTVDSRNRKNQSAFVCIACGHRDNADRNAAINILNRANIAGVEARHLSLSCEAQTTLGESQGNLRPSGRGRC

SEQ ID NO: 26938 - protein, 328 aa, Spirulina sp.
MKTLKFKLYQHKRNRYLKRTINAAGRIYNHCVALHKRYYRMWGKHLNCARLQKHIAKLRKRNPWWLQVGSQAVQDICQRIEKAYQLFFKHNKKGVRLPNFKKTRKYKSFTLKQAGYKFLGGNRVRIGNKVYQYWHSRPIEGKVKTVTIKRTPLGELFMIVTVDTPSEPEVKTETGNIAGFDFGLKTFLTCSEGFNIDAPLFFKQSLNSVRKASRELSRKQKGSAHRERARLNLSRKHEDIAHRRRDWFWKLAHQLTNQFDGLCFETLNLKAMQRLWGVKVSDFGVSGSFCKSWSGWRRRRGSGWSMLTAGSLRARPVQVVVIFWSIWI

SEQ ID NO: 26939 - protein, 363 aa, Spirulina sp.
MLVLTYSYRIYPDLEQELQMLNWLETCRKVYNYAVGERKDWINSRKCPVNACSLQKEYIIPADTPYPDYYRQKKALTEAKKTNPELKAVHSQVLQDVIGRVDAAFVAFHQQRIGFPRFKKFGRMRSFLFPQMKGEAIDGNTIKLPKLGPVLINLHRPIPEDFDLKAVRVVRKHSGWYVMLTLKADVDVPDIPPEGHALGLDVGLEYFLSTSDGEQVSRPRFFNRLHRKLKSLQRRLKGKQKGSKNWLKLIKRIGRVHENIANYRLDWQFKLAHHLCNQAGMIFVEDLDFRTLAKGFLGKHMVDAGLGQFVNIVLPWVCWKRGVCYGKVNPRGTSQECPDCGTEVLDTPRPKGTGILGSPSPLT

SEQ ID NO: 26940 - protein, 327 aa, unknown
  TnpB Polypeptide
MSNTMILCERHIIKKSHPFYDECDNLTFLAKNLYNSTLYFQRDSFFNQDFKNYYDVNRVFTHSNQKDYRALPSKVSKQVQMLVDKSFKSYFALVKKKANGDYSNGVRIPKYLGKTGGRCVVPYPKDALSLKNEGFVKFSKTNIIIKTKLSRKDIKAARIVPKGNHFVIEILYKAMMKPLKSDKPRRMAFVDPGLNNLMTVTSNCFNPLIYNGKPLKSINQLSNKNIAELKSKLSARGLRNSSLLQSVYSKRSRRLTDLLHKITTELVNQLDSHNIDTVIVGHNVGQKQDINLGKVTNQSFVQIPFTQLMYLLKYKCELRGMRFIETE

SEQ ID NO: 26941 - protein, 374 aa, unknown
  TnpB Polypeptide
MILAYKIKLSPSEEQNNVLLKTLEQYKQAINSPLLYGFQNKIVSGVELHKATYYPIKEKTSLPSQLICSARCKATEILKSVKSNTKGSFKTKQPTSHKFPTIRYDRNSCVITKEFVKLSTEQGRLQIPIVQSNWIDKIDFSKIQRSAELKYHKGKKIWLLTIFVEVEEPKQRGDKVIGIDRGCKHIAVCSDNTFFDSKHLRNVKGKYKHLRKRLQSKGTKSAKRLLKKLSGKENRFAKDVNHCISKQIVEMPYDIIVMEKLSIKRKKEQGKRFNSILNGWSYYQLENFVDYKAKREGKRVEFVDARYTSQKCSSCGHVHRSNRYQTSFKCKACGFQLHADLNASRNIKNNFKATLGKSSSSRVQSITHTEQAFA

SEQ ID NO: 26942 - protein, 419 aa, Streptomyces sp.
MLTGRKYRLELTAAQAEQGQEFADVCRAVWNTALEQRREYRRRGGRMTYVSQTAELAEAKREFAWLCAAPAQVLQQTLRDLDRACRQHGPFKVRWRSKGHWSPSLRFPDPQRIHVERAGRKWGRAKLPKLGWVRFRWSRPLGGAVRSATVSRRGGRWFVAFLIEDGKIAPEQHSLPTSAVGIDRGVKAAVVTSDGTFHHRAFTSEGEAVRYRRLQQRLARQRKGSANRRKTIAAMGRIAARVADRRTDFYARTANRLTTRNALIVLEDLRVKNLTASAAGTLANPGRNVRQKAGLNRAILETGWHRLELALASVARYTGTRVVKVNPAYTSMSCHACGHTAPENRDSQAVFRCRACGHQDHADINAAKNIKAAGLAVSACGDVGAGRSVKQEPKSRATGRTLCVGESPVHAGEEAKCTG

SEQ ID NO: 26943 - protein, 411 aa, Deinococcus sp.
MARRCLQHPEPWQSPVEEVTPIESTTLKAFRYRLYPTKAQTAALESTLLLCQRLYNGMLEERRGAYRKAGKSLTAYDQMKSLPEVKAALPEYAGVNAQVLQDVAKRLDKSFKGFFRRVRTGQTAGYPRFRGRDRYDSLTYPQPSQNSVSGDGKHVYLPKIGNVRLRLHRPFAGKLKTLAVKWEGQEWYAVLTCEVPKAEPLPETGSQVGIDVGTTWFYVTSAGEFCENHRFFQRSSKKLRVAQRTLARKPNKRSNRRRKARERVARLYRKTARQRLQLHHEEAEKLITNHDLICHENLNVKGMTQGNLGGQIHDVGWGQFFRLLSSKAAEAGRRVVTVDPRFTSQRCRVCGHTERGNRVTQANFRCMSCGHTENADVNAAQNILSLGQAFVAQRISTEIACPEKPRPHGLG

SEQ ID NO: 26944 - protein, 372 aa, unknown
  TnpB Polypeptide
MKKSFKFRIYPNKEQTNILNSTLELCRNLYNIALEQRIKGYKQGYHINYLTQAKELIDLKENSNYSLVYSQVLQSTLKQLDKAYQNFFRRTKIGQKPGFPRFKSKDRYNSFTYPQYTKLTMKENKITIPKIGDIKIKYHREIQGNPKTLCIKKVNNKWYTILSCDNIPIKEKVKNIVNKVGIDLGLINFLTTSNNEKIDNPRHLKQSLDKIKDLQIKLSSKKKGSNRRNKIKQLLSKTFEKVTNQRNDFLHKLSHWLINKYDLICYEDLKVKEMLQIENPKYMKRNINRSINDVAWSKFIGMLLFKAEEAGKEIIKVNPRNTSKQCSLCGFIKMDLKLDDRIYRCNNCKISLDRDYNASCNIFKSWDPALQR

SEQ ID NO: 26945 - protein, 390 aa, unknown
  TnpB Polypeptide
MIETIKVQLRPNNKQLTKLFQYAGCGRFAYNWAIAREQENYKQGNKFLSDNELRKEFTKMKKLDEYKWLNNISNNVAKQAIKDACNSYKRFFKGQTKYPKFKSKKNSKQSFYQDSIKIKFTNTHVKIEGFAVSKKKNKQKLNWIKLCEKGRIPTNCKYMNPRITYDGLHWFVSVSIDVEDNTDIPTNESIGIDLGLKDLAICSNGNTYKNINKTNKVKKIEKRKRRLQRSISRRYNMNKKGVRYEKTSNIIKREKELLKVIKRLTNIRHNHLHQITSEIVKRKPSFICIEDLNVSGMMKNKHLSKSIQQQGFYEFRRQIEYKSVWSNIPVIIADRFFPSSKLCSCCGEIRRDLKLSDRVYKCDCGNIIDRDYQASLNLKQYGENVLKRNL

SEQ ID NO: 26946 - protein, 303 aa, unknown
  TnpB Polypeptide
LVWLKEPDKFSLQNSLKDLESAYKKFFKEKIGFPKFKSKKTNRFSYRTNFTNGNIRYCRGYIKLPKLGMVKIRDKQVPKGRILNATISKEPSGKYYVSLCCTDVEIKKLENANSNIGLDLGIKEFCITSNGQTIENPKYLKKSLNKLVKLQRELSRKSKGSSNRNKARLKVARLQEYISNQRNDFLQKLSTKLIKENDIICIEDLQVKNMVKNHKLAQSISDVSWSEFIKQLEYKASWYGRKVIKVDKFFASSQLCNKCEYKNEEVKDLNIREWICPKCGTNHNRDINAAINILNEGLRRITI

SEQ ID NO: 26947 - protein, 421 aa, Planktothrix sp.
MLLTQTNRLKLNKQESEIARQLCRLSKNMFNVGLYNVRQYFFQERKHLRYEGNYYHSKGNENYELLATDIAQQTLKIVDRSFQSFFKLLQMKQRGELNVKVNIPGYLPKDGYFLLVIPIRPRDLEKMPSKNWVFTVPTSRKFRREVGTFSFTIPERLRGFNIKEIRILPKTGGRYFDAAFVYEGAEEKQVEPSQEMLGIDLGLNNFATCVSTTQESFILNGRKIKSINQWFNKENARLQSIKDLQKVQGLTHRQAALLNRRNHQVQDFLSKSARYVVNWCIKRNISKIVVGYNPDLKQLINIGKRNNQNFTQIPVFTFKRKLESLCERYGIKVVEQEESYTSKASSLDVDVLPVWNADNPKTYKFSGKRIKRGLYRTAQGWVVNADANGALNILRKHTSKLDELIGQFRGCLAQPLRVNLF

SEQ ID NO: 26948 - protein, 467 aa, unknown
  TnpB Polypeptide
MICERSATTNTYTADPVSDRYRECLFDWLAAHAPLWNQINYQRRQQYFSDDGDVWDADYTDLYDDYAPILGKATCQQIARKNSKAWRSHFELLSLYRDETNQTVTEKPSPPGYWGNRNDGYDLHGLVRNDLYTFGWDKDKSTLEFGVGDVLKERYGFEHNERITLQVRGDPQWRGDDSRLELIYEEHADQLRVQHPVRIQPDNVREQREDAFTHTLDSENTTQSAAIDVGANNTLAIVTENGSTAVYHARPEFKHFQNQSDRIATLQSELPANQWTSERIQRLYDDRSRKRTHSRNAAVKHAAEWLVKRDVDTVYVGDLTDVLETHWSADVNEKTHAFWSHRQLVERVKLTFGDVVITVLETGEYDSSSRCPACGSDMITRNGDSFRCEACDLEAHADIAGAWNILQSEVGPMARPAALSAERGRDAPTNGAYWKWNDHDWIPGIFGEQSWSPDQPSISKPASSQPG

SEQ ID NO: 26949 - protein, 444 aa, unknown
  TnpB Polypeptide
MYKHKFTVVTQLHENTNQYLIEYLESSRSEYAKAVRETFQVIKSSRDFSKSKFNTYLQNSYGTTKRTANSIILDAQGRINALKELKATEKVQLERKIEYLEYNVIPKLEQARNDNSNMLRLGLPISLVSQRNLRRKVVAKKQKLNRLKQKLANLEYQLETSKLKLCFGTKYLLQKDYKTFKEHRDSQMSFVGSKTETACNNQLQLKYIAQNNQFELQLRKDFGGFKDAKGSERYVFGRVYFRNHAKKIVNILKNKNSPLSFKIIKRNSRFYLYCTFEIQVGEKDFLTRSTNGTIGLDFNKGFITLSETNQNGHLVQTKFLPYRFKSGNKTKSDLQQIISKVVILALGSGKDLCIEDLNFSNTKAKTETKQSKKYNEMLHSLAYRQFADSISYASYRNRVFVRKVNPAWTSWIAEQKYCPQMKLNTHVGASFVIARRGQGYKDTV

SEQ ID NO: 26950 - protein, 394 aa, Mycobacterium sp.
MSRYRLLPTAEQAVLMAEHCRHARYVWNLAVEQQLHWQPGRHAPGYHEHCAQLTAARAEHDWLAAGSQTVQQQALRDFAQARRKFFNGMHRRPTWRRAGVHEGFRQVAVKPRQVKRLNRRFGQVWLPKVGWVRFQLSHPVPTGVKSYRVTCDRAGRWHIGFAHVPDPITGPGDSSVVGIDRGVAVSAALSTGELLHAPVLSGGEVKRLKVLQQRLARAERGSNRRARAKRAIAKLRARETDRRKDWIETATTDIARRFDTIRIEALDVRAMSRSARGTVGQPGQRVAQKRGLNRGISRSGWGLLAARLQHKAFGRVQQIPAAYTSQQCSVCEHIAPGNRKSQAVFECEACNAGPCNADVNAARNIAAGRAVTARGDLGASRSANREPQLCAPAA

SEQ ID NO: 26951 - protein, 507 aa, Mycobacterium sp.
MAVSTRLVARQLPVRGPMNPGKAATLWAIGSELDRVRAAMWTRFSGAKTAHLSKRQVRDRLMAEHARDDFGVPQRLWRATVEDTVDKIRAWQQAVIATEVRPKIYARACDDNDERNRLLMLAKTGRWCEDAWLSRQCRKAFASKKPRPRRSRRIVADNCSYDVQRDTQGRVWLAVMTPTRGDRLRLNLGPLPDELVPTSTIEISPDGREGWQVIAAYSAKAVCSNRPRHNNLIPIEGIDAGVTEVFTTTDGRRFGAGQYQTIANRAERDRARARARNKLCAVRDRHLARAQAAIGAGDSTTARAATAKARRIERNNLARKKLSAQRSHDRAVTKDVAYQAVHDLVDATAHIVAEDLTGLRGKSKFGRTASRVYAAWQRSFLADALASVPSRRGSAVTLVNPAYTSQQVHPCGHLGIRRGKNVHCQTVGCPQQGIVYDTEINAAGNILSRATDPQISRYTPKDEVKRILTERAGTVENCPTTTQVAVGNGGVNCERNTLPSKPIALKK

SEQ ID NO: 26952 - protein, 413 aa, Halanaeroarchaeum sp.
MKRTNTFDIAPDSETTEEILTRVLDASASLWNKLTYDRRQQFFDGESVWECDGYYDEYVDVLSGATTQQIARVNDTAWRSFFELLNDPEYDPSPPGYWGNQDDGRELRTYIRNDSYTIQWNRRSRLEIRIGMDLKDEYGFGMYERLRLPVRGNPKWRGDSGRLEISYDSVEETYRVHQSVTIDDVEESRSDGSEAAALDLGANVLVACTTTTEEQYLYSGQTPFEQFRETTNAIASAQAKLPDGRHTSQRIKRLYRKRSRRRDHAVNALLRDLVERLEAAGVSTLYHGDLTGVLGEYWSVEANLKAQTFWAHRQCIDRLESVCEEYGIDVGALSEAWTSQTCPECGERDRTRRHRETLTCPCGFDGHADLVASRTLLERATNTTVRPTARPVRFQWDDHQWFPVEGATVTPNE

SEQ ID NO: 26953 - protein, 416 aa, unknown
  TnpB Polypeptide
MYLTVKQQVKHLSKDDYYTIKELCHIAKNLTNEAIYNVRQYYFTEGKFLNYEKNYALLKSSGNYKLLNSNMSQQILKEVDSSFKSFFGLLKLAKNGKFAFKDCKLPHYLPKDGYTTLVIGFVRLKGNKLILPFSNSFKKSHKSIEITIPPILIDKKVKEIRILPKANARFFEIQYICETECIQRNLNKQNALALDLGINNLVTAVSNTGKSFIIDGRKLKSINQWFNKENARLQSIKDKQHLSKKVTNRQKTIARDRNNKVNDYMSKTARKVIDYCITNDMGTLVVGYNVTFQRNSHIGKQNNQNFVNIPYGKLRDKLSYLCELNGIAYIEQEESYTSKASFWDKDHIPVYNNDNPKEYQFSGARVHRGLYQIANGKCVNADVNGALNIMRKSSVVDMSILYGRGDVDTPVRIRIA

SEQ ID NO: 26954 - protein, 445 aa, unknown
  TnpB Polypeptide
MPDFLVSGKSGRSRKEMLVQHCVVTEHSSYQERVKAASGESSKYVSQGWKRTVDASAPSYGEDYVNLGAVDKQYAVIENNPFLDGEIILRMVIRGVWYRLIFSFDNKRFTEGKVTLPVIKVEDGTPVFIFTVVTDNPVVQFSCNYIIGVDVGINNYVTVVVRDVKTGRIVNETTLSQRVHSLWNSVRASEQQVRDLKAKAATLLHDRQARMSALDEAQLHREAASRKKRELAILAAQEIANLSHTFDNAVVAVEDLSWIVNTMQNGRWNRGALVQWLTHYITQNGGWVVAVNPANTSQKCHVCGAKVSHPTHKLSVCAEHGAMDRDVNAAVNIAARAVPRVAKARVTRAKNRKLRPQAPLKTPVARNSLKYPGRDRTKNKPTPKRKNQPRVVGEVILPVCPARAQATRLDARVLADQSTRNNLGTVQAALKQGNMVYKSRLCSLI

SEQ ID NO: 26955 - protein, 346 aa, Thermococci sp.
VNYVTIKTKLEPEKREDYLKLALLAEKFRRAVELAIRLQLKGVKKSVGVKEVSRLVLNNWWYSDSAWDYAKMLLRGAEQNGGNPRHIHLKSKFLISKPKENEKGNRNVRIEWPNVRIRSNGEWLEFRMKTAEKFLPVILDVQKFKYGAQVVLKNGKIYLHVQVLFGIYLKHLGKITRGRLYAGFDLNSDRVNMVILDETGIIRDVRVEHFPEVNSSGFSRRKARDLRLKALAQLLDYAYHHGVGTVFFEDLGKIKRRNGKAAGSRKGNRKASNFAKKELLEHGIVMASKRGFKVYLVNPADSSKLGRELARGLGLDVHTASAFVIGWWGVNSLKTHENSQKEEQFG

SEQ ID NO: 26956 - protein, 387 aa, unknown
  TnpB Polypeptide
VSIRTIALTLAPTEAQRAAFLRLRRAFADACNHVSAVAWDTGTFNRVRLQQATYGDVRATYGLMAQHTCQAVSVVAQAYRKDKDTERVFKPTMAVPLDTPRLYRLAGNHVAITTLDGRLAVKLNIGGIQRAWLKGAMALKEADLVCDRKGRWRLMVSAVYPDPPPMDTDGVIGVDLGRTDIAMTSDGDTFSGQQVTAVRDRYTRTRRMIQRHVSQGTRSSRRRGRQTLARLSGREHRFQAQVNHTISRRIVNRAVESGRAIALEDLTGIRERTNRQARTKTERRRSNSWAFHQLRLFLAYKCVGAGIPLLLVNPAYTSQMCHCCLHIGERSGKRFTCLHADCRWCGDADYNGARNIAQMGMSVTHPRGPWLCCSYQPGRRAPESPRL

SEQ ID NO: 26957 - protein, 450 aa, Nostoc sp.
VALRRATFRLYPTKKVNNLLHYHQRLHKELYNAAVSNRITSYRKFGKSVSYFEQQNCLPDFKEVWAEYKQINSQSLQATLKRVDLAFQRFFKGLGGYPKFKSIRRYSGWSYPSFTGWKCHSTGDNGYLELAKIGSIQMRGKSRLWGHPKALDIVHRNGKWYASVVLDIDDELLRNSRKTDDGIVAIDLGCNDAIAWTNGEENGLISAPRFFRNAEQKIKQLSKGKRRKRSPNLKKKQKASRRWKKAQSQISKIYRKVANQRQNWVHQVTTRIISGNSTVVTEQLEVKNMSAKAKKGGAPKAQRKRDKRKKQKTGLNKSILDVGMGMIKQSLKAKLDDVSGVFSEAPTKKIKPSQTCPKCGHQEKKSLDQRVHICSNCEYTQQRDIASGEVLLLWYSGRLPGLGTSLADADRSSSTSRTRKTAGSMKQLGEKKRQKSCSTGGNVETPPSTK

SEQ ID NO: 26958 - protein, 243 aa, Oscillatoriales sp.
MGIARFAVLSDGTFFLPVNSFRQHEKRLRKAQQALSRKVKASHNWRKAKKRVQRIHARIANVRRDFLHKVSAAICKNHAIVCIEDLQVRNMSRSAAGTAATPGKNVRAKSGLSKSILDQGWHEFRRQLEYKLAWSGGRLIVVPPQNTSRTCPCCGHVSANNRPTQARFACVQCGFEANADVVGAINILSRGMQIMRDEGRDTTDASVGRLACASVSPDGLWIEPHKRSEAGTHRSDYAKESDA

SEQ ID NO: 26959 - protein, 422 aa, Thaumarchaeota sp.
MQAAKYQLIAQKRKETKERHSRMAVRAYELKAERNHLGAAVLEKLERLFIEAKWFTNYAIAEGPFAVSWKVKCVPVKAGGHVEERELKVLSSQMRQGILKRLQDNIKALAVQKRKGIKVGKIRFRREVRSIPLPQRDYTYKVLDKGHIRVQNVGILKVSGLDQIPPGAELANAVLIHRHGDCYIHITAFLPKKDEEKPPYFVGIDFGIHDQLTLSNWIKVSFEVPHASKSIRHLMRSLARKRPGSKRYRITLQRLEKEFEHLANIRKDIAYKIGHVLTVHFALIAFQDDDIHGWERLWGRKVMTTALGRLKQFLEWHGAVAVEQYYPSTQECSLCHRRVGKLPLDERTFKCPYCGAELDRDVNAAKNIAEWGLRSAGSRAERPLRPADEAASALLQRELLSVPYVRAQVASVKREASPLTAG

SEQ ID NO: 26960 - protein, 391 aa, Thaumarchaeota sp.
VEGLDEGALTVTVMMKVSPDAALRALIKRYRDALAFAIRRVYETKTKATLKEVHRLLYEELKAWFGLPPRIAIDCEREALAIYKGWKKNPKKGKLPLPKKLSMWLTFKQGYRVKGNVLEIAGGVSAKIIGWDRRYDEYENREARLVYEDGEFYLFVTKKIPKPKPIETKGALAVDVNEAKIEIGNHEFHKEIATPLETAAHYKLLAEGLQEKYSSGRYRPWLTRQRIRGRIGAFHEKANNIVEDWAKKASLEIVKEAQDRSLAIVREDLTGLIKAIRRLPKSHKTRLISLAYRRLEYWIDWQAQKHGVLVKAVDPAYSSSTCPVCGSRLAEVGYRRMKCSKCGFEEDRDVIAILNLERMGGPLAAPTAPEMKDVSPNRSGEPIRPEGVVAL

SEQ ID NO: 26961 - protein, 465 aa, Symploca sp.
MAKPKKRFGVQQMLLNPDKETKAVLEYLCEQSGKLYNSGVYFARQTFFKTGKILTGKFDLVYESTVGKSQIAQSLPSTPAQQTLLSVTEAFKSYKGLRELWKKGQLLAQPKPPNYLKGSKLFKVAYPNSGGQKPKIFDRQLQFSLGLTVKRWFGVNSFRLPLPTNLDATKVKEWTILPKNGAFYLEASYELPREQTFKSLDDLPKDARRAVALSIDLGTADNLAACVDTLGNSFLIDARAMKAFNQYWNKQVATRKETKPEGYWDAWLDRVTRKRNHRMRDGINKAARIIVNHCLSYRIGTIVLGWNEGFKCNANMGRLNNQKFVQIPLGKLKGRIEQLCNLYGIKLVITEESYTSKASYLDGDSLPKYGEKPYGWKASGRRTQRGLYKSQNGSLVNADLNGAANIMSKVARKLGIDLDRLGRRSLTTVARVRLWVLPQFTLSAESPRMQDRGVSTLIVNLGVRY

SEQ ID NO: 26962 - protein, 435 aa, Scytonema sp.
VLHKVVQVRLYPSKEQEILLSQTFGSARWWWNYALNKSIEAYKETGKGLGRSALNALLPALKKAEETEWLADCYSQVLQATTLNLTTAYKNFFEKRAGFPKFKSKHSKQSIQYPQNVKIVNGNVKIPGDIGIVKAKIHRPIEGKIKTVTISKTPSGKYLASILTVSVCSAPPMPNGRLGLSRLGGGQRPTVDGENPATTDGKIYGIDLGLKHFAVVTDGEKVSKYDNPKHLAKHEKNLKRKQQKLARKQKGSKSRNKYRKVVAKVYERVSNSRQDFLHKLSYKLVSDSQAVIVENLHVKGMVRNHNLAKAISDVGWGTFTNFLAYKLERRGSRLIEIDRWFPSSKLCSNCFYQMSEMPLDVRDWNCPSCGTHHDRDGNAAINIRAEGIRMIKAEGSAVSAVGGEIRPKLGRKSNLRHSPMSTEADTVLGTPSQCG

SEQ ID NO: 26963 - protein, 398 aa, Herbidospora sp.
VAVRRSYKFLMRPTAHQQAALAACLDDHRALYNAALEERREAYRRSRVSIRYGDQSAQLKAIRAGDPDHARWSFSSQQATLRRLDKAFRAFFDRVKAGRTPGFPRFKGRDWFDTVEWPKDGDGCRWDSQPEHPTTTYVRLQGVGHVRVHRHRPVRGRVKTISVKREGSRWYVILSCDDVPAEILPATGAVVGVDMGVASFLTTSDGEQVGNPRHLAAVAGELAAAQQDLARKKRGSKRRRKAVARVAALHGKVRRQRLDSAHKSALMLVADYDVIAHEALQVTNMTKRAAPKPDGAGGFMPNRAAAKSGLNKSILDAGWGVFLTILSHKAESAGRELIAVNPANTSRTCARCGHCAKENRATQAEFRCRACGHAAHADVNAAINILRAGLALREAAAA

SEQ ID NO: 26964 - protein, 182 aa, Salinibacter sp.
MEAGSQGGGLLPEQQKLSRKEKGSNNWERQRKRVAKVHQRIQDRRRDFIEKLTTRLIENFDVIVVEDLSVKNMQQNGNLARHITQAGWSQIVRRLRDKCERYGRTLVIADKWFPSSQRCSECGHVGGKKPLHVRDWTCSECGAHHDRDINAAKNLSRVGQTRIQAPGDLGKPDAFEVVGSGR

SEQ ID NO: 26965 - protein, 157 aa, Salinibacter sp.
MIFADNVMKHEIKRTYRYRLYPGEAQKAELARTFGCSRWVYNWALETKTKAYYQDEESLSFTDLSSRLTSKKKEEETEWLSEVSAVTLQQSLRNLNQAFTNFFEGRAEYPSFKSKKGDQTARYVGTSRRERETEAPSFEDAGTYKHPVVEGASVRAE

SEQ ID NO: 26966 - protein, 339 aa, Chloroflexi sp.
MNRKPKRPRRQKRARTGEPQVITRAVTHIRLVEINPGKLVALDELAPIYLALCQHYITLFCIEETPNNLRTPLYATPLSERWHRVAIMQAAGIARSWRTNRATAYQEHQEALAAYREQQAEGTLAPTSQEPTWREWNVPTLRETAIQANANVVVCEPSQDSTYDYWLRISTLSRGKPLYVPVKLAPYHQKALKDKKVNSSVQLNKRDGVWWLTLSYDETVAPQTAPDAPVVGIDVGITNFITTSTGRHYGSMHGKLRERHKRDREKRRRKAKLRACLKKKNAKKVPSTSSRSGQRLIRHTRQMINKAVNDCYKDHPDAHFAYEQLSVASMRFRMLENAG

SEQ ID NO: 26967 - protein, 392 aa, unknown
  TnpB Polypeptide
MAEASKLSALLAAAEAAAPMVMRTYKFRLLPRKGQHQKLKLALDQTRDLYNAALEERIGAFRKCGETRSYIVQCGGLTELRTDPAFTQFAVAMQRWPLKKLDLAFRAFFSRVKHGEKPGFPRFRGKDRFKSFGFTDRDGWSVEGRRLRINGIGRVAMHLHRPLPSAPIACQIKQDSKGWVALLACQVPVEPIESVGHSVGLDLGITSFVAMSDGETIPGFRAGHRAQTEMRRRQRALARCKRGSRNRRKAKARLASLHAHVGNARRTFQHQLAARIVRENDLIAIEDLNVKGLARSIRARDVHDAGWTSFTQLLAEKAEKAARTLVRVDRRFTSQTCPDCGTVKPKDLSERVHRCECGLTLDRDVAAAKVILMRAVASPLSHNVGGCAVRAA

SEQ ID NO: 26968 - protein, 404 aa, unknown
  TnpB Polypeptide
MSRYRLYPTPAQEDVLLGHCAHARYVWNLAVEQRSWWQPGRLSPGFVEQCRQLSEARAASPWLAAGSVIVQQQALRDFHAAHASWFAALRQWRKRYAKIPPAERPAPPGQPGFRKRGLGEGFRIVATGPQDVRRLNRRWAQVLIPKLGWVRFRLSRPVPDAKSYRVTRDRAGRWHVAFAAIPAPIPGPSTGEVVGIDRGVTVTLALSDGRTYQAPADRDVTRLQRRLARAKRGSKRRARVKARLARLHTRNADARRDWAEKASTEIARGYDLIRLEDLDVWRMTRSARGTLVRPGRHVGQKAGLNRSILRSGWGMFATRLEHKARGRVEKVDPAYTSQRCSRCGTVDRQARESQAAFRCRSCGYRANADHNAARNIAAGHAARGGLALAEPANREPQLVASSVT

SEQ ID NO: 26969 - protein, 513 aa, Caldilineaceae sp.
MTTPTAEPDPTTKPTAIRSERYRVRFDHRGQAELCAQTAGANRFVWNLFLAYNNWSYRMARKARGYGRWTDFPEAQRPLLVDPGRSWQSMYKRFAMIRSGKYDREFQAFLASPEGAVYADQDLSWLRDLPSHPVRHVLKYLDSAYRRFYKAHVEAKAEGRFLPRRKSDGKPQYFPRRKGRQGRKPDGFTIPNNVRMDGDRLHLPRMGWVRLERGRNFPYRGCAPKTVRLLKEGTDRHPKWYATVAYAVPTARLKPAAGDGELGVDRNVRQATDSEGVVYEQPDTTNLDANIKRKQRKAAKARERSRRSGQPMSNRGRRICGQLRKLHRKKRRRRENAAHQHSRQMADSAHAVVVEDLDTKAMTQSAKGTVENPGTNVKAKSGLNREILASGWGQLELHLDYKAGLVVKVDPAYTSQTCAVCRHVGKENRKAQATFKCTACGHTANADRNAAINILDRGLPLIRQARGAGASARREAIPLGTSTTREHGRRGPPSPVQSGPDGPDRVPVVNLSV

SEQ ID NO: 26970 - protein, 271 aa, Hormoscilla sp.
MYLGSVRFVTRGSGTWRSTTFDHTRRKPEHVEHSYGGVGVDLSVKTLATLSNGKTFPAVKAYRKAKSKIAHLQRSVSRKFKGSNNRKKAILKLQKAHYRVASIRNDATHKLTIYLAKNHSEVVIEDLNVSGMLKNHRLAQAIADGGFYEFRRQLEYKCQWYDSKLTVVDRFFPSSKTCSHCGHVRKGLKLSDRTFVCPRCGFFLDRDWNAAINLALAGSSPVSACGASHKRNSAGRMRRSRKRTPDAGSTSSRVWICLTLGKFLRADKSQY

SEQ ID NO: 26971 - protein, 329 aa, unknown
  TnpB Polypeptide
LHSHILQVVVQDLDKAFQAFFRRVKAGETPGYPRFKGRDRFDSFGLKEYGNGFKLDGRRLRLTGIGRVRVRWHRPLQGRIKTIRIRRQAGEWYACFACEVEEQPLSPTGREVGIDVGIHHLLATSENEIVDNPHWYRNEQRRLRVIQRRVSRRKLGSTNRRKAVLALQSWHEHISNSRRDYLNKLANNIIANYGRIALEDLQINGMVQNHHLSKSILDAGWGFLKQRLIDKAEEAGRLVVLVNPAYTSKACCSCGTVFADLSLADRWLDCACGLSMDRDVNAAINIKRAGHARCSESTDVGLRLLHEAQLLERLGSVTSTSLTWSPELL

SEQ ID NO: 26972 - protein, 409 aa, unknown
  TnpB Polypeptide
MTKEIRTVEFVVLPTTRAKARKMFQIAGACRYVWNHFRERNLADYQAFKNGKGERPQTSYFSLGVEFTKLRHETEWLGELPANPVKHTLKYFADALGEAMAGRKGFPKPHSKNRHAPGFTLPSTGQFRIEKRSRKYSLLRIQGVGWVTLTREGGFPYEGIPKQIRLRHDGHRWRAFVSYEVEVERRPDDGEVLGVDMNVRQIATSDGDFYFLPDLKKKEARRKRYQRRMARQLKGSGRRRDTKKKLAKVSRNIANVRKNWVHHTTQKIAGKSGTVVVENLKVNNMTASAKGTIENPGKNVRQKAGLNRAMLDTALGEVRRNLEYKCGRLIEVNPAYTSQTCSHCGHVDRENRKTQQRFLCVSCGFMSNADTNATINIRRLGMAQLHGEECSGSKQTPTTREIDARQPDG

SEQ ID NO: 26973 - protein, 281 aa, unknown
  TnpB Polypeptide
VTVRKEAPTPYEPKAAIALDTNEDSLDGVGAAGTSAQLLTIPLGGVREVQATHFRRRRRLGRKKAHDRRVQRHLLGREGRRERNRVKQRLHRVSKALVRAAKAAKAALVLEDLTLHGAGSRSRRMNRRLSSWPRGELHRQIEYKAALAGVLVIEVNPAWTSKTCPVCGVRRRDRVGQDFVCLVCDWEMDRQHNAGLNILKSALASDEALARAVRFRPGALRHDVVSPLCERPTLQVRAREEPSGAECVASVRRRTLSPAHVTEPLGLSDLELQITGRIHGE

SEQ ID NO: 26974 - protein, 454 aa, unknown
  TnpB Polypeptide
MNYAIREVELNHMTPGLKRIVKDTLRIFRDAVKMLSDIAIIEWDGLKDLNSQDQLTYMEELVHSTKHHQAKYPQFDQTFHKFPSYYRRSAAHAACGQVSSYLTRLKQYEEKRYDHISNGRRFKEKVPTLNFETSMFPSMYNKQMYKMDGCDIQLKLFIRNTWDWVFVSMPMRDRKSLDRAIADGGRFRSLKFLIRNNKFYLQFPVLFKRGNFPKTDVWGQTVLGVDLGINRGAVCSVVSASGTIHGRCFDPFTSERDRIGHMLNKLRKISRQSGNGQSLSAFYTKLDGLKKNYTRKLARWIVDRAVEYNVYGIVMEHLGKMHGRGRKKDRIHHWCKKQIQSLVKGMALRLGIRVFEINPRNTSALAFDGSGKVTRDEDNFSLCTFASGKRYDCDLSASYNIAARYFIRAVKKSMTETDWSQCVAKVPALAKRTDCTLSTLWKLHKITRVAEAAT

SEQ ID NO: 26975 - protein, 408 aa, unknown
  TnpB Polypeptide
MEYSHRYPAYPTQQVAAELERHIDIHRQAYNYTRYEYENVDADDIGSAYKHHYRLPDWKDEFPVFSEVNSKALQRTVTRFYDNLSNLKDQKENGNKVGKLKWKSPKEYQSMTFSQSGFELKNTSGRRATLWLSKIGDINIRYHREIPDEADIKEITIKKEATGDWFASFGLETAEADLPEKPGVDSLNASNSVGVDLGILNYIHTSDGTTVEWLDLEGEYERLRREQRKLSRKEKGSNNYEKQRREVARVKRHIRRKVLDYQHKLTSWLIREYDAVFVEDLDVKGMLEQSHNARNKQDAAWRQFITLLEYKADLYGTHVVEVEARGTTKECASCGVKTAKPIWVREHSCPSCGFECDRDANAAMNVLQRGFSEVGLGWPEDTPVETALPTDTTTVSAKRVVEAGSLGA

SEQ ID NO: 26976 - protein, 404 aa, unknown
  TnpB Polypeptide
MIEIRKYRLYPTKEQINLLEETLESCRKTWNFLLARRKDRLDKTKFDQDHIIYLQKQKTPSLRLVYSHVLQNVSDRLDKSFRALFKGIARYPKFKSFGRYDSFTYPDAYNGSVKLGSSTRRTKLYLSKIGYVPVIVHRPSSLGKNKRCIIKREGDKWFAVLENQVSELPESNVVAPKSSIGLDVGLLSVVATSDGETFKPIVPLKKNLKRFRRLQQSVSRKKKGSKSRRKAVQRVSRLHWKIRSIRSDFNHKLSTQLVRAHDFFALEDLNIKAMLKNHSLARSISDVGWNQLVRMLKYKAEREGKKVGFVSPNYTSTDCSRCGFRKEMPLSVRTFHCERCGFETDRDVSSAIGVLNRGLERVGLERPELKPVESGVQSLNRWEIQPHVESGIEGVESPDLEGGF

SEQ ID NO: 26977 - protein, 411 aa, unknown
  TnpB Polypeptide
MVKTRNYKFRLYPNSDQEYELQNNLAVCRWLYNKFVEQSQKSFLSRNDMNYILTELKQSELWLYNYHSKMLQMVSTQLEGAEKALIELTKKGHKTGQLRFVRYNEFRTFTYNQSGYKLETHGDKTLLCLSKIGYVEIRKHREIPDNANIKQIIVTKSKSGKWHACLTCDMRESLFNIPKMSFAKAVGIDVGIKSFVYDSDGDQTPNPLNLKKMLKPLARIQRKVSRRKKGSNNRLKAIRHLQKIHERIANRRKDFQHKISTLYAQNNDVVFVEELKIPNMVKNYRLARSIMDSSWGSFLQKLEYKCKLFVEVSAKNTTIDCSRCGNKVPKCLAIRIHRCDKCNLVLDRDHNASINILKKGLKIFNLSAKDDYRLPQELRKVTPVEISMMSVKQEEITNLLGGSSQAFVSFR

SEQ ID NO: 26978 - protein, 369 aa, Candidate divison MSBL1 archaeon
MEVKKTVRIKLHFLTNNKQELLEREYRDFQKAVDGGASKLYSATRQQAEKVRRQKNPKNEQPVRLRNDLLRVEEQDTEISNFWVKIPVYNPEEDRGESIWCAAIIPRKDRGEVEECDFGDSELVKEDGEWFVHLVIKKKIEIEPIRPDRPSSFSDVIAVDMGVRWIATSVALEDRETKFYGEEVREIREHCKMLRKRVGKKKVRKGKQVIKRIGNKESRKIEDRLHKISRKIVEDAKERNAIIAIGDLNGIREQEDKGRKFNDKLHKFPFNKLKRFIEYKAEWEGIRVVEVDERDTSKTCNWCGSEDTRRIGQGKFVCKECGLEDNADKNGALNIGKRALGKSINRPLSEAGALLAVPETPAEKGEAAC

SEQ ID NO: 26979 - protein, 354 aa, Moraxella sp.
MKTLKLRIKDKHTNQLNRLSGSVNFVWNYVNDLGYKYLQKTGKFFSAYDLNEYTKGSGELLGLHSQTIQAINETHAKSRKQFKKAKLNWRTNRPNAKHKSLGWIPFKKSAIKYLSTRQTGKKALKSTIQLSLSKGQKLIIDVFDGYNLSLYQINTLEIVQDSRNRWYACITVKEYPKTQCGTGSVGIDLGLKDSATTSKGGKLTIKQTLKYAKELAIAQRAGKKKHVRAIHAKIKNTRQDLIHKFTTQLVKDNALIVVGDVKSRSFTNKKTKLAQSTYDAGWFELKRQLEYKCKHAGCRFEIVNEKYTTQTCSCCRQIDSNSPKGRAGLRIREWTCAKCGTRHDSDLTPVGIFL

SEQ ID NO: 26980 - protein, 442 aa, unknown
  TnpB Polypeptide
MRTVSSYGVELRKQNIPIRQTLDIYRSAVSCLIEIYARTWDELAVITEPKKRFNTAEHLVHTTKKNEARFDFDLRFPKMPSYLRRAAIQHALGSVSSYKTRLELWKETDLKGGSPKLVCDNHVMPVFYRDVMYREDTEEKDGAYLKLYDGHDWKWFRVSLRHTDMEYLRKNWAGKRAAAPVLEKRHRKYFLRFSYTEEVPLTRASAKEQIICSVDLGINTDAVCTIMRADGTVLGRRFIDHPSEKDRMYRTLGRIRRFQREHGSAQTQGRWAYTKRLNTELGKKIAGAIVRYAEENHADVIVFEYLEMQGKISGKKKQKLHLWRKRDIQKCCEHQAHRKGMRVSRICAWNTSRLAYDGSGAVTRDWENHSLCTFQTGKRYNCDLSASYNIGARYFIRELLKPLPATERSLLEAKVPPVKRRTSCVYADLRKLHSEMEFLKAA

SEQ ID NO: 26981 - protein, 402 aa, unknown
  TnpB Polypeptide
MTIHRAQLFQLRLSRAQASYMAKAAGTARFAYNWALEEWERQAAEWRDAGEVGAYPSAFALQKQFNAIKREQFPWTADVSGMVPEKAIFAVGVAFEGYRSGTARYPRFKSRTGKKSFVAATGRTGIRVEGQHVVLWRAGRLRLVAKVRWPEATPIGATISQRAGEWFVAITFEMDDKPVAAKPVLAAGVDLGIKCPLVVTAGDLTLRLGAGLSQRLNVERRKLRRANKRLHRRVKGSGRRWRAQQRAARIQQRMANIRADVQHKATSQISAMAARIGVETLGVRGMMRNGRMARAIADVGFYEIKRQLKYKADQVVEADRFYPSSKTCSSCGSIKTDLKLSDRTYRCECGFECDRDENAARNLEKMAANCAVSARGARSPARRRKLTLSSLAMKREAAKAAQ

SEQ ID NO: 26982 - protein, 422 aa, unknown
  TnpB Polypeptide
VTTKRFRYRLDQPRPAQAVALAQLFGCCRVVFNDVLRAREDAHQAGLPFPTSGDLSKRLITQAKLTPQRAWLNHASAVALQQALADADRAYRNFFTSLSGKRKGPRVGKPRYKTKRDRRQSARFTKNARFKLRQVNTRKATLTLPGIGNLTVRYSRPVPSDPSSVTVIQEADGALFASFVVDVPASTALPVVNRHAGVDMGLTDYAAVVASDGTRTKIANPRLLRTAERKLKKAQQNLSRKQKGSHNRAKARTVVARAHRKVRDARLDHAHKTASTLIRENQTISVEALNVRGLARSGAKGRRGRGIRKSVHDAGWSQFLRLLAEKADERGRIVTALNPAYSSQTCAVCGVLDGPKSLAIRQWQCQSCRTWLDRDYNAATNMLVAAGHAETKNACGQDVRLTLASASSADLDETGTTHTAAA

SEQ ID NO: 26983 - protein, 364 aa, Erysipelotrichaceae sp.
MKRRAYKYRIYPNTEQKEFFAKCFGCVRFFYNKSLTDMNEIYKTTGKFKDITPASYKEDYPFLKEVDSLALSNAQLNRNTAFKAFFSHKTGFPKFKSKRNDQSYTTNNQGSVKFSNNRYISIPKCPRIRIKKHRDFIGIIKSITVSRTTDNKYYMSLLVEEETKHMEPTDKMIGLDLGLKELIVDSNGKKYKNHKYLTKSQKKLAKEQRKLSKMIKGSNNRNKQRIKVAKLHKHIQNQRNDYLHKLSKKIIDENQIICIEDLKVKDSMLIYKADWYGRKVIKIPSTYPSSQLCSICSYKNSLTKDLAIRKWTCPKCGSIHDRDINAAKNILSKGIEILTKDGTHPDSLLMLGSLDSSSKKPPLL

SEQ ID NO: 26984 - protein, 410 aa, Microcoleus sp.
MIVVERPYIDGQHQFYKQFDDLSILSINLYNQGKYYMRKDFFTSGAKVGSTRIIRQLSAILKPTDGSQLFPAKISHQFLKQVVHDREDCQKSRIAYDRNLPRFSFLPSLPQYQDKIWERKLFIHDNQSLDKRGGDPNNELLHLSQNDIIISTKFPNLIKVRRGFTAAIYFSEVANQKPVTLVDLNCHLRPGRDLGIDHLVVLASNKPTLTPPIYDKKHLKSINQGFNQRRPFLQSKLDQGKSTTRQIQQITFNRNKRLKNYLHQTSSLIAKRLVDEKILQLIRGTNVRDKQTIKSEKKHKNFVVISPTQLIKFITYKTALFGIKVIVTQASYTNKRRFGDLEPVGKQESYQGKRGKHGWFRFFNESRINADVNPALNMIIKVNANSPLEECHNRIYMSAISPVRVYPVRK

SEQ ID NO: 26985 - protein, 339 aa, unknown
  TnpB Polypeptide
MFGKYISVNRIQKHFSKKIKRHLLHSQTVQEILQRLDSAYNRFFKKLAKRPPKFKRSDCFNSFVFKQGGFTLNGNVITINKNKKRFKFSSSRKYEGNVKQIRIIRETCRRYSLIIITDHNPVSSYGKTHNGASVGLDFGLKTYFTASDGNNVISPLFFKQYQNKIKKCNKRISKSVKGSNNRKRRRFELQQTYREIKNLRNDFQWKLAHELCKKYDFIFLETLNIEAMKRLWGKKISDLSHSSFINKLEYVATKYGVTVHHIDKWYPSSKTCECGHVNKELSLKDRTWACPRCGSVNDRDLLASKNILRKGISELESMGNSSGRNTGVPYVCIQESHSL

SEQ ID NO: 26986 - protein, 379 aa, unknown
  TnpB Polypeptide
LIYNLALETKINAYQSNKKHLSKFDLIKQITDLKKDCSWLYEISSISLQQSICNLDTAYKNFFRTNKGFPKFKKKNGRQSFKNLCHIKIDFAKSKVHIPKFQDGIKFALDRSFDGQIKQTTVSRVSSGKYFISILVDNKHELPTKAQIKEETTIGIDLGINSLLTLSDGTKFDNPKYLNKSIKRLNFFQRKHSKHRGNRTKHTLTLLHEHIANQRRDNLQKISTKLIRDNQSIALEDLNTSTMMKRCKPKQSEDGTYLPNGQSAKSGLNKFIQDAGWSMFVSMLEYKAEWYGRNILKIGRFEPSSKTCSSCGCINQDLGGKREWKCSECGVEHDRDINAAINIRNMALAKNKTVCGVHTENQKELPSMEGALTSEAHKE

SEQ ID NO: 26987 - protein, 379 aa, unknown; identical to SEQ ID NO: 26986
  TnpB Polypeptide

SEQ ID NO: 26988 - protein, 407 aa, unknown
  TnpB Polypeptide
LLKAYKYRIYPTKQQAILLDKHFGCCRLIYNLALETKINAYQSNKVNFSKFDLIKQITGLKQDYSWLKEISIQSLQQSICNLDVAYQNFFRTKRGFPKFKKKNGRQSFKNLCHVKIDFETSKVRIPKFQDGIKFALDRYFDGQIKQATVSRVPSGKYFISILVDNKQEPPSKVQIKEETTIGIDLGINSLLTLSDGTKFDNPKYLNKSMKRLKFLQRKHSNHRGKRTKRKITLLHEHITNQRKDNLHKISMKLIRDNQSIALEDLNIKGMSSKCKPKQGEDNGTYLPNGQSSKSGLNRSIQDAGWSMFVSMLEYKANWYGKNILKIDKFEPSSKTCSGCGFINQDLGGKREWKCPSCGIEHDRDVNAGINIKNMALSKNKTVCGVHTENQKELPGLLGAMTSETHKE

SEQ ID NO: 26989 - protein, 407 aa, unknown; identical to SEQ ID NO: 26988
  TnpB Polypeptide

SEQ ID NO: 26990 - protein, 230 aa, unknown
  TnpB Polypeptide
VEIPDPIPVEGPAVGVDLGVKTLATLSDGTVFPNSRALGKQLRKLRRLSKGLSRKKKGSRNREKTRLRLAKMHLKISNIRQDTLHKVTTYLAKSHSRIVIENLGVSGMLKNRRLARALADVGMYEFRRQLEYKCAWYGSHLIAASRTFPSSKRCSNCGHKKKDFSLSEREYHCELCGMTIDRDLNAALNLVAVSLPETQTACGEDVSLYDSLGITERTSAKQEPNIIPGP

SEQ ID NO: 26991 - protein, 371 aa, unknown
  TnpB Polypeptide
MLIQRAYKTELDPNQTQLKALRNHCGAARFIYNWALATKKEEYEQSGKSSNSFALNKKLTILKQTDRPWLYETCNQALQNAIRDLCKAYDNYFRRVKVKKGEKPGFPRFKSKYDDKKSFRVDRGIRVLDDRIQLPVIGTVRLKEKGYLPVDGIRIFSATVSSTGGRWFVSLQVEQEIDDRVAAGPVIGVDHGIKSLAVCSNGHVVENPRALAAAERKLKRLQKSLSRKQKGSANRLKAKQKVATQHYKIACVRRTALHQASSDIVYGHDPKVLVVEDLNVRGMMKNRHLAKALADASMAELKRQLTYKVAWNGGELLTADRFYPSSKTCSACGAVKETLSLSERMYKCEVCGHEMDRDLNAAKNLAAYAAG

SEQ ID NO: 26992 - protein, 368 aa, unknown
  TnpB Polypeptide
MKSNIAYKFRIYPSENQARLIEKTFGCVRLIYNCDLLYRSHTYKKDGKSKSLLVTEYKKDFDFLKEVDSLALANAKLNLDKVFKNFFEKRSRYPRFKSKKKSKLSYTTNNVNNNIRIEGNLIRLPKLGFVKINIHRPIKSGKLKNVTVSRDSSDNYYVSINIEYDLVKPEPVKPKKILGLDYKSDGLYADSEGNIANNPKWYRKSQVKLRKLQKNLSRKQKNSFNYKKNKKKISLLHRKIANQRLDFLHKESFKLANEYDMIVVEDINMQNISRTLNLGKSTHDNGFGMFKDILKYKLDKRGKIFIKVDKFYPSTQTCSSCGNKKLSDEKLKLKDRVYRCDKCGIEIDRDLNAAINIKNEGYRLYTSM

SEQ ID NO: 26993 - protein, 410 aa, unknown
  TnpB Polypeptide
MGTIEINRTIKSRIIFQNSQDVSKMVDSQEAFRQGCNFVSEYMFNNNFPMNTTTLVKLLYKDLRSKFGLKSQMAQSCIRTVIARYRSVQTQLRKERVWDGYKKDNHGKQVKNYVNKDLDFLWKPIEFKRPQLDLVRNRDYSHRDDNTMSLNTIYGRVIVKPIFNGWEKYFDGSWKLGTAKVLKSGKHWYLHIAVTKEVEEPEFKVSHVVGIDRGLRQLLTIYDEKGKTTFVNGKNVLQKRRHYKRLRQQLQSKNTRSAKRRLEAIGQRESRWMNDVNHCLSKTLVNYYGSGTIFNLEDLTNVTFDTVLKRAKKNRYEHHSWAFYDFEQKLIYKAIDKGAQVISCDAHYTSQRCPKCGFIDSKNRDKNKHEFCCKACSYKTNDDRAAAMNIQFLGTLYNSGNPKSAFEKVM

SEQ ID NO: 26994 - protein, 207 aa, Okeania sp.
VYQILGHRLFWTVENSNQSTSGTTKKIRLLQSIKDKQGIKDLTKKQVSIIVNRNNKVRDYLNKAARYLINWCSENKISTIVVGVNHRIKQSINLGKKTNQNFVQIPHHSLRLKLKTICDRYGLTYIEQEESYTSKASFLDGDRIPVYNADSPTTYSFSGKRVKRGLYRTKQNKLINADSNGAANIGIKSNLMGVYPGQTLRHLWLCH

SEQ ID NO: 26995 - protein, 384 aa, Serratia sp.
MKTLKLRIKDKHCKVLDQLASEVNFVWNYVNDLSFKHLKRKGEFLSAYNIAKYTKGTSKECGLHSQTIQAITEELVTRRKQFKKAKLKWRVSNNKSARRSLGWIPFKKVAIKYADGYVQYGKHQFKVWDSYGLSQYSVKTGTFVEDSRGRWYICLVVDSPKAEKTTATKAIGIDLGLKDVATCSDGTVISNPKFYRQYEQKLGIAQRAKKKNRVRALHAKIANCRKDHLHKASTMLIRENALIVVGNLSAKKLVKTKMAKSVLDTGFSALKTMLKYKCENAGVLFNEVNESFTTQTCSCCGEITASSPKGRTGLGIRVWKCENCLTVLQRDENAAKNILALGHERLAVGIPALKWRGGCQIQSMMLIHIIDQTFLLRNKNWCYS

SEQ ID NO: 26996 - protein, 412 aa, Haloplanus sp.
LKWCPKPTRLKYYIDVHRQAYNYTRYEYGNVDADNIGSAYKHHYRLPDWKDEFSVFSEVDSKALQPTVTRFYRNLNGLSEQKQNGRKVGKLKSKSPTEYHSITYSRSGFELKDTSGRHATLELSKVGDIRIRYHPEIPDQAEVKEVIIKKETTGGWFVAFGLETGDADLPENPDVDSLNTSNSVGIDLGILNYSHTSDGKTVDWLDSEDDYERLRREQRKLSRKGKGSNSYEQQRVEVAKVKRHVPRKVLDYQHKLRTWLVKEYDAVFVESLNVQSVLQDGGNARNKQDVAWRQFITLLEYRGDLHGTHVVQVDAQGTTKECASCGVETAKPIRVREHSCPACWFETDRCKRFIERVAERLCCIRAGMARINARGDGVSRTTRPRGDSHGPPPHTDRWEISSHKPCIRECPG

SEQ ID NO: 26997 - protein, 425 aa, Haloplanus sp.
MKYSPRFRLLPTKEQREAMDWTRDTVRQLYNHALNEFEQIPEDAGTLRQRVWSVRDQLPVLKDWWAELNLVYSTVLQKAVERIRDNIQNLGKLKAKGYDVGSLNWKNPREYRSFTYRQSGFELDKKSGPNGRGLLVLKKLKGGTREVPIRLHRDLPDHEQINEVTLKKEPTGAWYASFCIESEAPEKPAPEEITPEDAVGLDLGVRSFIHDSDGRSIGRLDLSDDRERLEREQRSLSRKEYESRNWKTQRRRVATIHARMSNKKRDYKHKLAHFYTTQYDAVFIEDLDVKGMLEAQENARNKAEVGWRAFISILSHHGEKNGCHVVEVDPRGTTKECASCGVSTRKPLWMREHSCPACGFELDRDWNASLNILSRGFDDIGVVHSEFTPVETATAVDAMSVSASRVVEAGSPALKQPPNAASRAG

SEQ ID NO: 26998 - protein, 407 aa, Haloplanus sp.
MPTLIKTLQATFVRPTAHKESKLIELCESYREALHEAFDAGASTLSAVGEIVVPYDLPYQAKAAVCTFVRQLRQVDHAKELGDGQPVRFSNQAATFDHSSERTHGFTWWVPQPGWGTNFWIPLRINPAQETYWHDLVNEDADPGPIILRQRGATWELLVTVKYDVDEPKGDGEITYVGLDIGETALVTGCALTRGSPTAPFVCDGGRAKQLRKEMFTTLKRLQERDAAAWRIDERFAYFQNALTDIIEKASRQAVEYAAQYDNPVIVMEDLSYIRERLDYSRYMNRRLHSWAFARLQRRIEEKAADAGIVIKYVNPAYTSQVCHACRHMGRRDSQAVFRCPNDACHISTFQADINAAANIARRANPWGESVPLDQAGRDDSPQDGRGCDTATTPRVQSRDADDAHGR

SEQ ID NO: 26999 - protein, 422 aa, Haloplanus sp.
MRRTNTFVIAPDLDDEECLRRLLDASASFWNELTYERRQRLFAGDPVWEGSDCGDRYKSRLGAATVQTVRRVNDEAWRSFFERRKDHSTSPPGYWGNQDDGRDLRVYLRNDTYTIEWGSRSRIDLLIGQKLKEEFGLGYRERLRLPVRGVPRWNGTRGRLVINYDEVAKQYRAYQSVAVNQSALETSLGETEAAVDIGANNLVACSTSGGSQYLFEGRPLFGQYRAITEHIAALAGKLPEGRRSSRRIKRLYRKRTRQRNHAQDALVRTLVKRLHAEGVATVFVGDLTDIVTDHWCVKVNQKTHSFWAHRRFTDRLSCVSEEYGIDVREVSEAWTSQRCPRCGVRENTVRDGDSFYCQRCQFRGHADLVGARNILAEHASGAVRPMARPVRFQWDNHQWRSTTDAPAEIPTNSARTCELPLE

SEQ ID NO: 27000 - protein, 416 aa, Haloplanus sp.
MAIEVTRTYVGSIQNHRQVCDGLDSLGDSASKIWNVARWTTDRIWDATGEIPDEGVLKSYMKNQACWKDLNAQSSQKVIEELSDAFQSWFDLRHKVDEANPPGYRKRGDNRPRSTVTFKEDGFKHDPENNRVRLSKGSNLKEYWADFLLCEYQTRPEVEFSEIESVQNVRAVWNGDEWELHFVCKVELEPTDSTGDGVAGIDLGVTNIATIAFPDEYVLYPGNSLKQDKHYFKRAEYDTEGENSPSEKSMWARRKLADRETHFYHTLTNAIITECVERGVRTLAVSWPEDIRDLDRGKTGNKKLHTWAFDRIYQYLAYKGEIRGIEVLKENEWNTSKTCSKCGDDASSNRKHRGLYICPSCGLVGNADCNGAENMRQKITPSPHGEDRSNGCVAQPSVHLFDSESGAFAPREQVVS

SEQ ID NO: 27001 - protein, 413 aa, Haloplanus sp.
MEYSHRYHAYPTDEVAEGLEYHLNVHRQLYNHVRWDYEQAPEDDKPSEYDQNNRLPEWKHKWPVFSGLHSKAAQATVARFHRNLSNLRKKKEKGYNVGRLKRQAPTDYRSVTYNQSGFDLDEKRGRDRFAYVRFSKIGWVRIRYHRPIPDHATIKEVTFKKETTGDWFVSFGLETDDAYLPEKPDVDSLDASNSVGIDLGILNYIHTSDGKTVDWFDLKDEYERLRREQRTLSRKEKESNNYEKQRREVAKVKRHIKRKVLDYQHKITTWLVREYDAVFVEDLDVKGMLEQSHNARNKQDAAWRQFITLLEYKADLYGCHIVQVEAAGTTKECASCGVETAKPIWVREHFCPSCGFETDRDANAAINVLQSGFSELGLGWPESTPVETVTATDTTHFESVSARHVVETGSLGA

SEQ ID NO: 27002 - protein, 391 aa, Halomonas sp.
MLKATKVRIYPTTEQAEFLNRQFGAVRFCYNTGLRIMSHRYKRHGQSLSAKHDIKKLLPVAKKSRKYGWLKEADSMALQQSCINLDHAFQRFFDPKQKAGYPRFKSKRGKQSSYHCVGVKAGDNWIKVPKLGPIKAKVHRPVDGKLKSITLSRTVTGKHYASLLFDTDQATPVPTMDVDTSRVVGLDMGLSHLAIDSNGRKVANPRFLKQAQKNLKRKQQALSRTKKGSARRAKARLLVAKAYERVANARNDFQHKLSRQIVDDNQAVIVETLKVRNMMKNTCLAKHIGDASWHALMTKLDYKAREQGKHLVKIDPWFASSKTCHVCQHKMDAMPLNVRSWECPACHTQHDRDINAALNIKHQGIIELKAEGLSVSAHGGLRKSGTSSAAA

SEQ ID NO: 27003 - protein, 457 aa, Streptomyces sp.
  misc_feature (457)..(457): Xaa can be any naturally occurring amino acid
VSIRDRLKGLTSQDEKVLRAVGEHMGRLASLDLARRVRDALDHSTDTWAARKRDLTAESSSRWAGSVTSNTHDQWGLARRSQHQHLTSLDAGIRMIRHRLSLPVGGKGSGGKPGGYRSRQEWFLKTRRLAVLETVHDRVRAERDAGGVSVVRGGGRRLLKARHNLTAAGKTKAQWREEWEASRWFLTADGESGKRHGNETIRVTPGGEVSIKLPAPLAEYANARHGRYVLTVRVSFPHRGEEWRDRVACNRAVAYRIHRNTSSGRWYLDASWTRKDLPVVPLGTMRAGRVIGIDMNADHLAAWLLEGHGNPVGAPRRFDYDLTGTAGHRDAQLRLGLTQLLHWAKATGVRAVAIENLDFTDSKTREKHGRKKRFRQLLSGIPTGRLRARLLSMCAEADISVIAVDPAYTSQWGAEHWQKPLTTPRRPASRHQAAAVAIGRRSLGHRIRRRTAPPHRX

SEQ ID NO: 27004 - protein, 244 aa, Thermoplasmatales sp.
LSAYTLSLTIGREVDSVECTTTVGIDRNLRNATVGNEFHHDIHDLSEVVEIKQRYRSKKSHFHRSDRRIQKRIASKYGKRERNRTAQIIHETSKKIVMNALQRREMIVLENVKGLINITWKGDGNAHDYRFLLHNAFPYGMLASQIVYKGSWEGLPVIELTGKETRYTSKECSACGSMTRIEHDRMLKCDSCGLEIDRDINACINIAGRGRTRLKRSCKGLPVEAVKQSKDAEQMAGSQISTII

SEQ ID NO: 27005 - protein, 381 aa, Mollicutes sp.
MLENITYKYRIYLTEDQKKTFTKISNAETNLINLVLQKIDRSKFNYPSVNDLFFYLGKVRKEGHADIFNDLYSSTIPLLIRRLAMGINICKKNNVPFPMPKNPKDYVSSIIFNPQIDRIQMVSRKKIRAILNIKKFGNIKLVFHRPFPKNSTCIATIIKKFPNDQFYIFFVLQGSFGKEKNYEYKSYDKTIGLDFSLKNFFVSTDPKIIPNMNLLTPNREELKLIKTRQNNLMRENKYSKNHERAHILYSKLVTKLKYRRIQEYYRLIDEILKKYDVIAVETLKMEKMKQNTRFSNRVLQLGYIEFLKLLTYKAELEGKHVVKISPWYPSSQICSVCEYKNNNLKIYDKTWICPKCHSFHVRDENAAFNIKKEGNRVYNLN

SEQ ID NO: 27006 - protein, 411 aa, unknown
  TnpB Polypeptide
MQLVEQHIIGRKHKLYKEIDEVCFFGKNLYNRANYIVRQEFINTTKEKEAGTRTAANWIRYHELQKTLQKEVDYTKLPAKVSQQVLMNLDKSWKSFFTSIKDWKKNPSKYLGRPRLPRYKDKVNGRAVLTYTIQAISRKKLRTNIVLLSGTKISVPTKQKNICQARIVPKKGFYVIEIIYEKEVEKAKVNPDKIAGIDLGINNLAAVTSNLNIQPILVNGRPLKSMNQFYNKKRAELQSYVANKSSRKLERLTNKRNRKVNYYLHNASRWIVNYLVQNEIGTLVIGKNKLWKTEVNIGKRNNQSFVNIPHEKFVHMLTYKCELVGIKVMMTEESYTSKCSFIDKESLEHHEEYMGKRKHRGLFITKEKSQINADCNGSGNIIRKVIPNAFADGIEGVVVHPARFTPCKLAA

SEQ ID NO: 27007 - protein, 449 aa, Hassallia sp.
MIIYEFKVKGKDEQYRAIDDAIRASQFIRNKCLRYWMDNEGTSLNRYDLNKYCAVLAAEFSFADELNSMARQSAAERAWSAIARFYDNCKKRKVEPALRPGFPLLTETLRERAGSGVGAEASSAPTFVRGKVKGSSGYPKFKKHCRSVEYKTSGWKLSATRKAITFSDKKGIGTLKLKGTYDLNYYDIKQIKRVRLVRRAQGYYAQFAIDVDLKIETQPTGQVVGIDLGLKYFIADNRGNVEQSPQFYRKSEKQLNRANRKKSKKYDKARKKAKKAQSTNYHKARNRYARKHLRVSRQRKEYCKRLAYSVIQSNDLVAYEDLNVKGLVRNRHLAKSISDAGWSTFRSWLEYLGHKYGKVTVAVPPHNTSQNCSNCGKKVKKSLSTRTHVCPHCGFVEDRDVNAAINILKLGLSTVGHTGTYAWGDLPSWAIGANLSSNGKSLNQESPSQ

SEQ ID NO: 27008 - protein, 390 aa, unknown
  TnpB Polypeptide
MKNRAYKYRFYPTEEQKQSFAKTFGCVRFVYNWGLRLKTDAYYNESKRLYCNDLSAQLPVLKRQPETVWLNEVSSVTLQQSLRHLEQAFHNFFAGRAKYPNFHKKSGKQRATFASTAFKWKDRELTLAKMSEPLDIRWSRALVSEPSTVTVSKDAARRYFVSFAVEEEIPQAPENDKYVGVDLGLTDFVILSTGQKFGSPQFSCKEKKQLAKAQRSLSRKQKGSKNRAKAKVNVARIHAKVKDQRLDFLHKLSTRLIDENQVIAVESLQVKNMIRNHCLARSIADAGWGEFVRQLEYKADWYGRTLVKIDKFYPSSKRCSNCGYTMAQLPLSIREWTCPECSERHDRDTNAAKNILAAGHAVLACGEAVRPARKLKSLSEGTLQRSRKTG

SEQ ID NO: 27009 - protein, 372 aa, unknown
  TnpB Polypeptide
MANKAYKFRIYPDDVQKVLFARTFGCVRMVYNHWLARKIRQYEENKTTVTYTVCAKEMAEMKKTEAYAFLREVDSVALQQSLRHLDTAFQNFFKQPKTGFPKFKSKKQNKKSYSTICINGNIAILNGYLKLPKAGQVRLKQHRAVPKEYKLKSVTVSQTPGGKYYASILFEYENQVQEKEMRRFLGLDFSMHELYRDSNGNEPAYPKYYRNAEEKLAREQRRLSKMQKGSNNRSRQRIKVAKLHEKVSSQRKDFLHKLSRQTADAYDCVCIESLDMKAMSQMLNFGKSVSDNGWGMFTGFLKYKLEEQGKKLVKVDKFFASSQICSVCGYRNAETRKLAVREWDCPQCGTHHDRDVNAAVNIRNEGMRLVVA

SEQ ID NO: 27010 - protein, 370 aa, unknown
  TnpB Polypeptide
VILSYKYRIEPNRTQAAALGEMLGDFCQLYNAGLEQRIDAWRRRHISVTYKMQADELKAVRYAAPGLARWSFTAEQQVLRRLDKTFKAFFARGRGFPRFRARARFHAAEFRVGDGLTIRKSGKLGFVGVPGEIRVRWHRELPSKPKSAILTRQAGKWYVVFHGEVDAVERASPDSIGIDFGLSSLIALSDGHTVPRPNWTKRAARELRRRQRAIARCKRGSTTRAKRKAALDRFHARVAAKRRDHLHKISRDLVDRFGRIAIEDLNVKGLASGMLAKHVHDASWAQLTAMLDYKAARAGVELVKVDPRGTSQTCPECGTIRAKTLAEREHRCDCGCRLDRDVAAAMVVHYRAFGFWPGTGLGTLSEPVAA

SEQ ID NO: 27011 - protein, 355 aa, Nostoc sp.
MINASGIIYNHCIALHKRYYRMWGKHLNCAKLQAHIAKLRNRFEFWQSVGSQAVQDICQRIEKAYQLFFKHNKKGVRPPGFKKVKKYKSFTLKQAGYKFLGGNRVKIGNRVYQFWKSREIEGKIKTLTIKRTPLGELFMVVVVDGNDEPEVKFTTSKIAGFDFGLKVFLTCSDGTKIESPQFLKQSLKIVHSASRHHSRKVKGSASRERARKNLVRKYEDISNRRRDWFWKLAHELTDKFDVLCFETLNLKGMQCLWGRKISDLGFGEFLQILEWIAKKKNKLVVFIDRWYPSSKTCSNCGHILDSLDLSVREWRCPTCQSINGRDENAAKNIQAVGASTVSLGDVRQSQTAIAV

SEQ ID NO: 27012 - protein, 425 aa, Natrialbaceae sp.
MDRTITFRLIPTGKKERFLEDLSEEMAELANYVVEKYMEELHGEVKLSRSVLQKGFVRQNAEFYLGSQSDMLSKSRYFTSVVEKIKPNLKNHIKGRTNRPDFNTLLYFSTRIVEFEKTDSGYWGIEINHPSQRDKVFIKLAENDRNEEKVKKVIEAGGEDTFTCEIHKNDNGKWILSAMIGVGESPSPPSQIEHIIGADLGLRFVATASVMDTSRGIKDVKFLKGGEIFKKRKELNRRMQELQKKGEKKAYNRLKDKDGEIMRQKNHSVSKELVEWAEQYKPCIIVFEDLEDSKNSMKEETFKESGELKGSAGRYRNRLLSFWSPSMLKEFVEYKAEEKGIEVYNVDPEYTSQTCPECGQTSRDNRKNSKHRFVCQECGYEINDDLVGSVNIARKGAYKVDVDYVTDLTIKEFEVKTGGEETVSA

SEQ ID NO: 27013 - protein, 585 aa, unknown
  TnpB Polypeptide
MIPFWNKDCKKLSDQLWKPKDDFRESPMKDPSWNCDNKNISFKYFVPIEKVNIDFDFKPIPVQENTIDKRKMFFGKFNVEINRLEKKVKKNKINNDILKKHLKSIRKIQENVKKIDNIKKKHKDFFIKISKEISSLKKKFEKINMKDKCYPIIKQHFEQTDKIYKKMERLDNIVYCKKVKIILTREQNIIIRSWYLDTIEIYNGLTEEFNEIHNKIRREYQKTDKEIQYGKYLAAELKKNIKFPIGAQKLRNSKIGLLTKKYDVPFCIIADTIMQFSSNLKGNLTKIQKGQIDDFEFKPKKITGENKTIPIQQKYTSDKGFYPSILGAIKTEDIDFDWKSICSDYKIVYDQYHDTFNLHIPSYKQHQNVPYNRDPFASLDPGMRSFQQLYGLNHVIAVGENLYWPIMEKIDKIESMERKLKIDSDTKKNKKVRKVKTKKLSNSSRKNIRNAIARTHIKIKDLVTEMHNKLCIFLCESYDRIMVTDFSSRKVNGKQEGLPRNHKKVLGKLSHYNFRQRLAHKCQEYRCQYLEVTEEYTSKTCCNCGELKYNLGTAKHYDCDKCHLSIDRDTNGAINIFIKNRSEVL

SEQ ID NO: 27014 - protein, 338 aa, unknown
  TnpB Polypeptide
LKSFKIDSSNFSGKPEPPHKERFLKPIYFKNEAIRRKENYLLLSTKKPNEPLKIKWKIDLPTPHFVSIIFDQYTGWKINFVIDFPENQIDQKVENGTMSIDLGVKRIATTFDGEKCTTYSGKTFLSLGKLRNKLQSETQSKYSNTGKESRRRKYLKRAFRKNVKKIKNKEKDILHKYSRMIVNDAIANDIGTIVIGDCSTIHKDTNLGKSNNQKITQNPEQKLKDYVCYKFQSTGRITKVISERRTSKTCPKCGHVHKYSPKTRTFKCQKCGYIYDRDGIGSMNIYSLEVSSDHAKWLDVIGRMTLPSGVKYYPNLPCKIFRKIPKDRSCQGKETTML

SEQ ID NO: 27015 - protein, 263 aa, Microbispora sp.
VKTSYAHTDRYLTELKRDGGHDFLYEVSSVPLQQALRHQHRAFVNFFAGRAKYPRFKSRHGRQCATYTRSAFRWRDGRLHLAKMDGPLEFVWSWPEVDPATINPTTVTVSRDNDGRWYASLTVEAATGPEPLPAVGGQIGVDLGVSDFAVLSTGEKISNPRHLERKAKNLARYQRRMARKQRGSANRAKARAKVARAHTTRADFLHRTSTRLVRDHDLIVMKTSTSKAWSATGTSPGRSPTAGGASSAANSNTKPSGTGGAWS

SEQ ID NO: 27016 - protein, 418 aa, Microbispora sp.
MRTAYKVRVYPTPEQAAVLNRTFGCVRLVWNRVLAWRQARYRDEGVTTSYAQTDRYLTELKRDGGHDFLYEVSSVPLQQALRHQYTAFVSFFAGRAHYPRFKSRYGRQRATYTRSAFRWRDGRLHLAKMDDPIAFVWSWPEIDPTSITPTTVTVSREPDGRWYASIAVETGTGPEPLPGTGRQAGIDLGVSDFAVLSTGEKIPNPRHLERKARNLARYQRRVARKQRGSNNRAKAKAKVARAHTKVRDARADFLHRTSTRLVRDHDLIVIEDLNVTSMVRNRSLARAISDAGWGEFRRQLEYKTQRYGRRLVVIDRWYPSSKTCSACGHLLATLSLSTRHWSCPGCGARHDRDVNAAKNILAAGRAVSACGADVSPQGSSLRRSAVGGEAGSPAREGGNPSPLAALRRGRKSTAWPPC

SEQ ID NO: 27017 - protein, 324 aa, Thermoactinomycetaceae sp.
  misc_feature (315)..(315): Xaa can be any naturally occurring amino acid
MVIFGIAASTWKPLALFRKKRFVSTLKIRKRKGENQMMKSYKFKIEPNRVQMERIETTLNLCRWLYNTALEQRKFSYEKRGISVNYNMQQNELPRLKKEFPEFKQVQSQVLQDILRRLDKAFKGFFRRIKAGEKAGYPRFQGKNRYDSFTYPQSGFSLDGKYLKLSKIGNVRIKCHRQVEGKIKTCTIIRKNGKYYACFSCEIETITHSTGKQVGVDLGVRHLAITSDGEFFEHPKYFRKSERKLKRLQRIVSKRKKGSNRRRKAVALLAKLHEYIANQRKDIAHKISRYLVDRYDLIAFEDLNIKGMVLNHKLXVGFLLMGNI

SEQ ID NO: 27018 - protein, 408 aa, Thermoactinomycetaceae sp.
MVIFGIAASTWKPLALFRKKRFVSTLKIRKRKGENQMMKSYKFKIEPNRVQMERIETTLNLCRWLYNTALEQRKFSYEKRGISVNYNMQQNELPRLKKEFPEFKQVQSQVLQDILRRLDKAFKGFFRRIKAGEKAGYPRFQGKNRYDSFTYPQSGFSLDGKYLKLSKIGNVRIKCHRQVEGKIKTCTIIRKNGKYYACFSCEIETITHSTGKQVGVDLGVRHLAITSDGEFFEHPKYFRKSERKLKRLQRIVSKRKKGSNRRRKAVALLAKLHEYIANQRKDIAHKISRYLVDRYDLIAFEDLNIKGMVLNHKLAKSIVDAGWNQLVQFTSYKAEYAGKQVIQVDPYNTSQACSKCGQIVKKERKDRVHSCSCGYTEDRDVNAARNILHKAVEHVPTLKCGQLELNLI

SEQ ID NO: 27019 - protein, 448 aa, unknown
  TnpB Polypeptide
VKTPNKVIRTDKWRLNPTTDQKILFGETIKVYRQACRYLVGIIYTHWCELGCLTADQLTPAVERLMHQTAKRPDVKYPQFNQAFYKFPSYYRRAAIAFAAGLVSSYVTRYREWQSGTRKRRDTKPPRLNADTGCYPALYKGQCYKLHGFNQVEIKAFNGKDWIWTTVQITELRERHACASNKMMSPSLIFNERYCHLSVPFTCKPEKRKPEANVTAVDLGINTTATIAVVTHSGTVIHREFIHPGKDIDRRDKRLKSVSMRASKTMGKGGKLHKGFCSKTYDKCRRINHQIGHVVSRRIVDIAKEFNSEAIVFENLKGWKPKGGKKRSNLRQRFHGWLKAKIRDFTEMKWAELGGKVVEVVAAYTSKLAYDGSGTVKRNSKKYSLATFSSGKRFNADLNGAYNIGARGVFKLTRRNDGEGRSSKNSGRPPRSWACLCDLWATVSPRLA

SEQ ID NO: 27020 - protein, 393 aa, Moorea sp.
MFNVGLYNVRQYFFQERKHLRYESNYHHSKENENYKLLPTDIAQQTLKIVDRSFKYFFGLIKLKSKVGYHKKVKIPDYLPKDGHFILIIPVRKRDWNTMAVKDWVFTVPMSRQFKKEYGAVQFVIPERLRSKTVKEIRIIPKYRARYFDVCYCYENESETQVEQTGDILGIDLGLDNFATCVSSTQESFIIDGKRIKSENQFYNKRNARLHSIKELQGLKILTNRQARLLRKRNHKIRDFTNKAARYVVDWCRQKKISKIVIGYNPDLKQRVNMGKVSNQKFTQIPIYLFKDKLESLCLRSGIELIEQEESYTSKASSLDKDELPVWNADNPKSYKFSGKRIKRGLYRTSKGWLVNADCNGALNIIRKHTSKLDDLIGGFRGCLAQPLRVICS

SEQ ID NO: 27021 - protein, 260 aa, Ensifer sp.
MLWFVGEKQAPSQARHCVTSFCAANEAGTFRVDSQRIKLPVVGWVRMREAVRFTGKLKRVTVSREADRWFASIMVETNDIKPVEQPHDAVGVDLGVTTLATLSQGDPIPGPKAHTALLGRLRRTSRALSRKRKGSANRRKAKAKLARLHSRITAIRRDATHKATTLLAKTYRLIGIEDLNVRGMVRNRHLARSIMDGGFFEFRRQLDYKARFQAGAIPVDVRRDQVRRAGSYHRPWRILLRRGPFHAGLAHHARAFLSTG

SEQ ID NO: 27022 - protein, 309 aa, Mycobacterium sp.
VLEEQKHESGGVGGAKRCGAGERVRHDPAGRRRQGGDRGWFCAGRASPQVSYSVRRVEPDRRHLTLPVIGTVRTHENTRRVERLITTGRARVLAISVRRNGTRIDASVRVVVHRPQQPKVAQPDSRVGVDVGVRRLATVATVDGTVIERVPNPRRLDAALGELRHVCCARSRCVKGSRQYRERTTEMSRLHRRVTDVRTHHLHVLTTRLAKTHGRIVVEGLDAAGMLRQKGLPGARARRRGLSDAALGTRVGTCPTRRSGTDHNSWSPIAGSRHRKPATPAGMCETSAGTTIGYATLAWRRISVMTTPP

SEQ ID NO: 27023 - protein, 334 aa, unknown
  TnpB Polypeptide
MLADKQAYYKSTGESLYTKPSDYKKEYPFLKEVDSLALANVWTNLNTAYSAFFSKKSKFPKFKSKKVRQSYTTNNQRVGSYNSIRISNINNVFYIRLPKLKSKVKIVYHRPLPEAAVIKSVTISKTKSGKYFVSILVDMPDVEKFSHIDKKVGVDLGLKEFAVLSDQTVVKNPKFFRRSRDKITKLQRKLSKKEPGSHRFEKIRRKLAKAYERISNQRNDFLHKLSTKIIRENQTIVLEDLRVSNMLQNHKLALSIQEASWSAFRRMIEYKANWYGRDVVIAPSDYPSSQLCSYCGARSRQTKDLSVRTYVCEKCGAHLDRDWNAACNLESLAS

SEQ ID NO: 27024 - protein, 429 aa, Micromonospora sp.
VKTMQAYRYVLDLTPAQERAVLGHAGAARFAYNWALSRVRAVMDQRAAERTYGVPDVQLTPTLGWSLPALRKAWNAAKHDVAPWWAECSKEAFNTGLDALARGLGNWTDSRRRTRAGKPVRFPRFKSRRRSTPSVRFTTGAIRVEPDRKHVVLPRLGRLKLHESARKLVRRLDAGTARILSATVRRDGGRWHVSFCVETERAERHPARPDATVGLDVGITHLAVLSTGELVPNPRYLDTAARRMRLARRMSRRVGPDWRTGRRPSRRWEAARVQFARAHARVANPRRDNLHKLTTRLAAEYGTVVVEDLHVAGMLTNRRLARRIADAGFGELRRQLSYKTGWNGGRLVVAHRWYPSSKTCSGCGAVKTKLALSERTYTCTTCGLALDRDLNAARNLAALRPGGPVAMKRQPGTAEAGKTGTAAPQGAAA

SEQ ID NO: 27025 - protein, 426 aa, unknown
  TnpB Polypeptide
MLRTRGYKYELTVNNKERTLLTKYAGISRFAWNWGLANRKSRYRTRAGAARYTDAMKQHKELNRLKLTDFPWMYEVSKCVPQEALRDLDRGYQNFFTNHQQIKRKQTTRYIGLPIFKKKGKCKDSFRLTGVIHLFQKVKQVQLPRLGKLRLKERPNLPVSARILSVTVSRTADRWYVALTVKEVQPDCNPNDGPIIALDKGLSVFTALSSGIPITRPKFLLRQARKQDRLSKVHSRKQNVSNNKRKSALRLARFYRRITNQRHNFLHQTSTYLAKNHSVIVTEDLHVKGLMQNKKLSKYWADLSHGLFQRFLAYKAPLYGSKVIEIDRWFPSSKLCSNCLYYRRDLTLADRIFHCPLCGLALDRDQNAARNVANYYTIYQFLLFPVAESSAETLNVCGEVVRPASEQARVDESGRTAPTVVSNNSS

SEQ ID NO: 27026 - protein, 394 aa, unknown
  TnpB Polypeptide
MRTRMLKFRLYPNKTQRQVLEQTLEDCRQVHNYLLASQKAIYEETENLVSQYDQNIELTQLKRENPTLSKVHSQVLQNISKRVRDAYHNFFVRRKLGLKAGLPRFKKYGRYKSITYPQSGFKIKGKKLLLSKIGAINIKLHRPIKGNVKTLTVKRMPSGKWFAVFSCKIHFESEEKPNGTVGIDVGLNHFAVLSDGQIVENPQNYRKSERKLARVQRQFSRKKRKSRNREKARIKVARLHEKVSNQRNDFLHKFSRKIAFSYSTIFVEDLQIPNMLQNHKLAKSIADASWGRFIQMLSYKAEEAGGKVVKVDPKDTTQICSRCGLKVPKALSERIHICPRCGLTMDRDLNASRNILLKNTVGTAGIHACENRTSTPVKEQVWLLKQEASQLVER

SEQ ID NO: 27027 - protein, 368 aa, unknown
  TnpB Polypeptide
MEKSYKYRIYPNKSQKQILTQTFGCVRFVYNHYLDKRIKTYEKDKITLNYTKCSSDLTNFKKQPDYIWLNDVDSTALQSSLKNLDTAFKNFFAQPKVGFPKFKSKKTHRYSYTTKYTNGNIKYSGKYIKLPKLGNLKTRNKLIPEGRIVSATVSQEPSGKYFVSLCCMDVPDKKYIKTGNSVGIDLGIKEFLITSEGEMVKNPKYLSKEERKLILLQRQLSRKSKGSANRRKARIRLAKQHEKIANQRKDFLQKLSTRIIRENDIICIEDLQVRNMVKNHKLAKSIADVSWSEFVRMLKYKADWYGKEIIKVDKFYPSSQICSACGKPAGKKTLDVREWDCLYCETHHDRDINAAVNILKEGLRIRTA

SEQ ID NO: 27028 - protein, 404 aa, unknown
  TnpB Polypeptide
MLVRGVVFYLDSELPSEAKFLLEDFRLAVNNAIRAGLQARVTSRNALCKIAYKDFREQHPRMYAKHLVSAFGVAGGVLKNLRRSFRKGVTSRIPYVKRLMMKTENQAYKLDRKLGIIDLPIRAGCHVELKLIVSQYHRKYLDDLSLSLGSLTVLPDRVIVAFRKDAPKPYTPDSLISLDTNERSLDGVFVEGDVANAVKAEFPEVATIQQRHHHRRRRLQKKKAHDRRISRNLCRREGTREHRRIDYRLHQVANSVLKFAEERRSVVILEDLKGFKPKMNKELNRRLSMWPRRKLHQIIEYKAQWKGIPVVKVDPRYSSRTCPICRKIQDSRMGAEFKCECGWHLDRHVNASINLLQTAISKGMAGGLWFNPGAFQHDVMMILYEPAMAARSEPNGTSGIVVVS

SEQ ID NO: 27029 - protein, 413 aa, Thermoproteus sp.
LELQEGRRLRGPRPAGAVSPRREGEVWIKPHRRFWLYWWRVLRKEAELASTLIVKRRRGRWYAVFVFDVTPKRKPPAEAVAFDVNENSVAVAKVSLLSTVDRVASWNRQYINPAVYSIRTDFGRLAKRYEAVRNAKLEELRGKYPFAGRDGEERAQNVADTREFRRFAGRLRERRRKDARVKQVAREVARSPAVIITEDLGENPQEEMIGVEKKAKKGVRKKVEKRELRHRIKQTPFRKILRAVEDKAAEGGSAVFYASSFRNSKACPIHFAKLEDGGDWHTLRCPHGHAVDRDAAAVLNMLWKTTPTGWVKGVWWDLRDVKRRLERERGLVPKELAGRKNPLVPWPVVRAVWASLRSLKASPQWPAVLARAASMTPAGGAHEGGARAPPRGAPALGEEVSDLHRNPDVAHCE

SEQ ID NO: 27030 - protein, 261 aa, Streptomyces sp.
VSIWTTVGRMKNLAFTGQAEQLEVLARHRQGESDLLHQGGKWYLIATCEIPEAALNAHPVAFLGVDLGIVNIAATSDGERHCGRRINRKRENDRKLRRKLQQKQTKSAKRRARKYAGKEARRNKDINHKISKRIVAEAQRTGRGVALEDLKGIRERARLRKSQRTTLHSWTFAQLGAFIAYKAKKAGVPLVYADPAYTSQECSQCHHIARGNRPSQARFACRSCGFVHHADHNSSHNIAHRGWMAWVCGVQSATPELTLIA

SEQ ID NO: 27031 - protein, 404 aa, Ekhidna sp.
MLKAYKYRLYPNKAQKELINRHIGSVRFIYNLALEVKQTAYKKTAHRERPINLSYSNLSEQLPDLKKECEWLKEINSQSLQASIKNLDTAYQNFFKKQAGYPKFKSKHRGNQSFHVPQSMSIENGRLKIPKFKYPIKFVQDRTLKGQIRSATVSRVPSGKFFVSILCDTGEACKEKAPVKADTTVGIDLGLKDFAITSGGKKFENPKYLEKAEAKLKFIQRKYSKHKGKRTKQKLAKCHEKVANQRKDLLHKNSTKLVRENQTIAIEDLNVKGMLKNHCLAKAISSVSWSMFTDMLAYKSEWYGVNLLKIDTFDPSSKTCSACGDVNKDLTLKDRFWTCKTCGSEHDRDINAAQNIKAFALNKKTGAWVEYLKPEIAAGGGESTCTLVTEGVTTSGEHLFFSSD

SEQ ID NO: 27032 - protein, 480 aa, Cupriavidus sp.
MQVGYRFRCYPTPDQQAILLRWIGCQRFIYNAKVGEDRYYRVFQRKTLALAGEHAPIDQEYARFKCRELTPWLYEVPSQILRNGAVRWKTAYSRFFQRLGGRPTIQRKSGPQSVWLTNELFSFEAAGGATPEEVSYRLSIGKGKFPVGVIPYTAHRPHKIPASITLTVDAGHWYVSFNIDDDLPLPTPQEIAAELASWPETELRASAVGVDRGVTVPVFASTGMCAGLSDVQQQRLRKKERARKRWQRRMARRVKGSSGQRKAAHRVARCHQYARSVRLDFAHQTSYRLVESAGVRLLVFEALRVKAMSARPKAKQNETGQWLKNQASAKAGLNSKILASAWGKTLVFAQYKALRRNKLVVTVPPHYSSQECSRCGHTHPENRPTQAEFVCQGCGFRTNADHNASRVIRDRGVALVRSGEFSPVGRKKTMRMRTKVGAGCSEPEPIQAPTPGETSVRRQAVSRKAQKSVNPETPATSRRL

SEQ ID NO: 27033 - protein, 379 aa, unknown
  TnpB Polypeptide
VERHRLPVPGTVRPQRQNAFLLGLAEEGARGRETHRGARMAGRGRQRPLLQMHRDALQACWNGVRKTRRQRRARCRSLKRNPVNSARFTANGFRLRDNGRLYLAKIGDMKVRWSRDLPSTPSSCTIIREPDGAWYVSFVVRRETTPLPEIPVSNAIDLGFTHLGSLIDTDGNRRRIPAPKPLNQTQRRLAKAQRKEARQQQGSKRYQKQKQRIARLYAKARHQLDDYQNKQALRIVRETQAIGLETLNVHGMSRIHGRSVLTVAPSRFVMKLEHKAQQYGRQIRHIGRFQPSTRLCSQCGHHVKGGIPENIRVWKCAECHTILDRDYNAALNILDAAGLAESLNARGDSVRLHLATAGRSNSQRNANHRHHTDAGIPML

SEQ ID NO: 27034 - protein, 420 aa, unknown
  TnpB Polypeptide
MQERLLLSHAGAARFAFNVGLAHVKAALDAGERLDLSSYALRRWWNANKDTVAVGGDGEPWWQENSKESYSYGLESLAKGLSNWSKSRRGDRKGRNVGFPKFKAKNKVAPRFAYTTGCFGLIQGDPKALKLPRVGRVHCMENVAERVGDAKVLRMAISQRAGRWYASLTVEREDKPVAKHPKSGAVGVDLGVKNLATLSDGTVIENPRYLQKSERKLKRAQRELSRKTKGSNRRAKARAKVVRIHAHVANQRLDALHKLTTRLAEKYSDISIEDLHVAGMVKNRHLAKSVSDAAFGEFRRQLEYKAARTGSRLHVVDRWYGSSKTCSKCGSVKAKLSLAERTYRCDSCGLAMDRDLNAAINIKVAGSAPETLNAHGATVRRSDRSGHATRVSVKCEPSVRGGRRAVRLGADSRKTVLQTS

SEQ ID NO: 27035 - protein, 522 aa, unknown
  TnpB Polypeptide
LAKNKAYKAFAARPTHVLCLDGAILDGAPVLASLASEVRDISSYSTYVVRNDEVLGDELARVTAVQPATAGRQAGVTMPDFLVLGKSGRSRKEFLVQHRVVTEFRSYQERVNVANGESSKYVSQGWKRTVNAAVPSYGEDYVNLGAVDSAYARIENNPFSDGEIVLKMVIQGAWYRLIFNFDNKRFGEGKVALPVIKVQDGQPVFIFAVVTDNPVVQFSGDYTIGVDVGINNYATVVVRDTKTGRIVHQTTLSQRVHSLWNSVRASEQQVRALKKKATTLLRDRQARMAALDEAQLHREAASRKKRELAILAAQEIADLSHLWGNAVVAVEDLGWIANTMQNGRWNRGAFVQWLTHYVSQNGGWVVSVSPAHTSQVCNACGATVTHPTHKDSVCPTHGAMDRDVNAAANIAARAVPRVAKARVTRAKNRKLQQQQPLRTPVARSSLKYPGRDRTKSVPTPRRVRKRSEGVKTPLSPARVQAARLVTVVLADRGAHGASGTGTATLKRDASVAYECRLLCSPV

SEQ ID NO: 27036 - protein, 445 aa, unknown
  TnpB Polypeptide
MPDFLVSGKSGRSRKEKLVQHNVVTSHRSWQERVKAANGESSKYVSRGWRRTVDVSAPSYSEDYVNLGAVDQWYAAIENNPFADGEIILKMVIQGAWYRLIFDFDNKRFTEGKVTLPVIKAQDGKPVFIFTVATDNPVVQFSGDYTISVDVGINNYATVVVRDVKTGRIVYETTLSQRVHSLWNSVRASEAQVCDLKKKAATLLRDRQERMSALDEAQLHREAASRKKRELAILAAQEIARLSHVWGNAVVAVEDLSWIRNTMQNGRWNRGALVQWLTHYVSQNGGWVVSVNPANTSQKCHVCGQRVTHPTHEVAVCPEHGVMDRDVNAAANIAARAVPRVAKARATRAKNRKLRPQVALRTPPARASLKYPGRDRAKNKPTPKRENRRRVVREVILPSCPARAQAQRLDARVLADQGTCGTLGTSWAALKQGNTAYECRLYSLI

SEQ ID NO: 27037 - protein, 395 aa, unknown
  TnpB Polypeptide
MLLTESHIIEQTNELNELTFKCKNLYNKANYIIRQEFISNGNYLSKFDMFTICKDLDEYKSLPVRIGRGVLRTLDANWKSFFSCIKKWKTNRELFKGKPNLPKYLPKNGRFTALFYETAILKERKKNKDIGLSSLKMRLPVKTKNKLIEIQVIPTKTTKYKINIIYDYKEEELKKDNNQYCSVDLGINNLMTVTSNKRGIQPLVINGKPLKSINQYYNKTKAKYQSELPKNIHTSERINKLTFKRNNKINDYLHKASDYIIKFCLKNELNTLIIGYNEFWKQKVNIGDVNNQKFVQIPFDKLLFMLEYKCEKHGINMTTHEESYTSKCSFLDNELIGKHDEYLGKRIKRGLFKTKIGILINSDVNGSYNIMRKVFPKAFADGIEGVAVHPYRVNL

SEQ ID NO: 27038 - protein, 400 aa, unknown
  TnpB Polypeptide
MQTVRIYRLKGLDRLTRARLKAAQMEAARLWMYCVQRHRGARSERSGWPDRDDLQRETKGGQYALYSQSIQMVCHQFLANVETIKQLRQANQRHRYPYHPKKYMTVQWPAQAVSRQGKRLILPMGRGRKSLSFHLPDLPEHIGAVSLVWHGGYELHLVVPAAPEAEVSVHADQGVQATIDLGEIHQAAVTTTTGKGLIVTGRGMRTVKRQYNKTLGQLSRLQARCQKGSKRWRRLQYAKERESGKKERRVRDLRHKGTHEAVVFCQRAGVQTLFVGDPQGVRQPNKGRHHNQRMAQWEYGKDQDYLQQKCEHVGIACFSGSERGTSSHCPRCDWKKKPKGRIWTCRRCGFVGHRDIVGSMNMHLLAFGSRIAYPTSLTYRRPGPLRDRRQDKELSSSGTS

SEQ ID NO: 27039 - protein, 396 aa, Nonomuraea sp.
VGVRRSFKFLLRPTAGQVAALAACLDDHRDLYNAALEHRRTAYRKAGVTVRYGEQSGELKHIRADDPDGQGRWSFSSQQATLRRLDKAFRAFFSRVKTGSKAGLPRFKGRGWFDTVEWPKDGDGCRWDCQPEHPAATFVRLQGIGHVRVHRHRRFLGTVKTISVKREGSRWFVVLSCDDVPAGQLPGTGAAVGLDMGVASLVVTSDGVHVANPRHLAAAAARLAAAQRDLARKRRGSRRRRTAVARVAALHAKVRRGRLDAAHKAALALVRDYDVIVHENLQIANMTRSASGTIDAPGRNVAQKSGLNRSILDAGWGVFLQVLAHKAESAGRELIAVDPRNTSRTCARCGHCAKENRVTQAEFACQACGHTAHADINAATNILRAGLALRRAAEAA

SEQ ID NO: 27040 - protein, 386 aa, unknown
  TnpB Polypeptide
MEGVKTVTLNLLEPTKAKYEVIDKLRNAYRNALSFVVSQGVKANRMKLQSLFYQKVREYGVHGQVANDLFKDAVAILNNGGKVGNVALPFNIPRSGNFGLTKNGNPVVSFAALNGRIAIPIAMDRTYHRYKELLIEGYKTTFFRLNKDRVHVVLKKDFPIKNNYDTIIGVDIGVKRLTTVSVISKEGKVLKQLYLGQDVGDRQRDISLRRSKLQNYRDNGSRYARQTLRRLRGYEKRYIATRCWQVAHEIVKLAERYNAFIAVEDLKGLKNAKANRKGNRKAKRMPYAKLRLAVGSVAGQSNRLVVAVRPRGTSHICSRCGSKGIREKAIFKCPKCGYEANADRNASVNIALRAGEHPKTKGFFISQSPERNLAVNQGFLSMTRLV

SEQ ID NO: 27041 - protein, 334 aa, Streptomyces sp.
MWNLVHDWWTMLPKDKRNLATADAAIRQGRKELPWLSVLPAQAAQAVLKTYFQAWKNCWEGRADAPNFKGRFRCRMAIDIPQGRDLQIVRLNRRWGRMWAPKIGHVLFRWTKDLPVGKRADKDNRVTGARLVKEADGWHVVFRVQCDVPEPAPHTGPTVGIDRGITKPLALSDGTFREHGPWLTKGEAERLRRLEKTKERGRNARKPGEKNSRRLTRTYDQIAQLRATAKRRAIDWQHKTTTGIAETFSRVGVEALAITNMVKSARGTVEFPGKNVRQKAGLNRAIAGEAWGRTVTMLEYKTADRGGGQAVSGRGDLGDTRSAKRQPPTQPHAA

SEQ ID NO: 27042 - protein, 394 aa, unknown
  TnpB Polypeptide
LLKGYAEDSAILWNTANFERRKAWHEHLKMPSYADQCRVLKMSEAFKRLGTCKAQALLSKLREAWSSFYALKRLEKQGMLPPHILRVNPPRYWKENGVRVAKAFYVRNDGWRWIGEDELVIGKMRIPFQHGRLRVGKQGRLEVLHDKLLDKWRAYFPVDVPLEHPSRIASKMASLDLGICNLAALYIENEKPIVYSGRAVLSDWVYRTKKIGGKQSKLPRKKHTSKGILLQFRRRQHRLKHAVNAMCRDIFNRLEEAGVSVLVIGDLNGIRAGAYFGRNGNQKLHNFWVFNRIAKRLAELGEEHSVVVRKVLEFKTSSTCCLCGKEHNGRIHRGLMVCLSAHRSVNADVNGSVNIKNVAVNRFPVSLAQSMLGTSGSGLLAEPLLLRWNYNEWK

SEQ ID NO: 27043 - protein, 399 aa, Actinomadura sp.
MGTTRAKRAFKYRFYPTDAQAAELSRTFGCVRKVYNMALQARTEAWTLRAERVNYNQTSALLTAWKRTEELAYLNDVSSVPLQQALRHLQTAFTNFFAKRAKYPRFKSKKKSRESAEYTTSAFRFRDGRLTLAKMSEPLVIVWSRPLPEGAAPSTVTVSRDTAGRWFVSLLVEDPTIRLLPATDTAVGVDAGLDHLLTLSTGEKITNPRHERRDRDRLAKAQRHLSRKAKGEGANRAKARRRVARIHARIADRRRDTLHKLTTRLVRENQTIVIEDLTVRNLLKNGKLARAISDAAWSEFRSMLEYKASWYGREVIAVDRWFPSSKLCSTCGALQDKMPLNVRTWTCGCGTTHDRDVNAANNILAAGLAVSVCGAGVRPQRSTPGGQSATKQKPPRREP

SEQ ID NO: 27044 - protein, 192 aa, unknown
  TnpB Polypeptide
MLRRPRVSTWIYYHEKYLDAIYKRDERLRHLYITAIRFLADELHRRGVRKLYIGYPIMLSQNNGNEYNTNIWWYRKIVLWIVDVFREYGIEVEIVPEDYTSKECSICGNKHKNGRIYRGLYECKKTGKKINADINAALNIARKLGHRIRIARKIESYSITHNGVKPLIPLQRANTRDPSIETPPFRAGRVSY

SEQ ID NO: 27045 - protein, 429 aa, unknown
  TnpB Polypeptide
MTEQERLTKNKQISQTKRETIDRHNSMSVKTFDVKIQENQLSESQKEALDTIFLEQKWLKNYILNWCEQSEKNKISKFDTKIKEIIKKDKDMKDVPVKLKYLSAQSKQCLVSRMIANIKTLHTLKSKGLQKCGKLKFSKEETIIDLKQYGVSHKILSSKRIKISGIPKSLIVNGLNQFINIPKIEFANARLIHRATGFYVQFVCYVPKEQKKNKINEILGIDFGCETAFSLSTGEKISAQIPESERLKKCQKSMARKQKGSKNWRREVSKVKKEYQKITNRKNDLANKIVAKLNQYETVVIQDEQLKNWHKNGHGKAVQHSVLGRVKSKLLMNPNTVVLGKTVPTTKLCTKCGQWHDEIKVWNRIFKCECGVEMDRDIHAAKNIVWFYKNNVGVGRTNIKRVEMESLVANAISSTSNQIPSVKHEADTL

SEQ ID NO: 27046 - protein, 312 aa, Catenibacterium sp.
LPNYLPKDGYTTLVIGFVRLSGNKLILPYSNAYKKTHKCVEITIPPTLLDKKVREIRIIPKANPRFFEIQYIYESECIQRNLNINNALAIDLGINNLVTAVSSNGKTFIIDGKRLKSINQWYNKQNAHLQSVKDKQNIGKRPTNKQKANTRRRNNKINDYMNKTARTIIDYCINNDIGTLVVGYNETFQKNSSIGKANNQTFVNIPYGQLRFKLEYLCEINGIVFVKQEESYTSKASFWDKDDIPIYNNDNPQSYTFSGKRIHRGMYQCLNGKCLNADVNGALNILRKSNVVSLVGLYSRGEVDTPVRIRIA

SEQ ID NO: 27047 - protein, 402 aa, Acidithiobacillus sp.
MLIRKAVRYRLETTPEQENLLARAVGCVRFVWNRALAVQKSYLDHHCGTLNYAGLCELLTSWRNSEAFGFLAESPSMPQQQTLRYLTQALKEAFNKNSAKNFPNFKKKFVHDSMRYPEPGHIHFDLNPVDRDGRKVLPKIFLPCIGWVKFRKSCIIGGEIRNVTVSRAGGHWYVAIQTEKEVPDPVHPSTTAVGGDRGVANLLTLSDGTMFLPVTAYRDLQKKLAREQRKLAHKVKYSANWKKQKAKITRLHQRIAEMRKNVLHQVSTTISKNHAVVVLEDLKVRNMTASAKGTVDKPGRNIRQKSGLNKSILDQGWGLLKRILDYKLQWAGGMLFLVNPAYTSQTCSVCGVVDAGNRPHQAVFHCLHCGHEAHADVNAAQNILARGLQSTAGHAGVACSPK

SEQ ID NO: 27048 - protein, 574 aa, Acidithiobacillus sp.
MITLHTRIRNLTPEQDAALSTYAERFNRVAHHLATDMAKEKRTGASFKKAYLRRFTLTARQFNAICLSVEGLASNRLENLKNQENMLSDKILALQKLLPKIVLQIQKAGAEQKPDTVIQRLKNRLHQKKRKLVNLLERQSQVIHEQQRPLGSGLCFGGRKLFHAQHHLQENGYQNHAEWLADWKLARSRQFFVLGSNDETAGCQGCVARIQSDGTFLLDLRLPGTEEKRVTIGPLQFPYEAEKLRNVVALHAQLSKENLPRITKQSKAGKPYSRIVYPEALSALSWRFQRGKDQKGWRVMVSFQQPLQGANPAAAVQTHIQAGAIGVDLNADHLAWAELDRFGNPLETGNIPCVTYGKTATQAEALIEAAAIALTQRAKQTGKQLVLEKLDFSQKKTQLSEVDGPRYARMLSSLSYRKIHDAIAARAAKDGVEIKTVNPKFTSVLGRINYAARYGLTVHQGAAVVIGRRAFDRFAKNPHTGKNFKEFGLREMPIGRTGRDGRKTITAPDGRGAQVTFSYPAWNEQKHVWTLLGKVSRKMKAALAAQRVAGQSDHPERMVKSARRKPEVPVAAAV

SEQ ID NO: 27049 - protein, 442 aa, Acidithiobacillus sp.
MDELPITQALTCKLKLLLTKEQAEVVRSTALAYRAALNHASVVAFANGKMSQGMKLQTLVYQDLREKFGLPSQMACNAPRQVAAAYKTLWERAKSNAANKTKGGTKRRYKGLDKAPKFTAMTVTLNHRRDWALGKEQTVSIGTLQGRIRCRYEGWSRHLEWLEYTLAHGITLGAAKLWQDPGTKAWYLLVSVEKALDSKAMDSITTVKGVDLNRRNIAVESSTRGKCRFYPGGHQRHLAERAASTRSALQTKGTRGANAVLRKLALRERRLNADTAHYVSKAIAEPHAMVGLEWLKDIRDRTERRHSKKTSVKRRKANRRVSSWSFAEVQAKTAYKTRLSGGVPIWVDADYTSQTCPICGHIGRENRPNNGLLFICAKCGHTLHADLVASRNINMRTLLVRQVWARTGRLSAVPEASGNETKAADLQRYAELRWSLSASSVL

SEQ ID NO: 27050 - protein, 399 aa, Massilia sp.
MFVAHRIRLDPNNVQATYFARAAGIARFAYNWALEAWKKQHEAWKMDPTLPKQNEGALRRQLNAIKRERFPWMLEVTKNAPQIAIMQLGRAFENFFAKRAGFPSFRKKGRDDRFSLSNDKFRIQDKRIRIPKLGWVRMHETLRFAGHIVSASISRVADHWYVSITVDTPEPSGPPVENQGAVGVDLGITTLATLSTEEKFAGPKALRTLLERLRRLSHSFSRKVKGSRNRAKARLKLARLHEKVANMRRDSLHKLSNSITRRFHTIGIEDLNVEGMMANSRLARAVSDMGFHELRRQLEYKSAWRGGHVVIVDRWFPSSKLCSCCGDKRESLDLRTRHWTCSGCGTQHDRDVNAAINLRNMAVSSTVSACGGEGAGHVPERVAKPAPVKQESNGRAGPT

SEQ ID NO: 27051 - protein, 376 aa, unknown
  TnpB Polypeptide
MEAIRAWKFRIYPTNKQSKEIQTHLWLSKNMWNNLLEYSKNKYKETGKFPTKTELQSMVKDSGLYSQTAQTVSHRLYNALLRYFRMKKKDKNAGFPRFKNMDRIKSLLYPQSGFKIIERKLEVTPFGEISIRKHREMKGIIKTLTLKRESSGKFYAIFTTKAEIMPKENHGKQVGVDLGLINFATLSDGAVIKNPRHLKKHEERLAKRQRELSNKEKGGVRRKKQKRKVALLHEKIRNARRDFLHKISLHLVNSYSLVALENLSIKKMSMEGLGKSINDAGWNEFANMLGYKAEEAGCRIVFVNPDGTTKECSSCGEVVDKGLRERWHSCPSCGLSMDRDLNASINILKRATAGQAGSNARGVDQQVDIEARSPAL

SEQ ID NO: 27052 - protein, 273 aa, unknown
  TnpB Polypeptide
VLSDYHRRYLDDTSFALGSLTLFPDRVIIAFRKNAPKQYVPESALSLDTNDRSLDGVLARGVSVMAVKAEFPDVAVIQQRHHDRRKRLQKKKAHDRRTSRRLCRREGARERHRIEYRLHQVANAVLSFAEDQKSAVVLEDLKGIRPKWSKELNRRLSLWPRRKLHRIIEYKAQWRGIPVVKVDPRYSSRTCPICGRIQDSRMGAEFECECGWHLDRHINASLNLLRTAISKGMAGGLRFNPGAFQHDVMMILYEPAMAARSEPNGTSGMGVAI

SEQ ID NO: 27053 - protein, 438 aa, Streptomyces sp.
VIVKLTVQVRLLPTPEQMATLEATLRACNEAATWASGVAFEKGVKRNFALREHTYDQIKERWGLGAQAAQHVIKKTCDAYATLKANLRAGNLGKPGSKRYRRATEKPIAFRPEGAQPYDDRMLSWQTAERTVSIWTVAGRMKGVVFTAAPEQLAALALYRKGESDLLYRDDMWFLNATCEVPEVAPNTEPVDFLGIDLGVVNIATTSDGEIMAGRELNRIRTRERTLRTKLQRKNTPSARRWLKKRRRKEARRAKDINHKIAKHVVAEAGGTSHALEAVGEHRPRSRPGRPDGHPRTGTASQAWGYLPRPLGSGGGPPTPAGPSPSSGSSSRTRPAGRGCRWCTSIRRTPPAPAPSAATSTGRTGSRRPGSRAGPADSLITRTGTAPATSAPERGSCGDAGLRLRPPPHHRASGAGPDANAAPQPVVSVAQARRFSAG

SEQ ID NO: 27054 - protein, 497 aa, unknown
  TnpB Polypeptide
LSRVDVGRQVYSACLQAALARLRTLRASPAWARPRALPRDTDKQRARRARAFARARKRYGLTEHALQRVALTHFRRSGWMCGHLGTHEVQKIGTRAYLAVTRILLGHSRSARFKGPGQFHSLEGKSNATGIRWRGDHVHWRGLALPAIIKRGDPVAEHALTTRVKYVRIVLRRVRGVPRVYAQLVCQGHPYRKPKNRIGCGHVGVDLGPSTIAVAAPQTALLTRFCDPVVRRRRQIRVLQRRLDRQRRAATPDTSLPDGRVRRGVTRGHASRRERAVRDRLADLFRRERAHRKTLHGQLANEILRMSNTIHIEKTPIRSLQRAFGRSVSVRAPGLCVQILRRKAESAGGQVIDIPARVATLSQTCHGCEAARKKPLHQRVHACASGVELQRDLHSAFLAAHTDAGGALHAGRARRAWPGAEPLLRAAWSEAVQPARGRPVPSPFGGPVACRSQSGSLAPGGTANAEARGGTTPGEAAVVPLRPPPALAVGRFSSLTR

SEQ ID NO: 27055 - protein, 416 aa, Halarchaeum sp.
MAVGVTRTYVGSIRNHRQVCDGLDSLGDSASKIWNVARWTADRIWNATGKIPDEGSLKSYMKNQSCWKDLNAQSSQKAIEELSDAFQSWFDLRQKDDTANPPGYRKHGDTRPKSTITFKEDGFKHDPENNRVRLSKGSNLKEYWSDFLLCKYQTRPDVDLGEVNQVQNVRAVWNGDEWELHFVCKVELETNDSVGGGVAGIDLGITNIATVAFPAEYVLYPGNSLKQDKHYFTRAEYDTEGENGPSKKSMWARRKLTERETHFYHVLTDAIITECVERDVGTLAVSWPEDVRDSDWGKTGNKKLHSWAFDRIYQYLDYKGEERGVEVLKENEWDTSKTCSRCGDDTKTNRKHRGLYVCSSCALVGNADCNGAENMRQKITPSPHGEDRSNGCVSQPSTYLFDRESGTFQSREQVVS

SEQ ID NO: 27056 - protein, 430 aa, unknown
  TnpB Polypeptide
VLVFLGFSLSCISLGRPHVCLPPFWAVEAHRALLFPVNWDAPLLDWLLSEFRLLVNESIRIALKAEIRSRTRLTQVAYSDLSARYGVYKQYIPSAFEIALGVLKAHRRRLKRKKRSSVPYMRKLMLKAENQSYRLDRETGRIRIPVRKGESVVVQLPLSAWHRSFLNDPEWRLGSLTVVPGKIVVVIRKEVPKAYEPEGAIALDTNEDSLDGVVASDAGIVSTSLRFESVRRIQQTHFRRRRRLAAKKAGDRRVLRRLLNREGHRERHRVRQRVHQVSKRIVQFAKDSRVAIVLEDLTLHGAGGWSRRMNRRLSSWPRSEIHRQIEYKAALAGVPVIKVNPQWTSKTCPMCGARRRDRVGKVFVCLMCDWEMDRQINAGLNILKTALAGNPALARAVRFQPGALRHDVVSPLYDLSALPTSAREEPSGVE

SEQ ID NO: 27057 - protein, 369 aa, unknown
  TnpB Polypeptide
MEYSYKFRLYPTGEQENLIHRTFGCTRFVYNYFLDKRIQAYKESKETLNYYACAAALTELKKTDDHSWLKEVDSIALQQSLKDLDNAYQNFFREVKKGGAVGFPKFHSKRDRRKSYTTKQNIEVFDRYIKLPKLGKVKCRVSREVKGRILNATVSQTPSGKYFVSVCCTDVEVDMHQSTGAMVGLDMGLKEFAISSDGTTYQNHRYLRKSAKRLARLQRSLSRKSKDSKRREKARIAVARAHEKVANQRRDYLQKLSTTLIKEYDLIAVEDLAVKNMTKNHSLAKSINDVSWGEFMRMLEYKAAWHKKVIVKIDRFYPSSQLCSVCGHRNADTKDLSVRKWICPQCGTTHDRDINAARNILAEGLRSLE

SEQ ID NO: 27058 - protein, 315 aa, unknown
  TnpB Polypeptide
VSRLERGESTSQPHFSADSVVYDKRSATFHRDHVSLSTPDGRVECDYILPDDSETPPTKYVSNDDYEFRMGHLQYRDGDWYLHASMRKEEEDTKPDTEHRTVLGVDLGVNNIAVASTGRFWSANEFNHWNREYEKRRGSLGLCGSREAHENIERIGRKAEGRFTIYLHTVANELIREAVENECSHIVFEDLTHIRENIPNATWQHQWAFRRLYGYVEYKADEHGLEVVQVNPRNTSKRCSTCGFTHDENRHQESFECQQCGYENHADYNASKNIGLQYLRRRQNAGDGGAPVDVRLNRGTLNVSGDYVPPASTEA

SEQ ID NO: 27059 - protein, 402 aa, unknown
  TnpB Polypeptide
VEFRRTAVIKLNTPDGADSFLHETVEQFKHCANIASEWCWNGDDGYHVTSKAKAERALYDRLRDETDLTANLVQKGIRRAVEATKSGVSRLERGESTSQPHFSADSVVYDKRSATFHRDHVSLSTPDGRVECDYILPDDSETPPTKYVSNDDYEFRMGHLQYRDGDWYLHASMRKEEEDTKPDTEHRTVLGVDLGVNNIAVASTGRFWSANEFNHWNREYEKRRGSLGLCGSREAHENIERIGRKAEGRFTIYLHTVANELIREAVENECSHIVFEDLTHIRENIPNATWQHQWAFRRLYGYVEYKADEHGLEVVQVNPRNTSKRCSTCGFTHDENRHQESFECQQCGYENHADYNASKNIGLQYLRRRQNAGDGGAPVDVRLNRGTLNVSGDYVPPASTEA

SEQ ID NO: 27060 - protein, 424 aa, Actinomadura sp.
MPSSSVIGQYGAGVQLRYNYRMYPTPGQQIALARAFGCARVVFNDGLRARLDAREQGLPYPSDAELSKRVITQAKVTPERAWLGEVSAVVLQQALADLNAAYRNFFASISGQRKGRKVAPPRFRSRKDNRQSIRFTRNSRFKVLDNGRLRLPKIGEVRVRWSRPLPSDPSSVTVIWDAAGRHFASFVVDTGPQEPLPSSDHEVGIDLGLTHFAVLSDGTKVTAPRFLRRAARKLKRLQRALSRKQKGSNRRGKAVVKVARAHARVADTRRDWQHKLSTAIIRDSQAVYVEDLCVAGLGRTRLAKSVHDAGWAAFTAMLEYKAARYGRTFGRVDRFLPSTRMCSACGRINDKIALDVRAWDCPCGAAHDRDVNAALNILAAGRAESRNDRGARVRPPAMAAPRGEAVTHPDAAWSARSVEGISVL

SEQ ID NO: 27061 - protein, 360 aa, Actinomadura sp.
MARQVRRAFKYRFYPTVEQAAELSRTFGCVRLVYNKALEERTRAWCGEQRRISYVESSAALTHWKKTPELAFLAEVSCVPLQQALRHLQTAFSNFFAKRAAHPRFKSRKRSRASAEYTRSAFTWRDGHLTLAKMAEPLDVRWSRPLPEGAEPSTVTVSRDSANPRHERRDRARLARAQRELSRKAPGSANRDKARRRLARVHARIADRRRDFLHKLSTRLVRENQTVVIEDLTVGNLLKNRTLARAISDAAWRELRTMLEYKCAWYGRDLVVIDRWFPSSKLCGACGTVRAELPLDVREWTCGCGSLHDRDVNAARNILTAGLAVTACGDGVRPQRDTSRTGRSSAKQETQRATAGIPCL

SEQ ID NO: 27062 - protein, 474 aa, unknown
  TnpB Polypeptide
MTMLLTYKYRLNPEKRQHRALERILEQQRQLYNAALCERIECYRKTGKSISEVDQSRSLTQIRADDPAFALVQRRIQRGTLKRLDRAYKAFFRRAKEGAGASSGFPKFKGREHFDGFAFDAFAQITFKDGGLWFAGMPGKLRINLDRPLPETPHEKTGEMGVWIKNVWFKREGLIWYVGFQVPAPVRENRNGLGKGAIGADWGTSVLAHLSSGEIVPNPRHGEALAQDLARTQRSVSRKAKGSKQRLKARRHLQAVQRKIANRRRNSLDKLSARLVKNFGTIAIEDIAVKGLMDAERPGETLPEFVKTRRNREVLDTAPYLLRQMLTYKAQREGATLIVVPSTNTTQECFWCGGLHFKELTDATHVCTRPGPYFNLKAPRKLNAARVILKRALACVPAPLRGAGRNAPIKNHRGGPVPGGLSGSSPVVRNARTSARRPGNTEAEQSAPGRRGVETPPLPHARGRDPKVRGSPGW

SEQ ID NO: 27063 - protein, 372 aa, unknown
  TnpB Polypeptide
MQTVTLKVKLLSPNKGKLEKMVRMLELYHQACSWFLKQAEALNTTSRAKLNRGTYHKACELFDLNRATLQCAMLKALSAYRSYFSRTKNGKKSSLPKFDRIIPVMVRQDCYSMHQLSSGTWVIKFPVSSGRSQIAVPIATSEYHAKKLQNLAGGSCQQGSVEIWRGKDGEWYAAISLVYETHINEPCGVIGVDFGIVKLAVLSDNIFFDGRQIRWRKERWAQRRRALQQAGRLSRVKKETGRERRWMRHINHCISKRIVEIAKEEGKAIALENLLGIRERVKGSKKFNRMMSGWNFKELASFIEYKARLVGVPAVYVDPKETSKACPKCGNASRYNRKTQGWFKCTRCGYQSDADRVGALNIAARALDALGA

SEQ ID NO: 27064 - protein, 389 aa, unknown
  TnpB Polypeptide
MVVRNVSQRIPFTPSKTQAALLEQCFGARRFAYNRQVEAFNAYDKDTNPRPSYPNVTDMKGANEWLRDSPIPSNALSNAITDFRWARAAYFRKGEYGKNRPRFASKSDNIQSFRNRAPIRRMEGNRYQLSKKLGSVRIRRRDRIRYPLESLSSWTVKRENGVYYLILLFDVDVQPKPPVDGQVGIDLGVKDFLTLSTGEKANYPDRLRQLEEKVKREQRKLSRREKGSSNYRKQKRAVAKAYAKVRHFRENFQHQVSHRLIEDNQFIGMETLAVQNMTRKAKKKLDANGKSARNGQSAKRAMNRSIFRSGWGDLVDKLAYKAQWYGRAFVQVDRFYPSSRLCNNCGHKYDGLLLSEREWVCESCGVLHDRDVNAALNILGEALRLSQTE

SEQ ID NO: 27065 - protein, 353 aa, Escherichia sp.
VKRLQAFKFQLRPGGQQEREMRRFAGACRFVFNRALALQNENHEAGNKYIPYGKMASWLVEWKNATETQWLKDSPSQPLQQSLKGLERAYKNFFQKRAAFPRFKKRGQNDAFRYPQGVKLDQENSRIFLPKLGWMRYRNSRQVTGVVKNVTVSQSCGKWYISIQTESEVSTPVHPSASMIGLDAGVAKLATLSDGTVFEPVNSFQKNQKTLARLQRQLSRKVKFSNSWQKQKRKIQRLHSCIANIRRDYLHKVTTTVSKNHAMIVIEDLKVSNMSKSAAGTVSLPGRNVRAKSGLNRSILDQGWYEIRRQLAYKQLWRGGQVLAVPPAYTSQRCVCCGHTAKENRLSQSKFRC

SEQ ID NO: 27066 - protein, 415 aa, unknown
  TnpB Polypeptide
MKLTYKFKINYNEDISNLCKISKNLYNQANYLIRQDFIKNRKYLNYNIIENILKNQRYEKEDYDNYHKLKIQTSQQILLLLDKNWKSFFKSIKDYSKNKSKYLGKPNLPKYLKKVEYILIYTNQNCQIKKNILVLSKNIKIKIPEYKDFSNFNQVRILPFKKYYEVEIIYEQNIVNSDLDLNNYTSIDLGLNNLITLISENKSILFSGKIIKSINQMFNKKYSKLKSIKDKKKGINLNYNKLRRLECDRKYFIKDYFHKVSRSIINYCLINKIGNLVVGYNVNWKTSINIGKRNNQNFVQIPYSQLLTYLEYKCNLVGIKFIKTEESYTSKCDGLALEKICKHENYLGKRIKRGLFQSSIGRLINADVNGALNILRKVIDDSSEFIQKIINSRVLFNPVKIRTTEMLLNFCKGIY

SEQ ID NO: 27067 - protein, 302 aa, Streptomyces sp.
MVVQVRLLPTPWQAAALEATLHACNEAATWASEVAFAKDVKRNFALREHTYAEIKQRWGLGAQAAQHVIKKTCDAYRTLAANAKAGNLGKPWSRRYRRATEKPVVFRPEGAQPYDDRMLSWQITDRTVSVWTLGGRVKGVAFTASPEQLARLALYRKGESDLLYRDGMWLLNATCEVPEAVPNTAPDGFLGIDLGIVNIATTSDGQIMAGRALNRGRLRERTLRTKLQKKNTPSARRRLKKRRRKEARRAKDINHKIAKHVVAEAERTSRGIALEDLTGIRERVRLRKPQRATHSSWSFAQL

SEQ ID NO: 27068 - protein, 721 aa, Streptomyces sp.
MQLRYNYRAYPDTSQRGALARAFGCARVVWNDCLRDRKEAHAAGLPYVTSAELYRLRISQAKHTAERAWLADVSAVVLQQSLRDLDAAYKNFFDSVTGRRKGRKVGPPRFKSRKDTRQSVRLNTNAFSLQVNGTVYVAKVGNLKVRWSRPLPAAPTSVTVTKDSCGRYFLSFVVDTEPDILPEAETDVGIDLGLSAFAVLSDGTKIASPRFLRRAEKKLKRLQRELSRKVKGSKNRAKARIKVARQHAKVADQRRDFHHKASTQIIRDNQAVYVEDLAVSALARTRLAKSVHDAGWTAFVSMLEYKAIKHGRAFVKVGRAFPSSQICSACGFRDGPKPLHVREWTCGACGTVHDRDHNAGRNVLAEGRRIVAAGRVETRNACGAPVRRAPVPAQRGEAGSHRKGQQKAQTGTLDFGQGSTPRQDFLDTAPQVDRSAERTIVGSVRRNDTRPTGRPRMSANDEERPLQDSDTHAPGVRSVRRAVEILNLLSEDRPVVTLREVTEATGLAKTTALRLVQTLEETGLLGSHPAGYTAGPALWRWAYLAQSQWEVPQETRKVMRDLADRLGETVNLFVARGVHRICVAHEESPHPLRHVVDVGDEQPLWAGASSKILLRDAPDPFLRRVATTSPQGEPLADRLRTWAAEAAERGYAVSSSEFDEGLTAVAVPITGRTGKVAASLSLSGPTHRFPYESIERFATELAQGARLISDQGFSHPLGNAG

SEQ ID NO: 27069 - protein, 235 aa, unknown
  TnpB Polypeptide
VFHDYWEPVPLRRSGVVRTVPRDDRRNRPPTVETPRGSRSSNRIRRLYRQRTKRRDHAQNALVRDLVERLYDEGVATVYVGDLTDVLEAHWSVRVNEKTHNFWAFKKFIHRLACSKPTDGVCEEYGISLETESEAWTSQTCPECGDHEKTVRHEDTLTCPCGFEGHADLTASETFLRENSNCEIRPMARPVRFEWDDHDWSGKLYPHESPKEVRTNPKLPPWVGSRTLNGGILAL

SEQ ID NO: 27070 - protein, 471 aa, Calothrix sp.
MVLKTKLSKKSDQDSTTKENNLKAFWNELCQEMSNNLWLDTKTDLQDSDLTLLNGFVNSTIQNSWFATTQNLVQKEKWWKTYLQSFMSSVAGCTDSENTNLKSKKIRLYPEAKLKTVWRRWIASSRYCYNKAMAYMRDCYKDGLKLPSAYDLRKIIMLKIPEWVNSTPFNLRGAAIIDAHAAFKKTKKENKLTPKFRSCRHPVLSFKLQSDNWKKGTTYPTHKTDEGIKIIDLKINASEIIPDVIPSDFNIVLDRGRWFITYTIEDAKCSNANNQAIALDPGVRTFLTGFDGNKVFELGKGAISRIVNLCRRLDSLQSQIAQAKGKDNKRKRFNLRKVAQQTRIKIKNLVDECHKKVACFLTSNYSQIIIPHFESSDMVYKAQRKITNKTARNMLSWAHYRFKQRLKHQAAKRGSQVIEVSEEYTSKTCSKCGHVHKKLGGSKIFNCPNCGHKVDRDVNGSINIFLKTISG

SEQ ID NO: 27071 - protein, 443 aa, unknown
  TnpB Polypeptide
MAFEEAVGIVKGGWEQTFARVKTLVCANKRWSDLERQELCYVLASPPLIAKVVLGEIVETPKPEWAGNDQRMLCTYLRRLILAHRTPAPRRERQKRAFVADNTAYRIFSRPEDKHFKGVWVSLSTLPGEKPIAIPLAGRTLKYLDGPGKKNLRVTLEDDRIRFTIARDVPVPAQLAQVGKSDRPSAGPQEIVGLDKGMSRLIAANATNDPVNAVFYGDEDVAQKIAESSDRPSRGRLWSYVRELEKLARDEARSIEERAIAAAKAGRIRSQNLGSVKLRRLNDRGHKTIVRLTNQATNEFFRDHRTMTDLVEEDLTKMSGDTGKGRNFNRRVSHWMRGALSDALEAKCKLNGVQREVVNAAYTSQACPICSWTESKNRRGTVFHCRQCGYVAHADAVAATNVRARFGDPEISRFMPRSKVKEILLARWRRRSELPPGAQTAAA

SEQ ID NO: 27072 - protein, 443 aa, unknown; identical to SEQ ID NO: 27071
  TnpB Polypeptide

SEQ ID NO: 27073 - protein, 185 aa, unknown
  TnpB Polypeptide
VVGLDVGLLSFATLSDGTTLDNPRHYRKAQAKLRRAQRRVACRKRGSHNRWKAVVLLQKAHAHGQNQRADFHHKMTRTLLNTYGVIAVEDLNIKGLASGMLAKSVHDAGWSAFIRKLAYKAGEAGRKLVHVDPRGTSQTCLCGAPVPKPLSQRWHQCDVCGLSTARDHVSAQLILGLGLSLLGLT

SEQ ID NO: 27074 - protein, 418 aa, unknown
  TnpB Polypeptide
MPCPTYRLGGFYLRSINGKEKLKTVKRNPMLKTYQYRVYPTTKQRLTLEAWLDACQTLYNQGLAMRIETFKKTGKSISYNSQAGMLTVLRRHSSFWKGIHIDVLQDTLRRLDKTYDAFYRRLKAGEDPGFPRFKGRGRYRSITFSHLSVNLIRTIRRKFARVVVPKIGHVKIRYHRPLPDGQIKMLTIQRKASGWYANITVEMPDIPKIDIQSAVGVDVGLESFLTTSEGDKVENPRHLRRAEKALKKKQRHLSRRKKGSVRRRKQNTILAKHHEHVANQRRDFHYKTAHRLFSQYDAVVIEGLTIDNMKRNHYLAKSISDAGWGHFRLALSCKAENAGKHLLKVAPHGTSQICSGCGSVVRKTLAIRTHQCDCGTTLDRDHNAAINILGAATALRGGAEVTNSPEKPSRLTHDPDHG

SEQ ID NO: 27075 - protein, 396 aa, unknown
  TnpB Polypeptide
MSFRTHKIALKPNNKQRNWFAQQCGYARFAYNHALADFKASLDDDDFLSIFTLNKRFNQTKKEYDWTPEQDQRAAFYSIYANLASAIKNWVEKRAKFPKFKKRGKHDSYTTDEQSVIVRGKRIRLPKIGWIRMSQVLRWTGKIVKVTISRTAHRWFISITVDAENIKAVEQSTHPVPIGIDVGINTLATCSDGTKYDNPRPLKRFEYKLAKAQRKLSRKKKGSNNWHKQVAVMARIHYRITCIRNDAHHKASTAIVNHASAIGIETLHITNMLKNRKLAKALSDSALGGFLTMLKTKAEARGIPITEADQFFASSKTCSSCGHKKADLTLSDRIYQCDECGFTLDRDLNAAINLRPKLAPGHRESQNACGAQVSPHSEARAAESGKVVWKQLTLPI

SEQ ID NO: 27076 - protein, 383 aa, unknown
  TnpB Polypeptide
VSIRTIAPTETQRAAFVRLRWAFVQACSYVSAVAWDAQEFNRVRLHHLVYAEVRATHGLMAQHAIRAIGVVVDAYKLDRKAQRTFRPEGAVALDTPRLYRLEGNHADIVTLDGRPRVKLNIGGIQRGQLKDVTRLLEADLIRDRKGRWRLLVSAAYPDPTPMEMDDVLGVDLGRIDIAVTSDGATYSGGRTTAIGDRYTATRTMIQRNVSKGTRSSRRRGRATLARLSGRESRFQRNTNHPVSRRIVDTARATGRASALEDLTGIRERVNAQSRGKTERRRGNAWAFYQLRAFLTYKAHDAGRPLMLAPPAYTSQTCYRCLHLGEREGKCFSCINPSCGWAGDADFNGACMIALLGAAVTSPRGPWLCCDVQPGRRAPESLAL

SEQ ID NO: 27077 - protein, 387 aa, unknown
  TnpB Polypeptide
MRRAYKFRLYPKREQVVALDRTLMLCRHLYNAGLEQRITAYERGHKLSFSKQSDELPTLKAELPEYNEVFSQVLQDVLHRLDKAYANFFRRVKQGGEEPGFPRFKGRNRFKSITYPQAGFEVLPNGHLKLSKVGTIRMFRHREIEGTIKTCTIKRDAVGDWYAVFTTELPDVPRREPRTAIGIDVGLKTLAMLSTGESIEPPKFLRASEDTIKIRQREVSRKVKGSNNRRKCVRRLAKAHRRVERQRDDFLHKASRALSLKADTIVFENLNIKGMVRNHHLAKSISDASWGKLMELTRYKAESAGGGVVLVNPNGTSQICSRCGTMVRKSLSERTHRCTVCGFSADRDLNASFNILQRLHTDSVELLKTPVETAPPQLLSGGCEHGR

SEQ ID NO: 27078 - protein, 398 aa, unknown
  TnpB Polypeptide
MVVEAGCLAPEALMRGFASATFRAGRMSQKVVLASNYHMYVPAHTYQHPAHQVWNAFKSWFKLRKTDKTANPPRFRPKQEPSSFLYTNDQFKVINENMMLLALGQSLKDELNYPRKRLAIRYKWNTPFPKDGIIQQVEIVPRDGYFELHAKILLPEPIWKTQGQIIAVDLGERNPIVSKDEVGNIDIFKGGKILSNLRYWNKETARVKSEVMGRSKGKKKHSKNLSRMDTRGNRQKKQSVHALTSAFTKLCVQRDAKEVVVGDLGGIKKNKDGTGKNWRDKQQQNWQQFPIREVVAQLGYKLARYGIRLVEQDERGTSKGRCSLCGCEDRSKLHRVKRGMFLCRNCDTVQNADVNGVGNQLVRYLHHIGKPIEGSSGSLAEPRVWRWDDHRWTKVVVG

SEQ ID NO: 27079 - protein, 389 aa, Streptomyces sp.
VKLVVQVKLLPTPEQASALEATLHTCNEAANRLSAQAYEHQVTSRARLQAMAYGELKARGLSAQPALHVLRKVADAYTTLKANLKAGNLGKPGSKRHTKATGKPITFRKDAAQPYDDRCLSWQIPERTVSIWTTTGRMKNLAFTGQDDQLAVLAAHRKGESDLLRRDGQWYLIATCDIPEARANTHPAGFLGVDLGIVNIASTSTGTRHCGRRMNRRREADRKLRSKLQKKNTKSAKRRARKHAGKEARRARDINHKISKSIVAEAERTAQGIALEDLTGIRERARLRKPQRVTLHSWSFRQLGTFIAYKAQRAGVPLVHVNPANTSRECSRCHHVDKRNRPSQAVFTCRSCGFVEHADLNASHNIADRGWMAWVRGAESQAPALTLIA

SEQ ID NO: 27080 - protein, 379 aa, Calothrix sp.
MKRIERSKTCHTLKKRARLKKKAGKPPVLPQSTNFPIQVYSGMFKDDTGETLVVKLWTGKVWQFQKVSYKCRELPLDYVKGTFSLIYDESRLKLVWVIQKNIPSKGKLVDHIKAYGKLRILSIDLNLDDPIVVGKVLEGYEDTSVVVELANLRISGNNRLHHLRKRYLGEIAKAKSLTNTKTELGVLPPLNFCSKLWKRIKNLEKELIETISHSIVEFANDYNCNLIVFENLKSLKPQRGKYSRRSNMKRSFWVAKKIQKRVEQKALNRYSIYTVRVNPAFTSITDSRSGAKCLRGSQVGSLNLYLWSDSGLGKLVQTPDGKIFCSGENAARNIGLKYLTAKFEKPVVFKNAGLPTGCVVWLRKPVGKGNVVIPAWSCA

SEQ ID NO: 27081 - protein, 410 aa, unknown
  TnpB Polypeptide
MDRTIQIQLHTTLEQSALLQETVKQFTSVYNAVCRYGWDTHEKNGVKLHHATYYQMREAFPQLNANVLIQARIKATETLKSAFTWEAKHEAKHRKKLEKARKQGKPEPRFKPMKCPQSAWCAIRYNERTYTLNWTRSTVHLSTVEGRTVVPFTVPDYCRKYIGNPNTTADLLYKNGKWWLHVVVSVPEPVVQKDSIVIGIDLGLNRPAVTSHKHFLGNKRWKEIDRRSFRLKRKLQSKGTKSAKRHLKKLSQKQARFHRDCDHVLSKQIVVSTPTGATIVLENLTNIRETSKIGRGKKNKNVETKRKLHSWTFAQLYSFLAYKGQERGIRVEKVDPRHTSQTCSKCGHRARNNRRSQSLFLCRKCKYSLNADLNASYTIRDKYLATSLASVGTSFASGVSSTTLSSQASA

SEQ ID NO: 27082 - protein, 338 aa, unknown
  TnpB Polypeptide
MYKKSLNAYSLQKHLTKLKKLDKYSHWNQLGSQAIQDIADRIDKAYKLFFRNQKHGIKSGTPNFKKRRNYKSFTLKQAGYKLLEDNRIKIGNKIFKYFKSQDIQGNVKTLTVKRDKLGDIYIYAVTDTESLKVAPCTGEIVGCDFGLKTFLTVSNGEDVESPLFFQQNRTTIRKANRKLSKKQRHSNNRRKVRKSLERLHKRIANQRNDFHWKLANELTDKYDFMFFETLNIKAMQMLWGKKICDLGFYSFMLKLKYLASVKGKTVCLIGRFEPSSKTCSVCGYLYKDLELKEREWCCPGCESLHDRDRNASYNILRVGASTLGLGDISPLPTMAISA

SEQ ID NO: 27083 - protein, 399 aa, unknown
  TnpB Polypeptide
MSILAFKYRLKPSSGQITMLEEQLRLCRWTYNTLLGHCLDERKAGRGTPTSTSLNYLLPAMKTRTPELEEVHSQVLQNVAKRVRLGFENYWNRHRAGLKAHLPRFRRDERYNSLTYPQSGFSLKEGALKLSNIGALRIILHRPVEGTMKTLTVKREPSGKWYAIFNCDVENKPIEGRLPAVGVDFGLKSIVALSDGTTTEAQQFYRKSEQRLGQLQRIHSKRKLRSRNREKARSRVAKLSEKVANQRRDFLSKIARGIVNKYEMVYIEDLETANLKRNKHLSKSIGDAGWRILRHSLTYMAERSLGMTVYVAPQNTSQLCSGCGATVLKSLSERKHWCPVCGLVLDRDVNAARNILQRGLGIGLGQPESTPVGEETATFLSEGMQATSMNQEATLLVGW

SEQ ID NO: 27084 - protein, 426 aa, Catellatospora sp.
LLAVAAVVKRTFKYRCYPTDAQAGELARTFGCVRKVYNLALAARTEAWTARQESIGYNATSAMLTAWKKTEDLAFLNDVSCVPLQQTLRHLQSAFTNFFAKRAAYPRFKSKKKSRRSAEYTASAFRYRDGQLTLAKMTEPLDIVWSRPLPEGSTPSTVTVSQDPAGRWFVFLLCDIACKPLPVTAAAVGVDLGLDSLVTLSTGEKIANPRHERADRDRLARAQRQLARNEKGSNNRAKARSRVARIHARIVDRRHDLLHKLTTRLVHENQVMVLEDLAVRNLIANHTLARAISDAGWRQLRTLLEYKADGCGRNLIIVDRWFPSSKMCSACGAVAASMPLQIRNWACGCGVVHDRDVNAARNLLAAGLAVSACGAGVRPQREPSRTGRSAMKQETPGATPGIPRLRPGEDVKKAPGGCRGGSAASW

SEQ ID NO: 27085 - protein, 429 aa, Streptomyces sp.
MQLRYAFRLYPDAAQQAALAKAFGCARVVFNDAVRARENARKAGQPFPTAGELSRKLITEAKRTKERSWLGEVSAVVLQQSLRDAESAYRNFFASLKDTRKGPKVGAPRYKSRKDARQSVRFTANARWGITDSGRLNLPKIGAVKVRWSRTLPATPTSVTVLRDAAGRYFASFVVDTDHAADTAGMPATDRTVGIDLGLIHFAVLSDGTKIGSPRFLRRAEKKLKKAQRELSRKQKGSKNRAKARLKVARAHAKVADARREFHHQLSTKLIRENQAIAVEDLSVAGLARTKLAKSVHDAGWAQFLSMLQYKAARYGRVLVKAGRFTPTSQTCSTCGAVDGPKPLHVREWTCSGCGAVHDRDTNAAINVKTAAGLAVSACGAPVRPGVIPAQREETGSHGFPTGNRAAGAAQEPVGKARILALQGEEHVN

SEQ ID NO: 27086 - protein, 514 aa, unknown
  TnpB Polypeptide
MEQLKQSDKLIQCRGSTILSVSKGSKKRRKEDSCVESRSSNKEMTLPDTQLENNSQKQILSNTSEVDVTSNKGNFKPFWDDSCKLISSNLLSHIQIDSADLETCLSKVEEESWFLTERKFHQIKNYKKNFLQSYLSSFEEFNVFDNNLIKSRKIRIYPTQQQKILFKRWFGVSRKFYNETLVIYKNGSQKTWNKVYQEIAENNKDYDYIKSVPYQVKKIAVKDYKNSLSINKKTAKRLGKPFEMKFKSKKNPKQTCYIPKTAISSSGIYHTIAGKLKMKERQWFENEDICDCRLTLEFGKWFLVIPKKVKTKPIENQEGIVAIDPGIRTFATYFSTEGYFGKLGKGAFERILRLNLKIDKLISKRSKETNKFKKSNLKRSIFKIRFKIRNLIDELHWKTIKFLTSRFKVIIFPPFNVSEMIKKSKRKLSKKVVRSMNCFRFYEFKERLKLKCKENGITFIESSEAFTSRTNSFTGELIENLGSKEKFEFDNILVDRDINGARNILIRAMRDASA

SEQ ID NO: 27087 - protein, 542 aa, Rhodococcus sp.
MAKAKTPSFIIDVELKGKNRDLIRIESELEVNRVIYNTTLVEYLKREKQMKRTKRYKKLVRIFKVIKSHLANKINEEKIKFYQNEQKNLYEEFKKLREEFGVTEYSIQEYIKQVRKHFKDNINSIIAQKTATRAWNTFKKKLFGKSKKVVFVKRGEMDSFEGKNNDTGWRFKEGKVISNGRVCALKVKEMDMYLKEAFHLLNSQQIFQYKNKDGENINDFYRVKYVRILKRIVRGTVRYYAQLVCAGYPPVKRGKTGQVKYPLGNGPVGTDIGTSSIAVSGTTKVQLKNLAENIKKVNHVQREIRLYNRKLDRSKRATNPLNFDEAGRIRKGKKKWDFSKNYKKLKAQLKELHRKLALYRKFSHQYEANRMVMLGDIFYIEEMNFKALQKRAKRTEVSEKTGKYKKKKRFGKTISRRSPAAFVSILSRKVTALGGTFIKVKTSSFKASQYDHKADKYKKKELKERWHIFDDGNRVQRDLYSAFLLMNSDLLGLKSDRTACLNVFEQFLKFHEEEIKNIENENEVILNSGIKLKVKKTVAYAA

SEQ ID NO: 27088 - protein, 602 aa, Rhodococcus sp.
MTGPGATAPRQFAFTTRAHVAVDDVTGESIGLDDVDTRVGWLLDLIAAAGTELVARVWHPVTFDVLAAGLDHQDRRLPVHGHVAAARLGWNPHYPDGVYVPSRVTRVVTAQVVATLRTLAFRDAAIAALSERFDPATGTLAAPTEPGDWVPLGFARGVRRQILARARRTDSGALAGRLRITDIQGPPQTNAMARLSAADRQLAQITVTGDELVLTVKLPTCPAPAGRAQWRRVRLTATIPAHLHGRAITDWHLPTLALDRKGLLWRCAATDLVPDCELGSATVAVGVDWSPSTLGAAAITTETPEGLSSDFRGFTYDDRGLGTKLARLQTEGQMLHRKAARLTQLATNAEPEVRARLEEKIAVLNEHRTAVGVKRGRINRELGFHFARQVTDYATAAGAQVIAVEDLSTLETRGHGRVNNNRAAQSARRKAVTSLAHTAGGVGIAVVSVPARGSSALCPGCDAPLARPGGYHSAWCSGCRVGGNRDHVAGVNLAKRALLGKGKVTRRQGQLPAIRVAEHAPVRPSRGKTSPTPSRPRHRRVRRSLPTVTPRAGVTPNRYVPAPQASVWDTVKPTPPQDDAGSRDTRTSPTNATPVVDSMRST

SEQ ID NO: 27089 - protein, 403 aa, unknown
  TnpB Polypeptide
VRTAYKCRAYPDFEQASVLNRTFGCIRVVWNRTLAWRHARYDGEQARTNFTQASAYLTGLKAREDLGWLNEVSSVPLQQAIRHQQAAFSNFFAGRARYPRYKSRDGRQSAEYTRSGFRYRGGRLFLAKMSTPLAFTWSWPGIDPASVDPTTVTVSRDPCGRWYVFFAVDLADPEQLPATGAVAGVDLGIKDFAVTSDGEKIPNPRRLARRAKNLARYQRRLARCQKGSANRAKAKGKVARAHRKVRASRADFLHRTSARLVRDHDVIVIEDLAVKNMVRNRPLAKAISDCGWGEFRRQLEYKAAAAGRHLIVAGRWYPSSKTCSACGDLLASLSLNTRTWQCPSCGTRHDRDINAAKNILAAGLAVSACGADVRHSGSSRVRSAVKQEPRPVTAGIPVHQGGE

SEQ ID NO: 27090 - protein, 499 aa, unknown
  TnpB Polypeptide
MSGGGNPRGVPARDSDPLEAFRELIERRKRSNKRTVRLRLFPNRYEQETLFDIGLACARLWNELNYEKRRAFFNRELTPEKRDEINKRYYHRYKKVLGVNAGQVINKNDEAWNAFFELLDLRKQCKLPPFMKKLSPPGYWKDRETGEKEIHILIRNDRYYLEPISEDKGYIVLEDFDLRIRYAGRIRWEGKQRRLEIIYEAGRWQAYIPIEVGVDPPKSNPKGYVKPIYDDEERKKKKQRITNPKSIKQRDPIGDKEAFIDMGLNNLFAIVVSDGSALLVKGGYIKSEYCWWKREIATYQSVRDMLRRLGISTWINYHEKYLDAMYKRDERLRHLYITAIRFLADELYDRGVRKLYIGYPIMLSQNNGNEYNTNIWWFRKIVLWIVDIFMEYGIEVEIVPEDYTSRECSICGNKHKNGRKHRGLYICKKTGKKINADINAALNIARRLGYRVRVSRKIESYHVTHIGVKPLNPLQRANTRDPSIETPPLKGGEGSCQEY

SEQ ID NO: 27091 - protein, 419 aa, Brasilonema sp.
MITLTYRYRIYPDITQEQTLIEWMEICRTAYNYALREIKDWCDSRKCLIDRCSLEKEYILSPELKFPGEIYQLNNLPKAKKEFPKLSEVPSQVLQQAIKQLHKGWEYFQQRGFGFPRFKKHGQFKSLLFPQFKENPVTNLHIKLPKIGAIPINLHRPIPSRFVVKQVRILRKADKWYTSISVQCDVNIPDPIPYGHVIGVDVGLEKFLATSDGVLVKPPKFFKQLQSKLKLLQRRLARLQRRSKNYEKQRLTVARLHHKIDNTRKDFHFKVAHALCDAGDMVFMEDLDYRTSAKGMFGKHMLDAAFGQFRAIVKYVCWKRGKFFSEVDARGTSQQCPECGGQVKKDHYVRVHSCPDCGYIIDRDVAAGQNIRNRGIKLISTVGQTGTQTACAVDLPGTDENQSRQVAKSRKRTTRKSSK

SEQ ID NO: 27092 - protein, 431 aa, Nonomuraea sp.
VKLRYNYRLYPDAPQQAALARLFGCVRAVWNDALARRKAAWKADRARISGPRLQQLCITAAKRTPERDWLGQVSAVPLQQALRDLDVAYTSFFASVSGKRKGPKMGLPVFKSRRDHRQSARFTTTAFKLRPGGAGDALYLAKIGEIEVRWSRELPAPPSSVTVIKDPAGRYFASFVVDVPDDSQTLPRSDAETGIDLGLTHYAVTSNGEKIVNPKWLRRRERKLKKLQRALARKQKGSANRTKARIKVARQHAKVGDARRDFLHQVSTAIVRENQAVAVEGLAVRGLARGRLAKSVNDVSWGTFLRLLEGKAARYGRAFITVDRWYPSSQLCPCCGHKIGKLGLGVRAWDCPSCGEHHDRDVAAALNILAEGIRLKTLNDLNDVNGLNDTRSVHDVAAGLADTRNDCEGQVRPGKAIPTLAPPETSTAHAA

SEQ ID NO: 27093 - protein, 443 aa, unknown
  TnpB Polypeptide
MSSWTNEDPAGRRRDCVGGRFRGAARGALAKPPGAARPAAVYTLVAPSVRASFFEICYNFHVASSISYKLRFYPNAAQRQQLAVDFGVARWAWNTALDARSFCYRALGRSVSGADCSRAITELKADPAYAWLKDANSTAITQALRDQDRAFANFYAKRAGFPKFKSKRGPQSARYQLDQRHIGRTFDAETHLLKLPKLGALKLRWSRKVGGTPKMVTVSRDACGRYFAAFGCEALIEPLPMTTKSVGVDLGLASVVTLSDGFKSGAPRYIRRYARRLRKAQRALSRRVKGSHRWQRMRQRVARIQARIADCRRDFVHKLSFRVVRDHGLIAREDLNVKGLMRALRLSKSAADASLGELVRQIDYKAQWHGRDVIKIGRFARSTGVCPECGAVGQRLPLNVRRWRCECGAEHDRDIAAAQVILLTAVGCTVEARGAVHQPTAVA

SEQ ID NO: 27094 - protein, 334 aa, Lyngbya sp.
MFGKCVKKAKLQSHIAKLRNRNKFWQLVGSQAVQNICERIDRAYQLFFKHNKKGFRPPNFKKVKKYKSFTLKQAGYKFVGGNRVKIGSRVYQFWNSRLIEGKIKTVTVKRNPLGELFFCVVVDNNSTPEIKSETGKIAGFDFGLKTFLTCSEGFLVQSPQFLKQAISEVKKASRSLSKKRKGSKNWEKARKHFVRQHGKVVNRRRDWFWKLAHQLTEQFDVLCFETLNLKGMQKLWGRKIGDLAFAEFIEILEWVATKKGKQLVFIDQWFPSSKTCFHCGHVLEKLELNTREWRCPSCSNVNGRDENASLNIKRVGASTLGLDSVRQGLPASVV

SEQ ID NO: 27095 - protein, 440 aa, unknown
  TnpB Polypeptide
MQRLQAFRFELMPNGQQEQQMRRFAGACRFIYNKALALQKERYERGEKKLGYAELCKLLTEWRKSTEIAWLARVPIHPLQQKLKDLERAYSNFFDKRADFPRFKKKGRSDSFRYPDPRQIKLDQGNSRIFLPKLGWLRYRNSRKVLGDLRNVTVSRGDRPVARTGKWFVSIQTEREVERPRPKGGTVGIDLGIAHFATLSDGTFYPPLNSFKRHEVALRKAQPAGCRGDSPSRPYFSNNWKKAKARVQKIHVRIANVRRDFLHKVSTAISKNHAVVVIEDLKVGNMSRSAAGTANAPGKNVRAKSGLNKSILDQGWYGFRRMLEYKLSWKGGRLVAVPPENTSRTCPGCGHVSADNRQTQARFACVACGYENNADVVAAINILFRGVQQLRDEGQDTANALVGMQVDWLPVSARMACGSNCIGSRKQEPAETTARGAIRV

SEQ ID NO: 27096 - protein, 411 aa, Clostridiales sp.
MEQTLTAKLKILPSPSETELLMDTMRTYSEACNYVSDYVFRTHELDLRSLNSELYYAIRQKYSLPSQMAQSVLRTVAGRYKTILTSEKRWIRPKFRTPQLDLVWNRDYSLVSGRTLFSVNTLNGRIKVGFCSCGVNLDGRFGTARLVYRHGKFFLHIPITNDIEEVPLSDIRHITGIDRGIRFLAASYDSDGNCSFYSGRKVMEKRAHFKMLRKELQQVRTPSSRRRLKAIGNRENRYVRDVNHVISKALVSQNPDNTLFVLEDLKGIRSAAERVRVEDRYVTVSWPYYDLEQKLIYKAERNHQKVIKVNPKYTSQRCPVCGHTAKANRDKRNHIFRCGQCGYTSNDDRIGAMNLCSMGIQYLAQSQGSTSSLTGSQSAGPDVTAAAEAVTNMGGIMPTTMGQSQAPASRS

SEQ ID NO: 27097 - protein, 437 aa, unknown
  TnpB Polypeptide
MAVRKSKTAQRRERVSSSTQQRTIVLPLPLTREQYDPIRRSAEEYNRMWSSLISWCDSNKTVNRTRMQKENYRRLRDRHPTLPAQFACIAMRDAAGAMRSWNSNHPKRRWNMKASRKALTINYDMRVMSLRGNLLTLSVAHGEKRVRLRLPDLPEWFTARYPEGKPNAAKLLLGDKPEDTRIALIYRISDPQPLADGDVLGVDLGQHSLYMDSRGGETPYARVQGAKRRYAHNRKTLQEKGTRSAHRRLKAMKQREERFIRDVNHQASKRLANTQGVQAIAFEDLTYIRRQASKRTKTGARRRNMLNQWSFSQLQEFTAYKAARNGIRILMVDPSYTSQRCNRCGYVDARNRNGARFDCRRCGWSDNADHNAAMNIRDRALSSLAEEEHTSTDRPVDRSQSTDHDGWSAHDDLPTPTGQGRVMGTTLTSKPRCSSSR

SEQ ID NO: 27098 - protein, 379 aa, unknown
  TnpB Polypeptide
MEQTLTLVCKLQPTPEQVAKIEATLKAFADACNYANEQVKPQITSKTTIQNMVYQDLRSKFDLSANLAVRACARVGANRKTAKAKGKPVKAFKPTSADYDARIFALRDKDWSASLTLNGGREHIKLQVANYQMGKLKGRCPTSAQLCKHRDGLYYLHIQLTDIAPEPIKFNKVIGIDFGRRDIAVTNHGDKWDGKQIKETRDRFSRVRASLQRKGTKGAKRALKRLSGRERKYQTWLNHTISRAVITDAKARNAIVAIENLTGIRERTNQKPRNKTERRRSNSWSFYQLRTFLKYKGIAVGVEVIAVPPAYTSQTCHHCLHIGLRSDKVFKCGNCSWHGDADFNAANVISLLGGAFVSLPERSVLACFLNKPQARAKAP

SEQ ID NO: 27099 - protein, 401 aa, unknown
  TnpB Polypeptide
VLTRRGFRYRIYPTPEQETRLRQWEGALRVLWNLAHEQRLAYLRRHTKMPTAFDQINELTALRADVPWMADVPRNVSAQLLVDLDAAWQRCFFRLGRRPRWKKKGRDTINLTEPHSKGFRLTSTGVLFPKLGELRAVLHRPCVGVPKRCTIVREIDQWFVSILCEADLPEPVLRPEPVVAIDRGITHLLADSDGVLVPNPRRLELALKKLRRAQRVVSHRKKGSRRRERAKTRVARIHRKIRRQRTHVLHELSSRYAKSHGVVVVEDLNVKGMVKGGLGRHLAGAGWATFCSMLRYKLEATGGTLVEVPAHYSSQTCTACGIVDAASRSGEVFCCVACGHEAHADLNAAQVLLSRRNGGGAGRGGFPEVRGPAKRQLRVVKRGLPTGQGLGLLKSPGLQSG

SEQ ID NO: 27100 - protein, 420 aa, Xylanibacterium sp.
LSIRARLYPTPAQAEAMVVHCGHARFVWNLAVEQSNMWRRDKGPTPNYVAQAAQLAQARREHAWLGAGSSVVQQAALRDFDRARQSWWKNPHHFSRPTWRKRGVHEGFVIRDLTVTKVNHRWATVHVPKVGAVKFRLTRPRAQVTAATSARVTFKAGRWHVSLVTPPPVFDRKPTGAVTGIDRGVANTIATSESVMGSIPGWTPGEQARYVALQQQLARQVKGSNRRAVTKGKIARLHQRLTDRRTDWIEQTTTTLVREHDLIGIEALNTRGMVRKPAPKPDPENTGVFLPNGAKAKAALNKTIHASCWGKFAKRLHDKAANTPAGAKTLVVEVPARYTSQRCHHCGHTAPENRKNQAEFRCVDCGHEANADTNAAENILSRAITLAAGQAVDPRPRRTVDGRNRGTTTTASTTRERKAV

SEQ ID NO: 27101 - protein, 481 aa, Xylanibacterium sp.
VRVVARHTTFQWVADPTAEQARALARHEGAARFAFNQGLRLHLNARHAAKDAVGDDVVRVPWTGFDLINAFNAWKKTEDAGRRFVVDGSGNVELEVTGLAWRAEVSAQVFEEAVVDLGKALGAWTASRRGKRAGRPVGHPRLKKKNPERGSFRMRNKTSQTKTGQRSTIRVGENGPRSVTLPGIGAIKVHDDTRRLRRMLDTGRARILFATVSRRGGRWRISLNIEAADLHPAAQHPARDDADHSGWVGVDRGLRAPVAAATADGTEVLRIDEAPKALRTARPVTRRLQKSVSRKVKGSAGRRAAVKRLSRHHERVRARRHHFLHEVSNLLVKTHDRLVIENLNITGMLANHRLAAAISDAAWGELAHQITYKQTWRGGQLLTADRWFPSSKTCSGCGDVKATLTLADRVFTCGTCGLTIDRDRNAAINLAAWGEQRHSQVLDPEARGQANNAHRPDGSGRRPRVDETSRDDVGTLTATAA

SEQ ID NO: 27102 - protein, 361 aa, unknown
  TnpB Polypeptide
MLKAYKYRIYPNEEQKLYLAKTFGCTRFIYNKMLADRIKSYEENKDLDVKQIKYPTPAQYKKEFEWLKEVDSLALANAQLNLDKAYKNFFRDKSVGFPKFKKKTNTNSYTTNNQNGTVSVENGFVKIPKLKSVIKMKQHRELKGLIKNCTISKTRSGRYYISILVDTENFILPKVDKKIGVDVGLKEFAICSDGYREPNPKHLIKSEKRLAKLQKDLSRKQKGSKNRNKARVKVAKLHQRIADQRADFLHKLSIKLIRENQSIVIEDLKVKNMQQNHKLAKAISEASWSEFRRMLEYKASWYGRKIIIAPSNYASSQLCSECGYKNEEVKNLALREWICPNCGVHHDRDINASKNLLKLAI

SEQ ID NO: 27103 - protein, 244 aa, unknown
  TnpB Polypeptide
VYIENGYIKLPKLKSMVRIKQHRLFDGVIKSCTISKTPSNRYYISILVETEIDQLEPIDKKIGVDVGLKEFAICSDGFRVDNPKHFRKSEKRLAKLQKDLSRKQKGSNNRYKARLKVARLHQKIADQRADFLNKLSTKLINENQVIVIEDLKVKNMVKNHKLAKAISEASWSEFRRMLEYKAKWYGREIIVADKNFASSQLCSECGYKNPLVKNLGVRKWKCPNCGVTHDRDINASINLLNLAI

SEQ ID NO: 27104 - protein, 436 aa, unknown
  TnpB Polypeptide
MKLTGDLKALENSIRIYRDALHFVIPVVDAHWDDVKDFEYSNQRMMYVEKLVHTTAKSQARYDFDGKFPKFPSYLRRAVLNLALGIVSSYRSNLANWEKEPKGQAPQLSLTHYTYPAYYKRDLFRNFDPVRQTVELKVFKNGDWVYETYKLKTSDCTYYQAHLTGKKQNVPIIQKKGRRFYASFSYEEKVELVKDESISKICAVDLGLNTDATCTIMDQDGTVYARTFISFSKEHDRLDTQLGRIKRNQKRGSRRNKRLWRSVAGISQDIADKTVKAILDFGNEHGVDVFVLEYLDFKGKNIVKRAHFWRYKRIYKVLAQRAHQTGLRIARVNARYTSRLAFDGSGWSKRGREITPETPYAEMQFPTGKTYNADLNASYNIGARFFIRHLLKTVTVTQRLALEAKVPQVAKRSTCTLSDLINLRSEFVALASKTQA

SEQ ID NO: 27105 - protein, 514 aa, unknown
  TnpB Polypeptide
MRAQTPSYVVSTKIPLPESIAKRLEKSLRISNSAYNEALSFGLKRFEALKRNSYYQELLEARRLALKGIAQLEKAKKTAKGLKQQVKCYNKMLSELRKSYSLTEFGLSAHLSQQRRKLSSPYQQFNAGEIQVIAGQAYKTLEKVLFYQIKPHKVRFRSKFDLDVSFRNRVNTTGTRLEPSDRKDMAYRLYIHKTSTFVDIPVKAFNKYQQLSLLRSEKIKYVQIIRKTIRGKKVYYLQIVCQGFPPSKVTKGEGVVGIDPGISTVAFASPSEVALVDLVPKNITQKEKLLKRLDQRIERSRRVNNPECYKENGTIKNGARFKRPSKRQMRLRNRRRKAYRALTEERKKLQGQLVNRIVSQASHIKVEELHVKGLQKRSRDIRINPKTNQPYSKKRFGKAIFRAAPSTFKVALETRAFQLGIGVEVISPKEVKPSQYNHITQTFEKKPLSTRVYDLSDEYPGVQRDLYSAFLIGHIENGHYQQEQLNQDFPDFYDQMKAFLQQPIETKRLAWYLN

SEQ ID NO: 27106 - protein, 412 aa, unknown
  TnpB Polypeptide
MRSQKLRLKLTKEQERLAWWYSKVSRNFWNLLVDIDKRNNKGEFDEILSKNGNKTYHSNFYDRDIYCLNSSDYLNLAKMVVADNYEKDAESWSWYYQPNQFFIYSFLSRELVKIRRQNKGRLNFRSVHKSQPNFSVRCDTFPSKKRLSRIYLKENGKLQIPTLGEVKYGSVRTDSDLSGKKQVAKVSFDGKYWYLSYTEDVDTEVVDLPDYTDGVGIDLGIKTLATMSDGTSVPNIKTFRRVRILEKRLKRLQRKVSRKYRINQCNKYNKTKNIIKLERQIRLLYRSLRNIRRNHIRQFVSQLVKKQPQYIAIEDLNVKGLLKNKYLAKDIMNCAFYTIREQLIRKARERHIAVRLVDRFYPSSKTCSHCGSYKKDLKLNERVYHCLNCQTTMDRDFNASLNIARTDQYVLA

SEQ ID NO: 27107 - protein, 365 aa, Proteobacteria sp.
MRKMMQYRLYPTEAQTAALDDQLGEACRLYNAALQERREAYQRGGLSLHYYDQANQLKDIRAAGNLGLANFSASQDVLRRIDKTFKAFLRRVKAGASKPGYPRFKSRRRFDSYTFPSWGDGCRLTAVGRLYLQGVGHLQVTWHRPLEGQVKTVTVKRQAGTWFVCFSIAYEGEALPGTEARVGIDVGLTDFATLSTGETIPNPRYYRKAQGTLRIAQRRVARRKRGGRNRRKAVVLLQKAHAHVQNQRADFHHKTSRTLVDTYGVIAVEDLHVKGLASGMLAKSVHDAGWSAFFNKLAAKAEAAGRLLVKVNPRGTSQTCLCGAPVPKTLSQRWHECAACGLSAARDHVSAQLILGLGLSLLGLT

SEQ ID NO: 27108 - protein, 380 aa, Ruminococcus sp.
MLKGYKIRLYPTKEQEKLIWEHIHASRFMWNYMLNVQQENYKNGGKFITDFSMHKMVTPLRKEEKYSWLQNVSIHMLQRTCSDLAEAYKYFFSGQNGYPKYKSKKNAKSAFPASSDNFYFKNNIVHIQKLGKIKYKSDFSFPYGKTCRYYNVRITFKRGKYILSFSKECESQAPKLNESFAGIDLGVKELAVVACNDKKYVFHNINKSKRIKNIQSRLCFYQRCAFRKYEYSKEKNKGQYVKTKNIKKIEKRISDLYARKANILDDYTHKVSKSIVSLLPSKITMENLNVKGMLKNRHLSKSIQEQAFYKFICKMKYKCEWNGIEFVLADRFFPSSKTCSNCGAIKKDLKLSERIFVCPECGFSIDRDYNAAINLMKYTV

SEQ ID NO: 27109 - protein, 222 aa, unknown
  TnpB Polypeptide
LPKTGESVGVDFGINRLATLSTGEKIANPKHGAKWQRRLAFYQKRLARCQKGSKRRAHVKQHVARLHEKIGNSRTDTMHKFSTSMVQRFDVIYIEDLNLRGMLKNHSLARALSDASIGQAARMLEEKAERYGKRVERIDRWYPSSKTCSACGHIQESMPLSVRDWTCPSCDTRHDRDVNAAVNIMAVGQTVSAHGGTVRRSRATASERKSPRSANLQASTSG

SEQ ID NO: 27110 - protein, 377 aa, unknown
  TnpB Polypeptide
MIKQKTYKLTVKQKSYKFRLLPNLEQRILFEKTFGCSRFIWNQMLADKIAYYKETGKNLKNTPAQYKDEFPWLREVDSLALANVCLNLNDAYKRFFQSKFGFPKFKSKKTAQSYKTYSQKGLITILNGKVKLPKVGWVKLKLHRQPKGVIKSATISKTATGKYFISILCEEEIVPLPKADSNLGIDLGLENFAILSTGEKIGNPKFFTSLSKKLAKEQKILSRRGLLAKKKGMKLSESSNYQKQKLKVARLHEKIVHQRKDFLHKLSTNLIKNHDVICIEDLASRNLMKNHRLARAIGDVSWSEFVRQLHYKADWYGKKIVTISRWFPSSQLCSSCGLSSGKKPLSIREWTCESCGTHHDRDINASLNILKEGLSLV

SEQ ID NO: 27111 - protein, 257 aa, unknown
  TnpB Polypeptide
LQNGKLKLPKAGWIRIKQHRSIDDSYILKGATVSQKADDKYYVSLLYAAEEPEYEIRPVKIAIGLDFSMSELYVDSNGAHADYPHFFRMSQEKLAREQRRLSHCEKGSSRYMKQKKKIARLHAHIARQRKDYLHKESRKITNFYDLVCIESLNMKEMSQDSRFGKSVHDNGWGMFTDFLSYKLERAGKKLVRIDKWYPSSKICSCCGKLKKDLKLEDRMYSCTCGNQMNRDENAAINICREGLRILGVELDTERKIS

SEQ ID NO: 27112 - protein, 375 aa, unknown
  TnpB Polypeptide
VRKTYEYRLRPTPAQERRLVATLDACRFVYNWGIEDRRNLWNYCRVSANFYDQSDYLKSLKSANPWLQEVHAHPLQEALRRVERSFDGFFLRVKKGEKPGYPRFKGKGWYDSFTFKEWENGASLDGKRLFLSKIGRVRIHLHRPLEGEIKTCTVKRKVDGWYALFSALLPDPKPSGITNPVGIDVGLESFATLSTGEKIENPRPLRKNERELRIAQRRVSRRRKGSNRRRKAVRHLRLAHLRVQRSRRSFHFTQAHRLVKRFNPIFVEALKIRGMVRNHSLAKSISDASWGQFLGILSHSAESAGGASIAVEARGSSQECAVCGVEVRKSLGERVHRCWNCGSLEDRDVNAARVILRRGLGRPVGEGACLRRLGN

SEQ ID NO: 27113 - protein, 326 aa, Paenibacillus sp.
MHVQMTFQFRLYPTSEQEQLMNRTLELCRKLYNRAKEQRETAYKQEGKTITYAMQQNELPAFKKEFPEYKNVHSQVLQDCLQRLDDAYQRFFRGEAGYPHFKSADRYVSFTYPQPGAVDKTFAKPGYVYLSKIGVVKMNAHRPFDPANVTQINVKRYVDRWMVNISVKVPDAEAVQTAESAVGIDVGLNTFAALSDKTKVDNPRYLRKAEKQLKRKQQQLSRKQPASCNRKKAKHKVAKAHQKVARQRKDFLHKQSHRIVRDHDLIAVEELKVRNMVRNRRLAKSISDAGWRRFITYLSYKAKRQGKDRDIVSAKIILQRALEIPA

SEQ ID NO: 27114 - protein, 313 aa, unknown
  TnpB Polypeptide
MTKQNKAFKFRLYPNKEQKELLAKTFGCVRFVYNKMLTERKETYEKFKDDKETLKKQKLPTPAKYKKEFPFLREVDSLALANAQIHLQNAYKNFFEGRAEFPKFKSKKHKQSYTTNMVNGNIKIEDSHIKLPKFKKPIKMKQHREIPAEYKIKSCTISKTKTGKYYISILTEYEKDIRPVKIQKVVGLDFAMDGLYVESEQGEKANYPRYYRQALDKLAKAQRILSRRKKGSARWEKQRLKVAKLHEKTANQRRNFLHHKSKELATNYDAVIIEDLDMKGMSQALNFGKSVHDNGWACSPLSFSTNWKNRGRN

SEQ ID NO: 27115 - protein, 198 aa, Bacillus sp.
MFETGIDVGLKEFATLSDGSVIHNPKHLYQLEEKIKREQRILSRRTNGSSNWRKQKIKVAKVHEKIANAREDILQKITTMLVNENQVISIEDIRVKNLLKNGNLAKAISDVSWSEFRRMLTYKCEWYGKTLVVVGSNFASSQLCSECGYKNKATKNLAVREWTCPNCKAHHNRDHNAAKNILAEGLRLFSEMKVTQAA

SEQ ID NO: 27116 - protein, 134 aa, unknown
  TnpB Polypeptide
MLANRRLARAVAGQGFGQVRRMLGYKTGREGGPLVTAGRWYPSSKACTGCGWRRPSLTLAERTFACDACGLVMDRDENAARNLLALAASGAERLNACGGTVRPGTAGHIPVKQEPGTSLAGQAGTASRQQEAAE

SEQ ID NO: 27117 - protein, 372 aa, unknown
  TnpB Polypeptide
MKRIIQIKLLPKAEQAAALEETMRRFNAACNWVAEKAFERQLANSYALHKLYYYEVRETFDLPADIAILTFAQVASCYKRDKSKQVSFRPLAAIPYRKGAFRYKGLEHLNIKTADGRRHDIPMVMGDYQAEQFGNVKLFAELVRRKDGTWFLMATVEHEPEPPCDPDDFLGVDLGVENLTTDSDGELHTGEDVEAVRVKCQTLKQALQSAADLAANHRRRKRIRKKLKRIADRESRFRRNTNHTLSKRIVAKAKDTRRGIALEDLKGIRDRIRFRKPQRNRMGSWGFDQLRQFISYKAKAAGVLLRIVDPEYTSQMCSQCGHIESGNRSSQSRFCCKQCSFELHADCNAARNIRAKAFVNAPKVSAYSAAAG

SEQ ID NO: 27118 - protein, 399 aa, unknown
  TnpB Polypeptide
MILVERHIIKQSHPHWQQIDQLSFLSKNLYNAANYICRQHFFATGKKYSLTDLYHLTKDCVDYRALPTKVSKQIIKRLVSTWTGYFEAHKEWKKNPSKFLGEPRIPGYKDKTKGRNVVIYYHESVYKAELKLGICHLSMSDIQIPTKVDNVVEVRLIPRPTCYVVEIVYYKQEEEQSTSEYVAGVDLGLTNLVALTSNKGGFTPLLINGRPLKSVNQFYNKTKAKLQAQLGEKRKSSKRIQSLTTYRNNYVDNYLHNTSRTIVNLLRASDIGTLVIGKNNNWKQNINIGKKNNQSFTQIPHARLIDQITYKCQLAGIKVVVTEESYTSKTSALDLEQPVKHSTYLGKRVKRGLFESSNGTKINADVNGSLQISRKVFPNAYTAEEIVSAAVAPLKVLPL

SEQ ID NO: 27119 - protein, 279 aa, unknown
  TnpB Polypeptide
MPDKFEFNPDCYDVRLIYRKGQIEVKISSEFETPQIVTKPVSQGTIGIDCNPDGLAIVETNSQGQLVHHHYEKEQRIRFAKSEKQTYDIRQLAVRVVLFAFLTKKPLVLEELRFRAGKQKNKKFNRMRSNFLHRQMLEAIKSRAVKMGVEVVEVNPAFTSVLGKLKYQDMYSLNVHTAAALVIARRGMGYLESQRFTDKLTGRGGSRVNLEGRSRKHTLRPRAWSWLRDEFLRPKNSWAHSPAIGSCNIAGMHGNPGEIPGGESYPITGRVRHSVSAER

SEQ ID NO: 27120 - protein, 410 aa, unknown
  TnpB Polypeptide
MKVIRSTKCTLKFSTAAKLATLEMVLAEYGQVTNFFIQYLWVLPKVPSKSALLKPIVDLPKTWLSARLRKVAAREAISMIVAAKRRWKDKAVQPTHNGKSMYVSSTIAELHEAQDATEFDYWLKLWSIGRGIIFHLPIRLHQHYHKLAARGKRLNSYVITAESVTFAFETDTGLKRTEGHPLGVDTGIKALATTSDGLQLGTDIQPMIERINRCKHGSKGQKTARRALKQRMDEVARDLLEIPDIKIIVVENLRGLNHKSRVKRRLTKNMRRSLGSWAYRYWLGRVQGRCEDNRVVFKAVNPAYTSQRCPECGYTERGNRNGEVFKCRKCGHTDNADVNAARNILTRFRWGPYGAPFKPSVKVMKGTVVPDSFVLGTVQSPHGRIRLHCSGRGHLSFQGGSNGESSSADA

SEQ ID NO: 27121 - protein, 463 aa, unknown
  TnpB Polypeptide
LKVTRILQADVPPALLQVCRATRFLRADVWRRYGALKNVGKSALAIRKEIVAGGIYVTLAIDGTIRNETTKDVVNDILFYKAAAKGKVRKAIWQRTDNEMERKRLYTLLRSDAWMEDPFLHRQMRKHFKHGVSHTKNQFIVRSDKFKIEHVNGYLTIVIQIARKYGDDIVLTTTSNGTSVDLSSCNLRIIVKGGTTEIHYSVDKSSGRPHGSRTLGVDKGYTEAFVDSDGEHQGEQFGAVMTEYSDKVSKTGSARNKLYALEKKHRQSGNSRKADNIRAHNLGCKKIDARKRLAQTRLRGVAFKAAHAIVDKAAVVVSEDLTSPIAKKRPWKRFNRRMSGWAKGALAEALDSVCTQREASHELVNCAYTSQMDSVTGLLQGKRVGDKFYRINGDVIQADHNAALNVLARLSDKDIGCFTPYQEVKRILLARSPAELTVKRHELQSRGSQPCADKPSRSGVINA

SEQ ID NO: 27122 - protein, 398 aa, unknown
  TnpB Polypeptide
MQLRYNYRLYPTPGQRAALARAFGCARVVFNDGLRARQEAFAAGLPYVTDAELSARLTAAKASPERAWLGEVSAVVLQQALADLGTAYRNFFASVTGKRKGPKIAVPRFRSRKDRRQAIRFTRNARWQITAGGKLRLPKIGDVLVRWSRALPSGPSSVTVIADAAGRYFASFVVEAGDDPLPQTDTEAGIDLGLTHFAVLSDGRKVANPRFLRRAERKLGKAQKALSRKVRGSSNRAKARIKVARVHARVADARRDWLHKESTRIIRDNQAVYVEDLCVAGLGRTRLAKSVHDAGWSAFTAMLEYKARRHGRTFGKAGRFEPTSQVCSACGVNDGPKPLSVREWTCGACGTVHDRDVNAARNIVTAGRAGTLNACGGTVRPGFAPAGPGETGTRRSAA

SEQ ID NO: 27123 - protein, 363 aa, unknown
  TnpB Polypeptide
VWNRTLAARYARWHTERKGTSYAQADRALTIMKRDPELEFLNEVSAVPLQQALRHQEKAFRAFFEKRARYARFKSRRGRQSASYTRAAFRMRAGELWLAKMGAPLRYVWTWPDIDPAALDPTSVIVVRDPAGRWFVTFRVDIPGPEPLPATGESVGVDVGLTHFAALSTGEKIGHPKDWERHQRRLERYQRRLARCQRGSRNRAKARARVARAHARIADARRDFLHKASTGLVRGFDMIAVEDLNVPGIVKNRRLARAISCTGWGEHRRMLEYKADRYGRAVAVVDRWYPSSKTCSACGHLLATLSLGARCWTCPACGTRHDRDINAAKNILAAGLAVTACGGDIRRTGTPPARLPVNRNPDL

SEQ ID NO: 27124 - protein, 661 aa, Streptomyces sp.
VQQRGQGLVSRKLPLADGETSRTACVRALVRSGVDEKTGEVLTSAALAERVGWCADLVAGMTEALLAEHWNTADVDTLAYGEDPGGRQLPSNAWMALRRLGWTVCAPEGVKVNDRIVRMAQETAGRSLRSVKWRADVCAGVLASWPADPAKRTPDEWEAVRGAIPGGEHLPSSIIRSRTRQIAAYLRKHGRLPAHLFELESTSRVARMLLLSACDGQQATIERSDDGQRALLRLQLPTRPDPQKYADWTWVACPVTLPPTIPANAVLHLPTLRIVRDKVRADLAYTYPVPKTRRTGHTVALGVDWGLNTLLSAGTAQLHQDGRITALGAGAQFRAAGVLAKQCRLRRISERLHVKTDHYARLADPALDGKAALLAEEIQRVCERRSNLNEALAWSAARWAVDQAITAGATVIYLEDLRSMEAGGMGRTHNTRMSQTVRGQIVVRMRHLAAETGIAVVTVPPRNTSRHCPHCLTPLRHRKAPDRPTVSGWKWAICPNQSCGWQGDRDQGAWRRIAARGLTHQTKTVTDRAIGAMVIRAVVNKLEAKAIITTVPISRKDRSKTGPTRPRTNHLAPRRRKVPSPAARLCGPAGQRPEGHAPTDRTPLPRAAHRHQSVITTSTPTTGHRPRGAALGAGFHLHAHASPPRWADPTSDTMSRMGSLS

SEQ ID NO: 27125 - protein, 476 aa, unknown
  TnpB Polypeptide
MQQTVRQKSLPLNNEKWARITETAAAYARQKDAFLVEYGHVKYLHYLGEKRKLRDKLVSAGFVSPFGLQARQWKLALEDALYTLKRQWEAAIAEVKGRLYRHEGLTDEEKHYANWLLYKHEKHGRDWQRIQSIFTGEDVINEEIKLDVEGRTRARKYLKRVFCRVPGKKPRVKKTRSFTIDQQMYRVFATEKRQYIAVATLNPGKRVVIPLAGIYAIKGNLRVVLLPDEKCVEIHLTREPRTYPPGEGEAGIDLGVTEVFTDDTGRKYRSEYGEALQRISDHLLDKGRKRQKLWALYRKNLEQDSSKARRIKEHNLGTTKQRKQNRKYRACCENEINRAFNELYRERRPRIIAYEDLAHLRGKAKNKGLSRKVSNWQRNTIKKRLEYKNHIYSVTDPGPTNAAYTSQQCPQCGWVDSRNRHGDTFKCRKCGFAAGADHVAALNLKARLFDIEITCYTPYRKVKEILLQRYQQKQAK

SEQ ID NO: 27126 - protein, 403 aa, Haladaptatus sp.
VSGPEYFRRTAVTRLAVEADDHERLLSMVREWKRGCQIAVNVAWGVCHTRNEVQQLAYEPLRERTELGSQHAVLATHRAAEAIKRALERSDDAEKPEFTSPTVVYDSRTLTLFDDGNISLTTTGDRVRCRLVMPEGSYQSQYLNDDRWEPAKSTLHYRDGNFDLHLGFRRPRPEVELPTEDSTVLGVSLGVENLAVTSTAHFFSGGELAHRHAEFADLRADLRETDTRSARRTLRRSSERMGNFARNELHEVAGGIVSEAEEHGCSVIAFGELEGTQETLEKATRFHRRTFERLFEFVAYRAAERDITVVQVNPEYTSQRCTSCGFTHPQNRDVENNRFECLKCGNEANDDYNAAKNVGFRCIRRGPLSSRGVGAKYCALASGRVTPDGEFVPNEELEAVQKP

SEQ ID NO: 27127 - protein, 420 aa, Moorea sp.
VEKSWFSANLKVVQNPNLPQIFSESFMSSLAGFTDSESTARKSKKIRLFLNPDQRTLIRKWFGVSRYVFNKTVKILQAGVVKANWKAIKTGILNDLPEWCKEVPYQIKSIAIKDACTAVREAKKKYKKTSQINRVRFRSRKNPIQSCYIPKSAVSAVGIYHTKLGKLSYSESLPDDICDCRLTSNNGNYYLVVPHKVTKKKTENQGRVVALDPGVRTFVTFFSETSVGKIGHRDFSRIQRLCQHLDNLLSKISKAKRGQKRRRRKAARRMVIKIQNLINELHHKTARFLVDNFDVILLPTFETAQMSKKGSRKIRSKTVRNLLNFAHYRFQEFLKHKACETGKTVVDVCEAYTSKTVSWTGELVNIGGSKTIKSKIDGLVMDRDINGARGIFLRSRSVAYGHALGDTPWLRNQLALVSQD

SEQ ID NO: 27128 - protein, 461 aa, unknown
  TnpB Polypeptide
MQKGIKFRIYPNKGQKAFIHQTLGCCRFIYNRGLAMRKEGYEKGEKIGYGQTSAMLTELKKQEEFAFLKEVDSIALQQSLRDLDRGFVNFFQKRASHPTFKSKHNHFQSYRTVNQKDNIRIVGRYIKLPKLGYVKVRQSMEVGNIHHVTIEHTPSGKYFAVLNVEFEPEPRPNQGGTIGIDVGIKTFYSDSNGNTVANPKYLERSMRKLVREQRRLSRREKGSHNRDKQRIRVAKVHEKVTNQRNDFLQKQSTMLVCENQTICIEDLHVKGMIRNHKLAKSIASVSWAKFFEMLEYKAVWYGNEIRKVPTMYPSSQTCSSCGYRNPLVKNLRIRIWECPGCHAVHDRDTNAGINILKKRTAAAVGIKIRKLYRRACGNSINIACGHRVRHCSTVRYLPMQWWKKQESPCFSCGECQHSYKKWKGDFYLWQLQRQKQNMDRFMVCKKTATRYFAAFRTQSRR

SEQ ID NO: 27129 - protein, 416 aa, unknown
  TnpB Polypeptide
MYLTIKQQVKHLSKEDYKSLRELCHVAKNLTNEAIYNVRQYYFTEGKFLKYEKNYTLLKNSNNYKVLNSNMSQQILKEVDGSFKSFFGLLNLAKQGRYAFKDCKLPHYLPKDGYTTLVIGFVRLNGNKLILPFSNSFKKTHKPVEITIPPVLLDKKVKEIRIIPKANARFFEIQYIYEADCIQRNLNTSNALALDLGINNLVTAVSNTGKSFIIDGKRLKSINQWFNKENARLQSIKDKQHYGKKTTNRQKAIARDRNNKVNDYMNKTARIIIDYCIANDIGTLITGYNVTFQRSSHIGKQNNQNFVNIPYGHLRDKLSYLCELNDIVYVEQEESYTSKASFWDKDIIPVYNNDNPKEYAFSGSRVYRGLYKTSDGKLFNADVNGALNIMCKSSVVDMSILYGRGEVDTPVRIRIA

SEQ ID NO: 27130 - protein, 328 aa, unknown
  TnpB Polypeptide
LKKTQRYAAWAIVPSQAIQDITDRIERAYQLFFAHAKKGKVRPPAFKKRSKYASITLKQAGYKILDGNKIKIGKACFKYFKSRDIEGTIKTLTIKRDALGDVYLFFSCEIEDVSPCRVMTGKIAGFDFGLKTFLTSSDGTKIDSPLFFKEGSAKIRQTSRKVSTKKRGSNNRRKAKLHLARCHKKIAHQRKDYHFKLAQKLTEEYDYLFFEDLSIKGMQQMWGRKIGDLGFSDFLSLIEYRGRCNGAQVHIIDKFYPSSKTCHVCQKVVGELSLEDRIWKCPTCDAVHDRDINAAINIKIVGASTIGLGDVRPMQIGYRCLNPESNVL

SEQ ID NO: 27131 - protein, 489 aa, Streptomyces sp.
VDNGVGWFGSDDGDSFDLRARCAAALDHDSEQWAKRTLTDEASSRWAGSITKAGHDQWALAHRGHLAHIQSLETGVHTITHRLSRPIGEKGTKNAPGGYRSRHEWFAKSRRLHVLSDRLEREQADRAAGCVHVVRGGKRLLHTRHDLDAAGMTETAWRQRWQAERRFLAADGESGKRFGNETIRVTPDGEVSIKLPAPLAHLANAPHGRYVLTGRVRFKHRGEQWRDRITANRAVAYRLHEDTARGRWYLTASFTIPPVQTVPLATARARGMVGVDTNADHLAAWRLDAHGNPVGVPLRFGYDLTGTADHRDAQVRHALIRLLYWARRHGLAIAVEDLDCTAETTREKHGRRKRFRNLISGMPVSKLRARLASMAAELGIPIVAVDPAYTSKWGAQHWQKPLTTKTRKTTRHEAAAVAIGRRALGHPIRLGVPPRLLRHWGRTAPPHDDQSDRRGHRTIQARPVASEGEGTRPRSSTTFGRLSCIRTRA

SEQ ID NO: 27132 - protein, 388 aa, Saccharopolyspora sp.
LGVKIMVQVKLIPTPEQASALEATLRTVNQAANDVSRTGFERCGLRGEVKRLRSECYAELKDRGLGAQAAQHVIKRVADAYATLRGNIHHGNLGKTGSNRRVKAESKPIEFRLNAAHTFDNRCLSWNYDQRTVSIWTVHGRLKNVAFAASPSDLRTLIEHRRGESDLVFRDSKWFLLAVCEIPEQPEFEPRDGVGVDRGINNLATTSDATNYSGRRLNRYRRWQARKKAEIQAKRTRSAARLLKKRAKREARHAAHINHSIAKDVVAVAQRTERGIALEDLKGIRERVTVRRDQRATQSSWPFHQLGAFIAYKARRVGVPVIEVDAAYTSQRCPLRGCGHTERANRPTRDFFSCRRCGLAGPADVVAGVNVRDRARSAWVFVNMPQPT

SEQ ID NO: 27133 - protein, 403 aa, unknown
  TnpB Polypeptide
MTETSKLLKKGFKFPIYPNAEQRQQLEKVFGCCRYVYNRALAQSKAEYRLYTELRDKGEVMPSTRPSVDGYYFCSLLTAYRYDPESSWLREVSSVALQQTMLHLGGAYARFFREKKGYPNFKKKHGKQSFSLMRTGFGLNGNQLRLAKIEGTVKVAFSRELPSTPSSLTITRTLTGKYYVSFVCEYRPIKTAGVGIVGLDAGISALITTSAGEKIENLRATKRHAQKLKRAQQSLARKQKGSKNRTKARIRVAKVHERIRNVRQNHLHQHSRRLVNENQVIGMEALKVANMVKNRHLAKHIQDAAWGELRRILTYKVVESQHATLVLMDTYYPSSHLCSSTGERLDRKLTLSERSWVCPHCGQTHDRDVNAAVNIAKEAEQAANKHPYALRAGKILRANAYKA

SEQ ID NO: 27134 - protein, 457 aa, Crocosphaera sp.
MKYQTQKILLTGNIDDETHAYLLWCCEQSNKLYNSVLFTIRQDYFEKCNYKTWFDKNDNYRRSPRLRRVKISYAQLCKDFKDDVHYQAIGGQQGQQTIKSVVEAIKGYNKLLPMWFSGELKDTPRIPSYRKRGLYQVAFTSQNIRYEPLEGICYLPIPNSQRKELETPSIIIPSGVNFQSEDIAEVRVIPSNGKLWAEYVYKTQLLKASNLDYSQGLGIDHGVDNWLSCISTKGKSFIVNGRKIKSINQRYNRFVAKQKQGKSQEYWDEKLDQATHKRNCQMRDAVNKAARFIINYCLKHQIGNIVFGWNDGQKESINIGKTNNQNFVQIPTARLKNRIQELAESVGIVFTETEEAYSSRASFLDDDLVPKHGEKPKGYKFSGKRIKRGLYQTARGWLVNADTQAAANCLRKVATQLGINLARVGKEVLTLPKRYDLNRLTRSYRKQAEMWLQPIEA

SEQ ID NO: 27135 - protein, 380 aa, unknown
  TnpB Polypeptide
MESEADHMEKITHNIAYRFRIYPNREQEVLLAKTFGCCRFLYNQMLNDKIREYEASKKMLRNTPAMYKKAYPFLKEVDSLALANVQLHLEKAYKNFFRDPKIGFPKFKSKHRSRKSYTTNVVNGNIQVEDHRIKLPKLKWIRMKKHRDIPAEYCLKSVTISMEPSGKYYASLLYEKSDCENQAEEFDYENAKILGIDYAMHGMAVFSEDIQKENEGYFRKSEERLAREQRKLSHCVKGSNNYYRQKKRVALCHEKVRSQRKDFLHKLSHEIAEAYDVVAVEDIDMKAMSQCMHFGKSVMDNGYGKFRELLEYKLTWRGKKLVRVDRFFPSSKKCCKCGNIKKELKLSDRVYLCTCGNRIDRDLNAAINIREEARRMLLAG

SEQ ID NO: 27136 - protein, 518 aa, unknown
  TnpB Polypeptide
VLAKNQTYKAFSARPSCILDLNGELLDSASVMSQLASEVRDISAYATYVVRNDAKLAANLAQVTAVQPTTAGRRAGVTMPDFLVTGKSGRSRKEFLVQHNVVTAFRSWQERIKAIEGTSSKYVSQGWKRTVDASAPSYCDGDFINLGAVDKQYAVIENNPVVDGEIVLRMVVHGRWYRLIFSFDNNRFIEGKVTLPLVKIENGKPVFIFTVVTDNPIVQFSGDYTIGVDVGINDYATVVVRNSNTGHVVHETTLSQHVHSLWNSIKASERQVHALNKKADKLLHHRQVHMSAIDEAQFHREAASRKKRELAILAAQEIAHLSHSYGNAVVAVEDLSWIRNTMQNGRWNRGAFVQWLTHYVTQNGGWVVAVNSANTSQVCHLCNERVAHPTHKVSACPKHGEMDRDINAAANIAARAVSKVEKARKTRAKNRKLQPQARLKTPIARASLKYPGRDRTKSTSTPKRKKRTSKGVNLPISPARVNMTTVLADCGTYGVTETYQAAINQGNVAYKCKLCNLN

SEQ ID NO: 27137 - protein, 400 aa, Okeania sp.
MKARFKYRIYPTPGQKTKLAKLFGCVRVVWNDSLASCQEKYKLGENKPTNSKLQKLFITQAKKTEYREWLSEVSAIPLQQSLNDLNQAYQNFFKSTQGKRKGRPIKPPKFKSKKSKQTARFTKGGFKVGQDKVYLAKIGKLKIVWSRELPAPPSSVTVIKDSAHRYFLSFVVEIQPEILPKTDNSVGIDLGIKTFATLSDGTKVDAPKPLKKRIKKLRKLSKSLSHKTKGSKRYEKARIRVAKFHAKLKDTRTDFLHKLSTKIIRENQTVVLEDLNVSGMVKNRKLSRAISDLGWRQFRTFLEGKAEKYGRDFRVISRWEPTSQTCSSCGFKGGKLDLQVREWECLNCGSKHDRDENAAINILVAGGHSETKNGRGGKRQTSVKVAAASKTSTRRGVTAR

SEQ ID NO: 27138 - protein, 407 aa, unknown
  TnpB Polypeptide
MYNIDMIKKKAFKFRLSPTLVQRHLFCSFAGSCRFVYNRALSQRLEIYEKEQRSLSLFDQNNELAQLKKEEETSWLRDIHSQILQQSLANLDQAFKNFFRRVRQKEKPGFPKYKKRGFSDSFRYPQGVKVDDNRIFLPKIGWVRYIKSRDIEGRIKQTTIRKDGDHWFVSVQTEIACDDLKHPSESSVGIDLGVARFATLSNGESIEALNSFKSLEGKLALAQRELSRKKKFSSNWKKQKRKIGNIHRKIRNSRHDFLHKTSTAISKNHALVVMEDLDVQKMTESPRGTQENPGKNIKVKSRFNRSMLDQGWHTFRSFLGYKLEWLGGKLELINPKNTSRMCTVCGHVARENRPSQAIFLCKACGHEDHADLNAAINILRAGLAQFACGEKSQDSSLKQEPLAAVVS

SEQ ID NO: 27139 - protein, 431 aa, unknown
  TnpB Polypeptide
LRAADSGWEGSTSPRPPKEASATRPGRTRVRRVAGRCFVGTDRHAGTMRVAYRCRAYPDPAQQSMLNRTFGCVRVVWNTALAERRQLWNTQGRALSYAQTDRALTALKKDPDLAFLKEVSSVPLQQTLRHQHHAFTAFFAKRARYPRFKSRHARQSAHYTRSAFTMRGGELRLAKTNGPLRFVWSWTQVDVSCLAPTMVIVSRESDGRWYVTFAADIEAPMPLPSVGRAVGVDLGVRDFAVTSDGDKIANPRHLERKARNLARYQQRLARCQKGSANRAKAKAKVARAHRKVRNTRSDFLHRTSTQLVRCNDLIVIEDLNVCGMVRNRHLARAISDCGWGEFRRQLEYKCQRYGRQLVVIDRWYPSTKTCSACGHLLAELSLSVRTWQCPSCGTRHDRDINAAKNILAAGQAVTACGADVRHPGPPGCNRQ

SEQ ID NO: 27140 - protein, 410 aa, unknown
  TnpB Polypeptide
VLRTSTVLLKPTTGKELSGYAEQSAILWNMANYERKQAFLKHLKAPSYAKQCATFKDCDSFKKLGTCKSQALLSKLNEAWRSYYALLRLKKKNKLPAHIRKVSPPRYWKKNGKRQAKAFYVRNDGYHMNDGEISIAKDVKIPYRSGELWVGKQGRLEVLRDELSGKWYAHIPVEVQWKPPSRTDANRKASLDLGICNLAALHIEDTKPTIYSGRAVLSDWVYHTKKIAEKQSQLPKRKHTSRQINSVFRKRQRRLKHAINSMLRDMFERIEAQGVGTLVIGDLNGIRANANHGFQGNQKLHNFWVFNQIEKRIMELAEEYGVEVKKVSERDTSKTCSLCGKQHNGRIERGLMVCREKHRSINADVNGAVNILNVAVNRSPLVLSTDARETSGSRLMAEPMLLRWNYNEWQ

SEQ ID NO: 27141 - protein, 448 aa, unknown
  TnpB Polypeptide
MIYNRSIDISFDKKDQYILDGQSKICNWLYNQLLDLCIKDYKENNNSNKYLSGRNLRNQVPKFKTNKSFLETVHSSPLKNTAIRLKDSYKKFFNKDAKYPNFRSWKKKWFSLLYDEPNKGFKITGKEIKISLGKSESGKYLHITGMLKESLKINEGEKVNTFRLCKKQNTFYGVFTIEKRDIKIPRTKPKKWISIDPNHKNFFVGIDNEGTSVEFDKLKLIKHWDKVIDELKSQRDICKRKAKRKETPHGKFYYVPSKQWVRINRALERAYSCRREQIKQACYTIAHLLAKEYEKVVIGDYVPSTDTAIYDSMHRSMLNEEVIGTFRKITEWVCYKSKRQYKMQNEKHTTSDCCICKDREYKDPSVREFTCKKCGRKISRDINSCVNIALKAKLLSSSDYVGWDLSRPMYTAYWNPMLCRMKVAGTFSQKENVNELNQTGSSVWAKFI

SEQ ID NO: 27142 - protein, 513 aa, unknown
  TnpB Polypeptide
MPTQTAEPAPATKPTAIRSERYRVRFDHRGQAELCAQTAGANRFVWNLFLAYNDWRYRMARKARGYGRWTDFPEAQRPLLVDPSRTWQTMYKRFAMIRSGKYDREFQAFLASPEGTVYADQDLSWLRDLPSGPVRHVLKYLDGAYRRFHKAHAEAKAEGRFLPRRKSDGKPQYFPRRKGRQGRKPDGFTIPDKVRMDGDRLHLPRMGWVRLERGRNFPYRGCAPKTVRLLKEGTDRHPKWYATVAYAVPTARLKPAAKDGELGVDRNVRQATDSEGVVYSMPDTSTPDANIRRKERKAAKARARSRQSGQPLSNRGRRICGQLRKLHRKKRRRRENAAHQHSRQLADTAHVVVIEDLNTQGMTQSAKGTEEKPGTNVKAKSGLNREILASGWGRLERNLDYKAGLVVRVDPAYTSQTCAACGHISKENRRTQPKFQCMACGHTANADHNAAINILARGLPLTGQARGAGASARREAIPLGTSTTREHGRRGPSTPVRSGPPGPDCVSVVNSSI

SEQ ID NO: 27143 - protein, 370 aa, unknown
  TnpB Polypeptide
MEYSYKFRVYPTAAQAEQIQRTFGCCRFVWNHYLALRKDLYEQDGKTMNYNACSGDMTQLKKTLLWLREVDATALQSSLRDLDTAYQNFFRRVKKGEKTGYPKFKSKHHSKKSYKSKCVGTNIKVLDKAVQLPKLGLVKCRISKEVKGRILSATISQNPSGKYFVAICCTDVELEPLTSTGAVAGIDMGLKAFAITSDGVEYPNHKYLTKSQKKLAKLQRQLSRKSKGSKRREKARIQVARLHEHVANQRQDMLHKLSTDLVRNYDLIAIEDLAPSNMVKNHMLAKAISDASWGEFQRQLKYKAEWHGKKVVTVGRFFPSSQLCSNCGAQWSGTKDLSVRQWTCPVCGAIHDRDVNAARNILNEGLRLMA

SEQ ID NO: 27144 - protein, 358 aa, unknown
  TnpB Polypeptide
MHLTMQLKLLPTTEQADAMLRTMERFNAACDALAAVAFANQCANKVELQKLAYHDIRRDFGLGAQMTVRAIAKVVEVYKRDKTIQPTFRPHGAIVYDQRILSWKGADRVSILTNDGRAIMPWVCGAYQHARLDRARGQADLIYRDGMFFLYVTVDVGDVPDEGDPTEYLGVDLGQKNIAVDNDGETFSGALNASLRRRHARLRRKLQKKGTKSAKRLLRRRRLKESRFASNLNHRISKSIVRKAKDTGRGIGLEDLTHIRDRTTVRKSQRRAHHGWAFAQLRSFVTYKAALNGVPLVCVDPRNTSRECPECGCIDRRNRPTRDRFACISCSYSGPADTTAAVNIGRRAERHAAERRAA

SEQ ID NO: 27145 - protein, 330 aa, unknown
  TnpB Polypeptide
  misc_feature (10)..(16): Xaa can be any naturally occurring amino acid
VTSPPTIRRXXXXXXXYNHVKGELRGTQDQFDLLTQAIKHDGWHVGTAEALCRNGREELHVTVTNETAEVGEKTAAETVIGVDITEDCVALAALTEHGIEDSIVLDYPEIKEQRHRYFTMRKRMQEAGQTAFNDVFRDKEQQFVYDQLHTVSRRVVEWIQRLRFDSPVIVFENLTDMRDDIEYGTRMNRRLHSLPFAKLRDFITYKAAWRGIPSDDVDPEYTSQQCPVCGHTERANRHKKRFKCCECEHQDHADRGAGISVAQKWLRKQNNRNMPALNTLPQVQKWELQLRRQASGSVDDPTVVSDTVRGDQTDGIRGVSDQSTGRSSGA

SEQ ID NO: 27146 - protein, 467 aa, unknown
  TnpB Polypeptide
VRCLPRSYCAGSSRPPEDVPAFRPGRNPVPREAGRQGERQARSARLRRSYEKTCDYARMRTAYRCRAYPDAEQQAMLRRTFGCVRVVWNRTLADRRARWRAERRGTSYAETDRALTALKQDPALAFLNEVSSVPLQQALRHQHQAFRGFFAGRARHPRFKSRAGRQSAHYTRCAFSLRSGALRLAKTATPLRFTWSWPGVDVAALDPAMVIVCREPDGRWYVTFTVEAAGPEPLPAAGRAVGVDLGVTDFAVTSEGQRIANPRHLERRARNLGRYQRRLARCQNGSNNRAKAKAKVARAHRKVRDARRDFLHKTSTRLVRQHDVIVIEDLAVKNMVRNHRLARAIADCGWGEFRRQLDYKCRRYGRDLVVIDRWYPSSKTCSACGRLLAELTLSTRHWTCPSCRARHDRDINAARNILAAGRAVARGSPGDACGGDVRHSGSSRVQLPANQEPQPARAGIPVLQVGE

SEQ ID NO: 27147 - protein, 368 aa, unknown
  TnpB Polypeptide
MNKAYKYRLYPTEEQKEMFAKTFGCVRFIYNKMLADRLDYYKQTGKKLNNTPAQYKNEFTWLKEVDSLALANAQLNLNKAYSNFFSNRKHFRKPRFKSKKTGHSSYSTNNQNDSVRLEDGKIKLPKIGWVKLRLHRTIMENSIIKTVTISKTPSGKFYISILVEYENQILPIIPKKFLGLDFAMHGLFVASDEADADYPNFFRKAEKMLAKVQRKLSKKEKGGANRQKAKLRVAILHEKIANQRKDFLHKQAKILADKYDAIGIEDISVKSMAKRKKGGKFSFGKSVADNGWNMFINILKYKLLWQGKSLIKIDKWYPSSQLCHVCGYKNEETKNLSVREWDCPNCQTHNDRDKNAAINIREEARRIA

SEQ ID NO: 27148 - protein, 397 aa, unknown
  TnpB Polypeptide
LHRAIKIRLLPTNEQEILFLKSAGTARWAYNYFLEENEKTYKTWLKNGKIGKKNVSEGEIRKYINNVLKKTTHTWLKEVGSNVMKQAVKDANIALQRYLKGISGKPKFKSRHKSKISFYVNYESLVRKPNGFHGEKLGFVKTSSPLPKIPKNKKYANPHISFDGKHWYLSVCYEVKRQKVNLTDDILGIDLGVKSLAIVSNKDASKTYFYKNINKSVEVRRLEKKLKREQRKVSRKLEANIKSRDKKNRPLWIRPLRECKNIEKQHRRIRLIHKRLADIRSNYLHQTTSEIVKTKPSQIVMEDLNVKGMMKNKHLSEAIAKQKFYEFKRQIKYKAEMYGIKVIEADRFYASSKTCNHCGNIHKDLKLSDRIYVCPLCGNTLDRDLNAAINLANYKTA

SEQ ID NO: 27149 - protein, 354 aa, unknown
  TnpB Polypeptide
MQTVTQVVKVPAVFKPRLDGLLIGALEAVKLMLSDRAKSSSKFYPGIPCVVAKSLITKYQRNPRCRSVKRLAMPICGDKGKQIKLVPEGFRIPAIFGKAVIPAEWRHPVGGHIRQAELLLRGGEWFVAISYNTLGAKPIEAVGCVGIDRNSVGNVAVLADPQTGYVEHLGFNPARTKEVWRNRRKNLQKAGKNRLVARIRRKQGRRTKLENHIVSKRIVDYAASHCLAIAIEALKGVFSKGSKIKRFCQKSQWSEAQLETFTRYKAALRGVPVISVPAEYTSQECSRCGAIQKPDGKSYHCGACGHIEHRDANAGFNIALRGNGILSGGEPQDSVRLRRGLLVAPSLGNVYATA

SEQ ID NO: 27150 - protein, 356 aa, Pseudomonas sp.
MKSFKTLRVRVRDKHAAQLRKASRAVNFVWNYVNELSSRAIRERGRFLSRFDMHPYVKGSSKVLGLHSHTIQSVTDEYVNRRKQFKKRRLHWRCSEGPRRSLGWVPFKTGAAVWRNGQILFNKQHFQVWDSYGLAGYSFRSGRFNEDTRGRWYFNVTVEIECTLSPGQDTLGIDLGLKTTATCSDGEKLESGQFYRDLEAALGIAQRAGKKARVKAIHAKIANRRKDALHKFSSALVARCGLIVVGDVSSLKLVKTRMAKSVLDASWGQLKTMLAYKCDHAGIIFRVVSERNTTQTCSTCKQLPASRPRGIAGLGIREWTCCECGATHDRDINAARNILALGHERPSVGISVLKDR

SEQ ID NO: 27151 - protein, 463 aa, unknown
  TnpB Polypeptide
MSVGMNATEATIARLIIPTIADIGRRTGMGRLAVFFALVLSDPLCYHSFSSVINNIVLKAVKVRIYPSQEQQNHLAQAFGCVRWVWNQSLATMSQTYKETGKGISAFTMKKQIPVWKTEFEWLKECYSQCLQSSVLNLSQAFINFFDGRALYPTFKKRQGKQSIQFPQNVKVLEHDQIKFPGNLGVVKAKIHRELVGIVKTVTVSKMPDGRYYASLLMDDGIARPETIEDGKAIGIDLGLLDFVVTSEGSKYQNPRHLKKHERNLKRKQKKLSRKKNKTTNKRRKAKLAVAKVHARIARVREDFRHKLSRKMVDENQIIVVENLAVKNMVKNHCLAKSISDAGWGMFCTMLKYKAEAFGKVYLEVGRFFPSSHLCSETLLSLPKMDLSVREFDCPHCGKRHDRDVNAAINIKNEGLRILALGTSVTALGGNVRPKQYGRKSTTVEAVALELGSPLSIRRMRVG

SEQ ID NO: 27152 - protein, 415 aa, Mycobacterium sp.
VLAGRRFRVEFTDEQAEFAERIGGACRAVWNTGLEQRREYRRRGAWMNYGPQAHELAEAKSEHPWLKQVPGHCLQQTLMDLDKACRAHGTFRVRWRSGRRWPPSFRFPEGNKMVVEKLNRRHSRIKLPKLGWVKFRASRSLEGDIIRSVTVTRAGRHWFISVLVDDGRQVPETHQGSVTAVGVDRGVAVAVATSTGALFGRAFTTVGERRRVVALQRTLSRTASRSANRDKARAALAAVRARERWRRMDFCAQTAHQLAAANAMVVIEDLKTKQMTKSAKGTLDQPGRSVAAKSGLNRAILAKGWHRFALALASAARYTGTTVVKVPAAYTSQRCSACGHVDPKSRESQAVFRCTHCAHTEHADVNAAKNVLAAGLAVTACEDDRRPAGRAGSPKQEPAGNRKELLLQPAAVPAA

SEQ ID NO: 27153 - protein, 419 aa, unknown
  TnpB Polypeptide
MRLDKEQFKFLRDLCHRSKDLFNATLYETRQHFFRCGQFLNYNTAYHVMKEQEVFKRLPTDPGTQTMKVVERCFRSFFGLLKKKQGGNYNRPVSIPHYLDKDGHFILLFPIREGRCKNEFVVRVPKDMQEEYSFKQFTYTVPPNVKGHKIKEVRILPKAGATYFEIEFVYEVEQEDKRLDKKHILSIDLGVDNFATCLDSKSGLSFILDGKVMKSINRFYNKTKGYLQGVLDHQDKKWSKRLGRFSGKRSRMLGEHLSQYANLVVEVCLSNNIGKVVVGEGWLAQNGVNLGKRNNQNFVNLPFGKFVWKLQAKCWFYGIEVVTHEESYTSKCDHLAGEPMKHHEKYMGKRRPRGLFHSSTGIIINADTNGALGILLKESKQKGLLTQLCSGGVTPPRRIRLREIQQTSSKKLALNIFNI

SEQ ID NO: 27154 - protein, 321 aa, Geobacillus sp.
VEEQKNKGGETVQALTIKIRFFPDNPELLRQLSREYIHTVNALTEQAEKEGSFPKVTTKDVDAHLPSAVLNQAIRDAKSVSKKMKKEGKRPILKKPVYFVNNQNYTIGEQMIAFPIMLDGKTRKTRFRAMVTERDKNLIQHAKLGLMRIVEKRGKWYAQVSLGIPVTEKKKEKVMGVDLGLKVPAVAVTSNGKTRFFGNGRQNKYIRRNINGAPVWHMEGCFPRNICLRDPIAVLSAFRDEAIQNTCSGRTDAGGYVIIPDNDGYFYDHRSDIRHLRLSTIRYIHLYGGSRYSFSIICSRTDLIASRPDGGKGGKRNIALA

SEQ ID NO: 27155 - protein, 420 aa, Geobacillus sp.
MGGEKMYFCIKQQLNGLTKEEYLTLRELCHIAKNMYNVGLYNVRQYYFEHKEFLNYEKNYHLAKTNENYKLLNSNMAQQILKKVNEAFKSFFGLVKLAKQGKYDYKAISIPKYLKKDGFHSLIIGQIRIDGNKFTIPYSRLFKKTHKPITITIPPVLLDKKIKQIEIIPKHHARFFEIQYKYEMPEDQRELNDQKALAIDLGVNNLATCVTSDGRSFIIDGRRLKSINQWFNKENARLQSIKDKQKIKGTTRKQALLAMNRNNKVNDYINKTCRYIINYCIENQIGKLVIGYAETLQRNMNLGKKTNQNFVNIPLGNIKEKLEYLCKFYGIKFFKQEESYTSKASFFDGDEIPEYNADNPKEYKFSGKRIKRGLYRTKSGKLINADVNGALNILKKSKAVDLSVLCSSGEVDTPQRIRIA

SEQ ID NO: 27156 - protein, 535 aa, Geobacillus sp.
MFLSIQTKGEGKGMKTVRGMKIVSHDELQLRSLDELMRVFGSAKRYAFNRLLEGRNAKDIIQHLPRQFRLNKRFAEDAVLLAQSLISSQRELLPMRLEDVQAKIEKTEKKIDEYQHGRKTPKKVDLPTCLAGLHRRLEKLKSKEEELKHHLDHGTIPRVIFGGKQNFYKRLKGNITNEEWKDLRSNQLYARGDKSKKGNLNIRLTYDDKTYQCYVEIANPLGQQENKTAPRLRFPVSVPEKYEEEIMDLVMGEQVGVNAKGKPIIEYRPYTVEIQRKNGEYYVHLIYEEEVYGRELAYDEPIQAERIAGMDINIDRIAVSIVSKQGNFIQSKVFYCHELEYVKANKRNNIVGETVRDVYDWLLQENVGAVVIENIQLRQRHDTDKRFNRLTHNFNKKKLTDTIIRRGMRLGFRIKKVNPAYTSVIGRFKYMKKYGLSVHESAALVIGRRGLGYQERLPKELIHIIKTKVKNHLIAVLGSMEESYKQSKSGKKQRQYIAMMLRKIENFKQEHEWSLWNILHKCCWLNQDQIQLKEV

SEQ ID NO: 27157 - protein, 410 aa, Anabaena sp.
MLFLEQVEMIITMIVFEFKAKGTKQQYQKIDEAIRVARFIRNKCLRFWMDNQNVKPYDLNKYTAVLASEFDFADKLNSMARQAAAERTAFAIKRFFDNCQAKVPGKKGYPRFQKNNRSVEYKSTGWKLLDDRKHIKFIDKCDIGQLKLIGTWDLHFYQIKQIKRVRIVKRSDGYYVQFCVDTERKIDITPAGKTVGLDVGLTNFYTDSQGNKVDNPRYLRKSEKSLKRLQKRVSCKKKGSNNRKKAINRLGRKHLQVSRQRKDFAVKEALCVVKSNDLVAFEKLQVRNMVKNSKLAKSISDVSWLLFTQWLEYFGKIYGRVVVPVAPQYTSQNCSNCGETVKKSLSVRTHVCKCGCVLDRDHNAAINILAKALKQTGYDLSTVGRTETFNACGEMTLYPDLGTSLGKVAH

SEQ ID NO: 27158 - protein, 312 aa, Saccharopolyspora sp.
LTRHTTISGTRTTLRVSPGSNARDIGKESPSLARVQVRRVSHRVGQVKLPKLGWVRIRWSRALGGTVRSATVSRDGLGWHVAFGVYAEEPDEQPINTGPAAGVDVGIACSVFVSAETTERQRPDTLTAGERQRLKGLEQRKARQLAFAKKHNGGRYSNRLRKTIAQISAVKARQARRRADWNHKLTDDLAKNHGMIAVEDLKVSNMVRSARGTVEQPGRGVKQKAGLNRSIPSHGPAVAGCSPAHTVGTPNTPTAMPHTPSSIGHFAPPDGNTPCGVRRASARAVAREYRARAVPQRGKAIPQRVAGRVNQP

SEQ ID NO: 27159 - protein, 447 aa, unknown
  TnpB Polypeptide
VLKSYSLKHEYAEALLPLLHAYRDALNRVLEELWGQVEWEQRRIPQKKQYRLLPKFKADVHSNEYRRELRDRILANWPYAAHWVDSAIKTAYSIFKSWRKNYAKGDRKRRMPVARRLFARVKQTLVKLEGDKLRLTIKPGEYVYLDLSHRYFPLPSKVSSTGIGEPVITPKKVHLPIHFEEAAQTDKPAVAWDLNLLSLDGYSPETGWIRIDTSRLASVHISTFEKRRSVQRKASRSKKAKRILAKYSRRERNRARKHQIEIARVVSSLCGSVGLEALSKEGMFTRSRVWNRRITRSDWRSIARILEDKLGEGKVAELDPYNSSTFCSRCGWFNRDLNGADVFECGECGLRINRQLNAAINLYMRMRFGYTVSWVDGKKCIELRMGGAPQKEWWDHTVLPSLVGGCVPTGAERKDPSELVRGLHDALKPKLYYAYDRFADAYLRMLT

SEQ ID NO: 27160 - protein, 285 aa, Photorhabdus sp.
MLRATKVRIYPTPEQAEYLNSLFGAVCFAYNKALHIKKHTYKRHGVSLNPRKDLKPLLAVAKKSRKYAWLKAYDSIALQQAVINLNTAFDNFFNPKLRAQYLINAVRNLRRKQKSLSRKQKGSANRGKARLRLAAVHERVVHVCADFQHKLSRTIVDENQVVIVETLKSANMMKNRRLARAIGDAGWNSFLMKLEYKAAAAGVHLVKLDQWFASSKTCHCCGHKEPEMPLNKRIWQCPVCHVEHDRDINAASNIQRKGITELQAAGLVVSAHGGQRKSVIKTVAA

SEQ ID NO: 27161 - protein, 292 aa, unknown
  TnpB Polypeptide
MGEFVGRAYRRAFTDWRRTRKAGHQPGTLKAELIDAAHVQAPRKATSFDLWVMVQGVGKLYVPARKHRGINRTLALSGASLCEQGEVFRKNHKWYVRVAVKVPLPEVQETKEFIGCDVGVRSAVTRSDGYQGPDLRPILKRSRDRRATLQQHGIDESREISPQRQVLAREARAVVSVAQQSSRGVALEDPKRLIRWKQHAARFFGKRVLLLAAIYGVAVQVISPPYTSTTCSSCGHVEPRQRHREAFRCWHCGFTHNADINASRVIAKRARRVSCASHHGSLSLCPGGGKVE

SEQ ID NO: 27162 - protein, 337 aa, unknown
  TnpB Polypeptide
MILTYKTKHGRDFGRELGLAKKVAEFAIIERKISSKDVKHIGMKSMIANQILRKYAKNRNAKRVNSVKLAVPSQGIKVINNEIRMPCLNLVLPIHFDSSFEKINQIELDGTYAYISCSYKEPLLYKPERTIGVDRNTKCHVLVASNIDTGKVLKLGKECNHVHQKYKHIRKSLQKKGKYSLVKRIKNRESRIVRNINHQISKRLVVEAQNNKAVIVLEGLKDIRRTAKTRRNERYSLNSWSFYQLQNMIEYKAKKYGVPVAYVEPQYTSQRCSRCGHIESNNRKAKKFCCVKCTAVENADVNAGFNIAHLYREGISQFSKESDLLKGSTDTPREEML

SEQ ID NO: 27163 - protein, 366 aa, unknown
  TnpB Polypeptide
MISRLKRRGMKLTRNYVLKIYGNFGKIEDLRYSASRYKLYTQYFVTQMFYKPWIRSYSTKGMGLLANQAQREASGIVRGLRQKNKSDTPQSDCPQINFDSCPGSIEKSKDTKYDYWVSLNSQFRNKVKIPVKSHKKFNQALREGWKLSKYCKFFKKDDIWFVKAFVTKEVETAKPKDKFLGVDVGITHGTTRSDGYLGKNLNKIISKEKKSQAERQRQKHKKKNFKTKVKQVLDHDIHLALRRSEKDGLNLVLEDPKVLANLKIGKNDRWARCYYANRSIIRAKEMGIFTIRIHPAYTSITCSSCGHLDKHSRVNQSNFVCTGYGNMVNADLNAAINIARKGQEKLAWLNRLTDKVPVNTNSKEKV

SEQ ID NO: 27164 - protein, 380 aa, unknown
  TnpB Polypeptide
MYRFRLYPSHTQRERLFDNFKTCKEIYNNLLEASIGTYKTTGKTMRKFDYNKLLTGKYPDVFSQVKQNVSDRVAKSFQNFFRRVKDPSYREKGFPRFKSRVHSITYPQSGFRFKSQRHLHISKIGNIPIILHRTPKGKVKTLTIKINKAGQWFAIFSCEVEPFVVQHQSAIAVGLDVGLEHFATISTGETISNPRHIVKAEKRLKHLQRIVSRRKRGSRNRWKAVHRLAIQHVKVANQRLDFLHKTSRELVSKHGFIAVEKLSINEMMHNHHLAKHISDVSWGCFIRMLEYKAVTSGSTLVKVNPRNTSKTCSRCGAITDSMPLNQRMFSCGVCGFVLHRDHNASLNILRVGRDSPEFTPADDHVRPLIVGAVVNEPGTI

SEQ ID NO: 27165 - protein, 378 aa, unknown
  TnpB Polypeptide
LCYNIFVHKATFKYRLYPTASQATSMNHIFDECRWLYNHFLEDRKVVYEELEASLSLYDQIKTLPTLKAGRPTLAIVHSQVLQNVAVRIDLAMKAFFRRVKAGEKPGYPRFRGKGWYDSFTYPQSGFALKDSSVYLSMVGTVKATIHRPVEGAVKTCMVKRHAGKWFVAFSCEDVPDQDLPASDEVVGIDVGLTSFATLSTGDAISNPRFFRADEKALAKAQRRMSKEAKGTPARAKYRKIVSHIHERIANRRSNFAHQESRKIVTRFGVIAVEDLSINRMLHNHCLAKSISDAAWGQFTAYLSYKAESAGREFIAVNPAYTTQDCSRCGHRQPMPLSERSFNCPCCNLVLNRDHNASLNILALGLQSLGKIPRSPRL

SEQ ID NO: 27166 - protein, 235 aa, unknown
  TnpB Polypeptide
VHDTAIGIDLGIKSLAVCSDGRTFDNPKNLQRSLEHLALLQKRMSRKRKGSANRNKARIRVAWLQEHIANCRRDNLHKIAHALTHDSQVRTICMEDLNVKGMQRNYHLAQAVGDASFGTFLTMLEYKCRWYGVNLIKIDRFAPSSKTCGKCGYVYKGLKLSERSWTCPECGTHHDRDFNAACNIKESGLKALPSERGKVKLVDCPTVDDRPPCPEKPWQEEAGKRRTNCVRCSCL

SEQ ID NO: 27167 - protein, 386 aa, unknown
  TnpB Polypeptide
MVRVYRYRLYPSRAQHVAMLGTLWLLRELYNAALQHRSDVYRRTGETVSAYTQMREIAGVREVRPEYQAIHVHLLQDAITRLDRAFSAFFRRCKTGEAPGFPRFKGRDRYRTFTFKDAARNNGVRLAAGGKRVKLAGIGNVKLKLHRPVEGRIKQASVTLSGNGHWYVAFACDGVQPQPLPSTGASIGVDVGITTFAALSNGELVANPRPYETAQRALGKAQRVASRRKRGSHRRRKAVRQLAKKHDRVSRVRLDFHHKTALDLVRRFDVIAVENLNVKGLAQMALAKQVHDAGWAQFTTILRAKAESAGREVVAVDPRGTSQECSGCGAVVKKGLGVRVHACSCGLVLDRDTNAAINIASRGHRLRGGLNAPVEPRSPYLAVCGR

SEQ ID NO: 27168 - protein, 386 aa, unknown; identical to SEQ ID NO: 27167
  TnpB Polypeptide

SEQ ID NO: 27169 - protein, 661 aa, unknown
  TnpB Polypeptide
MDLDSLGKLKKEELKSLCKEKGLPVSGNKSDLVDRLSNRNSNNNQSADTPTQPKRPDLVTKGKQKKGTTEKVIKKSLIGTLKKKQLYDTISKWVSNASKTMNRGSLLFNRFLIHCLSNNLELPDFSLIPSEDSSTQNFFNHCFKTGKTGIRKSKSKFGIQTVWNQYFKSFPPLTTETGDSRTITWIAKNYSTVFNNSLEFNFESRQKRYIRHWLEQNNLNKNWIHSIRCAVNGWNCRTEPPLEAQEFISSQRRLLLPPEDGISEEWLKGNRNTILRYFWVILKYLETIDTAKKFTLAPIHTISSHFLMIDTTVLYYMSRDAGIIPEKLKYEEFNSQKQVYFREIFKFKESKRYIFTEKIQTDGVSVCFHYRLPKPKKEDIEIKKVEHERMIGVDPGRSNLIFGVEKTPTGLQTYRLTRNEYYCASGMTKRNRQASTWQQEIQEEEQVFSRVSPKTTNPLQWDAFLRDYISVYNRLWEVKTGKKWARARFRVFGLKKKVLDRFFNRMEGQVKPLICFGSSKFKPNGRGELSAPTTSIFKACEKRFKVELIDEFRTTKMCVDCDQSLHPVMVYSKKLGKYKEIRGLRRCSSSVCSQTSYKNRDLNAALNILRCESSFPRPKTLSRELSEEMPKVKPWYLMHASSTLRDKRPPVKVGCPTDVCL

SEQ ID NO: 27170 - protein, 410 aa, unknown
  TnpB Polypeptide
MKSYRFRLYPTKTQEDRLDNAIESCRTLYNDFIFESRLAYKEGYKLNFNELQRMIPTMIPKDKVYSKVAQMVLWQYYNNLKLLSSISKKGRTIGKLRFKPKSRFHSINYHQSGFKLLANDILKLSKIGKIKCVIHRKIQGKIKEVIIKRELTGIWYAIAVCENEFKSQCSLFRKKIVGIDVGINNYSYDSDGHIIKHPQILRKSEEKLGRAHRKLSRKIKGSANRFKQKLRLARIHQTIKYQRNDFLHKASRYYINNYDTIFVEDLQIANMKKNHHLAKSISDSSWNSFFQKLEYKAANAGILFRKVTASGTSQSCSGCGKKVKKTLAIRTHCCPFCGIAIDRDYNASLNIRQKGIDGLPAGYREVTPPERMPLIMINNHGHVISRNEEANGFSRLVIHEAISMRGALNS

SEQ ID NO: 27171 - protein, 415 aa, Petrotoga sp.
ITYRTQKNQLRNLNKQEYIALKELCKLSKNLYNSTLYAIRQYYFTEKKYLRYESVYHICKENENYQLLNTDIAQQTMKVVDRNFKSFFALISKAKEGNYRFSDIRLPHYLPKDGYFMLIIPRFKVKDGYFTVPMSNAFKKEFGEVKLPFPERLNKKQVKEIRIFPKHNCKFFDIEFVYVQEEENLNLNTGNALAIDFGLDNLATCVTNTGASFIMDGKRLKSINQWYNKENARLQSIKDKQGIKGITNRQYINTKKRNNRLNYYMNKTARIIVNYCIENDIGNIVVGYNPDWKRNISLGKSNNQKFVQISHGNLRLKIKSLCERYGINYIEQEESYTSKADFFANDDIPVYNADNPQGYSFSGKRISRGQYKTCQGTIINADCNGALNILRKSNLMDLTVLQARGCLNQPQRIRV

SEQ ID NO: 27172 - protein, 332 aa, Proteus sp.
LKEAPSQPLQQSLKDLERAYKNFFQKRTAFPRFKKRGKNDAFRYPQGVKLDQSNSRISLPKLGWMRYRNSREVVGEVRNVTVSQSCGKWYVSIQTEYEATEPQHESTSIVGLDAGVTKLATLSDGTVYPPVSSFKVNQRKLARLQRKLSRKIKFSANWQKQKRNIQRLHSHIANIRKDYLHKVTREISKNHAMIVIEDLKVSHMSKSAKGTTERHGRNVKAKSGLNRSILEQGWYEMRRQLEYKQLWGGGQVLAIPPAYTSQKCACCGHTAKENRQSQSQFECLECGYTANADINGARNILAAGHAVLACGGRVQSDRPLKQEPAEVIQTSV

SEQ ID NO: 27173 - protein, 404 aa, unknown
  TnpB Polypeptide
MERKAFRYRLYPSRAQERLLDATLETCRRFYNDCLAERKQAWEDEQRTVGKVAQLRQVKERKATNPWAKDVHSHVLQIVVDDLDKAFQAFFRRLKAGEEPGYPRFKGRHRWRSFGFKEYGNGFRLDGRRLKLSGIGRIAVRWHRPIEGQIKTLRISKQAGKWFASFSCVVDEPTPLPATGQDVGIDVGLASLITTSAGEQVAHPRFYRKAQRKLRVCQRRIARRKKGGKNRRKAVVMLQRQHERMSNQRKDYLNKLAHDLIARHDRIALEDLTITRMVHGNLAKSILDAGWGYLVQRLTHKAASAGRVVVLVDPRQTSKRCSSGCGHVFETLSLADRWVDCPRCGLSLDRDHNAAINILNRGGQLRWSLSSPEGGLGQEAARLEPLRSVTIVASSGHLTMMTDS

SEQ ID NO: 27174 - protein, 373 aa, unknown
  TnpB Polypeptide
MSADLYNACLEERIDCYKKTGKLRSYYDQCKALTEVRADDPEYDNISVQIFRGVVGRIDRAFQSFFRRVKAKEKAGFPRFKKGKRWCSIEINDQCCRMLKRQGNKLVLKIKGLPRIEVKSSRELPSSTLLKAIRITRKPLRTEVSLSYELPEPEQTRKITNPVGIDMGVSKRLTLSDGVTVEKRKIDYHHLIQLQRSIPRKKKSSNNRRKAVSALAKEWQRLTDKERDRLHRLTATLVKMYDFIAVEKLETKNMLSDRHLAKSIREQTWGKFMTLLGEKADSAGVKMVRVNPKNTSQECSSCGATIKKSLQVRVHRCTKCGYEADRDMNAARNILHRGLALIAGGKLDLESRMVGRIRDKREAAPVRPRTVYE

SEQ ID NO: 27175 - protein, 442 aa, unknown
  TnpB Polypeptide
MILSEEHRIKKHNNKKLLHEIDDYCYKVKNLSNSVNYLIKQCYRIYTKIRKGKALEDWEKELIQEINKALEEYNVGRSESKRLRYIDADNGYIADAYFLSWYLKGTEVYKDVPYSTCSQICIQEKCREWKSFYRATAEYGKDPKKFKEHPHVPGYLDPKTGRGSLVITSQNFKVDEDGNVTMPKFLSGIHIHARHSNVRQIRIKTFKDSMLISLMYEKEEKQICGTKIMGIDLGVNNLIAAAWDSEDRPVIINGKPLKSINQYYNKTKAHMQKEAKVYNGKNSTRRMNKLTAKRNRKIKDYMHKASRKIVDMAISSGVGLIVIGSNHGWKQEVHMGNITNQNFVSIPYKTLNDMIAYKARLEGIEVKNVRESYTSGTSYLDGEKPAREYYDKARRVKRGLFKSNSGILINADINAAYQMIRLGSTRAIPIKPGEQIIKIKAA

SEQ ID NO: 27176 - protein, 129 aa, Okeania sp.
MLVYEMKLEGEKVQYEKLDEAIRTGRFVRNSIIKAWIDGQVKSRSDAYKYCKILADNINFPWAKKLNSMARQAHAERAWAAIERFYKNCKAKVPGKKGYPKFKKYQVRASVEYKTSTPPNCRKIDVIWC

SEQ ID NO: 27177 - protein, 152 aa, Natrinema sp.
  misc_feature (148)..(148): Xaa can be any naturally occurring amino acid
VESVQQVRAVWTGEEWELHFVCKVEIEVAEVTGEKTVGVDLGINNFAALAYEDGHSELYPLNCLKQDDYYFSKQIARCDDSDSEQATRLNQKKSARRTHYFHTLSKHIVQRCVDEGVGTIVSVRNNCPLLESKVGLERYRSRGSVAQXYRKR

SEQ ID NO: 27178 - protein, 457 aa, unknown
  TnpB Polypeptide
VGKGWKKRDENNERGYVAIRYRAYPTSEQNQKAVQIDGCCRQIKNLAKEQRDLAYRLTRKSPSYTVQAKNLKELRDDPDLAPWLSNVPSQILQQALRDRDAGYQRFFSGKAKYPTWARKSSRISFRDPQGVKVERISRRWAEVKLKGVGRIKIRMHRPLVGNRICSATYTREPDGKTFVSILCERHKHQPTKPLDKDNTIVGVDRGVAVAVATSDGDLINRENWTQKERERLVRLERTRERKKRARAKAKGEISHKSKRQVKTELAIAALHARARRRRNDFVEQISYDLSKNHAVVVFEDLHLTAMTRSAKGTIDNPGKNVRQKSGLNRVILDKALGAILTRTDDKAHNHGHLVLCVPAPGTSITCPKCGHEDVDNRASRSVFVCRHCGHRAHADVNAAINIRERGIKLALAGGTPVAAYQGTNLEPTLIGAEPGAVRDGLGSGNKKTGYITERVVA

SEQ ID NO: 27179 - protein, 395 aa, unknown
  TnpB Polypeptide
MILSHRIALDPTEKQREYFVKAAGCARFVWNWALEAWNTEYAAGDRPSGFSLQKKFNALKYQQYPWMKEIYSGAHARPFINLQKAWNGFFKKISQRPKFHKKGRKDSFYVANDQFKLNNKTVRLPHIGWIRMRESLRFDGKIMNATVLRKAQHWFISIKVDVGEDYKRKRIIDGICGIDLGIKAAATVVGTSGVENFISPKPLAASLKKLRRLSRSHSRRKQGGSNRRKITNRIARLHVRISNIRKDFWDKITTKLCRENQAIGLETLNVSGMLKNHKLARAIGDVGFYEPRWQLEYKSKLYEAKLIEASQWFPSSKTCSNCGCVRESLMLAERVFHCDQCGHTQGRDENAATNLMKLAESKYPRLEGNLRLGRGRALSSLVEPGTKPCAETRTN

SEQ ID NO: 27180 - protein, 164 aa, Tychonema sp.
LRKSAAKIRIKIKNLVNELHKKAAKYLTGKYKLIFLPTFETQQMVKKGKRRLATKTARAMVTLSHYRFQQMLKHQATKHGGVVVDVTEEYTSKTCSKCGHIHTQLSGSKVFKCPECGHILDRDQNGAFNILLKALRDTSLTGELVAFSVLPYTVIPGLVRDLPD

SEQ ID NO: 27181 - protein, 491 aa, unknown
  TnpB Polypeptide
VQKEIVMAKYNTATYVIAYELAFDNDNPSSVLDKLEKTAKAVYNDCLNECLKRYHKLIHDRKYQELLIEYKTSNNKKELNKQLNDIALSYGYSEYSMHEYVKKAYEYFNKKLGSHECQKIATRAFKTIEKLKYHQADKVNFKSKYDSFSIEGKSSTSKLHYCDDDLSISYGKYKYKLKIKRNDIYAQSALLDKVKYVRIYSKTIRGKRRWFVQLILKGTPPSKNRQYGESSKVQGIDIGTSTIAIISSNEAKLKELAPNCKEDEHKIRVLSRKLDRSRRANNPYNYNEDGTITKSKHKWYKSKNYIKIQAKLKDEYRKLSVKRKQSHEILANQIIAKSTDIRVEKMNFKGLQKRSLKTTINKNGKINSKKRYGKTIKNRAPGMLLSIIDRKLKYKNLELKKINTFKVKASQYNLIDGTYKKKQLKDRLVKLDEEIIVQRDLLSAYIIAHTNNDLETINTITCLNDFDIFKQLQDKEIQRLKDNHQLSWYIS

SEQ ID NO: 27182 - protein, 370 aa, unknown
  TnpB Polypeptide
MKAARFRFYPTLRQRRQLAKELGCSRYVYNWALKARSELFKEAGVGATRFQLSGMLTELKKELPWLKEASSTVLAEVIEDLDSGFQRFFKKLAKYPRRKKYRMAQSCRYTLDKRQTKVFKDGELLKLPKLGACKVVWTSEVDVFPNTATVSRDSCGRWFISLQFDSQIKPNIPKSCQEIGIDLGLKDLVVTSNGEKIKPKKVYKKMYKTLKRRARHLSKARKKSKNRGKKRLRVARVHSKIANKRKDDLHKLSTSIVRRYRTIAIEDLGVQSMSKKGSKIKRKFNRAILDCSWRQIRTFLEYKAKWYNRELIVIPRFQRSTGVCPDCGEQVDLTLADRSWTCPKCLKEHDRDIAAAKVILGIARSARAEA

SEQ ID NO: 27183 - protein, 409 aa, Veillonellaceae sp.
MLRGKKIRLLPTPKQEVLFWKSAGTARWAYNYFLGENQAVYKAYLEHGKVGPKRISEGAIRKHINNELKKTTHQWLKEVGSNVMKMAVKEADRALKRFLKGIAGKPRFKTKHKTKPSFYVNYESLVRKNGGFHGEKIGFVRTRETLPKLPKGNHYCNPWISFDGKYWYLSFSYEVPEQETEKLTGDSMGIDLGIKVLATCYASGERKATVFKSVNKTKEVRRLEKKLRREQRKQSRKILANTARYETVQRKGKKPGRKPIWKRPLRECQNIEKGRRKIALIHRRLANIRQNHIHQTTAAIVKTKPSRIVMEDLNVKGMMKNKHLAKGIAGEKFYEFRRQMTYKCENNGIQLVFADRFYPSSKTCSCCGHVKENLKLNDRKYVCQACGTTIDRDLNAAINLANYFQSETA

SEQ ID NO: 27184 - protein, 418 aa, Acaryochloris sp.
MITLTYEYKLNLTKQQAEQINHDLEVCRKVWNYALRERKDWIASRKCPVNACSVRGEYIIAADEPYPSFKFQCQRLTASKKVNPELASVNAQALQQVLRRLDQAFERRRDLGAGFPRFKKVGRMRSYVFPQLGKTPLGQGRVKLPSLGWVAIRQSRPYPEGFVVKQARVVKRASGYYLMLSFQADIAIPEPPLVGHVVGVDVGLEYFLCTSDGLQVERPKFFVELQCKLKSLQRRLKRKQLGSANWKKAQAKVARLHEQVANSRKDFHFKQAHKLCDVADVIVVEDLNLIGLSRGMLGKHMLDAGHGQFLNSVLPWVAFKRGKATVKEDARASSQQCPACGAKTKKSLSDRWHRCSCGCDLPRDVASGLVLRNRFQKRCGAHSAENAPGEVLAGVSFGASSQDSVNGESPAIRAALAG

SEQ ID NO: 27185 - protein, 468 aa, unknown
  TnpB Polypeptide
MYCNALERRQPMAYSVAQRVISKKDSIYDYCDDLSRKSKLLYNASLFRIRNIFTGYEKEHLTSNEDEVFGEVKLLHESYPGIHVQKVICYKHLEKLMRVTENPDFFAGLPMQTAQAIVKQAVTDFNNWLKSLKAYAKHPEDFLGRPKMPHYKKDSLTTVTVTNQDAVLYPEESGVSLKLPLIKERILLSNISGRSTLKEIKIKPYYGRFLLCLTMEEPDITETLSMPHVCAIDFGTDNFAAIVCDDHSSAIYKGGAVLSNTQWFHKQRAKYISIITKGHSQMNATSARLKDLSFHHANFTKDQCHKISRNIIDFCLEHQAGTLILGVNPLWKQRTNMGTASNQKFVAMPISILRTMISYKALNAGIRIIEQEESYTSKADITMNDYLPTYGKDDNNATFSGARITRGLYRCADGTLLNADCNAAANIMRKAIPDIWKDTSDYTFLSSPKVYGFHELNPKSIPVKRIVA

SEQ ID NO: 27186 - protein, 407 aa, unknown
  TnpB Polypeptide
VITLTYQYKLKLNKQQAQEVERTLEVCRCVYNFALSERKHWLKSRKSPVNSCSIHSEYIIPANSPYPNYNNQAKKLTIAKKSNPNLKSVNAQVLQQTLKTLDKAFSDMKAKGYGFPRFKKQMKSFVFPAMLKNCLAKGKVKLPQLGWLKIKQSRDYPTGFEPKQARIVKKATGYYLMIAFQSQESCPDAPVGKVSLGLDAGIESFVATNTGELIKAPKFLLQAQSKLKLLQRRLKHKTKDSHNWLKLQKKIAKLHEKVANTRRDWHFKLANYLCDLTDNIFVEDINFISWSRGIVRKQSLDSGIGQFINEILPYVCWKRSKIYLKVNKDGTSQECSNCGNHTGKKQLSERIHNCQYCGYTAPRDVVSAEVIKNRGLIAVGQPVNQNACGDVLTGLLQSNLSELVKCL

SEQ ID NO: 27187 - protein, 394 aa, unknown
  TnpB Polypeptide
MSRYRLEPSRTQEEILLRHCSDARYVWNLCVEQESWWRRGRGRMPGFAERCRQLTEARAASPWLAEGSVTVQQQAIRDHAQAMARFFTGTARRPRWRKRGENEGFRVIHVKTPHVRRLNRSHGEVYVPKAGWVRFRWSRPVPGSAKSFRVTQDRAGRWHLAFAVIPEPVHGPGTGEAVGIDRGVKVTAALSTGEMLTVPRLSGRESSRLLRLERKLARARRGSTRRRKVKAQIARVKAWEVDRRKDWIEQASTDIARRFDVIRVEDLNIKNMTRSARGTAAQPGKNVAAKAGLNREISRSAWGALVRRLEDKAPGRVQKVPPAYTSQRCSACGHVARDNRESQAVFLCTACGYAANADVNAARNIAAGHAVKARGGDRDAGPVNREPQLDLLAS

SEQ ID NO: 27188 - protein, 382 aa, Chloroflexi sp.
MLIFEYKLDGTKQQYAAIDEAVRVVQFIRNTCLRKWMDETAVSKNALQVYCAVLAKAYPFASLLNSQARQASADRAWFAISRFYENCKNHKPGKKGYPQFQRNNRSVEYKTTGWKLAPDGRHITFTDGCGIGRLRLVGNPGQQIEAFPPKQIKRVRIVHRADGYYVQFGVKAERQITHVPTGRQVGIDVGLKAFSTDSEGNTLENPRHHRKAEKKLKRLHRQLSRKQKKSQNRQRARKQLAKAYLKVQRQREDFARKQANTLVTSSDLIAYEQLQIHNMVRNRHLAKSIHDAGWGLFLRWLKYYGALHDIPVIAVPAHYTSQDCSACGTRVKKTLSVRTHICPDCGVVLDRDHNAARNILQAALSSLQGGTVGHTETGRLAL

SEQ ID NO: 27189 - protein, 412 aa, unknown
  TnpB Polypeptide
VKGGERNMEQTVNIKVKLNILESNTGIKFYKTMEQYRLACNYVSKYLFDNHFPLNKNEVQKEIYNTIREIFNLKSQMTISCIRGVIARYKTVKTQMARRLYKYQDINTGEWYREVRDLNWLQKPITFNRPQVDLQRNRDWSYLSNGQLSINTLDGRVKVNPICHGFDQYLDGTWKFGLAKLLKTSGKWYLHISATKTVSDFDKQTVKHVVGIDRGLRFLATSYDEQGQTFFFNGKAIMRKRNKYQKLRAELQAKGTKSAKRRLKKLSGRENRWMSDVNHCLSKTLVQKYDVNTLFVLENLNGVSFERTDLPKTLRNQNKSWAFYQLEQFLTYKAHLHNSEVVEVSAKYTSQRCPKCGTIKKSNRNHEKHEYHCTNCNYCSNDDRIGAMNIQLLGTQYISGQEQPKFEVTTNA

SEQ ID NO: 27190 - protein, 371 aa, unknown
  TnpB Polypeptide
MRKAFKYRLYPSEKQDEKLSETLRLCRHLYNAALQERKEAWEKNRISISFKGQSNQLPVIKIDCPEYEGVYSQVSQDVLHRADKAFKAFFRRLKRGEEKPGYPRFKSRDRYDSFIYPQTGFMVQDNRLQLSKIGSIKIKLHRPVEGYIKTLNIKREAGKWYAVFSVIAEPKPLPHSDKAVGIDMGLESFLVTSDEEFVDNPRFLRTAEDKLAEAQRTMDRRKKGGKRRAKAKRIVSVCHARIRNARLDFHHKIARNLVNTYGFIALEDLNIKGMVKNHCLAKSISDAGWGQFISIVQAKAEEAGREVVLVNPRNTSQICSGCGALVKKDLSMRWHDCPACDLSVHRDINSSRNTLALGLSVRGSTPRSPRL

SEQ ID NO: 27191 - protein, 218 aa, unknown
  TnpB Polypeptide
MDCIKQLRIYPPKNGKCDLIVIYEIEEPEQHSQNGHYLSIDLGLHNLMTCYDSGNDRTFILGRKYLSLERYFHKEIARVQSAWYAQQSERGIKYPKSSKHIQRLYRKKQNTVKDYLHKVTRWIAEYCKKEDIRCVVVGDIRNIRKEKDMGHKTNQKFHGLPYNRLYIMLEYKLKLYGIQLIKQEESYTSQCSPLSPEVSKRHAEASNRKERGMYILME

SEQ ID NO: 27192 - protein, 599 aa, unknown
  TnpB Polypeptide
LSELIKAEKRVLKLAIPDREWANVALALMHEAKNLYNTCTFLIRQINSAYVFDGETKVYRLKDDLHEHQREALISFNRIIEQINAKRRVKQTEKARLVASLEPVMTIPPLYIALDVTVLDNVAKTHIDHEGQIVYRRLPASAAQQVVRSVIDVWKISLSAQRDFARNPGKYTGRPEFPGFKAKDGYFPLEIPYATMTRGFPRPTKLQELNSASIEQQERFYAHDLKSSANSACEKRGWLNAKPQHIRIVADGSNKVKIETVVSIKRTYPEGSFLHRLGAQHQSAFTDLKTVDEREKFILSTLGKDHQCLRIAGIDFGQTNIATVGFSTGNRAVVHSGERPNEIVDRYHQLMDKRLAACATPRLKELQRLKQELEAKGEKLSKAQRIELRQEQKRGFSDPEYRALSARLNRIKSDFEHKISTDIVAQCVKHKIDLIVIGKNKGWKSDIDSGKAENRRFHAIAHARLISLIRYKAEAYGIGVVTTEESYTSRSSFIDGDELPVHSTEKAKKERSSTQTEADIAVRQHSFSGKRSAKNRTWFVRHNVVADDRFAKVHADVNGAFNIIRKVFTNFRHHAGLTYKFTVRWISPRRGAVVPIGCL

SEQ ID NO: 27193 - protein, 358 aa, Bacillus sp.
MKDKISNQEWKDLRTRQLYSRGDKSKKGNLNMRITVDDCGQGWLEIANPLGRTNGKTKSPRIKVPIIIPYHFYHQITNVVMGKQIGVNPKGKPIIEHQKYSVEIIRKQNEFYVNIAFDETEIGRVLDFKETPQSDVIAGIDVNPDRIAVSLCTKQGNFKGSKIFYLHNLNAFSTNKRATIIGQIVQQIKTWLLENNVGGIVLEDLKFQQSHDTDTYSNRNFHQFTYKKMLNSLIRMSLRNGFSVKTVNPAYTSVIGKLKYSKNFGISVHEAAAFAIARRGLELQEQVPQEIILLLKNQITTKLRILVASMEESKKNTQKVYKKWLQTIQTWKEYHNWKLWSILHKTVYMSNQQFVFKI

SEQ ID NO: 27194 - protein, 397 aa, Sphingobium sp.
MFLQYKFPIEPSRAQHARLASILQLQRNLYNDALQNRRTAFQRGVHLTYEDDTKSLPAYRMANRQHTALPWGINNWTLRCVDTAMAKYRDRLRANPNAGFPRFRSEDRWRSFGVHGVRGCVIADGYLTVDGIVGKLRMRMHRPLPADARLTRLTFTRRARQWHVAILVDCKVGDQEHKKPGSACGLGLGIEQLASLSDGSLFDDTPRKTTQSSALRRAYRALARCQKDSRRRKKLRERQDRASQRVINLRSTRLHQISAAITNRFETIVVEDLALKQFPRPTRTRRPSDGAGAIATRENGQVLAEPRPKRLLEMIRYKAEKAGGKVVVVDPRHITQTCNACGSPTSESNDADRHICACGADVPRGTNNAINILARGLSAHAAALGRRVGKVLSNASV

SEQ ID NO: 27195 - protein, 195 aa, unknown
  TnpB Polypeptide
VTVKIDPKPSKAPGTVGIDLGLKDFLTTSDGDKVEAQRFYRALEPALAVAQRANKKQRVKAIHAKIKNRRKDALHKLSTRLVNEYGAIFVGDVNASGLAKTNQAKSVLDAGWSTFRTMLQYKGECAGTWFEVVNERYTTQACSECGSLGGQKGRKELGIRDWTCLHCGAYHARDVNVAKNILARGLARLPVAAVA

SEQ ID NO: 27196 - protein, 536 aa, Lachnospiraceae sp.
MPKARRRKGTSFESSMTKSVFLYGSPNKGKLSVLKHMEDAFTKLVNEDIRLLAGKDGITLFLVKNDKKSPEMRALEKSVRIEGYNSAYCQNAFDMAVTTLSNRMDSIRLDMYSREQTVFTKSKVLFAMAVDHRSRQNMISAMKDLADKAKTKSSFYTECVETLTSMQDPEFAMEMRTFEDLYITTGLEYGMPELKSVSVPLDSRLMKIESSTGTAMPYVISISDPFQKNHRIAIPVDTSAHSMHKITTCKMAGTVVMKVRNGKLRIGWAYQKSMTHPKTSKAVGVDTGITDALYPSSGEPIGSMQPAIDFYHEKVETSFAGLSDLRNKKKNISHYLHCHDLPDDVRRSLIEKIDRLDRMIKTADAPYRKNRCYYGMLDHEIRTSVNAYVDSIDSETLTVLEKLDIREFDKCRKINGLFSMFARGKLQMTLMETLNWHGFDFKEVVPDYTSQLCPVCSNVDSKNRNGKAFYCTCCGHTEDADKNASINIRDRADDTEVLDACEKNKYNHVQMQKELKAIYNRRNEEYVKKHKNTASA

SEQ ID NO: 27197 - protein, 463 aa, Actinopolyspora sp.
MGSMLGAGVFAAFGPAAAAAGSGLLIALAVAAVAAAVAYCSESGGGTAAMTTVLQAYRFALDPTEQQRAMLSSHCGGARFAFNWGLARVEAVLDQRSAERSYGLDEDQLTPAMNWSAHSLRKSWNAVKGEVSPWWAENSKEAYASGLANLADALGNWHKSRIGKRAGKRVGVPRFKSKRGRWSFCISTGQFGLVKQDRRHVTLPRIGSVRTHESTRKLARHVERGTARIRSATVSFRRGRWHVSFSVEITKADPNPAPRDGPVGVDLGVKHLAVLSTGETIDNPKHLDRAQRKLRRLQRQASRRRAGAARRSARRDRILQLRCAAVLHAGQRRGVHAARAATARAAPAGRARRGRMPAAGGHPARAGGAGWDRSDAVRAGVPRRRCPVATRARFRPALSPPPVGPRAGPVPCGLTSARPRGGLELSAADSKPLQVRGASCCTGSTRFRAGNWWPPTWRSPTAG

SEQ ID NO: 27198 - protein, 405 aa, unknown
  TnpB Polypeptide
MQHKLTLKAYKYRIYPTDAQIVFFAKTFGCCRFVWNKMLNEKIQAYKKKERIPRPTPAKYKDEFPFLKEVDSRALCNVQLQLDKAFKDHFKNRKQFKIPKFKKKRDKQSYTTNNVHNSIRVDFEKSLLYLPKIKDGLKIELHRRFDGKIKSVTISRTSDGKYYASILVETENPRNKVVEPKSKACGIDLGLAHFVIVTNDFRSYKVEHPKYLRRGEERLKRLHKSFSKKQKGSKNSEKARQRLARQHAYITNARNDFLHKLSKAIIDENQVVVVEDINVKGLLKTRLAKSISDSGWAKFLTYLKYKAEWYERTFIQVDRFFPSSKLCHRCGHKNGDLALHDRTWCCPTCGETHDRDINASINLYYVGLGRPEVTYFEQALVDDRSPYGLPKKPSCDEAGSSTTKG

SEQ ID NO: 27199 - protein, 501 aa, unknown
  TnpB Polypeptide
VACARDDPAPEQVRCCRRLYPAGRGSPGPAARYGCDLTPSGAHNRAAGHGLAGAYCRRILRRARARIAVARRGAAGFVCCADRRVVSRQRRAVAINHQNLRLEALSFSCGEEKRGAKRQLHNPIICAILSYMKLIAQAKLLPDDEQRAYLLQTLEQANALCNWLSEQAWQLKKFRRFDLQAACYYAARERSGLSAQMVIRCIAKVADAYTLDKRTQRSFKPHGAIAYDDRILSWQTNNQRVSIWSVGGRLNIPYQAGKRQLELLAYRQGETDLVYRKGVFYLLAVCDIPDPDERDVDAALGVDLGVTNIATTSDGDIYTSATIERNRRRYQRLRTQLQKCGTKPARRHLKKLAGRQRRFQKDVNHTISKRLVQTAERTNRGIALENLTHIRSRTRVRGKDERARHSNWSFAQLRQFIEYKARLAGIPVVLVDPKYTSQRCSACGHIERANRKSQSEFLCCVCGHTAHADVNAARNIARAAVIPPIVSETPAGVAPGTSPRL

SEQ ID NO: 27200 - protein, 651 aa, Acidimicrobiaceae sp.
MAKDQATSTLVLNLDTSDAHARTRLEALYFTMFNLRRALQRDAQRLCREYWSRKEDRDTLGWKFVAEGLGLTRNGFEELARRHATTSGWAMDHVSAALVSHMADAVFENVVRHLWSDNSGQRHGPLHVTPRHEFATIAGRARSHTTANKWETFRLYGSLEGHLDVYAHGAKNQHRTLHDVAACGPGTPVLRQPRSGVKPPGPTRWPTYVGPLVMVYAGGPQSNEPELQLPVRLPQGRGAWDRVTHFLNDPDTWHKIDLVRRADSSQRGGWRYEMHLLVLREGYVSARNAALLEQAPTNRTACVDVNVANLSVVSVDAGHGDPRSTVVRADAGERDRLARVSAKKRWGQRRVDRSRRAANAQQYAKSKSQVKRDERRAERGLGGVTDATPRGPRTSNAANVARQAHRRDHLSASYRDTRRRQGEQARAESLTKRIRAHEVAVQLVATHGTTWLIEDCNLTAWATLWGKSLSSFAPGMVTAELARITSQRGGRLTKVGTGRTALSSHCLCGQRARKGLGQRTHVCASCGFTGDRDLVAAALGTCVVHTDLADPLSARVDYARSCALLTALTAPSTNHGCQDTLTSQTHPLVGARRSDARDQGTRPVGSSTGLLVKKPAGEPSSALRTTQSTNGPGSARPAKVAHGLAPGRSSP

SEQ ID NO: 27201 - protein, 453 aa, Acidimicrobiaceae sp.
MTTPVLERTSTSTESVTTRAYVYAIDPSAEQANHLRSHIGGSRFAYNTLLGLVKDNWDENRAKKEAGVEIAQEDWVDTSHFGLLYLWAEHRNEVAPWWAENGSSTYNDATQRLAKAIANWRKGRAKFPTFKSKGQGGSVRFMGPTVRLVDSHHVRISRIGEVKTFESTRKLFRHIERGSAKIVAATVTQRCGKWQVSFTVEVTRQVPATRAPERIVGVDVGIATLYTGATADGVHVLDVDNPRHFVKVQKKLAHAQRIAARRQGPRKGVAPSKRWKKANGRVQTIQAATRHARRNLINETTTRLAKNYDVIVIENLNIKGMVKNPSLAKHIADASWGEFGRQLEYKTKWYGSALVRVDTFYPSSKTCSQCQTVKATLSLDERMFHCEACGLVIDRDLNAAINLARKGLPGTSSGTGRGGEVSPAQQKLAETAHPDEASTDPSPEVDGVGDALV

SEQ ID NO: 27202 - protein, 290 aa, Clostridioides sp.
  misc_feature (276)..(288): Xaa can be any naturally occurring amino acid
MYPNKKQQELINKTFGCCRFVYNKYLAKRIDVYKSDKETFTYKQCSSDLTNLKKELKWLKEPDKFSLQNALKDLDNAYKKFFKEKAGFPKFKSKKINRFSYKTNFTNGNIMYCGQYIKLPKLGMVKIRDKQVPQGRILNATISKEPSGRYYVSLCCTDVDIEVFENTNNHIGLDLGIKEFCISSCGDFIENPKYLKKSLNKLAKLQRELSRKTIGSLNRNKARLKVARLQEHIANQRKDFLQKLSTKLIKENDIICIEDLQVKNMIRNRKLSRLIXXXXXXXXXXXXXKL

SEQ ID NO: 27203 - protein, 240 aa, Bacillus sp.
KQLGEIEIHLHRPIEGTIKQLILKRQSKRWYAIFSVERQDVPPSIDIENAIGIDVGLNQYAVLSNRTVFENPRFLLQKEKQLRKAQRNLSKKKKDSANYKKQVERIQILHEKVANQRKDFLHKLSYHLTQMYSVICIENLDIRKMVRNRKVSKSISDAGWGTFRKMLLYKCEKFGSLLVRVDPAYTSQDCSSCGNRVEKSLSIRTHICTKCGTVLDRDYNASLNILRKGLERLLMRTTEE

SEQ ID NO: 27204 - protein, 382 aa, Caldilineaceae sp.
MKAGRVRQRFGSKRLWRKQHHLAENGYASHQEWLRDWREARSDEFFVLGSRDETAGCQLCVARVADDGSQTLRLRLPDCLAPRHGKYLTIQDVRFAYGHAQVLAALESNAEYTRYRREHGEQAVRATALGQAVSYRFKRDAKGWRVFATTEMMDGPVVTDTRCGAIGVDLSADHLAVAETDASGNPVHAFRVPLVTYGKSRHQAEAIIGDAVARVVAYVRAAGKPVVIERLDFRQKRAELEGESRRYSRMLSSFSYGKVKACFLSRGYRQGMEVQQVNPAFSSVIGRVKFMERYGLSVHQAAALVLARRWLGCSERIPRRRGPPVGDGVQVAFTVPARKRVKHVWTYWGAVSGQVGPVLAVQHRLGRRRCPPNPVQAARGVA

SEQ ID NO: 27205 - protein, 392 aa, unknown
  TnpB Polypeptide
MQRVERHIAIGNKRLDELCFLSKNLYNYVNYLIRQEFTQNKKFLSEYEVTTMLAKDKQADYIALPSQTSQQIIKILFKNWKGFFKLCKVKDKLKARPKLPKYKHKTRGRNIVVFTNQQCKLKDGYIHFPKRAGIEPIRTKVDNLCQVRIIPQCSCHIIEVVYEKEKEEATELDDTAYLSIDLGLDNLATSFDPQHNRCFVINGRPLKSMNQFFNKRRAFLMSLISGRGMSIRIGRLTLKRNCKVHDYMHKASRFIVNYCKDNHIGNIVIGNNKDWKQNCNMDKVNNQNFVSIPFEKLISMIQYKCEEIGIKVIVTEESYTSKTDHYSNEAMCHHENYMGKRIKRGLFRSASGKLINADLNGAIGILRKVVGERLWQIADRGGVGTPSRIQFV

SEQ ID NO: 27206 - protein, 365 aa, unknown
  TnpB Polypeptide
LHRTIDVAAEIWNHAVALKNRYYKLFGKGLSKARLQVHLARLRNGRRAHWKAMGSQSVQAIIDRLYLGWEAFFAGDIKRPPTFRKRRKYRSFTLKQAGYKIVGHGRIKILGRNYRFNQSRPVSGVIKTVTVRRDALRDIHITFSCDQVPQPEQAPKTGLSAGADFGLKDFLTLSTTERIAAPQPLKARLRRLRKAQRVLSRKQKGSKARESARLDVARVHRKVANVRNDWQWKQARMLLLTFDMLVFETLNLRGMQQLWGRKVGDLGFADFLSKAEWMAKKLVRDLVKIDPWEPSTQTCRVCGRRREIPLNMRTFECHGCGHVEHRDVNASHNILEAGRRLRSGASSKTAHGRQDALVTAESHAL

SEQ ID NO: 27207 - protein, 405 aa, Symploca sp.
MRTAYQYRLRPTRKQVAKIDRWLSMLCAQYNYLLTDRFNWYEQNRSPVNACPLVCHLPELRVNPDYYSQKKTLPQLKKDRPWYKDIHSQVLQDVVKRVKVTFDRFVKGDSNGKRSGRPRFKPLSRYKTFTYPQIKHSCLQGNRIDFPLLGKVKLVLHRQIPKGFKIKTASISKKADGFYVTFSVDDQTVPEIKTDINPHSITGIDVGLKDFLTTSSGETVAIPQHYRKAQKRLRIIQKKVSRRKKGGSRRLKAIKLLAKQHKKVADKRKDFHFKTANQLLSKYDVIAHEDLNIKGLARTKLAKSVLDAGWSNFLSILTNKAEKAGLLVVPVSAHNTSLDCSSCGEKVPKKLHIRWHNCPHCGCSLDRDHNAAINIKNRAVGHPVLKAQLTSEAVAGVPEKPTLTR

SEQ ID NO: 27208 - protein, 374 aa, Oceanobacillus sp.
MDMTKQHKAFKFRLLPNKDQVIFLAKTFGCVRFVYNKMLADRKETYEKYKNDKEKCKKQKFPTPATYKSEFPFLKEVDSLALANAQINLQVAYKNFFEGRANYPKFKSQKDKQSYTTNMVNENIKLKDRHIKLPKIKQTLKIKQHRDLPADYKIKSCTITKTKSGKYYISILTEYEKEIKPVNVQHVVGLDFAMDGLYVESEQGEKANYPRFYCQSLDKLAKEQRILSRKKYGSARWEKQRLKVARLQEKTANQRKNFLHHKSKELASNYDAVSIEDLDMKGMSKTLYFGKSVHDNGWGMFTTFLEYKLKELGKQLMKIDKWFPSTKKCSCCGAEKPMALSDRTYQCSCGYVADRDYNSAINIKNEGLRLLALS

SEQ ID NO: 27209 - protein, 417 aa, Microcoleus sp.
MIVVERHYIDRQHQFFKQFDNLSFLSINLYNHGNYYMRKHFFKSGYQVGCARSFKNLYAILKPTADYKSLPDQISYQVLKQVFHYGDAWKKSIMAYCRDIHQFSSSPNIQKDKPKTCGRNLLIYDNQLIGERGEHKNNGLLDLSQGDIIIITKAQDLIEVRIVSATAIYVVEVVYEKPVRLVDLNPQLIAGIDLEIDNLVALTSNQLTFTPTLSDGKYVPLINQCFNKRRAFLQSKIDQGKYTARQIQQITFKRNKRVKNYLPKTSSLIVKGLVDEKIGQLVIGKNVAWKQNLALAQKTHQTFVVISYAKLREMISYKAELVGIKVTVTEESYTSKCSFWDLEPVGKQESYQRKRVKRGLFRSLNQTLINPDVHPALNMIRKINGNSPFEECSNCIEVFAVSPVRVEPVRKEPQKVR

SEQ ID NO: 27210 - protein, 552 aa, unknown
  TnpB Polypeptide
MDPSDATQPTIWPGDHPATPEQPGRRCGLFGCLETATWIISDPQGGELPPARSTWTCCSATRSAGAAGQLGAGGRLARMSHRRLAAAPVAAPGAGCGQKPLIVTARSYRRAHDQAREPRDSAVTATVLQAYQFALDPTPRTQGSLASHTGAARFAYNWGLELVKTRLEQRKAGRDVQVPWTLAELRWEWNRAKHQVAPWWADNSKEAYNSGLDALVRALKNWRDSRNGRRSGRPMGFPRRKTRRHARVACRFTTGAIRVLADRKHVQLPRIGVVKTHESTRKLARRLEQGSARILAATITRRADRWFVAFTVEVQRLIPASNGTQSAVGVDVGIRHLAVLSTGTVIPNPHALEGSLRKLRRLNRELARRRPGSKRRSQSRRRLARVHANAANLRRDALHKLTTSLATQHGTVVVEHLHVAGMVRNRRLARAIADTGMAELRRQLGYKTIWYGCRLVVADPFYPSSKTCSGCGWVKAKLTLAERTFCCEACGLRIDRDLNAARNLAQLVQSVAQSGWETSNARGADRKPQHAGQVATKREAGTGSRPDRTGTV

SEQ ID NO: 27211 - protein, 404 aa, unknown
  TnpB Polypeptide
MPVKGVVFRLKGEFPVEVTSLLEDFRLAVNSAVRAGLQARVTSRNALTRLSYSDFRKEHPKMYAQHLVSAFEVAGSVLKNHRRRVRRGNAGRIPYIRRLFMKAENQAYKLDRVNGVVDLPIRAGCHVMLKLVLSDYHRGYLSDPSFTLGSLTLFPNRAIIAFRKNAPKPYAPEAALSLDTNERSLDGVLVRGDSAVVLKAEFPEIAMIQRRHHDKRKKLQKKKAHDRRTSRRLCKREGNRERHRIEHRLHQVANAVLSFAENQKSAVVLEELKGFKPRRNKELNRRLSLWPRRKLHQIIEYKAQWRGIPVVKVDPRYSSRTCPICGRIQDSRMGAEFECECGWHLDRHINASLNLLRTAISKGMAGGLRFNPGAFQHDVMMILYEPAMAARSEPNGTSDAGGTA

SEQ ID NO: 27212 - protein, 265 aa, unknown
  TnpB Polypeptide
VDYKFPSVRVYEGGRGMLLSHKASIKISQEYSNIIGHMCYAASKLWNICNYERRHYKELGLEKYPDWYYQKKAHKGNLWYKQLPSQTAQETCKQLDKAWRSFYVLKKTGGIKDPNPPRFKQDNIPVTYMQMGIRHEKGSDQLRLSLSKDLKSYMEETYGIHEKFLYLENKIFRNMDHIKQLRIYPPENGKCDLIVIYEIEEPEQISQNGHYLSIDLGLHNLMTCYDSGNGRLLFWEESIFLWKDIFIKKSPEFSLYGMHSNRKEE

SEQ ID NO: 27213 - protein, 408 aa, Cyanobacteria sp.
MLRIVKVRIYPDTSQKVLLAKAFGSCRWLWNYFLNLINETYKATGKGLSSYDVKKLLPELKRQEATAWLSETYSQCLQQVCLNLGTAFNNFFEKRAKYPNFKCKHGKQSLQYPANIKIENHCLKVPKIGLIYTKFHRSIEGKIKTVTITKNCCNQYYASILVDDGKDKPEQSSDGKAIGIDLGLTHFAITSDGSKFDNPKILKNHELNLKRKQQQLSRKQKGSNNRNKSRLKVARVHKKITNCREDFLHKLSRRVVNENQVIAVENLNVKGMMQNHCLAKAIQQVGWEQFCTMLKYKAEQEGKVYIEIDRFFPSSKICHVCLNKAGCLPLDVRYWTCKHCGTNHDRDINAAINIRDEGLRIIQTGLTSSGNKFQKQPLTSGTGDKAYRQTVSRSNRGRKKSTTTLVSG

SEQ ID NO: 27214 - protein, 484 aa, unknown
  TnpB Polypeptide
MIRRAYPVSFAFLTARKRRLVAEICRSFRAAVNHYVRLLWSDTEIKSYKDALPPTRLSMHYIDDALRQARTLVSSARKSAAELGVAAGRPFFRGKPILGDNIVKVEIGAGSFDLVLRLATFDKGHKVTLPTKAAAPLRKRLKFEGAYLVQGIALDPDEPILWVASPPPAPKATGEHVAVDVGANVLLADSDGGLHGTAFRAVLDKVRRTKTGSKGRARAYAERDDFVKKTIKDLPWEKVQVLIHEDLKGIKHGKKGGKRLRKLLGPWNQGKVHELLAAKAEDAGVAEVAVDPFCNSITCPKCSSRHKGQRRGSVFKCRNQDCRFTCHADTVGALNALKKARRPDDLVGAAIEQQHKDAAWQRPILIKRAAKAAALSKKTQERGRERALAAKAKKSKLTRPRAATGGRRSTSSTNKALVAPCAIEAAVFGATTPGNVAGEIVRPTLAEGGQPFPVAKSPAAVPERAQRRTDPLTSVTVTSLGPVT

SEQ ID NO: 27215 - protein, 267 aa, Herminiimonas sp.
LEFDIPPFYETSTIIDNMTVPSYGLSQYKLGFGSFSQDARGRWYANVCVEVPAFVGPIKPPELSACVGIDLGLKDFATMSDGFKVEAQRLYRGTEAKLAVAQRAKKKARVNAIHAQIANRRKDTLDKLSTNLVKQNRAIFVGNVNASGLAKTNMAKSVSDAGWTSFRTMLSYKSIATGVLFEEVNEAYSTQTCSSCGTLPDSRPKGIAGIGIREWTCSECGKHHDRDVNAARDILARGRARLTVGIPVLKGRGGCQKSRPKVIARHV

SEQ ID NO: 27216 - protein, 381 aa, unknown
  TnpB Polypeptide
MSKVKKSIRVRLYPTREQGILIDKTIGCCRFVHNQTLADCKQSYEQTQHFPSKNERITNLVPLKDEFKFLKEVDAKALQQSVRNLNSALDNFFKNRSHFGFPKFKSKHNLRQSYRTPYNQRNSHIVDSKHIKLPKLGRVKTKRFDMPDEYKIFNITVERTSTGKYYASICIETEVHPLPKTEKQAGFDLGLKDLLIGSDGTRYERPKFAYAYKDKLSKEQRKLSKMRTKLERAKLNLDECKNYQKQKHKVAKLYEHISNCAKDFNHKLSRKLVEEYDFIAMEDLNIEGMKQNRKLAYSVSDVRWSQLLTFIKYKCQWYDKEFKQVNRFYASSKICSECGTYHNDIVNSLSVREWVCPDCDTHHDRDVNAAKNILIQALSVA

SEQ ID NO: 27217 - protein, 574 aa, unknown
  TnpB Polypeptide
MKRKKKEVQKDTKRLKQPFSVNNQFKNTSIDLWLPTQIDKIENLMENKSWFSINRMSSDNNLKLDSYQFTPKIEQKVSKDKTMTLSKKIKLKLNNKEKKTIDTWFKGYKKTYNLLIDYHRIHKKPFYQHASKEKVVKEPLTLNQIKYYYKSKKFPYKFHTTVECREKLTSIFNILKKLDTKKNRDFNNYKLITFLVRTFNIVLNQENCVITKCQQKDELMHYCINKDSPMVKEYPFLLNTPQDIRDKARRHFISTLESNMKSKKTFNLSYKKWYQNTIEINSITFNNSFLNDKYLYPTVTKRSGNELIKLRSYEQLFESSGSVKISKDRVGSYYIHLTFEKKVQKERKPRNIIALDPGVRKFLTGYDGQDVFEFCGKEFGKIGKYLKEMDIINSRMDTIKNRMNDLSKEIKTLENEEEKRDKSRIRSKLNKRHKRHKLAWFRKIKKVKDVRDDMHKKVCHYLVSNYNHIILPPFETKQMVTKLNSKVSRNMTTWSHYQFQKRLKNKCKEKGVLLHILDEEYTSQICGNCFELTKTSDEIYECNSCQLKIDRDAMAARNIFIKHCCLKPFSVETH

SEQ ID NO: 27218 - protein, 420 aa, Streptomyces sp.
LKQQRGHKARLDLTPVQLWKIEDQGHAARAMWNLLHDLWTMTPKCQRSLSRMDAEIRLDWLAKLPAQAAQQILKTYIRAWVNCWEGRAQEPNFKARFRTRAAVDIPQGRDLRITRINRRWGQVWVPIVGLVRFRWTKDLPGTTKSSPAARVTGARLVKDALGWHIVFRTELTVDEPKPHMGPGVGIDVGISRPMALSDGTFRDHHTWLRPKEAERLRRLERTRERQKQHRKPGEKTSNRLRRTNRLIAGYHARAKRRTLDWQHKTTTGIADMFGVVGVEALKITNMVKSARGTAEEPGKNVRQKAELNRSISAEAWGRTVTLLEYKLSDRGGHLIKVPAPNTSRRCHACGFITEGNRETQAVFVCKNETCGWSGNADTNGSFNIEIATKYQTPQEIVGVRTWSLSQWAGREASTTHPVAL

SEQ ID NO: 27219 - protein, 402 aa, Candidate division WPS-2 bacterium
VVIRHQGYRFLLKPTASEEALLRQFLGCSRFVWNAILAENEARYEQGDPLPLNSFAFSARLMILKRRHAFLRDAHSQPLQQTVRDLASAYQRAFDPSLGADLPIFKRKGEAESIRLPQAFKVQRSGVYLPKIGWVAFRASKRTRAIEGKVKSVTVRLESGRWYVAFLTEREIPEKTHPRPNAVVGIDVGVTRFAALSDGTFIDGPNAFKRHAKRLACLQRRLSRRVKRSANWRKAKARVTKLHFQMANIRRDHLHKSSAKISKSHAIVVLEDLRIKNMSASASGNIETPGKYVAQKRGLNRRILDQGWGEFRRQLKYKLEWSGGKLLLVDPRNTSRTCSACGDVSAENRTTQAAFKCVACGLALNADTNAARNILGRAGCARIACGDLPLGESAKQEAPCVA

SEQ ID NO: 27220 - protein, 364 aa, unknown
  TnpB Polypeptide
MTQAYMAKTIQVILKSEGHEQFLLSKAKAVPKELLPKYERGTYPEGSARIVNNAIHKIWKTMRSSKQIPIDKQISGIVKKNKVLFLKIQTELIPIRIKEVPELDELLIKYYRAGVVWLKGRKWVADILVNVKDHYVEGKPEVVIGVDLGKWHNAYSMWIDGKEAYRAFDKFGDYHFTIRKITHKISEAQQTFEGTRRQLTKILKPLYEKRKMVLRQYYGTLRNKILQHIPEGYNAVFVIEDLESLPRAELRKAQRTWAHQELANGIFFSQLEWNGYKVVKVNARGTTHTCWKCGEPVKSYDNRTIICKNCYPKGLDRDLNGARNIARRYMLSGIGEHSCTPNDRLSSISQVQAEDNRENPAEQE

SEQ ID NO: 27221 - protein, 410 aa, unknown
  TnpB Polypeptide
MSDMLARGIAFRLKNELPPEARFLLEDFRRAVNSTIRAGLQARVSSRNALVKLAYKDFRREHPDMYAQHLVSAFEVAGSVLKNYRRRLRTRDASRVPYVRRLMMKAENQAYKLDRKNGIVDLPIRAGCHVKFELQVSEYHRRYLDDPSLKLGSLTVLPDRLIVAFRKEAPEAYMPESALALDTNERSMDGIFVKGDEARAVKADYQEIAIIQQRHFDRRKRLQKKKSQDRRTSRRMCRREGNREHRRIEYRLHQVANAVLSFAENQKSAVVLEDLKGFKPTWNKELNRRLSLWPRRKLHQIIEYKAQWKGIPVVKVDPGYSSRTCPICGRIQDSRMGTEFKCECGWCLDRHINASLNLLQTAISKGLEVAGGLRFNPGAFQHDVMMILYAPDKGARSEPNGTSCVGAVTS

SEQ ID NO: 27222 - protein, 383 aa, Actinomadura sp.
MVQVKLLPTPEQASALTDTLHRVNTAANHVSAIAFERFGLRGRELPLRRLCYGDLKADGLGAQAAQHVIKRVVDSYTTLRGTIRNGRLGGPTSARRRRAESKPVMFRANAAHTYDDRNLSWQLDAGTVSIWTVAGRCKNLKFTCSPDQAKSLAAHRKGESDLMHRDGMWFLLATCDVPEPEVYEPVDWVGVDRGIVNLATTSDGDYHQGRRLGRYRRWQARKRAELQAKRTRSATRLLKKRARRETRHARHINHTISKQVVAVAARTGRGIALEDLSGIRGRVTVPRDQRARLSSWPFHQLGAFIAYKARRHGVPFIEVDAAYTSQRCPRCGHTARANRPSRDLFCCRRCGLAGSADVVAGDNVRDRARSAWVFVNMPQPAPG

SEQ ID NO: 27223 - protein, 431 aa, unknown
  TnpB Polypeptide
MRLTFIYPVYPTQEQETTLERWLDHLCELQNSARHDRLVASETEGAFVSLSDQQTLLTAAREKYDDFREVPQDFQNHALRRNDKAFTAFRKRCKEGAAKKGYPRYKKRVRSLTWSLRKYTKVVGKKTKDTDKQTRRVRENPIIETDFRHNRLKVPKLGDVKIRMHRPLQGDPKEVTLVKKASGWYAHITCEIPDTPKVEPTAAVAVDVGTTHYLTTSEGEKEDNPRWYRQAEGLLRKHSKDLSRQKKGSQRWRKQQQKLAVHHERTANKRKDFIGKLVYKLYHHRENNVLVAEDLRVSNMVKNKHLSKSISDASWATFFEWAGNIAERDGFHFHQVDPKNTSQTCSACGQKSQRKLSLAIRTFNCQSCGTSLDRDHNAALNILFRAETCAHRGERWITTLTETRNKNEARDAGFGNAKQLLFSDLLTSPSL

SEQ ID NO: 27224 - protein, 404 aa, unknown
  TnpB Polypeptide
MRNTKHKLFYEKSLKYLHNDLDICGIVRNHFIALSMRYFRRYGKGLSYAKMSAHLTKLKRLEKYKHWNIPYSWALQNVLKRLAESFKEMRTLGRGHPQFKSCKKHKGMTFRGEQIKLAYLLPKQKHERNHPTYEIRLNGRWYRFALHRNIEGKIIQVQVTRDALGDVYITLTEECSEVKPEPKTGKAEGFDMGIKDFLTGSDGERYTSPMFYKQNADTLAKAQKSYSRKVKGSNNEERERKRIARIHKKTANQRTDHHWKLAIDLCRKFDIMFFEDLNLRGMKALFGKQVSDLAFGEFIKKLQHQSRKRLKSVHKIGRWTASTKSCSVCEHKNDSIPLSDRQWICPKCHTHLDRDHNAAINILKEGVASFGLGDVRPIVLLGRIVGCSVEVSTSRLLKSTNAFA

SEQ ID NO: 27225 - protein, 414 aa, Okeania sp.
MYGCQQELIKNSENVPFLEYLCTTGNKLINCGIYLSRQWYFKLGKTPGKYDLEKKLKSNINYQFLYSQAAQQTLRTVVEAFKSYKELSKKYKKGELTNKPQLPKYRKKGGMGIINYPKQALKLEKGKVKIPLGRKVKAAFRVDSFFLDFPTNLEFKEIREIRILPRNGCFYVEWVYELKADQPQLDKAKVLGIDHGVDNWLSCISNVGASFIIDGKHLKSKNQWYNKQIAKIKEGKTQGFWSKKLACITEKRNRQMRDAVNKAARLVINYCLKHGIGRIVFGWNKRQKDSIDIGSKNNQKFVQIPTAKLKERISQLCELYGVEFIETEESYTSQASFLDGDFLPTIGEKPKSWKASGKRIKRGLYQTQSGLLVNADINGAANILKKVATTLEFSLKEVSSGTLIMPLRVRFWTA

SEQ ID NO: 27226 - protein, 387 aa, unknown
  TnpB Polypeptide
MLKSYKYRIYPNENQKELLSNIFGQVRFVYNLGLETKIQAYTANKKHLTCFDLNKQITDLKKDLTWLKDSPSQALQMAMYNLDNAYTNFFKGSGFPKFKSKYGNQSFQLPQGVKLSENKEQIYIPKLKMVDIDYHREFKGDIKTVTVSKSVTNKYYISVLVDNNKDLPDKKPIKLKTTVGIDLGIKDFAITSDGKKFKNHDFFKSSMRLLRIEQRSLSRKQKGSNHYNKQKMKVALLHEHIKNQREDYLHKITKYLVDNYDTICIEDLDVSNMLKNNKLSRAISDMGWYKFKSFLEYKCDWYGKNLSIIGRFDPSSKTCSNCGSINKKLNLNDRNWICQSCDYQHDRDVNAAINIRNFGLRNQPSVTQSEWLHCTCGVETHKSSVCV

SEQ ID NO: 27227 - protein, 397 aa, unknown
  TnpB Polypeptide
MLKSYKYKIKPTEDQKVLLNKHFGSIRFAYNYFLNERRFEYETNKQTLNYNDNSAALTKLKKQDEFKWLREINSQSLQHSLKGLDDAYNSFFKKRTGFPKFKSKHHKNSFKVPQFVKVKDGCLIIPKFKYPIKMIQDRKFKGEIRQATLSKTPTGEFFVSILVETDHKKFEKTGKEIGIDLGIKDFVITSDGYKYKNNRYTKTYSRKLKENQRHLSKKVKGSNKYNKQKLKVAKLHKKITNSRLDNLHKVSTELVKNYDVIYLENLNIKGMIKNHKLAKHIADVSWGRFITLLEYKAIWNDKKIVKIDRFFPSSKQCNNCGYINRNLDLSIREWTCPSCNMELDRDLNASKNILKEGIKIISSGTDDYRHGVQIRPVLTGTSDEVFKKKERLSPETH

SEQ ID NO: 27228 - protein, 386 aa, unknown
  TnpB Polypeptide
MLRKAFKFRLYPTPAQQTLLRQTLETCRGVYNSLLLERKVDFERTGKSPSRSEQINQLPLWKKAHPQLGQVFSQVLQNVAVRVDLAFDAFFRRVQKNENPGYPRFKGPGQYDSFTYPQSGFCLKEATVTLSKIGTVQAIVHRPTEGKVKTCTVRVQSGKWFACFCCEVQAEPLPETEEKVGIDVGIEKFAALSNGEFIQNPRFLRKQEQALAKAQRKLQKQKQGSRKRRKAKKAVSRIHERIRNRRHDFVHQTARRIVNRFGLIAVEALQVKNMSRRPKPKQDEETGEYLPNGASQKAGLNKSISDAAWSVFRTVLTQKAESAARVVVTVNPAYTSQDCSGCGSRAPKKLSERWHLCPCCGLSLDRDTNSAVLILNIAVGLHSVPA

SEQ ID NO: 27229 - protein, 378 aa, unknown
  TnpB Polypeptide
VKTFCFKIYNSKKNRYLHNQISVAGEIYNHCIALHKRYYRMYKKSLNAYSLQKHLTKLKKLDKYSHWNQLGSQAIQDIADRIDKAYKLFFRNQKHGIKSGTPNFKKRRNYKSFTLKQAGYKLLEDNKIKIGNKIFKYFKSQDIQGNVKTITVKRDKLGDIYIHIVTDFVETRTAPRTGEIVGFDFGLKTFLTASNDNDIESPLFFHQNSNAVRKANRKLSKKQRHSNNRRKARKSLERLHKRIANQRSDFHWKLANELTDKYDFMFFENLNIKAMQMLWGKKICDLGFYSFMLKLKYLSSVKGKTIFCIGRFEPSSKTCSVCGYIYKDLELKEREWRCPECATLHDRDRNASYNILRVGASTLGLGDVSPIEMLAISA

SEQ ID NO: 27230 - protein, 295 aa, unknown
  TnpB Polypeptide
MIMLLESWQTQSYFAYTVELKLREGEIYGSVSFEIPTPEVKYTKENGVIAIDTNASPIHLAIAEVSKTGELLSYQTISLHHLIGLSQNSKDHQEWVLAHRIVDLAIEKGKAIAVENLKKLKKGTRGDGKAKLRKILHQWNAKKFLQKLKRVAMLKGVEVVEVHPAYTSVIGMLKYAPQLSIDKDVAGAYVIGRRALGFKEDMPENYEKLLKDKAYLEFALKRYEEREKELRELIEKESNEYKRNALESELRSVENSKKLLTNLIQSLQSESSSCGGCSKNPLLGPSPQRIRELTR

SEQ ID NO: 27231 - protein, 450 aa, unknown
  TnpB Polypeptide
LAKKAKKTDLAEKAPTKFANIAFKTAFIPASNEQRQKLEQGFGTARFAFNWALSTWEANRASDQKNSFMGLRNTLNSIKREQFPWMTEVPKDIPAEAIRDLSTAFKNFFDKGTKAKYPKRKKKGKAKFSFRLPGDRLRYREAIRDDGTAVTEVYLSTIGWVQLREPLIAVGRIIYVTVSRRADQYFASFCMEYEPIKRTRRVTKPMSVGIDLGLVHTLTLSSGVKIESPRSLSRFATQLAKANRLLHRKVKGSNNRRRAARNVARLHRRIANIRRDFTEKATTNLLRAYDVIGVEDLNVAGLLKSGRFSKSLSDSALGGITAALHRKATKYGCLVTEIDRFFPSSKKCRKCQVKNHDLTLADRMFHCSSPTCDHKEDRDIHAAKNIHHEALSQLPRATGEATPVEIWSIPTELSGPVGKPSRRSRKRMPRGAVTSNTVQRQNPSESAQHV

SEQ ID NO: 27232 - protein, 305 aa, Coleofasciculus sp.
MIVLEFKLKGRHEQYRVIDDMIRTAQFIRNKALRYWMDNQGIKLSDLYKQCAVLAKKFDWAGKLNSMARQASAERALIAIQRFFANCEANSPGKKGFPQFKKCTRSVEYKTSGWKLSSDKRHLTFTDGFKAGTFKLVGSRDLYFYASEEIKRVRVIRRADGYYSQFCINVERVEKIVPTGKAVGLDVGLAHFYTDNTGETVPNPRHLQKSEKALKRLQRRVSKKKKGSANRRKAIDRLGRKHLKVSRQRKDFAVKTALCVVKSSDFVAYEDLQVKNMVKNHKLAKSISDAAWSQFAQWLQYVGKV

SEQ ID NO: 27233 - protein, 420 aa, Moorella sp.
MSQLKRNTAAKKGKRQKQGDVLVEKLPLRLKPHEEELAKSLQRESAKVWNTVMTIHRLFWIKYGIWIDEATMKEFLKGRFSVHSQDVQAIIETYYECWERTKKLHEEGHTEWRYPWRLKRFFTSTWKVTGITVEDGYLRLSNGWKKPPLKIKLPARLKGSEIKQVQLVWHRNGYWLHIAVVKPALEKVQGDAVAAVDPGEVHALTLTDGREALIINGRHLRSLHRLRNKTLRKFQKAISRTKKGSNRRRKLLAAKYRFLNWIEAQISHTEHTITKMAADWCLERGVKKVYIGNPQGVREQDCGRYHNQRMGQWSFGRLRDLLEYKLKRYGITLEKIEERGTSGTCPLCGKYTKQTGRIYRCGNKECGFSGIHRDVIGATGILDIAVNSRFTSGRKLPETVSYVRPAVLTPMPGHKTKKAA

SEQ ID NO: 27234 - protein, 446 aa, Moorella sp.
MNRGEEMGWAKQKGKQPENRLYLTRMVPLPLDHYLPLLKPPMLAGTKIWNSCVWESREARKNNEKYPTESELKSRFKHYGSWKSLHSQSAQAVVEEYFEAVRSYIKHRENGHEEMRPPGLKNKNLLRTITWKRQGFEYREGTITLKLSRKLNDIRVPLPEGADSLKLPDGTVLVGTPIEVKVKAVYRKRKIAGLEIHVTWDFGVVPLIAGNRVSAYDLNTALIARASTTGGQQLIVCRELLSLIQYRNKTIAEFQQKISRLKEGSRKWKALLKAKRKELKKLERRIKQLTNAVTKLMAEIDAAENIAVSVLGDLGDLRRKARTNDKNKKASQKINQLPYAQIEQQHKYKSLLKQICPDKWSEKYSSQTCCICGTRNKSFRVHRGLWRCRSCGAIMHADLNGANGILKNYLIGHCDMKQLFPLKSPEVYRWDKRWNRFVKVSPRAAA

SEQ ID NO: 27235 - protein, 226 aa, unknown
  TnpB Polypeptide
LIFQFYTDQGGQCCNVFSDGELSTSSQGATRQEGLGWVIHVCRKKKGSRNRGKAKHRLARQHYRISCVRKDALHKATTAIAKRCVIVGIESLNVSGMMKNHCLARSLSDATMGNFLRCLKYKVAWHGGTIVEADRWFPSSKMCSVCGEVKHKLTLRDRVFHCDSCGHIQDRDENAACNLRNLAVSSTVTACGEESAGLVHLNQVKLSSMKQEPNPDGGPVSSIGSV

SEQ ID NO: 27236 - protein, 305 aa, unknown
  TnpB Polypeptide
VLEKRHRKYFLRFSYTEEVPLTKTPVKEQIICSVDLGLNTDAVCTIMRADGTVLGRKFIDHPSEKDRMYRVLGRISRFQRKHGSAQVKSRWAYAKRLNTELGRKIAGAVTGYAEENHVDVIVFEYLEIKGKISGRKKQKLHLWRKRDIQKRCEHQAHRRGMRISRICAWNTSRLAYDGSGTVVRDPGNHSLCTFQNGKRYNCDLSASYNIGARYFIRELLKPLPVTERSLLEAKVPSVKRRISCVYADLRELFFRNGTLKSSINTGRYTADYLWCGNLPYLAWKKAHDCAYPKLQAYPPIFSLVA

SEQ ID NO: 27237 - protein, 392 aa, unknown
  TnpB Polypeptide
VSRVRVVKSVRQKHEASADLLQLLNEFRRMMNVCIAVGIEENVSSLKTLSLKSYHRLSCGILGYYRLCAISTATGILRNYRKTKKKNPRTRFPYARKLMLTTCYGFKIQNGLLRLPVRPRQYSYVRLNNHTLQVVSGLSVHSVTLTPDSLTMSYSKETVEIEPEGYVGIDRNLDNITIASTDGTVKTFDMSKATVINADYRYVKSRFKRNDSRTRTQIFSKYGEKQQNRVQPLLYGVSKRIVEEAKTGRCGIIMENLTGMRRLYRKGNSQSRNYRARMNSWSYGELQRQIEYKAGWKGVRVIYVSARNTSKRCSICGYKTLESTQRRLWCPQCGTILDRDENAARNLAAGGLRFSPSGPPGEAMVEEREPENATLILKVDGGKLGPTDPTKT

SEQ ID NO: 27238 - protein, 520 aa, unknown
  TnpB Polypeptide
MGVDAYRTAILPARVSGDTVQTLHDTAAQYTYCQNETVDYCWPDTPKQPDDLTTTKRDVRDAIYSRLKDETDLNANLVQAAIKETVENIDGLKTDWEKGRRISKPKYDHTEGGWSMLFDKRSATFRKWQITLSLADGNRHEVEFTLPEGLDNPYGEYVLSDMFEYRTTRIVYRPDAPSGHEFQAHVQTLADIDPVPLPSQHSIQETTAFGSLTRSAWQEIIRTRENGSDTSEHRRVLGVDRNVHGYSAVTSAGGFHGSADQLNHRRTEWEKTRAGLQQTDTRSAHRTLQSVKGREWRWFDQRAHAIANLICVDAVRVRASHVVFERLLDIRRRISNDKEYQQWFFKRVEDYVEYKLEPYDVVVDNVNGAYSSQACSRMDCSHVAEANRSGKEFECGECGYSLDADLNAAKNVAYRYVREEFRSDEVADDAKWFPVVDQAKEDADNGVSGTHKSSSGRAASEPTEDADSQPAPKTAIVLKSGLIGLDGRFTRREWLEPATVESTTESRTSPTLNEAAPAAE

SEQ ID NO: 27239 - protein, 237 aa, Oligella sp.
MKTLKLRIREKHAKALDELSRSVNFVWNYVNDLSYTHLQRTGKFLSAYDLSEYTKGSGEFLNLHSQTIQAVNETYAKSRKQFRKAKLAWRTNHPKAKRKSLGWIPFKKSAIKHVASRQMGLKSLKSTLQLSLGKGNQLMIDLWDSYNLSLYSINTLEIVQDSRGRWYACITVKDFPKKTCGTGKVGIDLGLSSAAVASNGDTLEMKQTQQWAKPLAIAQRARNKKRVKAIHAKIKNT

SEQ ID NO: 27240 - protein, 398 aa, unknown
  TnpB Polypeptide
LKNEVNQMIKSIKVRLNPNNKQLTKLFQYAGCARFAYNWAISREQDNYKQGNKFLSDNELRKEFTQLKKLQEYKWLNKVSNNVAKQAIKDACNTYKRFFKGQCRYPKFKSKKHSTPSFYQDNVKIRFTDTHVKVEGFSMSKKQNKQKLNWIKLCEKKKIPIDCKYINPRFTYDGLYWYVSVGIEVDDNTIFPSNEGVGIDLGIKDLAICSDRNTYKNINKTQRIKKLEKRKCRLQRSISRRYEKNKKGASYCKTSNIIKKEKELLKVTKRLTNIRHNYLHQTTSEIVNRKPKFIVLEDLNVSGMMRNKHLSKAVQQQCFYEFRRQIEYKSAWNNIPVIIADRFFPSSKLCSCCGNVKKDLKLSDRVYRCECGNVVDRDFQASLNLKMYGENVLKQSVA

SEQ ID NO: 27241 - protein, 379 aa, Anaerolineae sp.
MLRTYRYRLYPGQDQQQSLNDILWAACWLYNRALDYRRKRWDESRHSVTYYEQAGMWRDWRNEAPGANPLRRLNMSAGQQVLRRLDGAYRQFLKGQRGRPRFQKSSRFNSVNYKPGDGAAVRGSRLYVQNAGLIQVRWHRALPEGKLKNIVLVRKSTGWYVLFQLELPQPPVEKSTHPPVGVDLGNTHALALSDGITFDSPKSLQASLRKLRLLQRSVSRKKKGGRNRHKAMRKVARLHEHIANQRLDWWHKTTRHLADTYGTIVLEDLSLTFMLQNRHLSRSAHDVGLGMFRTMLNYKAMEAGVEIVTVSPRNTSQACSGCGHIVLKDLSVRLHDCPDCGLTLDRDVNAARNVLRLGYRRWALTWEDAPSVAQEAVRL

SEQ ID NO: 27242 - protein, 379 aa, unknown
  TnpB Polypeptide
MPKKNDDLGHKAYVFRIYPNAEQKVLLAKTFGCVRWVYNHWLDIRKTAYADRKESVSYNKCSQQLTDIKKSEKYSFLKEVDSIALQQALRHLDEAFQSFFSSQGKGYPKYKSKKENDRSYTTNCVNGNIELSNGYIKLPKIGKVKIKQHRKVPDSYILKSVTVKQTPAGKYYVSILFEYEKQVQNKELLSFLGLDYSMHELYKDSNGNEPAYPRYYRNAEKQLQREQRKLSHMQKGSSNRNKQRIKVAKLHEKVANQRKDFLHKLSRQITNAYDCICIEDLNMKAMSRSLRLGKSVSDNGWGMFTAFLKYKLEEQGKRLIRVDKFFASSQTCSVCGYQNNATKDLSIREWDCPQCGTHHDRDVNAAINIKNEGMRMLSA

SEQ ID NO: 27243 - protein, 417 aa, Coleofasciculus sp.
MRHQAIKVRLYPTTEQQVILAQHFGCSRWWWNYALNLCIETYQLTGKGLTRSALNAFLPKLKKQEETEWLSECYSQVLQATTLNLVAAYKNFFEGRARYPRFKAKRNKQSIQYPQSVKVVDGCLKFPGRVGVVKTKIHRPIEGTIKTVTVSMTPSGKYFASVLTEVEGDNPPVSTLASRSEGKIAGIDLGLKDFAIVNDGVKTSKFDNPKHLAKHERNLKRKQQKLDRKEKGSKSRDQARKLVARVHERVSNVRQDYLHKLSRKLVDENQVIVVESLNTKGMVRNHKLAKAISDVGWGMFVNFISYKLEKEGKVLVEIDRWFPSSKLCSNCHYQVDEMPLEVRSWTCPSCGTHHDRDGNASANIRAEGVRMLRQAQQHLSVSGTGTADGGGDVRPKLGRKSKLTQSPAKPEAQASTK

SEQ ID NO: 27244 - protein, 409 aa, Coleofasciculus sp.
VRTAYQYRLRPTKHQATALDRWLSMLCAQYNYLLADRFNWYEQNRSPVNACPLVCYLPELRNNPDYYSQKKTLPHLKKTHPWYSEIHSQVLQDVVKRVKVTFDRFLLGDSNGKRSGRPRFKARNRYRTFTYPQMKDGCWRGNLINLPKLGKIKVVLHRPIPDGFKIKTASVTKKADGYYLTLSLEDKTVPEIKPDFNPDKIAGIDMGLKEFFTTSAGVVVNIPQHYRKAQKRLRVLQKRVSRRKKGSNGRLKAVKQLGRQHKKVADKRKDFHFKTANWLLSKYDVVAHEDLNVKGLARTQLAKSVLDAGWSSFLSILTNKAENAGLLVIAVSAHNTTQDCSNCGEKVPKKLFMRWHNCPYCGCSLDRDHNAAINVRNRAEGHPVLKAQRLLSNSRIGCEAYTIPVLRLV

SEQ ID NO: 27245 - protein, 307 aa, Coleofasciculus sp.
MKFKKNCRSVEYKTSGWKLSENRKAITFSDKKGIGRLKLKGTYDLNFYSIDQIKRVRLVRRADGYYAQFAVKADVRVKTKPTGKAIGLDLGIKYFLADSNGNTEEPPKFYRKSERQLNRANRKKSKKYRRGAKPQSKNYHKARKRYARKHLRVSRQRKEYCKQVAYSVIQSNDLVAYEDLNVKGLVRNRHLSKSISDAGWSTFRQWLEYFGHKYGKMTVAVPPHYTSQDCPKCHHRVKKSLSQRTHVCGNCGYTEDRDIAASLNILQKGLSTAGHAGNYAWGDLPSWAIGAILSSNGGSENQESPSM

SEQ ID NO: 27246 - protein, 277 aa, Helicobacter sp.
MLSNNTLKTNKTATALSKKKNGKVMLITYKQKLYKNDKNRRIDTLLRRYGVFYNHCIALHKRYYRLFKKYLKLNDLQKHTTKLKKTHRYAFLKTLGSQTLQDLTERIDKAFKKFFKKQAKLPRFKKVANYKSFTFKSQVDKKTGLNKGVGFEIKDNVVSFNGYSYKFIKTYALIGKVKTLTIKRDNMGDYFLCLVCEIEDKPKPAGGNSVGLDFGLKTFLTCSNGAQIPSPLFFSKYLPLIRACNRSLSKKKRDSHNRLKARLILARLHRKIKNLRM

SEQ ID NO: 27247 - protein, 448 aa, unknown
  TnpB Polypeptide
VKQIITAKLKIITTPEQFQALRTTQLAYRDALNAVSQYAFEHGKTSSKVALHRGMYPELRTRYHLPSQLACSVERQVAATYKGLWTKLKKNAEHRRKKITKKRFKGLDQPPHYSSPTLQYTYERDYTFQCERHVSVGTLNGRVSIPYQGYNKHLAHIRSEASIGDARLWYDKVRKTFYLLVSLEIDVFELTSEQLSEVVGVDVGIRYLAVTSTSTGKATFHPGKRVRHKANHYARLRKRLQKKGTRGAKRRLKRIEQRERRLKAQASHSIAKQIITQHPHALIGLEQLTDIRERTKRKKRKRKKNGKGYERVSSKARKANRIYSQWSFAELHGLTSYKATLAGSKAIKVDADYTSKQCSMCGYTADENRPRKGLLFVCQNPGCGYTLHADLVGARNVTMRTLLVRHDWIRTGCLSIIPDASDKEAKAARLQRYAELRWSPDVTQASGL

SEQ ID NO: 27248 - protein, 390 aa, unknown
  TnpB Polypeptide
MKAIKVKIYPKKWQKETIEKHFGCCRVIYNYGLEQKIRTYTETKKSIGIYSIQKEIPKMYEEKPWLKEVNSQSLQQSLKDLDSAFSHFFKKNNEFPKFKSKYNTKQSFRVPQHFELSKDKKYIKIPKLKWIGFRDKFNLPKNVEFRNITISREGNEYFASICYDDKKVIQLPLPIEENKTLGIDLGVTHLAIFSNGTKIENPKHFKKYESELANEQQKLSKKENKETKAYQKQKLKGNKIHKKIRNTRKDFLHKLTTNIVKNQNYTSYCMEDLAVKEMEQDNYSSMSKAIGDTGGRMLRTMMEYKCKEKGKNLIIIGRFEPSSKTCSVCGHIYKELGRDEKEWTCCKCNTIHDRDINAAMNIKNFGIIKSLGKDFVETSESELKLEPHEL

SEQ ID NO: 27249 - protein, 367 aa, Eubacterium sp.
LNIAYRFRIYPTEEQKILLGKTFGCCRFLYNQMLNDKIREYEKTKKMLKNTPAMYKKEYPFLKEVDSLALANVQLHLEKAYKNFFRDPKIRFPRFKSKHHSKNSYTTNVVNGNILVESKRIRLPKLKWIAMKKHREPAEGLRLKSVTVSMEPSGKYFASLLYEGYSCENQAAEPDYSTAKILGIDYAMQGMAVFSEKVETEEAGFFRKNEKRLAREQRKLSRCVRGSHNYELQKKKVARCHEKIRNQRKDHLHKLSRKIADGYDAAAVEDIDMKAMGQCLHFGKSVQDNGYGMFREMLDYKLAWKGKKMVKIDRFFPSSKKCCKCGRVKKELKLSERVYHCVCGNKMDRDRNAAINIREEARRMLTA

SEQ ID NO: 27250 - protein, 382 aa, Escherichia sp.
MRRFAGACRFVFNHALALQNENHEAGNKYIPYGKMASWLVEWKNATETQWLKDSPSQPLQQSLKDLERAYKNFFRKRAAFPRFKKRGQNDAFRYPQGVKLDQENSRIFLPKLGWMRYRNSRQVTGVVKNVTVSQSCGKWYISIQTESEVSTPVHPSASMIGLDAGVAKLATLSDGTVFGPVNSFQKNQKTLARLQRQLSRKVKFSNNWQKQKRKIQRLHSRIANIRRDYLHKVTTTVSKNHAMIVIEDLKVSNMSKSAAGTVSQPGRNVRAKSGLNRSILDQGWYEMRRQLEYKQLWSGGQVLAVPPAYTSQRCACCGHTAKENRLSQSQFRCQVCGYTANADVNGARNILAAGHAVLACGEMVQSGRSLKQEPTEMIQATA

SEQ ID NO: 27251 - protein, 373 aa, unknown
  TnpB Polypeptide
MHKAYKFRLYPNAEQEKQIQRTFGCCRFVYNYYLAKNIEAYKTGTKHMNAFACMNDLTQLKKERGWLREVDTTALYSSLEDLQFSYQEIFRNRQRGVEFPNFKRKNSSRKTYRAKISSLKKGYPTIAMCLRHIKLPKLGLVRCAVSKQVEGRILNATISQAPSGKYFVSVCCTDVEIPQCESTGNAVGIDLGLKSLAITSDGTTYENPHHFDKLAKKLAREQRRLSRKPKGSKNREKQRIKVARVNEQIANRRLDNIHKMTTELVRQNDVICVEDLAVRNMVKNRRLAKAISDIGWGEVRRQLAYKCEWQHKALVAVGRFFPSSQLCTCGYRNARVKDLSVRYWTCPECGVHHDRDINAAQNILKEGLRLIAQ

SEQ ID NO: 27252 - protein, 382 aa, Herbidospora sp.
MSSMMDRSCTRLQAMGQLVKRAYKYRFYPTSVQAEQLAQTFGCVRLVYNKALEERTRAYQIEGRRVSYAESSAALTRWKRTEELSFLNEVSCTPLQQALRHLQAAFVNFFAGRARYPVFKSRKKTRASAEYTRTAFRWRRGRLTLAKMNIPLDIVWSRPLPEGAEPSTVTVSWDAAGRWFVSILVEEEIAPLPCSRAMVGVDVGLTHLAVLSSGEKIANPRHERADRRKLAKAQRALARTTKGSRNRVKARLVVARIHARIADRRRDHLHKVTTRLVRENQVIAVEDLAVRNLVKNRSLARVISDASWRQLRTMLAYKASWYGRELLVVDRWFPSSKQCSVCGVVGESMSLGVRDWVCGCGVHHDRDVNAARNILAAGLAER

SEQ ID NO: 27253 - protein, 471 aa, Boseongicola sp.
LDPESITGDDALSPYWNGLCAEMQSKWWLPHRTASPGRAARSSGTSSNFREEASSFWKRAIFPTGPASAASLRISLPPGPPVTASVLVKATRKIRAYPKNPGLLHELVRQQRRAYNLAVACFREADDGLVDPKGPDLKQTVLRATIRDFVRSEVHERGGTFRSADCDEAVNAAFRARDAVIRKRKAGGRCRLSFRSIRDMRQRIAVQKLSGAFVARNFDLAEPMPDEAWKKLTTIVLERGIWFICAQLHIVTVGQDEIQVRSVVALDPGVRTFVTAYSVNHAASYGDRFHSDKVFPLLLKLDRLIGQRTKAKHEGWKRHFQKRIDKLFIRVRNLVDDLHRRVAYDLVQSFDVIILPSFETKGMSAKEDRKIRTRTVRSMLGLAHYRFRRKLEWTCRKYGKRLVICNEAYTSRTRSWDGFVNENLGGAKTVSDGSIVVDRDMNGARGIMLRALYGNLGRFRAAGADVALVAK

SEQ ID NO: 27254 - protein, 430 aa, Hydrococcus sp.
MYATQKNQLRRLKEQEFNALSALCRLSKNLFNVALFECRQYFFTERKRLTYESNYHICKTNENYRLLNTDIAQQTMRVVDRSMKSFLGLLKAISIGSCNQKPKLPNYLPKEGYFPLIIPRIKRYEDGTFAVPMSQQFKREYGEVRISLPERLKDKEIKEVRIHPKYQARWFEIEYIYEDEKIKTSVDGNKAIAIDLGVDNLCACIDTDGHQFLIDGKKLKSINQWYNKRNAQLQSAKDGAYKRLNQVQATAPHKQGIKSFTHKQARLYQWRNNCVRDYLNKAAKVVIDHCLKHQIGKLIVGYNPGIKQEINISKSNNQNFVQIPFWQLRRKLEALCSRYGIEYLEQEESYTSKASFYDQDTIPVYNADNPSQHKFSGRRIKRGLYRTKNKHLCNSDINGSANILAKSKHRLDFQRVSSGFLANPLRMNIS

SEQ ID NO: 27255 - protein, 392 aa, Nostoc sp.
MRITYQYRLRLTQKQIDTFEHWLELCRRQYNYRLAERFNWWEQNRCDVNRCSIVCCSIAPLKDQPNRWSQQKDLANTKALFPEYKELPLHTLQNVIARVDKTYTRWLIGDKNGKKSGRPRFKGKGRYRSLTFPDPIKPEHIQDKFIQLPKIGKVKAILHRPIPDDFKIKTATITRKADGWYIGLSLEDMTVPSLKTDAIPTPDNTVGIDMGLKFFLVTSDGEEVAIPQYYRKSQKRLKRLQRQLSRKQKGSKRRALAVKRVAKLHQKVANQRRDFHYKTALWLLSKGYKFIAYEHLNIIGLARSRRSRLAKSILDAGWGQFLAIASLKAANAGGAGLPQNSHKSTIECSDCGQDVPKTLADRWHNCQCGASYDRDHNAARNIKHRAVGHRVL

SEQ ID NO: 27256 - protein, 427 aa, Streptomyces sp.
MKADAGRRYRAYPTGEQESVLTRWGHTGRALWNVALEQRVYLYQQRGYTLRAVEQCKHLTAARAELDWLGDLPAQAGQQILRRLDAAYDNFWNPDHPARFPARKRRGHRLSIPFPGQAVEVRKLNRKWAEVRIPKLGRLRFRLSRAIGGTIRNATISRDGNGWHISFGVHTGTRPAAPNGKPGCGVDFGVCTSAYVSTESAPRLMPPSLTDSEKKRLKHLEQRKARQVTYAKKHNGGKYGRRLRRTIADIGKLRARQATRRRDFTHKLTTDLAKNHGWIGIEDLRVKNMTASAKGTVENPGKNVRAKAGLNRSILDNTPGERRRQLAYKAPLYGSELRAVPPFHTSQTCAACGRVDPESRKGCGRLFACVHCGHEDDADHNASVETEARARRTGGTVTNSTRSVPRTRVPATGRRRMRETPKPAHAG

SEQ ID NO: 27257 - protein, 393 aa, Roseiflexaceae sp.
MRRTIRLQLTPSTTQAANLAETSRQFTAVFNAVCMVGWAEQITNGVKLHHATYYPLKAAYPALVSDLLVQARVKATEAVKSAFVLHKQGRTTRMPVSKACPPRYNVHTYKVDWESQTVRMSMIGGRQTIRFDIPAYTAAYAGYPTDSADLLFRHGRWWLHVVVTIPAPAVAPTEQVVGVDLGIVRPAVTSNNRFLGKRAWKAIEGKLFHLKRALQKKGTKSAKRHLRRVRGKQARIRRTNDHILSKQIVQSVEPGGTIVLENLTDLRKRTKMRKRTATSRRVHAWSFAQLKAFIAYKAEARGCTVVAVDPRHTSQACSCCGHTARNNRRSRGRFVCRACGVELHADLNAARNIAAKYHASVAIRDAGGLHVNQPIVSNLRVETQAATFRRAVS

SEQ ID NO: 27258 - protein, 478 aa, Nocardia sp.
MSRHTTFRYRLDPTVEQAAALARHAGAARFAFNQCLGIVKTALTQHEGDPEHAVPWTRFDLINTFNRWKKTEAAGRVFAAGSNGPAEIVVTGLAWRKQVSQQVFEEAASDCGRALAAFSNSRNGKRRGPRVGFPRFKSKKGATASFRLRNKYGTGGSPSIRVGDNEIPRSVTLPIIGMLALCEDTRRLRRLLASGRAKILSVTVTEKLGRWSISVTCEAADLHSAHQHRRRDSEDREGWVGVDRGLSTFVVAATADGSETDRIDSQPRPLAVGLRQLRKLSKAVTRKEKGSRNRERAVARLARHHHRVANVRRHFLHQVTNRLVKTHDRLVIENLHVAGMLRNRRLARAISDVGWGEFARLLAYKQQWRGGEVVTPDRWYPSSKRCSACGTINTALTLSDRQFVCGCGFRADRDLNAAINLAEWAAARQDVSRSPDLPAGGRVIKARRREGAGRHSSGVGGTGPVDAGTDTHTAALPV

SEQ ID NO: 27259 - protein, 465 aa, unknown
  TnpB Polypeptide
VLVIVAMRTKAQAQQVAELTGGKIILKDNKPTCKVVLPGNFEQYRKDVESVSVLFKLYDKAGKPVPSGWTLTGATFEVEWPKDSPINSHFGARRFAYNWALATVKSDMDAKKKDENYVSTQWTLAALRKRWNQEKNTVAPWWASNSKECYASGIADLVQALSNWSQSKAGKRKGKRVGFPKFASKRRDPGRVRFTTGAMRFEDDRRTIVLPNIGALGSKENTRWVQRHLAKNNARLLNCTLSERWARLFISCQLVIRDKLASPINQAPSKPTTRVGVDLGLGSFVTVTDSNEDRIVFSNPAPLRASMAELKRTQKQLSRRIPRSHGYERAKTKLNRLYRKSTSMRRENVHQVTRYLMDTYGEIKIEDLNIAAMKQSMRRRAFRRSLADAGLGAFGPTTHYKAKRAKVKVVVVDRYFPSSQIHHNCTGKLTGAKLATRLTCDTCHVEVDRDEKLRSISVTGRLSVG

SEQ ID NO: 27260 - protein, 379 aa, unknown
  TnpB Polypeptide
MEQITITAKIQISATADDKVLLNKTMSVYSDACNYVSDYVFRTHDLKQFSLNKALYSTLRERFGLKSQMAQSVFKTVIAKYKTVLENESKWIKPSFKKPQYDLVWNRDYSLTQNCFSVNTLSGRVKLPYFAEGMSKYFDHTIYKFGTAKLVNKHDKYFLHISVTYDVEESDISDICNVVGIDRGINFVVTTYDSKHKSGFVSGKAIKQKRANYSKLRKELQMRQTPSARRRMKAIGSRENRWMQDVNHQVSKALVKNNPKHTLFVLEDLSGIRNATERVRTKDRYVSVSWSFYDLEQKLIYKAKQNQSTVIKVNPAYTSQCCPVCGHIEKANRNKKIHLFCCKNCGYKSNDDRIGAMNLYRMGINHLEDSQVPDTVTAE

SEQ ID NO: 27261 - protein, 490 aa, unknown
  TnpB Polypeptide
MKEMRAQFKGVISSSFDAQLYINVFTCYQNKFDAIQRKLKFEVHEFNGFEFYQRDTKNHKKGELKRVLVKKKQTPLSNCLTYLARYGNEGIIEYINNNIDKCDDKKREFYNNILRCCKKFGFDRLYNLALAKRKRILNHYADKPIEFKSLTFSGRSRKKYIVDFNKNFGSKINSFVTLSGFNQKSLDIPVKYNKGYHGNMKDYRKDNPNYEYVITFDEKNHQVKVNLCKDGERYIPEPNGKTIGIDVNCKHNLFSLSNETTYDYDRKLVNDYCKLLRDIDMLKSKDKNYIVGKRKQWKLDKLKEKVIKFEQQTISTMCKGLKEQGFGHIVMEDLDNGFGKCYVTDKDNENINYNRKVSFLGLSSLKQEVEHIARKYDIAVSTVQASYTSKMCQMCGCIDDGNRPTQEEFQCVECGHKDNSDFNAAKNIRNRVLVTVLRENLLKQLDNGAFKPKTFKREKVKDVLLSFRRNLQDFARSECIESGLVTFDYV

SEQ ID NO: 27262 - protein, 379 aa, unknown
  TnpB Polypeptide
MLRAIKIRLYPNKQQEQTLNKVLGCYRFVYNDMLARKQEAYNTDKTNLSLCDLSKYFHHELLKDEQYAWLKEQNTKVMGQSIRQMFTAYDNFFKLKKGFPKFKSKKDGQSALFPLDTISKRNTFKTRHITLVKSLKNIKFRCSDLYLKRLQRYKDDIRSATLSKTKSGNYFLSILMDIPQNEFVKFKKTNKEVGIDLGVKDFVITSDGKKFENKHFFKADERKLKKLQRQLSKKKVGSNNRNKQRIKIAKVFEHITNKKEKYIHYVVNDLLSSYDTIYMEDLNTIGMLRNHHLGKAISEVGFYKFKEILNSKSIANDKNIVLIDRFYPSSKTCSCCGYKNKGLKLQYRHWQCPQCGEQHDRDLNAAKNILYEGRRINAA

SEQ ID NO: 27263 - protein, 379 aa, unknown
  TnpB Polypeptide
MLRAIKIRLYPNKTQEQALNKVLGSYRFVYNHMLALKQEAYKADKTNLKLKELSKYFYNELRKDEQYAWLKGQNTNVMQQSIRQMLTAYDKFFKEHKGFPKFKSKKDKQSASFSKHAISKKNAFDTRKITLTKNLKNIKFRCSDLYHKRLQKYKDNIRSATLSKTKSGNFFLSILMDIPQNEFAKFKKTNKQVGIDLGVKDFVITSDGKVFDNKHFFKGEERKLKKLQRQLSKKRKGSNNHNKQRIKIARAFETITHKKENYIHSVVNYLLRHYDTIYMEDLNTSGMLKNHKLAKAIQEVGFFKFKTVLSAKALQNDKKVVLIGRFYPSSKTCSKCGYIHKDLKLKERHWQCPNCSTSHDRDYNAALNILYEGRRISAA

SEQ ID NO: 27264 - protein, 379 aa, unknown
  TnpB Polypeptide
MLRAIKVRLYPNKTQEQTLNKVLGSYRFVYNHLLARKQDAYNADKTNLGLTELSKYFHHELLKDGQYTWLKEQNTKVMKQAIRQMLTAYDKFFKEHKGFPKFKSKRDKQTALFPYEAISKTNMFDTRKITLTKKLKDIKFRCSDLYFSRLQRYKDNIRSATLSKTKSGCYILSVLVEMNDNEFVKFNKTSRDVGIDLGVKDFVITSNGEVFENKHFYKKYEKHIIKLQRQLSKKRKGSNNFHKQCKRIARAFERITNKKENYIHSVVNYLLRHYDTIYMEDLNTSGMLKNHKLAKAIQEVGFFKFKTTLQNKALQNDKKVILIGRYYPSSKTCNKCGYIHKRLKLQDRHWQCPNCGTSHDRDLNAALNILYEGRRISAA

SEQ ID NO: 27265 - protein, 379 aa, unknown
  TnpB Polypeptide
MLRAIKLRLYPNKTQEQTLQKVLGCYRFVYNHMLARKQEAYNSDKTNIGLTELSKYFHHELLKDEQYAWLKEQNTKVVRQSIRQMLTAYDKFFKEHKGFPKFKSKRDKQSASFPSDAISKTNAFDARKITLTKNLKNIKFRCSDLYHKRLQKYKDNIRSATLSKTKSGNFFLSILIDMDNNELIKFGKTSRDVGIDLGVKDFVITSDGEVFENKHFYNKDEKRLAKLQRQLSKKRKGSNNFHKQCKRIARVFETITNKKENYIHSVVNELLSQYDTIYMEDLNTSGMLKNHKLAKAIQEVGFFKFKTMLQNKTLQNDKKVVLIGMYYPSSKTCSKCGYINNELTLNDRHWQCPNCGTNHDRDYNAALNILYEGRRISAA

SEQ ID NO: 27266 - protein, 379 aa, unknown
  TnpB Polypeptide
MLRAIKIRLYPNKTQEQEFNKTLGCYRFVYNHMLARKQDAYKANKTNLGLTELSKYFHHELLKDEEYDWLKEQNTKVLQQSIRQMLTAYDKFFKEHKGFPKFKSKRDKQTASFPIDAISKKNTFDTRKITLTTKLKNISFRCSDLYHKRLQKYKDNIRSATLSKTKSGCYTLSILIDIDNNELVKFNKTSRDVGIDLGVKDFVITSDGEVFENKHFFKKEEKRLAKLQRQLSKKRKGSSNFNKQCKCIAKVFEAITHKKENYIHSVVNYLLRHYDTVYMEDLNTSGMLKSHHLSKAIHEVGFYKFKTVLSTKALQNDKKVVLIGRFYPSSKTCSQCGYIHKDLKLKDRHWNCPNCGSYHDRDFNAALNILNEGRRISAA

SEQ ID NO: 27267 - protein, 379 aa, unknown
  TnpB Polypeptide
MLRAIKVRLYPNKQQEQTLNKVLGSYRFVYNHMLDRKQDAYKADKTNLGLTELSKYFHGTLLKDEQYAWLKEQNTRVMKQSIRQMLTAYDKFFKEHNGFPKFKSKRDKQSALFPKLAISKKNTFDTRKITLTKNLKNISFRCSDLYHKRLQKYKGNIRRATLSKTKSGNFFLSILVEMNDNEFVKFSKTGRDVGIDLGVKDFVITSDGEVFENKHFYKKDEKRIANLQRQLSKKCKGSSNFHKQCKRIARVFEAITHKKENYIYSVVNYLLRHYDTIYMEDLNTSGMLKNHKLAKAIQEVGFFKFKTTLQNKALQNDKKVVLIGRYYPSSKTCSNCGYIHKDLKLKDRHWCCPNCGSYHDRDYNAALNILYEGRRISAA

SEQ ID NO: 27268 - protein, 386 aa, Epsilonproteobacteria sp.
MLKAVKVRLYPTKVQQEIIASQFGTCRYIYNRSLALRKFVFERYGKTLAAHDLIKRIAVLKKRHPWLKDADSQALQQSVRHMDEAYRHFFRRVKKGDTPGFPRFKSKHHSRQSYQYPQRIRIDGSKVYLPKVGWVKAKGLRPEFAGKIKTVTVSLEAYRYHAAILIDDGIETVEPSHNGQTVGLDMGVAAVVADSEGVIVDPIDFERELLKLRKCHQRLSRKQKGSKNRQKAKMRLSKQNLRIANMRKDFLHKLSTRYSENQVVVVEELNVKNMTKSAKGTEEKPGRNIRAKSDLNRSILKNGWGMFFEMLNYKTARRGGRLVKVPPEHTSQACNVCGHVSKENRKSQSHFKCGACGHTANADVNAAKNIRDRGMTGYNASQQTAA

SEQ ID NO: 27269 - protein, 253 aa, Bacillus sp.
MARKKEVKVLRKQKKRETMQPPTTTSNALSCDLGVDRLLSCVTNTGDTFLIDGKKLKSINQYFNKTIRNLQQKNMENGLSKRVVTNKMDALWHKRERQINGYISQAVGLLFKKVKEFDIDTIVVGYNMDWEQESHMGEKNNQTFVQIPFHKLIAAIENKCVKEGIRFFKQEESYTSKASFLDEDPAPVWSKDDRTHYRFSGKRITRGLYQSKTGTCIHADINSALNILKKSKVVELDDNLKVKTPILLEVQKT

SEQ ID NO: 27270 - protein, 402 aa, Allosalinactinospora sp.
VHRAYKFLLRPTKRQQAALRGMLADHRSLYNAALQERRDAYAHASTTPITYGDQSAQLREIRAFDPERQGRWSFSSQQATLRRLDKAFQAFFRRVKAGLKPGYPRFKGAGRFDTVVFPKDGDGCRWDSTPEDPVRRVRFRGVGHVRVHQHRPLKGRVKTISVKREGKRWFVVLACDEVPAEPLEPTGRVTGIDMGVASFTTTSEGERIPNPRFLQRSADKLANAQRDLARFPRVKAENRTRKHNAAQAKVSRLHAKVRHQRLDHHHKTALDLVRRFETIAHEQLNIAGMTKVPAPKPDPDGGYLPNGAVAKSGLNKSILDTGWGLFLGILAHKAARAGRELFPVDARNTSRTCPRELCGHVSADNRPTQEKFRCSRCGYTEHADRVAAINVGIRAGLVLPAA

SEQ ID NO: 27271 - protein, 280 aa, Allosalinactinospora sp.
MKRERGHKARLYPDSDQLSALEDQGHASRAMWNLLHDWWTMASENRRVQLKEADQAIRQARKDIDWLSDLPAQAAQAVLKTYFRAWGNYWEGRAKAPTFKARFRSRMAIDVPQGRDLGIRRITRRWGVVKVPKVGMIRFRWTKDLPVGKHTDVKNKVTGARLVREANGWHVVFRVRTETKELAPQLGPGVGIDRGVAKPLALSDGSFREHDPWLSRLSRNVCADWRRQRHVRSTLASAVREHRTVSSGPMTRSQACAREPSAAPWTGSTRPPPDLPRPSA

SEQ ID NO: 27272 - protein, 459 aa, unknown
  TnpB Polypeptide
VLTGIKLKANPTSNQKLILSQWMGCARLVWNAKVSEEKYYRTFARKYYPMGTYAPIDQKTSQFKSKELTPWLSKCPSQIIRNSAVNWYQTYQKFMKGLGGRPKSKPKADRGSIHLTREVFRFDHCEDGNVRLFIGTKTNNIGYLSFKAHSKFEIPNSLYLRKERGQYYVSFCYENEKDGSQLSTNAEHLKFLQGSTKEYLEKNVIGIDRGIAIPVHAGYQSFDYSKNQKNKIDNADRYIKRLQRKMARQKLTSNRRKKTKYRIANHHAKKANIRNDFAHKTSRSLVNSKAKVIVFEALKTSNMVRRPKAKQDEQGRFTSNKAKQKKGLNKAILNVGWHVIESYTKYKSYQAGKAVFKIPAPYTSQECAKCDYTHPSNRNSQDLFVCGRCGNTDNADNNASLVIKKRAINLILDTGTVLSDKGVLVTKSDSVRGGKCKTSRAKSSTSSRQRSVKKEKLVA

SEQ ID NO: 27273 - protein, 439 aa, Streptomyces sp.
MSRFRMYPTLAQAGQMLSHCAHARYVWNLAVEQHSHWRKGRKAAPSFAEQCRQLTEARHENEWLGAGNAVLQQQALRDFAKAKNARFTSGFGEPTWRRKHRHEGFRVIGTDLVPEFDDDGRAKLNAKTGRQVMGRSVMVRKLNRRWAQVKVPGCGWVRFRLSAKGKGARPPSAKTFRVTYKNSQWHIAFAVIPVPVPTPGTGTVIGIDRGVKITAALSDGRNLNCPQLTTRERARIRKHQRRAARAPKGSDRKTTEYAKAARLKAREANRRKDWCEKTSTMLARTYDVVRFEKLNIKNMTAKAKAKPDPDRPGQYLKNGRAAKAGLNRAILAQGWGLLRQRTGHKAPGRVEDVPAPYTSLRCSACGWIDKNSRKSQAEFECSSCGFTCNADTNAAVNVVAGQGGIPRPRQSAGAGGTTPPTQRSSVREPQPTWVGIPLF

SEQ ID NO: 27274 - protein, 326 aa, unknown
  TnpB Polypeptide
VDSLGNTRQEAVCEATSACRQSRKANAGKCYLRFRSCRNKSQAIQFKNSAYKNGTWFCSKIGKLNFTVAKGYELPRNCVYGTELIYQRGQWFACFPQSVREVKTDSERVIALDPGNRTFLTGYDGENILEIGKGDIGRLTRLCLHLDKLIGKKMKAASKTNKRLRYKLNKAIERLRFKIRSLVDDLHRQAASLLVNSYKLIFLPTYQTSQMVVKANRKINRKSVRNMLTWAMGRFASHLEQAAKRKGVLVVRCNEAYTSKTCPKCGHVHKKLGGSKVHFCPACGHKAPRDWVGALNIMLRALQAVAFSVKDGVISISDADVVVAQG

SEQ ID NO: 27275 - protein, 366 aa, Salimicrobium sp.
MATKTFLVRLKSLSKKKHKQFVCEQQTFASCVNHCVERLQSGEKLSSKNVPFDLKSAIKNEGIRKAKKAVSDVKKGLAKTVPTFRSSLGIKINNQNWNTVEKNGRWYIAFTTNEGKKTFPVVETEYVHTYFPFFTYQNREFRGTIEVLRKGRDWYVAVPVQVSSELDAEKTHKPYEAYTPVGVDLGLRHLAVLSEPVSGIRQFFSGKEVGFKRRHFRSLRRSLGKKKAQRALEHVGKKESRWMKDYNRKLAKAIVDFARQFDNPMIKMEQLDDIRKTCKSLKRADRTIHSWAFYQLKQFIREKAADYNIPVVDINPYQTSQECFLCGYAEKGNRHMDTFHCKKCGHSNHADLNASNNIATSTSLAV

SEQ ID NO: 27276 - protein, 415 aa, Clostridium sp.
MKLSFKFYPKLNTQQLDIIEELSYHTTRLYNIANYDCRENEVKSYVEMSKLYKANYHKDFLHSHTYQHCLKVLEKNWKSYFVSIKDYKKNPNKYLGTPRQPKFKNTNNKKNEVIFTNFAIRYQDQVLKLSLSKAMKSTFKVQSLNFNMKDIKIPIDLDELQQIKIKWDNSSKQWYLIMIYNKEEVNLTDSYNNIMSIDLGLDNLATITFEQNTNLYIIDGKYAKSKNSYYNKKIAKLTSIAMKQCKDSKHFKRTKKIIKLQTKRKNFIKDYIHKSSKKIIDLAIINKCHTIVIGDFNGVKQENDAKSFVQIPQQELVDKVKYKAQLLGIEVAMQNESYTSGCSALDLEDIGKKYYNKSRRIHRGLFVSNNGIKINADVNGSINILRKYLKCSPKSLKMIMDNGVLDTPIRLRIAY

SEQ ID NO: 27277 - protein, 385 aa, unknown
  TnpB Polypeptide
MIKGYKYRIYPNSEQQKALSQMFGNARYIYNWGLDLCIKAREAGEKKPSAFDLHKLLTQHKKEEGKEWLSNSPNCSLQQSLTHLDSAYKKFFKEKKGFPAFKSKHDNSQSISLSIGGKVDFEGGTFYVPNLGKIKTVYHRTFEGDVKTCVVSKVPSGKYYVSITVNNANFCEPEKKPILESTAVGIDTGIKTFAVLSDGTEIENPKHLQVAMTKLKKLQQRVSRKAKGSANRKKAINRLATMHEKVSNQRKDFANKLSHQIATNYDTVIVEDLNIAGMLKNDKLALSIASLGLGSFYTMLNYKVADRGGNYVKIGRFEPSSKMCSNCGNTYKDLKLSERNWTCAECQTTHDRDLNAAINIKNMGLKMHGCGGLQPAAAFLQKTLT

SEQ ID NO: 27278 - protein, 356 aa, unknown
  TnpB Polypeptide
MKSIKTKLKINNHQKTILGKHAGVARHAYNWGLETCISEYESTKKRPSAITLHKRLVAEVKSINPWYYEVSKCSPQQALRDLDRAFKNYLTIKECGFPKFKKKGKKDSFYLEGSIKIIQGNYIKLPRIGIVKTYEILPSVPVKNVRISKHADNWYISFKYECQPKSTPPKKRAVIGVDVGINVLATCSDGTKFANVRAYKQAKKRLTRYQRSVSRKELHSKNREKAVKKLAKAHKKIADIRADTVHKLTTWLAKNHSNIVIEDLNVSGMLKNHKLASAIADCGFYEFKRQLSYKCEWYKSKLIIANRFYPSSQLCSHCGHQQKMPLHKRIYECGNCGFKADRDLNAAVNLEKYLIA

SEQ ID NO: 27279 - protein, 417 aa, unknown
  TnpB Polypeptide
VRLIKAVKQVFKPTQQVLALLEDFRLMVNDCIRVGLRFEEEQHATPSMKKLSLLCYSQLKRYKVYSPYRLTAMSKAAGILSARRKSIVRGFSTKSPYVSKPLLVSCYHIKIQAGMLRVPLGGGRFEYIPLNAHTMRTLSEAALRINSFTLTSASLSIAFSKEAEPMVLTSTIGIDRNLSNLAVGNNERVTYYDMTRVVEIADNTRSIVRSFKRDDVRTRQLISSKYGKRRSERVRQIIHGVTKQIVQGAKAKGQAIVFEDIRGIRGLYRRGNGQGRFFRGRMNSWPFHEVKRQVEYKAAWEGVPVVTLSRKDTKGTTMDCARCGERLQSPARGDLGHFRQLWCKNCGRWMDRDLVAVLNISHRGRVRFARSSTEGEAGEAVRGNAEHDGEPLILRVDASKLQREKRCSRTNLTALTS

SEQ ID NO: 27280 - protein, 405 aa, unknown
  TnpB Polypeptide
MIRTYKYRLYPTNAQEKALDFLLWQARLLYNAALEQRITVYKETGKGVSYTQQCAHFRDQRRANPDTLGQLNATSVQQMLRRLDKAFRAFFRRLEAGEKAGFPRFKGRHHFNSLEYRYGDGCKLRFDDRERALFYVQNVGEVKVKYHRSVPNDATIKHVILKRRNRKWYVCLMLDLPEPIVVPHTGPAVGIDMGLHSLLALSDGVTVDNPRWLRRSLAKLRVAQRRMARRRKGSRGWREAAAQVARLHERVANQRRDFWHKLTRQLVDAYGLIALEDLTLTFLTANRRLALSAYDAGLAEFRQLLQYKAESAGTEVVTVNPAYTSQVCSACGAMVEKDLSVRVHRCPHCGYMADRDVNAARNILFLAVNSARTGPPERNVAGCGERALGSSPLKRGESSRTLSFE

SEQ ID NO: 27281 - protein, 402 aa, Escherichia sp.
VKRLQAFKFQLRPGGQQEREMRRFAGACRFVFNRALALQNENHEAGNKYIPYGKMASWLVEWKNATETQWLKDAPSQPLQQSLKDLERAYKNFFRKRAAFPRFKKRGQNDAFRYPQGVKLDQENSRIFLPKLGWMRYLNSRQVTGVVKNVTASQSCGKWYISIQTENEVSTPVHPSALMVGLDAGVAKLATLSDGTVFEPVNSFQKNQKKLARLQRQLSRKVKFSNNWQKQKRKIQRLHSCTANIRRDYLHKVTTTVSKNHAMIVIEDLKVSNMSKSAAGTVSQPGRNVRAKSGLNRSILDQGWYEMRRQLEYKQLWRGGQVLAVPPAYTSQRCACCGHTAKENRLSQSKFRCQVCGYTANADVNGARNILAAGHAVLACGEMVQSGRPLKQEPTEMIQATA

SEQ ID NO: 27282 - protein, 734 aa, unknown
  TnpB Polypeptide
MRKELFSPKEAAKILGVSVMTLQRWDIAGNIQAVRTPTNRRMFPKSELDRLLGTSKFAASDRALVIYGRVSSGEQKKKGDLDRQVLFIKETLDLRIYQTITIITDVGSGLNDQRKGLVKLMELAKKGELTDLAIRYKDRLTRFGFNYLSVFFESYGVTIHILDEKSEDKIIYEELTEDLLSVVTSFSGKLYGIRSGKNKLLKEKIKGVVEDVANLSDPKTLSSHGLTFLQIKHQETHYLDKMAAFSGMIERKLFVDSFIKGKTRAECKRVYTKKYGITARQFNAIYIQLNGKMQSIIELHKVHLTELRDKIKSLEKFIAQQIEKAVRLHAKITRLEKKFPFSVNFKKTVKQYRNIKFLLHQKKRKLALCKKNLERFGYDAQNNRLRICFGSKKLFQKQFNLEENGYQSHEAWKRDWLKARSAQFFCIGSKDETAGNQTCTYSSSSNELRLRVADNFLREYGHYIIYKDISFPYGQEVIDHALKTYRGTTSGGKPANYVNSAISYRFTKNERGWYINAAVELDTPDITTTILVGSLGVDLNVGFMSLCEVDRFGNPLYEETIPLRMYNRSSDQITAALGDGVKAIVDKAMKTQKPMVIEVLDFSKKKSMLGEESKKYSRMLSGFAYSKFKEMLKSRATKYGVEVIEVTAAYTSVIGQMNFMKRYGLSSHGSAACVIARRGLGLTIEKPKYDSILGNYTDTMNHRPLKSRWSSISYRIKKNYRYFNERIELLKLEA

SEQ ID NO: 27283 - protein, 403 aa, unknown
  TnpB Polypeptide
MIIRKGMKYRLEPSAAQRADMVMFAGHNRAVWNKALALTKDRLERKVPIVWRHELEWNLTHIWKKSEEMSWLNEAPSQSLQQTLKQFDRAIRDCFDKNQPHKRMPRFKKKGVKDSFVFPQGISVEANRIKLPKLGWLKFRKSRELEGKLKSATVTKNGKHWYVSILCETEVPEPAHASTSAVGIDRGITIMAACSDEREYVGAKAFRKHEKQLAKAQRSLSRKMKFSNNWQKQKEKIQTIHSKIANMRRDALHKASTEISNNHAMIILEKLGTSRMSKSAKGNSEKHGKNVKAKSGLNKSILDAGWSMFAAMLEYKQAWKGGFVEYVPAAYTSQRCSACGHTAKANRVSQSKFKCVECGYEANADFNAAKNILESWRQDIAVSACGVDAIATTMKQEPALASC

SEQ ID NO: 27284 - protein, 399 aa, unknown
  TnpB Polypeptide
MQLRYNFRIYPTPGQRMALAKAFGCARVVFNDGLRLRQDAHAAGLPYIPDGELSKRVITEAKKTPERAWLGEVSAVVLQQALADLNTAYRNFFASATGKRKGPKVAPPRFRTRKDNRQAIRFTRNARFAITAGGKLRLPKIGDVTVKWSRTLPAEPSSVTVVKDAAGRYFASFVVEVSVEPLPESAAEVGIDLGLTHFAVLSDGRKISNPRFLRRAERRLRKAQKALSRKAKGSKNRVKARLRVAKAHARVADARRDFAHKLSTALIRENQAVYVENLAVKSLARTKLAKSVHDAGWSQFVAMLEYKAARYGRTFARINRFAPTSQVCSACGALDGPKPLHVRSWTCKECGTVHDRDVNAAKNILAAGRAERLNACGGDVRPPFGVADAGEAGTHRSAV

SEQ ID NO: 27285 - protein, 377 aa, unknown
  TnpB Polypeptide
MNVKRAYKFRFYPTNDQKDILAQTFGCARFAYNYMLKARTDAYYNEQKRMGYHETSALLTVLKKQSEFNWLNNVSSVPVQQALRHLQTAFSNFFAKRNKYPTYKSKFDKQAAEYTASAFRFENGILTLAKMKAPLVITWSRTLPKAANLTTVTVSKDFAGRYFVSLLCDDTVSAKTTVAASIGVDLGLTNFAVTSNGSKYQSPQALRNNLEKLALLQQRLSKKKKGSSNRNKARLKVAKLHAKIKDIRKDFLHKLSTKLINENQVIAVESLAVSNMLKNRKLAKSISDASWSEFVRQLEYKAKWYGRTLIGIDKWYPSSKRCNACGYTLSTLSLNTRTWMCPDCGLNHDRDLNAAKNILTAGLAGLAFGENVSPVCI

SEQ ID NO: 27286 - protein, 459 aa, Mycobacterium sp.
VAKFKIPEGWTVQAFRFTLDPTDDQLRSLARHFGARRKAYNWTVATLKADIQAWRETGVETDKPSLRVLRKRWNTVKDDVCVNAETGVVWWPECSKEAYADGIDGGVDAYWNWQNSRSGTRDGKRMGFPRFKKKGHDQDRVTFTTGAMRVEPDRRHLTLPVIGTVRTHENTRRIERLITKGRARVLAITVRRNGARLDASVRVLVQRPQRPTVVHPGSGVGVDVGVRRLATVASEDGTVLEQVPNPRPLDAALKELRHVSRARSRCTKGSRRYRERTTEMSRLHRRVNDVRTHHLHVLTTRLAKTHGRIVVEGLDAAGMLRQKGLPGTRARRRGLSDAALGTPRRHLSYKTGWYGSELVVADRWFPSSKTCHVCGHVQDIGWDEHWHCGGCSASHQRDDCAAINLARYEETPSVVGPVGAAVKRGADRKTGPRPAGGREARKGRSRKAAKQPRDGVQVA

SEQ ID NO: 27287 - protein, 371 aa, unknown
  TnpB Polypeptide
MMTTKYEKNDFRIHEYPIFPTGVQKVLLAARFDQEDGAYNTLAGLVNQSYSQGAGLEELKALVQNHPIPAENEVDRFAISQVRKRIISLLPRLCSGKMSCIKPRRADRSQRSACYHYVGISDYHLVLPMIGSIAMEQHRDLPKGARIYGATVYADCYYAFYHVALHLIVPQQPVDPVPIHYSKVVGLDYAQDGLYVDSSGHSAGYPAFRHQAQDKLNRCHRAANRFKTGSRRWRKFRQRAAKIERHVVNQRKDWQYKQAHALAQQYDAICVETLDLAGMMQNDPALSGKLCDNAPAAFYKRLEQVLNAQGKRLIRVDRYYPSSQICSACGRKVGKLPMDSAFTCPYCGLRLDRNHNAARNIREEGLRQLEQ

SEQ ID NO: 27288 - protein, 393 aa, unknown
  TnpB Polypeptide
MSYRTVEIKWMPDTASGWATYTAARVEAARLWGDLAARHRRIRCMNWRWPSKARFQKWAKGRYPGLSAQSVQQIVGEFVEAVNATRQLRKGGHDEARYPWKRPRYRDVLYTNQSVRIKSNRLVLPNGKSGHLRVPLPDGRPLPGRLMEVRLCIGRVLLVCEVPDEPRRQQTVVGIDLGVNTLIAATDGTKAVLVSGREAKATVQWRNKRLAEASARQSKMKKGSRRWRCLQRRKRKMLDKARRRMNDLVHKATRLVADAFPGATCYVGEPFNDAAQKMRPWQAQQVSQVAHRAATGQLDYKTSGTTQVDEAYSSQTCPRCGARNKCRRTYECATCGLIAPRDAVGGVNIRCIGQHGAMRSGQAMPTEVVYVRPVNVSRRQASSLVGHTRTSSA

SEQ ID NO: 27289 - protein, 439 aa, unknown
  TnpB Polypeptide
MEQIITAKLKLHTTPEQRARLRQTQLAYRDALNHVSRHAFDQGKITDAARLQKATYADIRAQYSLPAQMACNVPRQVAATYKGLWSKAKANVTARACGRTKKRYKGLDKPPTYSQPTVTYSYGRDYGFKRGWRVSVLTLVGRLVLPYSGYNKHLALIREGATIGAAKLWYDKPKKRFYLLVSLAVTLPDSTPDNLLPDVVGVDLGQRYLAVATDTTGKAAFHSGKEVRQKANHLARVRKRLQQKGTRAATRRLVAIGQRERRQQAAANHTIARRIVDANPTTLIGVENLTHIRDRTGPRKRGEKASGKQRTANRIRSKWSFAETQALLAYKATLAGSQVVWVDANYTSQMCPRCGHTSRANRPHKGLLFVCAMCGYTLHADLIGARNVALRTLLIRQDWVSTGALSVRPDVSDGEAKATRLSRFAELRWSLETSPRVNA

SEQ ID NO: 27290 - protein, 403 aa, Symploca sp.
MLKVVKVRLYPNPPQQLLLEQSFGNCRWLWNYCLNLINQTYKQTGKGLSGYDVKKLIPQLKKEYHWLTLTYSQCLQQVCLNLGVAFNNFFEKRAKYPRFKSKHGKQSIQYPQNVKVAPHHLTIPKIGNVCATIHRTIEGKLKTVTISKNCSNQYYAAILLDDGKQQPQPSKDGKAVGIDLGLNHFAVTSDGSKFDNPRLLNKHQHNLKIKQQQLSRKHKGSSNRNKARKKVARVHLKINNSRTDFLHKLSRRIVNENQVIVVENLNIKGMMQNHCLAKSIHQVGWGMFCTMLKYKAEAEGKIYQEVDRFFPSSKTCHVCLNQVGSLSLAVRNWTCTHCQTKHDRDVNAALNLRNEGLRILTSGTGDKACCPDVSRSNRGRKKSTTALSVGQEAYCVLALRHCR

SEQ ID NO: 27291 - protein, 395 aa, unknown
  TnpB Polypeptide
VNSLRICSQYFKPPHEEGTDLSFTQIKTRRIRIYPTKEQRTLLRRWFGVQRLVYNQAIQHYNDKEFDVRNWMKLYPIVFSELDMDYVKEVPCLIKVIAVKDAYTSWRTNCKKTKESGKPFSLKFKSRKDKVQSCGIPKTAVSAIGIYHTKSGRMKFSETDWFANSEISDSRLICDHGRWFISIPKKITTQQTFETQGGAVAVDPGIRNFGTYFSTDGRFGWVGQRAFERILKLNLRIDKIKSIIATTEDKLFKFRLKRVLDRLYHKIRDLVDELHWKFMNFLTKEFSVVIFPPFNVSEMSKVSNRKIRKVVVRSMMALRFHEFKERLKNKCKERHVLFIEQNEAWTSKTNSFNGEVMTNLGGREFFNYQGLIINRDVNGSRNILLRAMRDSSANS

SEQ ID NO: 27292 - protein, 453 aa, unknown
  TnpB Polypeptide
MLKITKIAYSKNLTKSKCQKLAEIALRLGNLRTEVWAKFGSINGTKIKHREIRDKWLEEKRKFDIPARLWKSTLDNVMSDITMCREAAKVKVRKDIFKRTKDKVELKRMYGLLKSNNWTEDYYLCRLMRKYYKHGKTNVKNQIILDTNSYSTFKKNGKCWLSVQSLEKGKRICVPLSTNVTPKNTLRIIIAEGNIEVHYSIEEVTHKKPCGTSTVGVDKGYTEAFTDSDGVKHGQGLGTILSSESDFRKEKYKNRNKIKSVVDKAKKSGNIEKVKRIIDNNLGRKKLETRKDKHEKNVRTMIFNATHKVVDKASVVVAEDLTSVMRNKKKISRNQKRRLSGWAKGLLAEALASVTRRRSASFVLVNAAYTSQMDSITGLLEGKRVGDKFYHENGEVSDADWNAARNILRRLADFEIKLFTKFTTVKSILLKRTKRVRLGLLNQDTRLSNVPSQ

SEQ ID NO: 27293 - protein, 256 aa, Microcystis sp.
VRHGKSLFLPILPNTRTRVAIAAHIGLCKISLQQSSPRTNTSLVRKARKSRLRSNFFNANRVEKTRRIKLSQLRKAQKSLSRKQKGSKNREKARIKVAKIHAQMTDSRKDHLHKLTTQLVRENQTIVVENLAVKNMVKNPKLSQAISDVSWGEITRQLAYKCRWYGRNYIEIDRWFPSSKKCSNCGYIAEKMPLNIREWDCPDCGTHHDRDINASKNILAAGLAVSVCRATIRPEQSKSVKAGAKNPSGKKQKPKS

SEQ ID NO: 27294 - protein, 485 aa, unknown
  TnpB Polypeptide
MLNAIPMVISKESFGRIFTFAEDNSALAKNLYNAALFRIRQVFTGWNKTKRTDLEQLVFDELKQTEAVYKSFKPRHVLSYAALDKIMRATGNPDFFAGLPMQTAQQVLKDAVHDFKAWLDSLKEYKKNPSNYTGKPKMPGYCKSIRKTFTVTNQDAVIYPVIDKNGCITGNELKLPGFKKKERVPVNYIDHKSNLRMMTFKPYYDKYIMTFVIEDMAPPFYPDMPYMAGLDFGTDNIAAIACTDNSSVIYKGGAVLSSNQFFAKKKAKAVSLITQGHSKMHAESEYLLTLSRKHSCFIKDQMHKISTEIIRYCVKHRIGILVIGVNKLWKQKSSIGRRNNQNFVSVPHFQLRQMIEYKALRAGIDVIEQEESYTSKADITASDYMPVYGKEKCRPVFSGRRIERGLYSCKEGYCINADCNGAANILRKAIPDAWKDTSDFHFLATPESIGFAMLNPADSHKKYKQHNNWIFVSADAAGCSYRPAA

SEQ ID NO: 27295 - protein, 356 aa, Ammonifex sp.
VPLVTLRAQVHADPETLAVLKDAMFCATKVYNGLLWHLRKEYEETGKVDISRKNLNRILKELPRAKGYYSMSVQLTREEVREAYKSFFALKKKGLTQHEAPGFRRKDYLSPLKYVQSGFKVEGDKVTVSLGTGREDGVREVSFRISHRPGVEYERVRELSITYDKVSGRIEARLVEVKANPCPGRLRVALDLGETILMAAAFEDGTVLLYSGRFIKSVRRYWQKVRASLKPNSRRWREVAHREKLQVEHLLHVATSHFIEECVRRGVGEIAIGAITGIRESIDYGDRLNQRLHAWPYRKLINMLKYKGALAGSWPGTMWTRGTRLCAVTPAGVYCLPTGNTGGFTCVPVGGRRRRM

SEQ ID NO: 27296 - protein, 530 aa, Ammonifex sp.
LILTTGLRLPDELVEPLKNLTALGLKVQEQVLATYWSPEGLEAVASSPGKAWKLLDTQLSRPQDVYIPSRAWRCILESAGRVLRSMAERKRIFELLLPYFNGKAKDAAKELYGLLKKDGKGEKFGYLFNVAEAVANFYAEHERLPKNFFELQKKPEPKKFTFTTSPDDGPEKGQVVRYECDGRVLRGRVKLPTCPEPRKEEDWRWFSFEAELPEELQEKLARGGKLCAPDLRLKVKPSGKLVALLDVKVEVPEKTPSGEKDRALGVDWGLRKLVTGTVVSKKGQLTPPFFVFWQALKAKLLRIREGISRLQKTRDRYERKSLEWKEYNRMIASAWQKYHRIQHQLAHQVSSLLVLLARAFGCRYVFVEWLLTLRGEKGRSKDLNWWVTTTVRGLLFRLLRYKARLLGIRVVPVPPGGTSTVCPRCLKRGKHVKSPSEPEEKDSGSWFVCPSCGYNADRDYVGSLNVGRTGFKLERPLTYTVCQAAAEPFPSQGAPRAMTFTTLGYIKSVFVANFNALTKLLEPAVLPSIT

SEQ ID NO: 27297 - protein, 561 aa, Ammonifex sp.
VRRKHKREKFSITVCGEFFPEVYPAFRSAKWSRGEEDPLETEMRLFCACERWAYNRLLEGTSRDEIKKRGQELFGLNSRYVDDACLKAQALLHSQKELLAQEVEETEKKLGRARKKLGLAMKKLARAEKKGAAPAVLEKLRLAVKGRASRVASLEKKLTELNSHLENGTLPKLVFGGRKLWKRVCKGRATREEWRHARKNRLYSRGDEEKGGNPNIKVFHRNGEFYLSVAISHLSEKIGEDKLGRPKMSRAPRVEGRLWLPEKHRGLVRIWLAMKLPYTAELMHTPEGRYLVHLTFDLGGLKEPDFVRGCLALDTNPDGVALCNVGTTGLPEPWPEGLQAVPYPGNLGKYEGEFQVITYPSGFMYIRVPDLAYTSGFRRDYLIGVLAKVVVGVAFFLGKPVVLEDLDFGKDRLDTSRKFNRMASNFPYAKMVEAVCRRAAKEGVPFKLVPPRHTSTIGYWKYMRRYAVPVHCAAALSAGRRVMGFKEKITREVKEFVLRVKQRLTSGDSLPGEGRGMTREVRALLARLEKKLSLHNGLARWQQESFGSCWRELKELALAFR

SEQ ID NO: 27298 - protein, 531 aa, Ammonifex sp.
VITLQCLLEFQSEEDRQKVLDLMRRFSSAERYGYQRLLEGWPREELKKHLAQVFQINTRYADDAVLKASSVLSSCRKRGQNPAKVIFGGRCLFEKLKKKHLSGEKREELKREWKERRQGNLYTRGDKEKKGNPNLRFVWIKGELYLRICVGERRWVYARVVRPAKREKDKWIGFVWDLHKAERTGKWFPYNVELKLKNGEVYAHVSISEKFPPAAITLENGVIGIDVNAYPFHLALAEVSPDGNLLGYERISLHELLSADRDKREYLAWQVAYQVVSLALEKGKAIAMEDLEKLPKGRRGDGFPKLRKTLQRWAYKSILEKIEILARRHGVEVIKVNPAFTSVIGKFKYAPQYLIDKDVAGALVIGRRALGFEEELPEAYRLLLWDEEFLLYSVAQLEEKVKKFKQELKGETNEWRKKAIKKRLSVTRSDLKILQKHLRILQSGEGEPASRQPADRWKEPVRGHLSGWRIKAWRVLSAALTVPVLEKFFHVKGTVRDFSPLRPILVLGDWERAVRRPVPVPGAGAAVQEYS

SEQ ID NO: 27299 - protein, 383 aa, Ammonifex sp.
LRLLATYQARIDDKGCYPFLEACGEYFGRLERKLYVDYHIKGLRVKELKRKYIAEHGITARQFNSLLKDLTARLASVRESLVFREQDLLGRIRRLERFIEEKERERERLKKSLSRLTPRSEEWQKKVDRLKKIKSVLHQKKRRLRNLRHELEAVRRDLESGRYPICFGSRKLFKAQHNLEANGFRDHAEWLRAWREARSGNFLVLGSKDEACGNQTCTYTEDNTLRIRVPERLRARFGHWVLIKSVRFPYGQEHLDRVKRPVCVVKGRKVYRTVTYRFVRRNGVWYLFATVERDDPAPSTSRWNGAVGVDLNDGFLQVGEVDRFGNPVNEFKVPVAMRDRRRGQVTAALGEAVKKVVLYAKEKGKPVAIEDLDFTAKKRGLRE

SEQ ID NO: 27300 - protein, 431 aa, Ammonifex sp.
MKHTNVVRVLPDKQQKQILEIIGDRCAALYNAVQYRCRQAFFGGEPVPSYAALCSEFEEHPAYKALPSDIGQEVIKKARKAWDSYFACLRLYRKGDIPRPPRVPGYWKDRRTGKRLVRLIPVKSPRSYSLDARTVSLTLPTDLREKRGDRLVLCTKGVLRFHGWPKTLELKYDPVRKRWYAHQVVEVPEPVRKVRPEKHAAIDLGARVLVALAIEGLGRQLLFSAREVIKDFLYWTNQIAKEQSRLNRTGRKTSRKLRRFYQLRARRLRHAFVALAAEVARILKRHRVTRLFLEDLTGIREDMDFGPKNILVHNFWAFRMLRNLIEAACARAGIKVVPMEPRGTSSRCAVCGHPVRRPVRHKAVCEKCGKLWHADANAALNILLQGSSKEHGAEATPQKPLAYRWNRHRWVGRFKPAAGTLKAASGSRTAA

SEQ ID NO: 27301 - protein, 517 aa, Ammonifex sp.
LRSLAYHGKIDLVRGNFGLQVRVLKFKTRKPADMITVPGRIYPDEAARERLISFMRRFQAAKRTAYQALRRGKEPEEIVKDLYRKFFPNARWCQWALEDAKATCDAQKEQVRMHVSDLEAKIEKSEEKLKRTKNKLHRQGILARLSLLRARLEYWKGFLERDEVPPAVFGGKKNLLLLQEGKLSKEKWRELRSNAFYSVGQANQKGLEGQYGNANTEIVYDEATDSFRLNIYIPPEPGDKSGRLRQDEDWVSVPLEVPARYRPLLLKYLVEGRAYTVRVVRKAGRFDCFTSFSLQDEAEVDRTSPMAGMDLNPDVVAVTVVLPDGNFKVSRCFWCHDLVHASHEKREWIAGNLAKEVADWLESLGVKQVALEELSFAQDHDTNRAFNRITHNFCKKLLFNRIVVALRKRGIAVFTVPAHFTSLIGFFKYSETYGLNTHQAAALVVARRALGFKEKVPKALVQKLLGRSPMEGWTKSMLWGRLSGMFKATRKKVSRYFNAKALTWRRPCSGSVPCSPS

SEQ ID NO: 27302 - protein, 412 aa, Ammonifex sp.
VTKAERIKNTIRETRERRKALRPVVFQLKLQNLSGKKEELLERAFLEAKWLYNWLVSDLERLDLPVNKVNMVEVKVGETFEKRTLTVLGSQVKQEIADRLKDNLRALAMLKENGHKVGRLKPKSFVNSIPLKQYDVTYSLDFARNRVRIQKLGSFRVLGLHQIPPDAEVASAVLVRKPSGYYLHVTCYLPREYFCYPYKLGEAVGGDFGVETKITLSNGIKIDFEVRETPRLKRLQRKLARTKKGSRSRGKIRLLLRREYEKLNNRRKDAQHKVLAFLRLYGKVVFQDDGFKGWAALFGGQVHSSGVGGLKSRLRDSLETPVVVKRFEPTTRECFACGKQHELSLSERTIKCDCGWTCDRNLNAALVILRKGLGLGPDQAVGLDRPELKPLERKAVARILGSNPYVRVSFPQ

SEQ ID NO: 27303 - protein, 504 aa, Ammonifex sp.
LRLLATYQTRIDDRESYPFLEACGEYFGRLERKLYVDYHIKGLQVKELKRKYIAEHGITARQFNSLLKDLTAKLASVRESLVFRKRDLLGRIGRLERFIEEKERERERLKKSLSRLTPRSEEWQKKVDRLKKVKFVLHQKKRRLRNLRHKLEAVRRDLESGRYPICFGGRELFKAQHDLEANGFRDHAEWLCAWREARSGNFLVLGSKDEACGNQTCTYTEDNTLRVRVPDRLRAGFGQWVLIKSVRFPYGQEHLDRAKRPVCVVRGRKVYRAVTYRFVWRSGIWYLFATVERDDPAPSTSRWNGAVGVDLNDGFLQVGEVDRSGNPVNEFKVPVAMRDRTRGQITAALGEAVKKVVLYAKEKGKPVVIEDLDFTGKKQGLRESGSRYARMLSGFAYRKFRVMVESCCSREGVELLRVDPFATSLIGQLKFMARYGLSPHGAAACVIARRGLGFGLERAPEVSAPGIPPRGRASRRGYWWQVCKSLKRGPGSGLRVDVLYADRF

SEQ ID NO: 27304 - protein, 435 aa, Ammonifex sp.
VAWSDKSHPHRLLLTKQFPLGLEVVPVFRPVMRAVNRIWNSCVWHSRETFRQENRWPTEAELKTKSKSFAAWCELHSQSAQAVVEEYFEAVSAYRKHRENGHLEMNPPGFKPKDHLRTVTWKRQGFDVEGNTLVLKLSRGKEPVKVVLPEGWDVVVLPDGTEVKGVPVEVKVKAVVRRNVENLVLHVTLDLGVMPVHRAGAVSAYDYNSALVARAVSNGRLDLFVCRELLSLVQYRNKIIAGFQEKMGRLKEGSRRWKRCLSAKVRVLKRLDRCIRQMEHTLTKSFAGLDGAEDVAFAVVGNLRGLRCSARTGMKGKKASQKINHMAYDRLAREQRYKNLMRDIETDTWTEKNTSSTCCLCGARNPAWRRYRGLWVCGRCGLVLQADLNGAANLLKQYLFGSCTGRAEPFTFKEVRVWRWDGRHNRFVQVSPRAA

SEQ ID NO: 27305 - protein, 423 aa, Ammonifex sp.
LTKQFPLGLEVLPVFQPVMQAANRIWNSCVWHSRETFKQENRWPTEAELKAKFKSFAAWRELHSQSAQAVVEEYFEAVSAYRKHRENGRLEMNPPNFKSKNYLRTVTWKRQGFDVKDNTLVLKLSRKKEPIKVALPEGWNVVVLPDGTEVKGIPVEVKVKAVVRRHRVENLVLHVTLDLGVVPVNQVGAVSAYDYNSAMFARAVSSGRLDLFVCRELLSLVQYRNKTIAGFQEKMSCLKEGSRRWKRCLSAKIRKLKKLDRRIRQMEHALTKLFAELDGAEGVTFAVVGDLTDLRRSARTGMKSRKATQKINQMAYDRLRQEQRYKNLVRGIETDTWTERNTSSTCCLCGARNPAWRRHRGLWVCGECGLVLQADLNGAANLLKQYLFGNCTGKELPFTLKEVRVWRWDGRLNRFAQVSPRAA

SEQ ID NO: 27306 - protein, 530 aa, Ammonifex sp.
VITLQCLLEFQSEEDRQKVLDLMCKFSSAERYGYQRLLEGWPREELKKHLAQVFQINTRYADDAILKAQSILRSCQERGQSPSRVVFGGRSLFEKLKKKHLNGEKREELEKEWKEKRQGNLYSRGDRSKQGNPNLRFVWVRGELYLQINVGYRKWVYAKVVRPVKREGDKWIGFIWSLHQAEKTGKWFPYDVELKLKNGKVYAHVSIGEKFPPTIITLENGVIGIDVNAYPFHLALVEVSPDGNLVGYERISLHELLSADRDKREYLAWQVAYQVVSLAQEKGKAIAMEDLEKLPRGRRGDGFPKLRKTLQRWAYKSVLEKIEVLARRHGVAVEKRDPAFTSVIGKFKYAPQYLIDKDVAGALVIGRRALGFEEKLPEAYRCLLKDEEFLLYALAELEEKVKKLKRELKGEENEWRKKAIKAKLKATRGELKTLRAHLRALQSGEGEPASRQPADRWKEPVRGRFLGWRIKAWRVLSAALTVPVLEKFSHVKGTVRDFSPLRPILVLGDWERAVRRPVPVPGAGAAVQVV

SEQ ID NO: 27307 - protein, 530 aa, Ammonifex sp.
VITLQCLLEFQSEGDRRKVLDLMCKFSSAERYGYQRLLEGWTREELKKHLAQVFQINTRYADDAILKASAVLSSCRKRGQNPTKVVFGGRGLFEKLKKKHLNGPRCEELEREWREKRQGNLYTRGDKKKKGNLNLRFVWIKGELYLWICVGERRWVYAKVVRPVKREGDKWIGFIWSLHQAEKTGKWFPYDVELKLKNGKVYAHVSIGEKFPPTIITLENGVVGIDVNAYPFHLALAEVSPDGNLVGYERISLHELLSADRDKREYLAWQVAYQVVSLALEKGKAIAMEDLEKLPKGRRGDGFPRLRQKLQQWVYRSILEKVEVLARRHGVEVIKVNPAYTSVIGKLKYAPQYLVDKDVAGALVIGRRALGFEEKLPEAYLYLLRDEEFLLYALAELEEKVKKLKRELKGEENEWRKKAIKAKLKATRGELKTLRAHLRALQSGEGEPASRQPADRWKEPVRGHLSGWRIKAWRVLSAALTVPVLEKFSHVKGTVRDFSPLRPILILGDWERAVRRPVPVPGAGAAVQVV

SEQ ID NO: 27308 - protein, 424 aa, Ammonifex sp.
LSGSSRRRRERERLKKSLSRLTPRSEEWQKKVERLKKVKFVLHQKKRRLRNLRHKLEAVRRNLESGRYPICFGGRKLFKAQHNLEANGFQDHAEWLLAWRKARSGNFLVLGSKDEMCGNQTCTYTKDNTLRVRVPDRLRARFGHWVLIKSVRFPYGQEHLDRVRRPVCVVKGRKVYRAVTYRFVRRKGAWYLFATVERDDPAPSTSRQNGAVGIDLNDGFLRVGEVDRSGNPVNEFKVPVAMRDRTRGQVTAALGEAVKKVVLYAKEKGKPVVIEDLDFTGKKQGLRESNSRYARMLSGFAYRKFRVMVESCCSREGVELLRANPFATSLIGQLKFMARYGLSPHGAAACVIARRGLGFGLERAPEVLAPGIPPRGRASRRGYWRQVCKSLKRGPGPGLRVDVLYADRFLSPAFELLPCRCGRL

SEQ ID NO: 27309 - protein, 560 aa, Ammonifex sp.
VRRKRKREKFSITVCGEFFPEVYPAFRSARWARGEEDPLETEMRLFCACERWAYNRLLEGVSRDEIKKRGQELFGLNSRYVDDARLKARALIDSQKELLAQEVEETEKKLSRARKKLGLAMKKLARAEKKGAAPAALEKLRLAVKGRASRVASLEERLAELNSHLENGTVPRMVFGGRKLWKRVCKGRATREEWWHARKNRLYSRGDEEKGGNPNIKVSHRDGEFYLSATISHLSEKVGEDKLGRPKMSRAPRVEGRLWLPEKHRDLVRIWLAMKLPYTAELIRTPDGRYLVHLTFDLGGLKEPDFAKGCLALDTNPDGVALCSVGPNGQPEPWPEGFSVPYPGNLGKYEGEFQVITYPSGFMYIRVPDLAYASGFRRDYLIGVLAKVVVDIALFLGKPVVLEDLDFGKDRLGDLKKFNRMASNFPYAKMMEAVYRRAAKEGVPFKLVPPRHTSTIGYWKYAGRYAVPVHCAAALVIGRRAMGFKERITREIKEFVLRVKEELASGDSLPGEGRGMTRKVKALLARLEKKLPLHNGLARRQQESFGSCWRELKMLALAFR

SEQ ID NO: 27310 - protein, 438 aa, Ammonifex sp.
VDEVVLLRIGGAHIGRDHPKVHRGSEGEVRRDQSRADKEHHPGDEGTAEGPGPRRLPAQAPEPLPEEGRDPREGLPGGQVALQLAGGGPREARPPRQRHKRSRGQSGGVFEKRELTVLGSQVKQEIADRTRDNLRALARLKENGHKTGGLKFKKFVNSIPLKQYGVTYSLDFTRNRVRIQKLGSFRVLGLHQIPPDAEIASAVLVRKPSGYYLHVTCYLPREYFCYPYRLREAVGGDFGVKTKVTLSSGIKIDFGVHETPRLKQLQRELARTKKGSRNREKIRCLLRREYERIGNRRKDAQNKVLAFLRLYGKVVFQDDRVKGWAALFGRQVHSSGIGGLKSRLRDSLGAPVPVERFEPTSQECYACGKKHDLSLSDRVIRCGCGWSCDRDLNAALVILRKGLGLGPDQAVGSGPCPNSSPWRGKPLRGYWGAIPISA

SEQ ID NO: 27311 - protein, 431 aa, Ammonifex sp.
MKRCNVVRVLFSKEQAKVLETLGNRCAALWNAANFRCRQAFLKGEPVPSYAALCSEFKEHPAYKALPSDIAQEVLKKLRKAWDSFFACLRLWKKGKLEKRPGLPRYWKDRRTGKRLVRLIPVKSPRSYSLDARALSLTLPADLREKHGGRLVLCTKGVLRFHGQPKTLELRYDPVRKRWYAHQVVEVPEPARPARPEKHAAVDLGARVLVALAIEGLDRQLLFSAREVIKDFLYWTNQIAGEQLKLNRTGKKTSRKLRRFYQLRARRLRHAFVALAAEIVRILKRFCVTTLFIEDLTGIREDMDFGPKNILVHNFWAFRMLRNLIEAACARAGIKVVPMEPRGTSSRCAVCGHPVRRPVRHKAVCEKCGKLWHADANAALNILLQGSSKGHGAEATPQKPLAYRWNRHRWVSRFESAAGTLKAASGSRTAA

SEQ ID NO: 27312 - protein, 531 aa, Ammonifex sp.
VITLQCLLEFQSEGDRRKVLDLMRRFSSAERYGYQRLLEGWTREELKKHLAQVFQVNTRYADDAILKASSILSSCRERGQNPTKVVFGGRGLFEKLEKKHLNGPRREELEREWKEKRQGNLYSRGDRTKQGNPNLRFVWIRGELYLRICVGERRWVYARVVRPAKREKDKWIGFVWDLHRADRTGEWFPYNVELKLRDGKVYALVSIDEGFPPTTVTLQDGVLAVDVNAYPFHLALAEVSPDGNLVGHERISLHELLSADRDKREYLAWQVAYQVVDLALQRSKAIAMEDLEKVPKGRRGDGFPKLRKTLQRWAYKSVLEKIEVLARRHGVEVIKVNPAYTSVIGKFKYAPQYLIDKDMAGALVIGRRALGFEEKLPEAYRCLLKDEEFLLYALAELEEKVKKLKRELKGEENEWRKKAIKAKLKATRGELKTLRAHLRALQSGESEPASRQPADRWKEPVRGRFLGWRIKAWRVLSAALTVPVLEKFSHVKGTVRDFSPLRVVLVLGDWERAVRRPVPVPGAGAAVQECS

SEQ ID NO: 27313 - protein, 509 aa, Ammonifex sp.
LKLLATYQTRIDDKGCYPFLEACGEYFGRLERKLYVDYHIKGSQVKELKRRYIAEHGITARQFNSLMGDLTARLASVRENLRWRERDLLGRIESVEQAIKKKEKEREKLLKSLAKLVPRSEEWQKKVDRLKKVKFVLHQKKRRLRNLRHKLEAVRRDLESGRYPVCFGGRKLFKAQHNLEANGFRDHAEWLRAWREARSGNFLVLGSKDEACGNQTCTYTKDNTLRVRVPERLRAGFGRWVLIESVRFPYGQEHLDRAKRPVCVVRGRKIYRPVTYRFVRRKGAWYLFATVERDDPAPSTSRWNGAVGVDLNDGFLQVGEVDRSGNPVGEFEIPVPMRDRTRGQIAAALGEAIKEVVLYAKEKGKPVAIEDLDFTAKKRGLRESNSRYARMLSGFAYRKFRAMVESCCSREGVELLKPEGKHVDPFATSVIGQLKFMARYGLSPHGAAACVIARRGLGFGLERAPEVSVLRLPSRGRASRRGYWRRVCESLKRGPGFGLRVDVLYADRF

SEQ ID NO: 27314 - protein, 410 aa, Ammonifex sp.
VPLITIRAQVHADPKTLAVLKDAMFCATKVYNGLLWHLRKEYEETGKVDISRKNLNRILKGLPRAKGYYSMSVQLTRDEVREAYKSFFALKKKGLTQHEAPGFRRKGYLSPLKYVQSGFKVEGDKVRLSLGTGREDGVREVSFRISHRPGVEYERVRELSITYDKVSGRIEARLVVEVKANPCPGRLRVALDLGETILMAAAFEDGIVMLYSGRFIKSVRRYWQKVRASLKQNSRRWKEVAHREKLQVEHLLHVATSHFIEECVKRGVGEIAIGAITGIRESIDYGDRLNQRLHAWPYRKLINMLKYKGALAGIVVRDGVDEKNTSARCHACGRVLPSNRKHRGLYVCSCGWRAQADVNGSLNIFERAYEVSPVKGSSGRVARPVVLSLHLGWHGVHEPKRKEKTLRTSL

SEQ ID NO: 27315 - protein, 425 aa, Ammonifex sp.
MKSWRGSGRRKRQGNLYSRGDKKKKGNLNLRFVWIKGELFLRICVGKRRWVYAKVVRPVKREGDKWIGFIWSLHQAEKTGKWFPYDVELKLKNGEVYAHVSVDEEFPPAVITLENGVIGIDVNAYPFHLALAEVSPDGNLEGHERISLHEFLSADRDKREYLAWQVAYQVVRLALEKGKAIAMEDLEKLPKGRRGDGFLKLRKTLQRWAYKSVLEKIEVLARRHGVEVIKVNPAYTSVIGKLKYAPQYLVDKDVAGALVIGRRALGFEEELPEAYRLLLRDEEFLLYSVAQLEEKVKELKQELKGEENEWRKKAIKARLKTTRGELKTLRAHLRALQSGEGEPASRQPADRWKEPVRGHLPGWRIKTWRVLSAALTVPVLEKFSHVKGTVRDFSPLRPILVLGDWERAVRRPVPVPGAGAAVQVV

SEQ ID NO: 27316 - protein, 415 aa, Ammonifex sp.
MLQATVCLYRQVVDFCLQLFHDHQELLERGDWFRQAELLTHRTRDNPNPLYPFDAEFSNLPSGFRRAAMAEARGIALAWKSNYERWQGRRQKHEERNRKRMEQGKKRVPFTERPPVFPDEVHTWPTYYATELRRLRPERHILLKVFTGRSYGYRKVVLLDPPEIPEGYEAGSPRLVKKNHGWELHFPLFQVRSPVQDQVLKSYFFLLTDQLQSGSSFRASVLKKTTVRHLVKTDPSLRVCVVDLGLEHHAVMTVRDTEGRVLAARFLPGAEDNRLRKRYLEKVVNLQRQTRVIPEGEAFARDPWEKITNFNDYLVHRVSRQIVDFACLYGAKIIVFENLKNFRPERGTRSHYLNQKLGYWLRGRIVRYTEYKALHAGILVVRVSPTNTSRRCPLCGELSIERYTPGRENGKKLEA

SEQ ID NO: 27317 - protein, 423 aa, Ammonifex sp.
MQAANRIWNSCAWHSREIFKQEDRWPTEAELKTKFKSFAAWKELHSQSAQSVVEEYFEAVSAYRKHRENGHLEMNPPGFKPKNHLRTVTWKRQGFDVDGSTLVLKLSRGKEPIEVVLPEGWDVVVLPDGTEVKGVPVEVKVKAVIRRRRVENLVLHVTLDLGVVPVYRAGAVSAYDYNSAVVARAVSNGRLDLFVCRELLSLVQYRNKIIAGFQEKISRLKEGSRRWKRCLSAKVRVLKRLDRRIRQMEHALTKLSAELDGAEGVAFAVVGDLTGLRRSARTGMKGKKASQKINQMAYDRLRQEQHYKNLTRGIETDTWTERNTSSTCCLCGARNPAWRRHRGLWVCGRCGLVLQAGLNGAANLLKQYLFGSCTGRALCLQGSAGLALGREAEPVCASISKGRLSGTWSSRDGSDGPLREAPR

SEQ ID NO: 27318 - protein, 531 aa, Ammonifex sp.
VITLQCLLEFQSEEDRRKVLDLMRRFSSAERYGYRRLLEGWPREELKKHLAQIFQVNTRYADDAVLKASAVLSSCRKRGQNPTKVVFGGRGLFEKLKKKHLNGPRREELEREWREKRQGNLYSRGDKRKQGNLNLRFVWIKGELYLRINVGRREWVYARVVRPAKREKDKWIGFVWDLYKAERSGEWFPYDVELKLKNGEVYAHVSVDEEFPPAVITLENGVIGIDVNAYPFHLALAEVSPDGNLVGHERISLHELLSADRDKREYLAWQVAYQVVSLALGKGKAIAMEDLEKVPKGRRGDGFPKLRQKLQRWAYRSVLEKIEVLARRHGVAVEKRDPAFTSVIGKFKYAPQYLVDKDVAGALVIGRRALGFEEKLPEAYRCLLRDEEFLLYALAELEEKVKKLKRELKGEENEWRKKAIKAKLKATRGELKTLRAHLRALQSGEGEPASRQPADRWKEPVRGRLSGWRIKAWRVLSAALTVPVLEKFSHVKGTVRDFSPLRPVLVSGDWERAARRSVPVPSAGAAVQECS

SEQ ID NO: 27319 - protein, 405 aa, Ammonifex sp.
MLAANRIWNSCAWHSRETFGQENRWPTEAELKAKFKSFAAWRELHSQSAQAVVEEYFEAVSAYRKHRENGHLEMSPPGFKPKGHLRTVTWKRQGFDVEGNTLVLKLSRKKNPIRCALPEGWNVVTLPDGTEVRGVPVEVKVKAVVRRRRVENLVLHVTLDLGVVPVCRAGAVSAYDYNSALVARAVSNGRLDLFVCRELLSLVQYRNKIIAGFQEKMSRLKEGSRRWKRCLSAKVRVLKRLDRRIRQMEHTLTKSFAGLDEAEDVAFAVVGNLRGLRCSARTGMKGKKASQKINQMAYDRLRQEQHYKNLMRGIETDTWTERNTSSTCCLCGARNPAWRRHRGLWVCGECGLVLQADLNGAANLLKQYLFGGCADRELPFALREARVWRWDGKLNRFVQVSPRAA

SEQ ID NO: 27320 - protein, 354 aa, Ammonifex sp.
VVEEYFEAVSAYRKHRENGHLEMNPPGFKPKDHLRTVTWKRQGFDVEGNTLVLKLSRGKEPVRVALPEGWDMVVLPDGTEVKGVPVEVKVKAVVRRREVENLVLHVTLDLGVVPVHRAGAVSAYDYNSAVVARATSEGHLDLFVCRGLLSLVQYRNKITAEFQEKMSRLKEGSRRWKRCLSAKARALKRLDRRIRQMEHSLTKLFAELDEAEDVAFAVTGDLKDLRRSARTGMKGKKASQKINQMAYDRLAREQRYKNLMRDIETDTWTEKNTSSTCCLCGARNPAWRRYRGLWVCGRCGLILQADLNGAANLLKQYLFGSCTGRAEPFTFKEVRVWRWDGRHNRFVQVSPRAA

SEQ ID NO: 27321 - protein, 472 aa, Ammonifex sp.
VRQKSLPLNSGKWARLVETAEAYARQKDAFLVEYAHIKYPRYLGDKRALRDELVSRGFTSPFGLSARMWKLCLEDALFTLERQWEAAIETVRGLVARHGGLTDEEKRYAFWLLYKPEKGSRPWERVQAIFTGEDVTGGQVKLDEADRLRVRNYLRRALRRVLGKRPRVKKARSFVVDPQMYRVFSTEKRQYIAVSTLTPGERVVVPLAGVHAVKGNLRLVLLPDERAVEVHISCEPAVFPPGDGEAGIDLGVTEVFTDDTGRKYRPEYGEALKEMSDYILDKSRKRQKLWALYRENLEKDPAKARRIRKHNLGVLKQRERCRRFRRRCENEVNRAFNEFLKARRPRVVAYEDLSRLRGKAKSRGLSRRVSMWQRSIIRERMGFKWFVYSVEDPGPVNAAYSSQTCPACGWPDPQNRSGDTFRCRKCGFTADADQVAAVNLKARLRDEEITRYTPRNKVKEILLRRYSGNGAV

SEQ ID NO: 27322 - protein, 531 aa, Ammonifex sp.
VITLQCLLEFQSEGDRRKVLDLMCKFSSAERYGYRRLLEGWPREELKKHLAQVFQVNTRYADDAILKASGILSSCRERGQNPTKVVFGGRGLFEKLKKKHLNGPRREELEREWKEKRQGNLYSRGDRTKQGNLNLRFVWIKGELYLRICVGERRWVYAKVVRLVKRERDKWIGFIWDLHQAERTGKWFPYDVELKLKNGEVYAHVSISEKFPPAIVTPENGVIGIDVNAYPFHLALAEVSPDGNLVGYERISLHELLSADRDKREYLAWQVAYWVVGLALEKGRAIAVEDLEKLPKGRRGDGFPKLRRKLQRWVYRGILEKVEVLARRHGVEVIKVNPAYTSVIGKLKYAPQYLIDKDVAGALVIGRRALGFEEELPEAYRCLLKDEEFLLYALAELEEKVKKLKRELKGEENEWRRKAIKARLKATRGELKTLKAHLRALQSGEGEPASQRSPADRRKEPVRGCLSGRRKSWRVLSAALTVPVLEKSPHVRGTVRDFSPLRPVLVSGDWERAVRRPVPVPGAGAAVQECS

SEQ ID NO: 27323 - protein, 369 aa, Halorhabdus sp.
MKYGGGGSHGRRQTRYGRQRRDSPPRHCRGVPVGVQLRRPRRMAGRSPPRKANSTTGRTPTCANRHGFKRISSNPHATGPPKPSKASSPGGRTARRRHNHTLRPLLSGTRNGVRRSTTTTYLSTVNGRIEAEYVLPPEGDNPQTKYLRDDDYEVTGATLQYRDETDTFFLHIGTKADVESEIPDEGDAENSTVLGVDLGIEQIAVTSTGMFWSGDSLNHRRREYERVRGELQRTGTESAHRTIERMGDRETRWVEDYLHRISKALVQEPVAHGCDRIAFEELTDIRDRLPGAKKFHAWAFRRLYDYTAYKAEAEGIDATQVDPAYTSKRCSKCGTTLDENRPSQSKFRCQKCGYEVNADYNAVVRSRAT

SEQ ID NO: 27324 - protein, 425 aa, unknown
  TnpB Polypeptide
VKIKNNGPKKAIKIRIYPNIEQTVLLYKTFGCCRKLYNTFLDLKQKKLSCPTEHELKTEFPYMTEIDSIALQQSRINLKNAYDNFFKSRSGKRKGRLMGSPQFKSRKNGTQSYRSVNVSDNIKIDFESRHIKLPKIGWVKFRDDRVFSQKIRSVTVSRDPSHRFYVSILIDKIISTEKTQPEKVLGLDMSLQHLIVDSTGNKTDYPRYFRKNEDKLAWEQRKLSRKQKGSKEKKSSNSYQKQKIAVAKIHAKISDSRKDFLQKTSTQITNEYDVICIESLNMKGMAQSLNLGKSVGDVGWGQFSHMLEYKALWKGKTLIKVSKFFPSSKLCSVCGFKNKALTLSDRDWTCPRCGVAHDRDINASVNIRDEGIRVLNHSLIPSTVGTTETDLIRKDRVYAQEDCVRPVHKPSVAFSDALPCSGNGR

SEQ ID NO: 27325 - protein, 383 aa, unknown
  TnpB Polypeptide
MKVIRTTKIKIKGSSKAENVIKNYIKALNWLSPIVFNSKEMNSNRLAKAYYPTLRGQFQLPSQLACSICKQITATYQTAKTNKRWFLATFKNSTVPIVWKRDFNKSHKGITLWGETISMHHPYIPQNCWKDSKLKRVNDKLYLILSYEKEVPDLKQTGCIVGVDSGIKRMLVASNSSNNNTLFFSGGKLNHLRKCIRLRRSSVQAVGTRSAHRLLQRLAHRERAITEHLMHVASKALTSYAHEIGARVVVFEDLSNIREASLKKGQDLREKVCRWPYASLQFKAGYKLAEKGIGTEIVDPAYTSQGCPRCGHIAKRNRVGLQFQCVACDHRGDADLNASENIRNRYILREQGFRRMGSVNTHEKSGNIEMILHNSTICSEIQV

SEQ ID NO: 27326 - protein, 359 aa, unknown
  TnpB Polypeptide
MCKEIQVKNLTITSTIKLRLNKKQETVLNGWLWNLTGVYNWAIKKIEYNAQNKIYFSGFDFVNLLADHGKKLGIPSHTIQGVLSQAYTAWSRCFKKIGGKPKLKGQRNKLNSILFPDPIHSPKENHISIPNIGKIRYHKQELPEGVIKCGRIIKRASGWYLCLFIDAERATIVRTGYGKIGIDPGFKSLLTLSNGEKIEHPRELETVEKRLGQAQRGHNKILAARLSERRANRVKDRNHKLSLRLVKENVFIAFSADNHKSIARKFGKSVSSSGHFQLRQMISYKSHIGGTEYIETNPRNSTKMCATCGALTGPTGLSQLSVRHWDCACGAHNDRDINAAVNVLNAGAGVAHEVHHAAA

SEQ ID NO: 27327 - protein, 392 aa, unknown
  TnpB Polypeptide
MHKTFKYRLYPNRKQITDLNKQLELCRWVYNQTLGIRKIFWEQEHKSFSLYDSHKMLTQWIKKRPELEQVYSQVLQNSQLRVDLAFKAFFRRVKAKQNPGYPRFKGFGRYDSFTYPQTGFNLNPANNTLYLSKTGRVPVILHRPVMGKIKTCTIFKTQTNKWYVSFSCEIDRPNPLYKTGKVMGMDLGLKTFIQISDGTEIKNPRFFKRSQKNLAKAQRRFSKFPKNVRSTEKQRARKIVAKVHEKIRNRRDDFCHKTVLNLVKNYDFIAHEDLSIKELLEEKKYSKSIADASWAKLIQMLSYKAEEAGKITVAVNPRNTSRQCSRCLATVPKGIDERIHNCPHCGLSMDRDLNASLNILRLGLESVERPMQRQTAQALVRARKNPTMEAVT

SEQ ID NO: 27328 - protein, 370 aa, unknown
  TnpB Polypeptide
MKLIRSSKCSLKFATTSKLSELRKVLSEYGRVCNIFIEHFWKNGTFSKSELLKDIVNLPETWLTARLRKVAAREAIDMISAVKERWKEKPWKITQPVHKGKRAYVSCTIADLQEKEGSKEFDAWLHLASIGEDTILDLPIKFHKHYNKLVAQGKRLNSYILTDKYVQFSFEIDTGEKKKGVNAIGVDTGIKALASLNNGAQLGLDTEACIERIKRCQHGSNGQKQARRAFKQRIDEVVQEIVKEFKHIDLVVVEALKNMNYKSKLKRRLSKNMRRSIGTWAYRYWLKRLEMACETNRVGFRTVAPYYTSQTCPSCGHVDRGNRVGQVFRCLSCGHAGNADIIAARNILARFLTGLYGARYKPYEVMFNIL

SEQ ID NO: 27329 - protein, 476 aa, unknown
  TnpB Polypeptide
MVTIKFPYKVSNCNKGTILSLIKQQNNAIRYLFNRIKDFSEPPTQKQLTIQINQINHINIDSWFKRSAIYKALAVNVSHQTKIKETLEYNKENLGAKKRLPSVIFGGRKLFFKRSEKKIKRSEFNLEKLMPLCSIGEAFQCGNRKFRFKIIENNSIIFQPDRTTKIEINLSHLRKNYSKILSRLQEFTENKKIPVQFEIDLKFIYMTYDEKFLQNSVYNFIPDRYMAIDLNPNYVGYSVIDWKSETEEEIIKTGVISIKEINDFQKETHQSSNSSENLYWNNKREYEVFQISKELVNIAETYQVERFGLEDLSIKSCDKGRGKKFNQLVNNFWSQEKFSANLIKRLNLSGIKPIKIMAQYSSFVGNILNQDYPDPVASSIEINRRVYKYFHRLDFKDPVIFPSFKGCKSALIKSLEEINKRLSELLQDSKDWKDFYYRVKNSGLRYRVPLDRFRYKVFRLFHEKALIDHYSVFSVK

SEQ ID NO: 27330 - protein, 348 aa, unknown
  TnpB Polypeptide
MNRTIKISLSSISKIKIRKLMALKQEIRSAINFYIDSLWINPGALNAITLNRFTFGSLSYRHKQNALKIALEIISSTQKNKSKKPVLSRAVTLSCLVAKIEKGKKSFDFVLKISGLSKGHPIVIPFKSHKRLNYWLNQPGAKLKQGCILGDTWAGLWIELPTPKLKQGPVLGIDIGLNKLIVDSNGIQYGTEIKKIVQSIRRKKPGSKSRKRAHRYRENYINKVLKNLPWNSIGTLGIENLKNLKKGKKGRGKNFRKAIAPWTYRQVMTRIPQLAQENRVRLVAVDPRDTSRTCPHCGSVAKENRRGEDFQCIRCNYSTDADYVGALNVLARTLGNSQECMVPESFCA

SEQ ID NO: 27331 - protein, 398 aa, unknown
  TnpB Polypeptide
MREEYPVLKLIQAVFSSLCPGSVNKLLPLLTIPKKSLMIKAHPKFKCPTMRRTSQVFLNDLNKTKTKTLTEFLYKCHDITQYFVDFFWHSGDRSAKLADLETVHRGRDRFETTARMAQAMAKQAKETIRNGTMNNNRKPRLRKHTITLYSLFVEIEKFKGSFDYAINFKGSGAPVMTVPIKSTKHLNNKIKNGWTLSKTIRLGIIDGKLFVDLILEKPKPVLRNSGRVLGMDSNYKHGMVFSDGRMIGDEIYDIIQNFGKRQKHTHKECTDRMFRALNKMDLSGVKAIVIENLKNVKKRGKFSRKLNRRMSHWLYASVMDWLSRRCEELGIRLERKSPWKTSQRCSVCGKWDRRNRRGDKFICVHCGHNDQADLNAAKNLEFLGLAGVYGLRDLPSLK

SEQ ID NO: 27332 - protein, 477 aa, unknown
  TnpB Polypeptide
MITIKLPYSVSNANKDMILALIKQQNSAIKYLFNRIQDSPEPLTQKELTALTHKINHTEIIDSWFKQSAVYKAQSINGSYKTKIKEILEYNEENLGAKRKLPSVVFGGRNLFFKRSEKKIKKSEYVLEKLIPLCSIGQSINYGNRKFRLKIIENNFIIFQPNKEMKIKLILPHLRKNYSKILSKLQELTENKKIPVQFEIDLKFIHITYDENLFQSSVYNPIPNRYMAIDLNPNYVGYSIIDWKSETENKIIKTGIISIKNINDSQKSVHKSSNSPENLYWNNKREHEVFQISKELVSIAKKHQIERFGLEDLSMKSCDKGRGKNFNRLLNNLWSQEKFSANLIKRLNLSGIKPIKIMAQYSSFVGNMLNQNYPDPVASSIEINRRVYKYYHRIDFKDPVIFPSFKGCKSALVKSLEEIDERLIKLLQDSKDWKDFYYRVKNSGLKYRVPLDRFRYKVFRLFHGKSLISQFLDFSMI

SEQ ID NO: 27333 - protein, 384 aa, Streptomyces sp.
MKLAVQVKLLPTLEQASALEATLRACNRAATYASRVAFAKGLMDRNGLQKEVYADLKARFGLSAQPAVRAVKKVVDAYTSLRANLRAGNLGPPTSKRYRAAVGTPIGFRPEAAQPFDDRCLSWQYDSCTISIWTAHGRARGIRFVCSPDQLKMLVARRKGESDLAYRDGKWFLIATCDLPDPEVYEPADWIGVDRGIVNLATTSDGINYQGRRLFRYRRWQARKRTELQKKTSRSARRRLARRRRKEKSHATHVNHRISKEIVSVAQRTGRGIAVEALGGIRERVRPRRDQRGTLSSWPFHQLGQHLAYKARRAGVPFLEVDAAYTSQRCPRCGHTERVNRPDRDHFRCRRCGLAGPADVVAGVNVRDRARSAWVFVTAPAPSS

SEQ ID NO: 27334 - protein, 525 aa, Thermus sp.
MACEDEKAVLNLMRRFSAAMRFAYNRLLEGKTREELKRENGPLSALFGLNTRYADSAIEKARAVLDSARELSQDPRKVVFGGRKLFEQLKRKHLSGKARKRVRQEWEERRQGFLYSRGDATKKGNANLRLEPEEGALWLWVNLGNGAYVRALVKTSHPQLKTLLQRAYASFPYNVTLYNVTLQLKDGKVYAHFTWSGGLPPPVHTKANGVLGVDANSDPYHLALAVVGKDGNLIRYLTLSLEEVNRAPNKGAKELLLKVASLTWEIAHRVISLAEEHGVAIATERLKYLRKSQRGDGSGWHFRRREHRFAYRSLLAKVHSLARKRGVEVLEVNPQDTSTIGMLKYAPGLSLSKDVAAAYVIGRRALGFEEKLPKGYEALLKDESFFAYTEGFYQSRLQELQKLREAEGNPYLRRRLSRDIGKAKAALTLVSSLQGLLGSRKGVTKGRNPSGAHPWRVLRVGLFLPLLGLEVPRDLSPLKPILHLAPLTQGSWEGWKVGPGPLWGPYTPDEPHPGGGPGCVIVHFE

SEQ ID NO: 27335 - protein, 364 aa, unknown
  TnpB Polypeptide
MSKKSAELTTTIQVRLSPTPEQSRLLMTHCQEYISVVNTLVSAIDSGVLPENASTKDFTCPLPSIVKNQALRDAHSVFKRSFDLGVIPILKKPICQWNNQGWQMTGTHLVLPVSLEGKTQQIHIACNGLVYTGKPGLLRIKKKRGKWIADITFTLDPVAPASGECVMGVDLGLKVPAVSYVSGKGTRFFGNGRYQRYMRRRFYARRKSLQQEKKIRAVRKSKGKEARWMKETNHQLSRQIVNHAQEQGVSTIKIESLAGIRKGTTRTSRGAKARKNNRMIATWSFYQLTQFLTYKAGRIGIRVEQVDPAYTSQECPACSARNKAQDRTYVCADCGWMGHRDKVGAINISRRTGLSDQRTSAVGA

SEQ ID NO: 27336 - protein, 392 aa, Lactobacillus sp.
MLITYKVEINPTNNQQWLLDRHIGGSRWAYNLFLDMNKRRYQDGYHYMGAYEFSKWFNTEYLEANPDDMWIKDLSSKSVKQAFIDADMAMKRFFKHLSGYPHFRAWKREQGSYYFVKNSKSQIIPVERHRIKLPKIGWVRLKEYGYIPTAAEHFVVKQGRVKKHAGRYYLTCLVEQADPVQPELTGEGVGIDLGVKEFAILSNGTIYGNRNKSSRVKRLRKQLRRLQRKQSRQYLAFKARKQKEGNSATDLNLAKTRLRMQRLYQRLQNIQADYQNKIIAAVVTTKPQWVALEDLNVKGMMKNRHLAKATSYQGFYNFRVKLVAKCQQLGIPVHLTNRFEPTSKLCHECGAKKVDLKLSDRIYRCPVCDYVEDRDINAALNIRDTENFELAY

SEQ ID NO: 27337 - protein, 409 aa, Zestosphaera sp.
MKAFIRSRVGRMPEGVYHRTLKAVAEVVEGDIKDLFWDLVIYRCVLQKVIDALWELEEIPKKDQAHQMFYGMLRVYGFRAHVVRNIYNTAIALVKSAKSNEGSKPTVKKLFTRLDHQDAEVNLSNKTIKIILRDKQYTLRIKHRDGYIERFKSLKWKEVHIKYRNGKLYVSIVFKVRYTPYIPKGVVALDLNLRHVVSYDCPDIRRYKTRFIDALSKKARAEEIQKKYPKRWRYNKKILKRVKNLHRRSRNIVINWCRKFAKEITLKAKRHGYTIALEDLKKLRKSYNNKNDRVVWKLTMFAYRKLQESILSKAIEYNVPVVFVNPKKTSSTCPRCKSKIRYIGRFGICRKCGFRADRDVIGAINIWLKVLKAYAGVPGSPQRASAMKNEARQSGGTKNEGMKKTIKSY

SEQ ID NO: 27338 - protein, 373 aa, unknown
  TnpB Polypeptide
MNRTHKIRMYPTREQEVQLRKTAGTSRYVYNWALSTWKQMYERFDNGESTEKPSVSVLARKWTAERPEWATETNRGSQTRAIMNVGIAFNSLWRGKSMYPRFHKKGRKDTFYVDNAHAYLEDGSVHLPQIGKVRLAEKLRYSGKIMSYTVSTYAGQWHVSVQVELSGPDQSGSVPRSVVGVDVGLKHAAVASDGSVLDLPEVISRLQERLKRAQRKLSRKQKKSNNRSKQLLRKQRVQNKINNIRRDAANKFTSRLAKSHGTVVTESLDIIGMMGRADKGLRRNLTWSLMSEIIRQLSYKAKRHVQVDRFYPSTKTCSSCGHVKENMPLSDRTYRCGQCGLVIDRDMNAALNLMHAGAVSPEAPVEKLEFQFP

SEQ ID NO: 27339 - protein, 330 aa, Aphanizomenon sp.
VYPVKELEFIWKKWVAAVRKVYNISIAYLNENQGFTKIGKKGGKMGFRTMLKASGLIPQWCLDLNVSKILDNASMEAYKAWSETAKNPKTINKGKDKKTHPQAGLKIAKFRSIRDQKLTIQFDPSAYKNGRWMVSTTKHLPHPEFRGQDFCVLTDGSSELTYNKGRWFAHFPVELQQTVSMTNKVIALDPGIRTFMTGFDGSDFLEFGNGDFNKIAKLCSHLDQLKSKHDLSVGYKFKRLRYKLRLAIERLRTRIKNLRSECHKQVGSYLAKNYDVIVLPTFETSQMFLKKKRKLRNKTARAMMTWAFYQFSQTLEHLCNRYGSFLSKNN

SEQ ID NO: 27340 - protein, 524 aa, unknown
  TnpB Polypeptide
MSKRKDPSFVLELPLVVNPHEARRLSVRFEAGRQLYHPVWGEALRRLDLMKQSRAWRAARKMSAGKPGSQEQKARAAAFALLAKTIGFTDDDIQSYATRCKNACWIGDHLDAHTTQTIGTRAFQAVQRYPFRTGGRPRFKPKWKALESMEGKSHAAGLRWREDHIEWGGPSLQAIDDPKDPHGVQVFALQNPVRYGRRVRRTLCGQTRWFVQRVIAGFPKWKDKNPVREGTSGIDIGPSTLAAVSETDAFLERFCASVPNLKQAIRRMQRAMDRSKRLSNPDNYCQDGTVKKAAQGKPLQWVFTMGYLRLRGRLRELHRVRAASRRTEHGKLANRVIARGHIVLALSNPAFQRRFGTSVRARAPRAFMDHLRRQAAGAGGEVIKFPTRSTKRSPSGPCGAVVKNPLRQRWHDGPCGVRAQRDGYRADLGLHVRESHGVWRLDTESARAGGYARGPLLVQAVSGVMQAAQGELGPVSFGLRARAALSRRGVWVLEEGSGCSRPVVKAAVARAGKTSRTGTRTPGL

SEQ ID NO: 27341 - protein, 401 aa, Microcystis sp.
MLKAFKYRIYPTSEQSVLLAKSFGCARWFYNYALNLTSETYKQTGKGLSRDEIIRLLPSLKKEHEWLSEVPSQVLQQAALNLSSAFLNFFEGRTKYPNFKKKQNRQSIRFPQHCKLKDDVLVLPKIGEVYCKVSRQPEGSLKSVTVSVNPSGEYFASCLYDDGQDLPQKLTLSEAEGSSEGKAVGIDVGLTHFAITSDGTKHGNPKYYRKYEQRLARRQKKLSRKQKGSNNRNKARVKVAKVHSKIVRCREDFLHKLSRKLVDKNQVIVVENLAVRNMVKNHKLAKSISDAGWGQFCTMLKYKAEWEGKIYIEVDRFFPSSKTCSNCLNRVDSLSLDIRSWQCPKCGETHDRDINAAKNIRDEGLRILAVGHTATASGGRVRPSKGTAFARHLPVNEESLA

SEQ ID NO: 27342 - protein, 399 aa, Actinocorallia sp.
VRSAFKCRAYPDPEQEAVLNRTFGCVRLVWNQTLAERHARYHGEGKTTSYRETDAALTVLKKTAEFAFLNEVSSVPLQQTLRHQHVAFQSFFAGRARYPRFKSRHGRQSAHYTRSAFRMRDGELWLAKTGSPLRVAWSWPHLDLAALNPTMVVVSREPDDRWFVTFAVDMDDPAPLPETGQAVGVDLGLKDFAVTSDGEHIAHPRHMDRHERRLKRYQRMMARKKKGSANRAKARRKVARQHSRVADARRDFLHKVSTDLIRRFDVIAVEDLNVAGMVKNRSLARSISQTGWGEFRAMLEHKALLAGRRFVVIDRWYPSSKTCSGCGHLLSRLDLSTRHWQCPSCGARHDRDHNAAKNIRAAGLAVLACGADVRPAGTSPGQTATKQEPRPAREGIPAL

SEQ ID NO: 27343 - protein, 506 aa, Actinocorallia sp.
MAAPFVVSGACGVSVRTRLKGLTVRDEEVLRRVGAHLGSLASRDLKARCGDGLGHRARRWAERKRELTAESSSRWAGAITKASHDQWALARRSQTSHITTLDTAITTISHRLALPVGQKSARGAPGGYRSAAEWFAKSRRLTVLQQRRQQVAADRAEGRVRVVRGGKALARGRHHLEAAGVSEQEWRQRWETARWFLSADGETGKRHGNETLRIAPDGQVSIKLPAPPAGLANAPHGRYVLSARVSFAHRGREWVDRVEADRAVAYRIHLDAVRGRWYVDASWQRPPVETIPLEAALARGVVGIDTNADHLAAWQLDTHGNPVGRPRRFFYDLSGSASHRDAQLRHALTRLLHWTRRLGVAAIAIEDLDFGDVKSRERHGGRRLRQVVHGIPTGRLKARLVSMATEQGIALVAVDAAYTSRWGARYWQQPTSTRKIKTSRHEAASLVIGRRAQGFGAGRRTAPPPRHRSDGAGHRTVQARHPGPGCEEPRPARIGGRTRSAAPPGA

SEQ ID NO: 27344 - protein, 292 aa, Actinocorallia sp.
VEVDRAVAYRIHLDPARGRWYVDASWQRPPVQAIPLKAALACGVVGVDTNADHLAAWHLDTRGNPIGTARRFSYDLSGSASHRDAQLRHALTRLLHWTRRLGVAAIAIEDLDFTDVKTREKHGRRRLRRVVHGIPTGRLKARLVSMAAEHAIALVAVDAAYTSRWGAEHWQQPTSTASRKTSRHEAASLVIGRRAQGLGARRRTAPPPHHRSDGAGHRTVQARHHDPGCEEPRPVRIGGRTRSAAPPGARRQGEPFCPAPFGTDALTPGGILLDSAQERLTSSPVEGGGSDT

SEQ ID NO: 27345 - protein, 511 aa, Actinocorallia sp.
MPLRSMAAPFLVAEACGVSVRTRLKDLTAADEEVLRRVGAHLGSLASQDLKARCGDGLGHSAQRWAERKRELTGGSSSRWAGAITKASHDQWALARRSQTAHITTLDTAITTISHRLALPVGQKGARGVPGGYRSAMEWFGKSRRLRVLKQRRQQVAADRAGGRVRVVRGGKSLARGRHQLEAARMSEKQWRERWEAARWFLSADGETGKRYGNETLRVTPDGQVSIKLPTPLAGLANAPHGRYTLAARACFAHRGREWADRVEADRAVAYRIHLDPARGRWYVDASWQRTPVQTIPLEAALAAGVVGVDTNADHLAAWHLDTHGNPIGRPRRFFYDLSGSASHRDAQLRHALTRLLHWARRLGVAAIAIEDLDFGDVKSRERHGGRRLRRVVHGIPTGRLKARLVSMAAEQGIALVAVDAAYTSRWGARYWQQATSTRKTKTSRHEAASLVIGRRAQGHGARRRTAPPPHHRSDDAGHRTAQARHHDPGREEPRPARTGGRTRSAAPPGA

SEQ ID NO: 27346 - protein, 326 aa, Actinocorallia sp.
MGRQVKRAFRYRFHPTNAQTAELSRTFGCVRLVYNRALQERTRAYRDEGRRVSYADSSAMLTEWKRTEELAFLGEVSCVPSQQAPRHLQGAFMNFWGRLAEYPTFKSKKKSRASAEYTRSGFRLRNGLRTLAKMSEPLDIAWSRPLPEGAQPSTVTVSRDAAGRWFVSLLCDDTITTLPPTDTMVGIDAGPTSLVTLSTGEKIADPRHERRHRRRLAKAQRASSRKAKGSRNREKARRMVALARAISDAAWRQMRGMLEYKTAWYGRNLIVVDRWYPSSKLCSACGRQAAAMPLSVRARTCTCCGTTHDRDANAARNLLAAGLAES

SEQ ID NO: 27347 - protein, 399 aa, Actinocorallia sp.
VQLRYAFRLYPTAGQCRSLASAFGCARTVYNDGLRARETARAQGLPFPKAGDLSRALITEAKRTPERAWLCEVSVVVLQQALRDLDAAWRNFFDGLAGKRPRMGVPRYRSRKDSRQSVRFTANARWQITPGRKLRLPKIGDVTVKWSRSLPCVPSSVTVIKDAAGRYFASFVVETSSEPLPETNAVIGIDLGLAHFAVLSDGTKIDSPRFLRRAEKRLRRAQRSLTRKERGSKNRAKARVKVARAHAKVADARRDFHHRLSTGLVRENQAVAVEDLAVKGLARTRLAKSVHDAGWSQFVNMLEYKAALYGRTLIRIGRFEPTSQICSVCGVKDGPKPLNIREWECPRCGSVHDRDINAAINIAQAAGLAVTACGAQVRPGLVPAQRGEAGTRSKLTPAW

SEQ ID NO: 27348 - protein, 352 aa, Actinocorallia sp.
VFKKKNRTPYAFRVRAQKGSVRLGAPGRPRTVRIPKVGVVRVREDTRGLRRMLRPCSDGTTRARITAVTVRTHRGRWIASITVQAADLHPSLRHPSSSPRGAGDTADWVGIDRGLIDLVVAATGDGRPVARVSAGRTYQRRQDGLAARQRRLTREQSGSKRRARAVEQVREFQARTAAIREHRLHQVTNLLVKNHDRLVIENLHVVGMLADHRLAKALTDASFGNLARMLTYESEWRGGVLVEADRWFPSSKICSACGHRANRLGLAERTYRCGECGLHIDRDLNAAINLAAQGPHLLRTPHRTSGPNPGPRTRKQRAGSPTRAQVPERRRPRPTGGAAAKGPSTARTGLPT

SEQ ID NO: 27349 - protein, 339 aa, Trichococcus sp.
MKTVQIKLKPTKTQAKELKRLSEEYIRQANVLVQQAIREEKFPRVTSKNIESGIPSALKNELIRYAKSKHKQFGKCTFKRPMLSYNNQSFSVDSTAIRFPIMADGKAKKTAIKAVIPEELFVLLSGSKLGTLRITKKGFHWMAQISVPTEEKEFVGEGILGVDLGILCPAVGVVAADGKTQFFGNGRQNKHLRRKYKELRRQLGKQKKVNAIRTINDKESRIMRDINHKLSRQIVTFAAENNCGTIHLENLSGIRRTSRLRGKNKANLHSWTFYELSSFITYKAHELGIKVVYIKPEYTSQTCPSCGERNKVKDRNYHCDCGYHAHRDRVGALNIAKTI

SEQ ID NO: 27350 - protein, 561 aa, Streptomyces sp.
MLVDCRDGDLRPGGGERVGVLRELAASFVVPGPSGVAVRDRLRVSESDAAVLAEVGVFLGSLAVGDLAERSRQGLEHDAASWAVRKRALTGKSSARWAGSITKATHDQWALARRGQVTHLEWLRAQIAAVEARLTRPLGAKANKREGLARGYASHGEWHAKSRRLQTLKARLAVVEADWSAGRVHVVRGGKRLANTRHHVEAAGLSEQQWRERWQAERMFLAADGESGKRFGNETLRITDTGQFSIKLPAPLAHLANAPHGRYVLDATVAFKHRGQEWLDRITANWAVAYRIHHDTARGRWYVTASWQRATAPVLPLEAALARGVVGVDMNDDHLAAWRLDGHGNPVGEPQRFFYDLTGTAEHRDAQLRHALTRLLHYTQRCGAVAIAIEDLDFTVGTSREKHGRNKRFRRLLSRFPTAKLRARLVSMAAEQDVAIVAVDPAYTSRWGAQHWQKPLTPPTRKISRHDAASIAVGRRALGYPIRRRTAPPPHHQSDGAGHRTVQARPDTRWREETRRHLPGPRTGCAPPGGGSKAGDQCAQHRSGHAAGHGFWQQDSLPLIL

SEQ ID NO: 27351 - protein, 569 aa, Clostridia sp.
VKKGKKNKKKAAGPNGGIIYTVQGEWFPKDYPAFRFPEWHRGNEDPLVTEMRLFSACVRWAFNRLLEGKAREELKKEGQELFGLNSRYVDDAILKAKEIIGSQQELLALEIEETQKKLGRAKKKLDRAEKDLDKAKAGDDPGKIEKAKRVIHGRRARARKLSAKLAELQAHQENGTIPKVVFGGKSLWRRVCKGQSTREEWRNARQNRLYARGDETKGGNPNLKLVHQDGEFTLSAAISHLAKPGKIDAKGVQHTKHAPRVTAKLWLPEKHRLKVWELLLGGVPYTVELIRGQDGRYRAHITFAVETPRLITNSNLGYLGMDTNPDGVALANIGYFGQPEPWPEGFDIPYPRALHKFAGEFQVIMQPNGFLYIKIPELAYSRGYRRTYLIGVLAQVVVDITKVLGKPMAVENLDFGKDRLDTNKRFNRMAANFPYRKVIDAVMRKAFKEGVSVKSVWPAHTSTAGYWKYMERYGVVVHQAAALVIARRATGFKERITEELKQNVEKIKEELSQKVKTLPGEGKGMTRKVKRLFRRLDEKILVHNGLTRFKQESFYSVWHDLKELALSSR

SEQ ID NO: 27352 - protein, 302 aa, Mastigocladus sp.
MSPRQQVKSWFKLDSFTLPMPSNLKFEDIKELRILPRNRCFYAEFIYKSNTVNSDVDKSRVLGIDHGLNNWLTCVSNVGTSFIVDGRHVKSLNRWYNKQVAIIKESKPQGFWSNKLAAITEKRNRQIRDAINKVARLVISHCLNNRIGRVVFGWGQGIKQEINLGQKRNQQFVQIPTARLKQRVEQLCQQYGIEFVETEEANTSAASFVDGDTLPKHGEKPDNWKSSGRRVKRGLFRTALNWYINADCNGAANIIRKVSTTLGLDLSGVSRGALTHPTRQYIWVTAKKKAIFADLSRCVASF

SEQ ID NO: 27353 - protein, 410 aa, Desulfotomaculum sp.
LSRCKNNQAKKTKSEDTDTLVEKFPLHLTNKQIILVRNLQREAAKVWNAACTVHRTIYIKHHCWLGEGAMKAFVKGKYGIHSQSAQAVVETYFECCERTKALHEQGYTDWRYPHRKKYFFTVTWKPLGIAHEERVLTLSNGRGREPLVLNLPKRLSGAVIKLVQLVWHRNQYWLHVTVEKPALQKVRGNVTAAIDPGEIHAATITDGKEALAISGRLLRSLNRLRNKVLRKFQKAIYRTKKCSKRRRELLTAKYRFLNNIERRIEHVIHTISAIIAKWCLDRNVKTVYIGNPDGVQKKDRGRKHNQRMSQWAFGELRRMLEYKLKRHGIKLVPEDERGTSGTCPACSEYTKQTGRTYKCGKCGFTGSHRDVVGASGILDKSVNGNFTKGRKLPEKVKYMRSRVVTLKKAA

SEQ ID NO: 27354 - protein, 370 aa, Solobacterium sp.
MTITKAYKVRLYPTKTQQELMIKTFGCTRFVYNKALHICQETYRTSKRPVFYGELSRMLTFWKTTTELSFLKAVDKFALQNSLRDLCQGFTNMKHGAGYPKYKSKHDHHDSYKTQFTNINIAVDNTYIILPKLGHIRYRDKKTPQGKIRNVTISRTPSGKYYASVCVETEDVRELPMTGNQIGIDLGIKGFCTMSNHEKVENPRFLNKTLQQIQKLQRELSRKSKGSSNWEKNRIRLARLYEKATNQKRDFLEKLSTRIVSENDVICIEDLHVSGMVKNHNLAQSILSASWYEFVAKLIYKAKWYGKTVIKVNRFYPSSQLCSACGHKNPLVKDLSIREWICPVCGISHDRDINASTNILNEGLRQLEVV

SEQ ID NO: 27355 - protein, 410 aa, Chloroflexi sp.
MQLVEQHLIRRSDPRYGAIDQAAFASKNLYNQATYQIRQAYLHEGRYLSYAEIFHRVKHLDCYQALPRKVSNSILIVIDQNWRSFQAALTEWKQHPEKFTGRPNLPGYKHKEKGRNILIYDIQAIGKRAYKKTGKLVPSRLGIAIETKVAWETIDCVRIVPRGSCYVVEVVYRKESKQAAVDPGLAAALDLGVNVLAAVTSTKKGFTPLLINGRPLKSINQGYNKRRAHLQARLAKAPTKRFTSRQLDGLTMKRNRRVNAYLHTASRRLIDHLVQEGIGTLIIGKNRFWKQEVEMGKKNNQQFVQIPHARFIDMLTYKAQLVGITVQVTEESYTSKASFLDLDEIPTYCLEQQGKYQFSGKRSGRWYRAKSGRRIHADINGSYNTLRKVIPTAFELGIEGFAVIPRPLAV

SEQ ID NO: 27356 - protein, 392 aa, Bacillus sp.
MIKSIKVMLKPNNKQKTKLFLYANTARFAYNWTIAKQQENFQNSGKFINDSILRKQFTQMKKLDEFNWLNNVSNNVTKQAIKDACDAYKRFFKGLSKYPKFKSKKKSIPSFYQDNVKIKFTKTHVKVEGFASSKKSNKQKINWIRLAEKGRIPFGENVKYMNPRFTFDGLNWWVSVGIETDSDYSPSKTEGIGIDLGIKDLAVCSDGKVYGNINKTKRIRQLEKKKRRLQRKISRKYEKGREGNRYWKTNNIIKSEKKLLKVSRRLTNIRHNYIHQITSEIVNRKPMFIVLEDLNVKGMMKNKHLAESVQQQCFHEFRRQIEYKSNWNNIRFILADRWFPSSKLCSCCGKVKKDLKLSDRTFECECGNIVDRDYQASINLKKYGENVLESAS

SEQ ID NO: 27357 - protein, 278 aa, Crocosphaera sp.
MSENFFDGRGYPKFKTRQRFKSFSYPPNQVKLEKNKVYLPSIGWMRFFKSRSIPDGFSLKTVTIRSLADGWYMSIRIENTEVPQLNLQDLGQVKTTIGCDLGIKKLLALSNGELIENPQFEKRLSKRKTIRQRRASRKKRGSSNQKKAYAKLARVDQKIVNQREDYQWKIAHHLVRLADVIVLEDLNIQGMIRKCRAKQDEKASDPAPSHGAPGSASSKFLKNGQSAKRALNRLIRDCSWGNLTEKIESVAAKFSSICLKVNPKFTSQKCSHCGHIQK

SEQ ID NO: 27358 - protein, 330 aa, unknown
  TnpB Polypeptide
MRKEGYEKGEKIGYGQTSAMLTELKKQEEFAFLKEVDSIALQQSLRDLDRGFVNFFQKRASHPTFKSKHNHFQSYRTVNQKDNIRIVGRYIKLPKLGYVKVRQSMEVGNIRHVTIEHTPSGKYFAVLNVEFEPEPRPNQGGTIGIDVGIKTFYSDSNGNTVANPKYLERSMRKLVREQRRLSRREKGSHNRDKQRIRVAKVHEKVTNQRNDFLQKQSTMLVCENQTICIEDLHVKGMIRNHKLAKSIASVSWAKFFEMLEYKAVWYGNEIRKVPTMYPSSQTCSACGYRNPLVKNLRIRIWECPGCHAVHDRDTNAGINILKKGLQLQSA

SEQ ID NO: 27359 - protein, 417 aa, unknown
  TnpB Polypeptide
MEVRRTVPVTLDVDSDDAALLEDTVDTFLWSAQYVVDHAFQGEYVTTSKTTLDDETYDDVREATNSFNGGLVQAARNTAAEACKSVVQRWKNGKTASKPCMTSPHVVYDHRTATFHDDYVSLATTDGRVEADYVLPDEDSDTPHAEYLFSNEYETTGAELHRKHGEWQLHIHCKKEMESDTPEQATTENGTVLGVDLGVNNLAVTSTGTFWTGEEFDHWRREYENRRGDLHACGTRWAHQNIQSVGQKEEGRFKQTLHRISNELVTEARENECSVIAFENLTDIRDRTGASWGHKWAFTRLYEYVEYKAAKYGINVEQVDPEHTSRRCSECGFTHPDNRESESFECQKCGYENHADYNAAKNIGLRYLRRNQTGGDEGAPLGVRLNSGTLNVNGDYSPALSEARTGVHAESHRFSGG

SEQ ID NO: 27360 - protein, 306 aa, unknown
  TnpB Polypeptide
MQMGIRHEKGSDQLRLSLSKDLKSYMEETYGIHEKFLYLENKIFRNMDHIKQLRIYPPENGKCDLIVIYEIEEPEQISQNGHYLSIDLGLHNLMTCYDSGNGRAFILGRKYLSLERYFHKEIARVQSVWYAQQSERGIKYPKSSKHIQRLYRKKQNAVKDYLHKVTRWIAEYCRKEDIRCVVVGDIRNIRKEKDMGHKTNQKFHGLPYNKLYIMLEYKLKLYGIQLIKQEESYTSQCSPFSPEISKRYAESSNRKERGMYITDGVRFNADAVGAFNILRKYLSVSGKQKELSVTGLKNPEIIKVAV

SEQ ID NO: 27361 - protein, 418 aa, Planomonospora sp.
MSFPVLPTSADIVVLPLPNVKGGGVRRSFTFLLRPTARQAAALAACLEDHRQLYNAALEHRRTAYRKAAVTVRYGDQSADLKHIRADDPRGQGRWSFSSQQATLRRLDKAFRAFFDRVKAGRTPGFPRFKGRGRFDTVTWPKDGDGCRWDSQPQHPTATLVRLQGIGHVRVHRHRTVKGRIKTISVKREGNRWYVILSCDEVPAQPLPATGAAAGIDLGVASLVTTSDDEHLANLRHLAAIADRLADAQRDLARKQRGSKRRRKAVARVAALHAQVRRQRLDHAHKAALALVRDYDVIVHEALKVANMTRSASGTLERPGRNVAAKSGLNRSILDAGWGVFLTVLAYKAESAGRELIAVEPRNTSRTCAECGHVAKENRLTQAAFACTACGHAAHADVNAAVNILRAGLALREAAQAA

SEQ ID NO: 27362 - protein, 369 aa, unknown
  TnpB Polypeptide
VWNLAVEQQRHWQPGRKAPGYGEQAAQLTEARAEYAWIRAGSQTVQQQALRDFAQAMSNFFAGTHRRPTWRKAGVHEGFRQVGLKPRHIERLNRRFGRVWVPKVGWVRFHLSRPVPKGVKSYRVTRDRAGRWHVAFTHVPAPITGPCDSSVVGVDRGVVVSAALSTGELLRAPGLTQGESKRLKALQQRLARAKRGSKHRDKTKRAIARLKAREKDRRTDWVEKTTTDLARRFDVIRVEDLDVRAMTRSASGTISQPGTRVAQKRGLNRAISRSGWGQLVTRLQHKACGRVEKVAAAYTSQRCNACGHVAPGNRKSQAVFECEACTAGRCNADVNAARNIAAGRAVTARRDLAVRRSANREPQLSDPAA

SEQ ID NO: 27363 - protein, 398 aa, unknown
  TnpB Polypeptide
MSRYRLLPTPAQQAVLRDHCGHARYVWNLAVEQHAHWHPGRTSAPGYLEQCRQLTAARAEYPWLAAGSQTVQQQALRDFAQAMAAFVDPGNPAGRPSWRKAGRDEGFRITGRRGRQWDVRRLSRHVGQVWVPKAGWVRFRWSRAVPAGVKSYRVTMDRAGRWHVAFAAVPDPVPAPGTGETVGIDRGVVVSAALSTGELLHAPALTGRERIRLRRLQRRLARAKRGSNRRGRVRQAIARLRARETDRRKDWAEKTSTDLARRFDVICVEDLKIGNMTRSARGTRESPGRNVRQKAGLNRGILRSGWGLLVRRLEDKAPGRVEKVRPAFTSQRCSACGQVDRDSRESQAVFRCTACGFAGHADVNAAINIAAGHAVTARGGDGSTRPVNREPQLLLQPA

SEQ ID NO: 27364 - protein, 550 aa, Peptococcaceae sp.
MTVCGEFFPEVYPAFRSKKRGRGEEDPLETEMRLFCACQRWAFNRLLEGTPRGEIKKLGQELFGLNSRYTDDARLRAQAVLDSQKELLELEIEETEKKLGRARKKLSQAMRKLAKAEEKGAAPEAIGKLRLAVKGRNSRVASLEKKLAELKIHQENGTVPKVVFGGKRLWKKVCRGRASRDEWRAARRNRLYCRGDETKGGNPNMKVSYRDGGFRLAVTISHLSEQVGEDALGRPKMSRAPRVEGKLWLPEKHRDLVRMWVAMKLLYSVELIRTLDGRYLVHLPFDLGNVSEPDFAEGCLAVDTNPDGVALCNVGPTGQPEPWPEGFSVPHSGNLGKYEGEFQAITYPNGFLYIRVPDLAYASGFRRNYLIGVLAKVVVDAAFFLGKPIALEDLDFGKDRLDTNREFNRMASNFPFAKMVDAVCRRAVKEGVAFKLTPPRHTSTIGCWKYMRRFAVPVHCAAALVIGRRAMGFKERVTKELKQLVAKIKQNLTQKVNFLPREGEGMTRRVGALLRRLERKIQAHNGLTQKQQEAYYSVWHDFKELALALR

SEQ ID NO: 27365 - protein, 418 aa, Gammaproteobacteria sp.
MLMAYCYRVYPTNVQQRTLRRQFGSVRFVYNYFLALQQKRFEDKKKHLSFFDMCRELVELKRTDDYSWLYQTNSQSLYEGLKNLDASYQNFFQKRAGHPRFKSRRNGHQSMAYTQGSFLDGNHLHIPKLGRVKIRLSRSFRGKIKTVTLKKTPTHKYFVSILVDDGKPMPKPIKEITHVSGVDLGLKDFATVASETETTKHENPRFYTQLLPKLRREQRSLSRKVKSSHRYRQQRKKVARLHEKVAHARQDYLHKLSTKLVRENQAVIVENLNVRGLVKNRRLAKHILDVAWGEFVRQLVYKCQRTGKHLVKVDRFYPSSKTCSECSVKNEELTLHDRVWMCPSCGVELDRDQNAAQNLRAEGIYQLTEMRYIFDNRREDVRLGARSFLALLRSTQQSSMKRAGSASMPSSEMAQISN

SEQ ID NO: 27366 - protein, 362 aa, unknown
  TnpB Polypeptide
MLTYRYKLYRSKNEKYLEAYNGIACEIWNHCIALHRRYYRLYGKHLNKYVLMKHMTKLKKLPKYTHWKKLNSQAIQDVVERIDRSYKAFFEHVKQKRSGRKAPPHFCKRKNYRSFTLKQTGYAIDGNTVYIMGRRYKFFRSRDIEGNIKTVTVKKMPTGDWYLCVTTDHKAKRDYARTGEAVGMDFGFKSFLVLSDGTKINSPEWLRQSLSELRRLSRNLSLKKEGSRNYEKAKRARAKLYEHIAAQRRDFFFLLANELCRKYDVIGIEDLNLKGMQALWGRKESDLAYGEFVQILEYMAASSGRKVVKIDRWAPTTKTCSECGCRVDLSLKDRHWVCPHCGAHHDRDVNAAINIKNLALAA

SEQ ID NO: 27367 - protein, 320 aa, Marine sp.
MFTRNYKFRLYPNSNQERHLQNNLAVCRWLYNKFVKQAKKSFLSRNDMNYFLTELKQSEPWLYNYYSKMLQMISTQIESAEKSLIKLNKKGYKTGTIKFARYNEYRTFTYNQSGFKFEKRYDSDGYSTPNPLNLKKMLKPLARVQRKISRRKKGSNNRLKAIHHLQRIHEKIVNRRKDFQHKLSTAYANNNDVVFVEHLEKLNMVKNRRLSRSIMDSSWGMFLQKLEYKCKLLVEVSSQNTTINCSRCGNKVPKGLTVRIHRCGKCNLVIDRDYNASINILQKGLKIFGQDNLPQELWKVTPVEISMRSVKQEQIIQRFR

SEQ ID NO: 27368 - protein, 381 aa, unknown
  TnpB Polypeptide
MGMFKRAYCYRCYPTNEQQQILARTFGCVRWIYNWALALKSRAYQEEGKSLSYGELSACLPVLKQQPETTWLAEVSSVPLQQSLRHLDRAFVNFFAGRGKYPRFKSKKRGSQAAAYTSSAFTWKDGTLTLAKMDTPLDIRWSRPLPEGVIPSTVTVSRDDAGRYFVSLLVEEKIEPLPPSPEQIGADLGLTSMVITSKGEKVGNPRFFATDEKKLARAQKRYASKQKNSKNQEKARRKVARIHARIADRRRDYQHKLSTRLIRENQVICVESLAVKNMMQNHSLAKAIADVGWGEFVRQLVYKAQWYGRTLIRIDRWFPSSKMCSWCSYVIESLDLEVRDWMCPNCGTHHDRDVNAANAVLTEGLRLSAAGLAVLLPVEAT

SEQ ID NO: 27369 - protein, 399 aa, unknown
  TnpB Polypeptide
MKIKRAYKTELDPNNVQRTSLLRHAGAARFAYNWGLQRKKESYQATGKSPTAIDLHRELNRLKRTDYSWMYEASKCAPQEALRDLDRAFKNFFEGRAKYPKFRSRKRGIGGFRLTGSIAVFHDSVQLPRIGRARLKEKDYLPTEGVHILSATVSEKAGRWFVSVQVEEEIEVPINAGRPAVGVDVGISKLAAISDGTIIENPKALARFERKRKRLQRSLSRKMKDSRNRFDAKIRLARFDLRIASIRRDAQHKATTMLAGTKSVIGVESLNVAGLLKNHCMAKQLADAGIGEFLRQLKYKTKWNGGTVIAADPFFPSTKRCSNCGTVKDEMPLSERTYKCESCGFEADRDLNAAINLASVAASWAETLNACKSGEVHAARQVLPYEAGTERHLGGVLDG

SEQ ID NO: 27370 - protein, 419 aa, Crocosphaera sp.
MYKAYKFRIYPDTEQQQALAKAFGCCRWYWNYSLELCHKTYQKTGKSLSRGAIQGLLPGLKKEYPWLSDAYSQCLQFVALNLSRAYQNFFDKRAKFPRFKSKHGRQSMSYPANVKFEGDYLKLNRKIGKVYCRSHRDFEGTIKTVTISKNSDGKYYASVTVDDGLEKPETSTEGAECTAACDSDFKSESVGGKAIGIDLGLTDFAVTSDGSKFDNPRHLAKHQQNLKRKQQKLSRKQKGSNTRDKARRLVAKVHSKISRCREDFLHKLSRKIVNENQVIAVENLNVKGMVKNHKLAKAISDCGWGMFCTMVKYKAENEGKTYIEVDRFFPSSKTCHVCLNQVESLPLDIRNWTCEHCQTTHDRDINASINIRNEALRIISLGTSETANGGNVRRLGGKISCLLDATPNEIGSPNYIACN

SEQ ID NO: 27371 - protein, 433 aa, unknown
  TnpB Polypeptide
MFLKLDGNIYKKNCVFVKNVVSLQKFRLFNSRMKKIHKSYKFRLNPTKEQIVLIEKHFGSVRFVFNRYLNSRKETYIEEKKSLNYYDNANDLTKLKKIEDFFWLKEINSQSLQSSLRNLDTAYNKFFRKQTNFPRFKSKYDRQSFTVPQFVTLEEGKLWIPKFKKGIEINLHREIEGKILFATISKSTTGNYYVSITCEVEYTPFEKTNSQVGIDTGIKDLAILSDGKVYENIKTLKTNLKKLKYEQRQLSKKVKGSNSRLRQKSKLATIHEKVTNIRKDYLHKVSTEIIKSHDVICIEDLAVKNMMKNHKLAQAFSDVSLGAFYTMLEYKANWNNKTVVKIDRFFPSSKTCSNCNYINQDLTLKDREWTCPSCNTLHDRDFNASINIKKQGLKILSCGSGIESQDKQKRSKALPLGESTTSEAHPISFAVGG

SEQ ID NO: 27372 - protein, 382 aa, unknown
  TnpB Polypeptide
MQRTISLKLEKSPELLETISVYNQIVNLHIKESFVLKTNSKKKLHNSIYKIIRQDFPAFPSALIQCARDNCVEMLKGNKYKEHTIKNEISSIRFDLRTIKVFLDSGKVSITTTQGRKKYNIFVPEYFSIYKTWKIKGATLGVSHKYLRLQVGIETDNPAFCNNKEVLGIDLGIKNFAVLSNNTFIKGKKIRGIKRKNQYLRSKLQSCGTASAKRKLKLLSGTERRFMRDFNHCLAKQITELPFGIFAMEELKGIRNGRKGKVFNRKRSNWAYFQLRQFISYKAENLGKKLILVDPRYTSQRCSKCGFIDKSNRVSCSFHCLSCDFVCHSDYNASLNISQIGLILFEQVDVNQPIVATSDEVSSLQNITSDVSYKPTNSLVGN

SEQ ID NO: 27373 - protein, 398 aa, Streptomyces sp.
MTTKQVKRAFKYRFHPTDAQAAELSRTFGCVRKVYNMALDARTRAWARQERVNYNQTSAMLTAWKRTEELAYLGEVSSVPLQQALRHLQVAFTNFFGKRAKYPRFKSRKKSRRSAEYTTSGFRFREGRLTLAKMVEPLDIVWSRPLPEGAQPSTVTVSQDAAGRWFVSMLCDDTIAPAPATTNAVGIDLGITSLMTLSTGEKITNPKHERKDRARLARAQRELSRKAKGDGANRAKARRKVARVHARIADRRRDFLHKLTTRLVRENQTVVIEDLTVRNMVRNHTLARAISDAAWSDMRMMLEYKTVWYGRELVVVDRFFPSSKLCGACGTIRSKLPLNVRTWTCVCGAVHDRDVNAAKNLLAAGLAVSVWGAGVRPQRESSRTGQPAMKQKTPRREP

SEQ ID NO: 27374 - protein, 384 aa, unknown
  TnpB Polypeptide
MIKTHKIALRPDRVQIAWFYQQCGYAKFAYNSALSDFKAELSADNFLSMYDLNKRFNQKKKAFDWTQAQDQRAAMYAVHHLGAAIDNWKAKRAKFPKFKKRGCKHSYTTDEQAVRMAGKRIKLPKIGWVKTFEELRFKGKIVSVTVSRTAHRWFASVSVEVEPPIERCPVSSEFIDYFASHTDIGTPEQIERSIYPTLGIDVGISTLATLDTGKKYENPKPLKRYERKLKREQRKLSRKVFLSQNWYKQKRKVERIHYRIACIRRDAHHQATTDILKCASRIGIETLQVTNLLKNRKLAKALSDTALGGFLEKLKTKAQALGIPIVQADRFFASSKICSSCGHKKDALTLSAREYHCSNCGMFLDRDVNAAINLRTLAVGYTES

SEQ ID NO: 27375 - protein, 380 aa, unknown
  TnpB Polypeptide
VKLVAKLKLVPTPEHAAALLATMERFNAACDWLAGKAYDDHTANKYLLQRRYYRQLRDDFSLPAQMAVRVIAKVSEAYKRDKSLRPTFRPHGAIVYDQRNSRFPGLDRVSLATLAGRVVVPFLVGAYQRSLVDRLKGQCDLLYDADSKAFYLYATADVPTPEVGEPQGVLGVDLGIVHLAATSDGEVFSGARLNGTRRRYFRIRRRLQQKGTQSAKRLLKRRRRKERRFQADTNHVISKRLVATAATTNRAIGLEDLNGIRQRVRQRKGAPNTAPQVQRRVLHGWAFAQLRSFVTYKAALAGVPVLLVDPAYTSQTCPACGHVARGNRPARDRFCCQSCGLAGPADGIAAENIRRAAVMRPHVSVLSRHPLPGPETSCLL

SEQ ID NO: 27376 - protein, 363 aa, unknown
  TnpB Polypeptide
MDAQTKTLKVRVKDKHTDILNRMAFEANQVWNTANEETSIWCYIPVSEVGYIRNNISAFDLQKQLKGIKQERGFAIGSATIQEVIAEHAKARRQFKKDKLRWRVSGGARRSLGWIPFKARAAKWKSGQVYFAGHYFSVWDSYGLSQYQFRAGSFSQDARGRWYFNIVVQVETKTSEATGQIGIDLGLKTTAVCSDGFILARGEFYRSQEKKLGIAQRAKNKKRIKAIHAKIKNRRLDANHKFSTQLVENNSLIVVGNVSSSKLAKTKMAKSVLDAGWHMLKTQIEYKSKAMQSVFIEVNEANTTRMCSSCQVIPDSSPKGMGMLGIREWICTECGTAHDRDINSAKNILALGHERLAVGIPCL

SEQ ID NO: 27377 - protein, 356 aa, unknown
  TnpB Polypeptide
MQTNYDRCMILTYRYRLKATSGAAQELSRQARAVNLVWNFCGETQETARRWNRLWPSGFDLINLTHGSSRDLGLHSDTVQAICKQFAQSRNFHCRRPRWRGRLSLGWIPFQAARAIRLDGDAAIFLKRRYQLWMSRPVEGTIKSGSFAQDARRRWYLNLQVEVPERSDCGTGEVGIDLGLKDLAVLSSGKKIANPRHLARYAAKLASAQRAGRKVRVRAINAKIANCRKHFLHELTSRLVRENRRIVVGNVNAASLARTSMAKSVLDASWSQLRSQLRYKAIRHGAQYIEVDERFTTQVCSGCGALGGPQGREGLVVREWRCLECGVQHDRDINSAINILVSGRNAGLQLTGIPAL

SEQ ID NO: 27378 - protein, 459 aa, Nocardiaceae sp.
MRSVIQAYRFALDPTSEQVDRLRSHCGGQRFAYNWGLARVKANLGQRAAERSYGIDEPGLTPSLSWSAYGLRKDWNQTKDVAAPWWAENSKEAYSSGLANLATALSNWAGSRSGRRKGSTVRFPRFKGKRGALSCRFTTGALGLADRDRRHVKLPRIGVVRTHESTRKLARRVEAGTARIRSATVSFTRGRWFVAFSVEVERHTPAPAGPVSVVGVDLGVKSLAVLSTGEIIENPRHLEQAQRELRRLGRQAARRTGPDRRTRQQPSNRWRRTQTRIARLHAYVANARQDGLHKLSTRLVRTHTTVVVEDLHVAGIMRNRRLARHIAGVGMAELRRQLTYKADRHGATIEVADRWYPSSKTCSACGVVKTKLRLSERIFTCGGCGTRIDRDLNAARNLAALAEASSPSCGATGNEPDGNPCKTRTTRATGTAAGRPAPQGAGQRRHRKASTQDTHLYVS

SEQ ID NO: 27379 - protein, 368 aa, Quinella sp.
LFYTLKIRLYPSKEQTEQLLRTMARFNAACNAISEIAFDNKTFGKTMLQRICYYQVRNKFKLSSQMVIRAISKVCESYSDRKKRDKIHTFKPHGAIVYDDRILTVKSIDKVSILTLAGRIFVPMLVCQYHAHILNHALKVRGQTDLGYIGGKFYLFLVAECADEPETISKDFLGVDLGIAKIATTSDGKFYSGSKVKSIRRRYFRLRQKLQAKGTKSAKRKLKMRRHKESRFATDVNHCISKRLVEVAKGTQRAIVLEDLKGIRQRARKGTRQTVCKTMRQALSSWSFYQLRQFIEYKARAAGVLVIYVDPRNTSCICSKCGHVDKKSRRDQEHFVCSACGYELNADINAALNIARRGAGVIQPNAVA

SEQ ID NO: 27380 - protein, 359 aa, Paenibacillus sp.
MLVLKAYKYLIYPNHEQQDYLASVFGAVRFIYNKMLADKIEHYKRAGNMLRTTPARYKKEFHWLKEADSLALANAQLNLEKAYKQFFRNKNTGFPKFKSKKTNNNSFTTNNQKGTIAIEGGTLKIPKLKTKIRIKVHRSFTGQIKSCTLSKTPSGKYFASVLVETDIVPLAKAEKTIGVDLGLKDFAVTSEGEVFANPKHLRTSEKRLKKLQKDLSRKKKGSQNRYKARLKVAKLHEKIANQRKDFLHKTSTQLINDNQVIVMEDLRVKNMMQNHKLSKAISEVSWSMFREMLTYKSKWYGRELIIAPKNFASSQLCSYCGYKNAEVKSLAVRQWSCPACHTEHDRDRNAAMNLLKLAM

SEQ ID NO: 27381 - protein, 367 aa, Micromonospora sp.
VVKRAFKYRFCPTPEQAEQLNRTFGCVRLVYNRALDARTRAWAVDRQRGTYVQTSAWLTEWKRTEGLAFLIEVSSVPLQQTLRHLQAGFAAFWDKRARYPRFKSKRKSRAAAECTRSAFRWRDGQLTLAKMDAPLEIVWSRPLPEGAKPSTVTVSRDAAGRWFVSLLVEDPTVKPLPPVDAAVGLDAGITSLLTLSTGEKFANPRHERADRRKLAKVQRNLSRKEKGSANRAKARLKVARVHARIADRRRDHLHKLTTRLVRENQTVVIEDLSVRNMLRNHCLARVISDAAWSQMRSLLEYKAAWYGRTVIAVDRWHPSTKTCSACGRINTAMTLGVRAWTCPGCEAVHDRDVNAAKNILAAGLAER

SEQ ID NO: 27382 - protein, 440 aa, unknown
  TnpB Polypeptide
MKMVLTAKLKLHTTPAQFQALRATQLAYRDSLNFVSQYAFAHGKMSNRVALQDGTYDDIRSRFHLPSQMACSVPRQVGATYKGLWTKVKQNAAQRKAGQTNKRYKGLDKPVNYVSPTLTYQYKKDYSFKAKHQVSILTLEGRVILPYTGYEKHAALIQKDAEIGTATLWYDKAKKRFYLLVSLEIGVASPTPATHTSVVGVDVGVRYLAVTSTTKGDCSFYTGKGVVPKANHYARLRKRLQKKGTRSATRRLVAISGRERRLKRDANHVVSKRIVTRHPHALIGVENLTDIRERTRRKRGKKATSKQRKANAAYSKWSFAELQGMIAYKALLHGSMAIQVDAHYTSKACPVCGHTSDANRPSKGLLFICQHCHYTLHADLVGARNIALRTLLVRQDWASTGVLSERPDVSSVETKAARLARYAELRWSLDTSPRASAGGL

SEQ ID NO: 27383 - protein, 386 aa, unknown
  TnpB Polypeptide
MQVAIRAEVIGDADLISTIRLSNQACQDTIESGIANKTFNKTRLHQLTYKKIRADYPNLNSSLVTAVRDQASDMLKRLKLKIKPTKKQNSSIRLNHNTFRLLPDSKVVSISTINGRKKYGIKIPAFFSKYAFQESTSARLRTKKGRVFIDIIVDVISPKKLKIKNVIGVDRGIYNPAVTSDNTFFNSRKLRDVKGRYKYLKGCLQRAGTRSAKRHLGRIGGRERRFVADTNHCISKAIVNKDCDAIALEILRTGNMKRKGKTGKTTRKLIGSWSAKQLLSFIEYKAEMLGKTIIFVNSHYTSQACNRCGDIRRANRKGKLFKCVVCGYSLHSDLNASRNIACLAKGKTSRLLVNEPIVACDELKASLREELRASIVTSSASKMRCS

SEQ ID NO: 27384 - protein, 399 aa, Hydrococcus sp.
MFVLEYKIKANKSQQIKIEEAIRTVQFVRNKCLRFWIDSLPKARLKCFDLNKHSTQLREEFEFVKNLNSMAVQASAERAWEAISRFFDNCKKSRDAKFRVFTEKKGYPTFQKDNRSVEYKISGWKLHPTKRRITFTDKISIGEVKLLGKWDVHSLSVKLIKRVRIVRRADGYYCQFCIDTENSNSLPSTGNSIGIDVGQKVFYADSNGSFEENPRFLKTANSRIRLNQKSLSRKEKKSANRIQARKRLAKTHLRVSRQREEYAKRLALRLCQFNDLVAHENLNIKGLARGRNAKSVNDVAWGLFFKWLSYFGIKYGRQIVAVNPYNTSQMCSSCGTLVPKTLEVRTHICGCGLVLDRDTNAAINILKLATEGHSECKAYGVGATTQLGESLVEQVLMLR

SEQ ID NO: 27385 - protein, 409 aa, unknown
  TnpB Polypeptide
MIKGIKFRIYPTESQKELLAKSFGSARFLYNWGLDLKTKTYQSEKKSVTRFQLDKQLTELKKEHVWLKEIPSQVLQQSLSDLDKAFVKFFKDKKGYPNFKSKHGKQSIRFPQSFSLTNNSIILPKLKAVKAKISKDLSCYEIKNITVSKSKSGKYFASICYDDLKPIPTKVPLDENQAIGLDVGIKTSIVTSEAEEIGNPKFLRKSLRKLKILQRRLSKKTKGSKNRNKARIKVAKHYEKVSNLRKDFLHKTSTTLVKQNDTVCIEDLNVSGMMKNHNLAQSVQDVSWAEFFKMLNYKAEWNGNNIIKIGRFWPSSKLCDCGTLNHNLTLADRIWICAACGVENQRDVLAARNIKKFAFLSNPTQYFSEVKERQGMPELSVEEVSLEAPMKQKPAKSTKTRHRKESNAL

SEQ ID NO: 27386 - protein, 501 aa, unknown
  TnpB Polypeptide
MRTVKRVSVKLNKKKFKDLIEIAKFYSKEKQVHLKYFQTGNNFGEARNYRQYRDELRNSGYKSSFTLQVRRVNCAIKDAFETELKYWASIAVDIKPRLFNLDWTDEQRHYGFWLLKIPQRLATLICDKAPINEEVDLGIVERKQVQNYLRRVIRRKYSNRPTVRLSRSFTCDAQMYFLKNIGQKQVCSISSLIPRNTIKIPLTGFTNIYGEFILVLNNVNKTAEIHTPFPILDTINNSQVTAAIDIGTSEVFVDDEGSFYGLELGEHLKQNSIRINDNGKNRNKLHQIAKKTKNKQKARNIKKFNLGKKKLIEKKRICNAESARIINTSINQLLKNRNPKLIISEKLDFRGKAKNKRMSRIVNLWPRTLFRERLNFKASVAGCNRQEVNPAYTSQICNQCGYLEDKNRKGDIFHCLKCGQGMHADVNASLNLLVRAEDKEILVRTPVPVVKRILQDRYNARFENIGRNEDITVSGQTLALIKPDKLSSRERNFKKQINKPS

SEQ ID NO: 27387 - protein, 430 aa, unknown
  TnpB Polypeptide
MKQVITAKLKLIHSKEQKVQLNAFCLAYRDALNFASQIAFDNNKTSNKVKIQKLTYYEIREKFKLGAQTACTIPREVGAQYKTQWTNLKNHIKNVKLGYTNKRYKSLDKPIVYKSRTALLQYNRDFSFDFKKNTVSVKTLGKRIKVEFAGWNKHLELLKTAKIGAANLIYDKNKQQYYLCVAIEIELEDIELSKIKKVKGVDLGQRYLAVTQSNENEVKFYSGKEVKHKSNQYSRKRKELQAKDTKSAKRRLSKLSGKERRFKQNVNHFLSKQILKEQCIIGLEDLTGIRERTKRRKGKRASKKQRKANADSSKWAFAELGNFLAYKANLQRSLVVKVDANYTSQMCIKCGHTAKENRPNKGLNFDCQCCGFKLHSDLLGSRNILMRTLLIRQVLINTGRLSACLDVNSDEAKAERLQVFSGLRWSDLQS

SEQ ID NO: 27388 - protein, 253 aa, unknown
  TnpB Polypeptide
MKLAFKYRFYPTQEQASILARTFGCARYVYNFGLALRRDAYERFGARLRYKDTSAALTVLKKQEETAWLKEVSSVPLQQSLRHLDKAFTNFFKGSGYPRFKRKHARPSATYAHSAFTYSVEDGTPVLRLAKMADSLDVRWSRHPLSEPSTVTVSRDATGRYFVSLLCEVEPEPLPPLEKAVGIDVGLIDLMVTSDGEKTGNPKFLERDLKRLSKAQRRLSRKQKGSNRYASSAAVWPASTLAFETNAKTICTS

SEQ ID NO: 27389 - protein, 124 aa, unknown
  TnpB Polypeptide
MLKNRRLARHIAGAAWSELVRQLEYKAVLYGREVVRIDPWFPSSKRCSNCGEKVGELPLSVRVWNCEVCGAVHDRDVNAALNILAAGQAAIARGGNVRPNSVDGSTRAANAEQGSPVEARILAL

SEQ ID NO: 27390 - protein, 352 aa, unknown
  TnpB Polypeptide
MKTLKLRIKDKHCKMLDQLAVEVNFVWNYVNDLCFKHLQRKQQFFSAYDIAQYTKVTSKECNLHSQTIQAIAEELVTRKKQFKKAKLKWRVSNNKSARRSLGWIPFKKVAIKYADGYVQYGKHQFKLWDSYGLSKYNVKTGSFVEDSRGRWYVCLVVDDIQQVKAIAKGSIGIDLGLKDLATCSDGVKLEAPKIYRQYEEKLGIAQRAKNKKRVKAIHAKIKNIRQNMLHQFSHKLVNAHAAIFVGNVNAKALAQTRLAKSVLDASWTTLRTMLKYKCENAGVWYGEVNEAYTTQTCSCCGSRSSSPKGRAGLGIREWQCMECGTLHDRDINSALNILALGHERLGGGIPVL

SEQ ID NO: 27391 - protein, 392 aa, Lactobacillus sp.
MTIRKRKSDLPEYGVKIRLYPTLVQQAKLRQFFGNDRFLWNQLVSLYQERYKNNKSLKLLTEFDLNNLLPALKNEYPFLKASDSSSFQIVTRNISDAWEAFFAGTRRKPRFHSKHNAKQSYTGKSSSIRIMGKRNMFLPKLRRVRSSKTGVIDGKIKCYTISIDACSRYWLSLIVEKKSAFLPKTGKAVGIDVGLTHLAILSDGRKFDRFSSDFCEKQAEIWQSKSSKRRHLAFVKSQQEANKKVLGAKSLSDYRNWQKANVAKNRYMSRITNQRDDYLHKITDQLVKEYDVIVIEDLKIKNMTKNHHLARSILRQSWGKFRKMLEYKCKKYGKILIKVNPAYTSRICSKCGKDTGKKPLSVREWDCPFCKAHHDRDINASINILLKGLAQL

SEQ ID NO: 27392 - protein, 425 aa, Halophilic sp.
MQKELTKTLVFQLDIDEGDPLLLSEAFLESRRAFNETLRLDREGRDWGEIEDTVAKDANLVQNTAQQVVSKAQDALENYYDNDDWGMPWYHHDEFPLPMNYGEGYNLFLKDNGTVRFRISAKPYKQVKGELRGSPDQFNRLKTAMTDDGWRVGTAEAMQKNGRFELHVTVTYEQATVRSKTESDTVVGVDINEDCVALAAFTDDTIEDSVVIDFPEIKEERHRFFTMRKRMQKHGQTAFNDQYRDKEQRFVHDQLHKVSRLVVEWSQRFDRPVIVFEDLKGMRDDIEYGTRMNRRLHSLPFTKLRDFISYKSAWTGIPSDDVEPAYTSQRCPRTECRHTTRGNRHKKRFKCQLCGFQDHSDRKAAVCVVQEWFKKQHENVPALNTLPQVRKWELRRQASGPVDGPTVTQHTDRGHHADGVAGVSD

SEQ ID NO: 27393 - protein, 403 aa, Halophilic sp.
MEVRRTVPVALDVDRDDAALLEDTVDTFLWAAQYVTDHAFKGEYVTTSKTTLDDETYDDVREKTDGFNGGLVQSARNKAAEACKSVVARWKQGKKASKPRFTRPHVVYDHRTATFHDDYVSLATTDGRVEADYVLPNEGSDTPHSEYFFSDEYETTGAELHYTNGNWMLHVHCKKNVVSGTSDTETTENGTVLGVDLGVNQLAVTSTGTFWTGDEFDHWRREYENRRGSLQQCGTRWAHENIQSVGRKEEGRFKLTLHRIANELVTEARENGCSVIAFEDLTDIRKQTGASWGHKWTFSRLYEYVEYKAAEYGIDVDQVDPENTSQRCSHCGFTHPDNRDSEDFECLKCGYENHADYNAAKNIGLRYLRRNQNGADGGALLGVRLNSGTLNVNGGYSPPVSHG

SEQ ID NO: 27394 - protein, 256 aa, Halophilic sp.
MTALDIGANNLVACTTTTGEQYLYEGRELFQRFRETTREIAQLQSKLRERRYSSKRIRRLYRKRTRRRDHAQEALCRDLLERLYTEGVDTVYVGGLTDVLETHWSVETNAKTHNFWAFKQFTERLACTAEEYGISVEVRSEAWTSQECPQCGSTDRTTRHRDTLTCPCGFEAHADLTASATFLKRHQNSSSSGLRTRHDVSRQRQTKQAVRPMARPVRLEWDSHDWLEVSHSHRPKEQRTDPSTVHRDGNVASGES

SEQ ID NO: 27395 - protein, 416 aa, unknown
  TnpB Polypeptide
VSELVRTVAVPSVELTERKFRVFKELEELYRQVLIELVDYGFRNNIDSFTRLKRDKYRELRRRLPQLPSHYVHTACQDASTRIKSFNKLKKKGLARSERPEVNRVSIWLDDHLWRRVGYTIILIHTHKGWIPVELIPHKLYWRYINSGWALRTQPKIRLDYKRGRLLVYFVFAKVVDVDENSVKRVISVDVNEDNVTVKVLDKVYILETGIKRITIGYARYREVVQSVKGNGYVGRAIRGRERKRKKDIRLKIANIVSNTARNLNAVIVLENLPEQCPRNMIRDVRNPTLRHRIYQAGFRGMVKVIEEKCLERGVPVVKVDPKNTSSKCPFCNSKLMRGDAPRQLKCPRCGFRAGRDVVAVLNLEKKYLTFKGLVPLAPMPSEPTPEVVVLPMKEWVRRKSLDETPKHPEVKEMTI

SEQ ID NO: 27396 - protein, 415 aa, unknown
  TnpB Polypeptide
VQRTNTVLLTPTCEQDQQLRSLAEASARLWNLANYERRQALFKSQRVPTYAQQCKRLKDTDTFKQLGTCKAQAVLMKLREAWGSYHALKRLKRRGQLPPHIRRVRPPRYMKDRQTRRLVAESIYVRNDGYKQREEELVLSKSLRVRFKAGELWVGKQGRLELHYDRLRGKWYGHIPVKVKWPRKGLPHHSTRKRASIDLGICNLATCVVDGAEKAYVYSGRAVLSDWRYWTKRIASYESTLKKTNQRDSSKHLSRLYRTRRRRLNHAVKAMLRDLYDRLEAHGVTDLIVGDLKHIRDNANHGKVGNQKLHNFWPFMQIRQRIRELGEEYNIRVRFKSERGTSKHCSLCGEKHKNGRKHRGLYHCKTRNILMNADVNGAYNILYRCRKVAAGSGSRPMAWPMLLKWNSQEWDVSAA

SEQ ID NO: 27397 - protein, 564 aa, Lentzea sp.
VVELATKPLREVSRPFVADGPSGVSVRGRLKGLTAQDEKVLRLVGEHMGRLASADLARRCRDGLDHCTDTWAARKRDLTAASSSRWAGSVTSNTHDQWGLSRRAQHAHLRSLDAGIRTLRHRLSLPIGEKGSRGKPGGYRGKGEWFQKSRRLAILEDRYEQVRAERETGKVSVVRGGRRLLHQRHNLTAAQKTEARWCAEWEASRWFLTADGESGKRHGNETIRVTPDGEVVIKLPAPLAHLANSKHSRYVLAAKVAFPHRGDEWRDRIEANRAVAYRIHLDVARGRWYLDASWTRKDLPVVPLDALRAAGVIGVDTNADHLAAWLLDSHGNPMGAPRRFGYDLTGAANHRDAQLRHALTRLLHWARATGVQAIAIEDLDFTDSKTREKHGRRKPFRQLISGMPTGKLRARLLSMCAEAGISVIAVDPAYTSMWGAQHWQKPLTSKKRQTSRHAAASVAIGRRALGYPIRRRTAPPHDDQSDRRGHRTAQAGPCNQGREGTRPRVSGPRTRSVQPDTAGTQATSASKTVRAAPVDQVWVQDSLLLTDLGTVTCRRRTICARTGL

SEQ ID NO: 27398 - protein, 311 aa, Photorhabdus sp.
LSAKAPVFKRKNDGRDAIRFVNFEKYCRLKPRRVKLPSGLGWVKFRQSQEVSGKIKNATISQSAGKWSISFQVEIETPDPQHESSSMIGLDAGVTKLATLSDGTIYEPVNSFKRNQRKLARLQRQLSRKVQFSANWQKQKRKIQRLHSHIANIRRDYLHKVSTTISKNHAMRVIEDLKVANMSKSAAGSISHPGRHVGAKSGLNRSILDQGWYELRRQLEYKQRWRGGQVLAVPPAYTSQRCACCGHTAKENRLSQSQFECLACGYTENADINGARNILAAGHAVLACGGRVQSGRPSKQEPDTEQSVVTH

SEQ ID NO: 27399 - protein, 408 aa, Photorhabdus sp.
MRLLKAYKFRLEPTEEQSQRLRQLCGCARFVWNYGLDETKRILESGGKLPSAFALNRMLTVWKNRPEHAFLQEAYTDNLQHKLKDLHGAWKRCFDKKLSAKAPVFKRKNDGRDAIRFINFEKYCRLKHRRVKLPSGLGWVKFRQSQEVNGKIKNATISQSAGKWSISFQVEIETPDPQHESSSMIGLDAGVTKLATLSDGTIYEPVNSFKRNQRKLARLQRQLSRKVQFSANWQKQKRKIQHLHSHIANIRRDYLHKVSTTISKNHAMRVIEDLKVANMSKSAAGSISHPGCYVRAKSGLNRSILDQGWYELRRQLEYKQRWRGGQVLAVPPAYTSQRCACCGHTAKENRLSQSQFECLKCGYTENADINGARNILAAGHAVLACGGRVQSGRPSKQEPDTEQSVVTH

SEQ ID NO: 27400 - protein, 245 aa, Photorhabdus sp.
LSISFQVEIETPDPQHESSSMIGLDAGVTKLATLSDGTIYEPVNSFKRNQRKLARLQRQLSRKVKFSANWQKQKSKIQLLHSHIANIRRDYLHKVSTTISKNHAMIVIEDLKVANMSKSAAGSISHPGRHVGAKSGLNRSILDQGWYELRRQLEYKQRWRGGQVLAVPPAYTSQRCACCGHTAKENRLSQSQFECLACGYTENADINGARNILAAGHAVLACGGRVQSGRPSKQEPDTEQSVVTH

SEQ ID NO: 27401 - protein, 329 aa, Photorhabdus sp.
MKRAIKVCLYPTVEQAEFLNAQFGAVRCVFNKALHISRHMYQRHGLSLNPKRDLKPLLAEAKKSRRYHWLKDYDSQALQQSVINLDRAFQNFFQKRAKFPRFKSKHGKQSSYHPNGKILTDAIQLPKMTPIKAVIHREIIGKVSSITMTRSATGKYSAAILCDDGQEVPAKPRLITGIIGLDMGLSHFVIKSTGEKIANPRFLNRNSRNLRRKQKALSRKKKGSANRAKARLQVAKCHEHVANARADFQHKLSRTLIDENQAIIVETLKTANMMKNHRIARAIGDAGWHSFISRLEYKAEQKGVYVVKLDQWYASSRRCHCCGDKMSDA

SEQ ID NO: 27402 - protein, 141 aa, Photorhabdus sp.
MRVIEDLKVANMSKSAAGSISHPGRYVRAKSGLNRSILDQGWYELRRQLEYKQRWRGGQVLAVPPAYTSQRCACCGHTAKENRLSQSQFECLKCGYTENADINGARNILAAGHAVLACGGRVQSGRPSKQEPDTEQSVVTH

SEQ ID NO: 27403 - protein, 382 aa, Photorhabdus sp.
MLRAIKVRIYPTPEQAEYLNAQFGVVRFAYNKALHIKKHAYKRYGVSLSPRKDLKPLLATAKKSRKYAWLKSYDSIALQQAVINLNTAFENFFNPKLQAKFPAFKRKHGKQSSYHCVGVKVLNEARKIPKLTPIEARIHREIKGEIKSITLSRTPTGKYFAAILCDDGKETPVPPDVIDADKSTGCDLGLTHFLIYSDGRKQANPRYLIWASKNRGKARLIVARCHEKVTNARADFQHKLSRQLIDENQAVIVETLKTSNMLKNRRLARHIADAGWHSFVTKLEYKGKEAGKHLIKLDQWYASSKTCHCCGHKESEMPLSQRYWMCPMCQTEHDRDINAALNIREQGLFELQAAGLVVSAHGGQRQTCRAQATACEVGSLAR

SEQ ID NO: 27404 - protein, 450 aa, unknown
  TnpB Polypeptide
MTMLAYRFALDPTPAQERALRSHAGAVRVAFNWGLARVKANLGQREAEKSYGITRDDLTPPVSWSLYSLRKDWNAAKGDVAPWWGECSKEAFNTGLDQLARALKNWGDSRKAGRKGRAAGFPRFRSRRKGRLSVRWTTGSFRCEARHAVLPRIGRVKLHEDGRRLADPLAAGTARTLSVTARFERGRWFASFTVEADVSRAAPRRQAAVAGIDLGIKALAVLSTGEEIPNPRHMSGALRKLRRLSRALSRRQGPDRRTERKPSNRWKRASAALGGAQGRVADQRKDGLHKLTTRLAAEFGTIVIEDLNVAGMARNRRLARHVADASFGELRRQLAYKTAWSGGRLIVADRFYPSSKTCSGCGAVKAKLLLSERTYVCTACGLVLDRDVNAALNLAEYGNRQIAGSGPEIPNGRGADRKTPPGAQVAVKRQPGTAQAGQTGTVPAQAGTAA

SEQ ID NO: 27405 - protein, 386 aa, unknown
  TnpB Polypeptide
  misc_feature (309)..(309): Xaa can be any naturally occurring amino acid
  misc_feature (330)..(330): Xaa can be any naturally occurring amino acid
  misc_feature (333)..(333): Xaa can be any naturally occurring amino acid
  misc_feature (336)..(338): Xaa can be any naturally occurring amino acid
  misc_feature (365)..(365): Xaa can be any naturally occurring amino acid
MLQRLLGAKRFVWNWALARKDAAWREDGVRLNGIALSREFTVMRQQPDTAWLAELPREPFAQTLRDFDRGWANFFAGRAKRPRRKKRGSVDAVRFTLDQRKPVVDRERGRVTLYGVGRVRFRITQPLEGRLRSVTVRRDAAGRWFACFTADGVPAPAAAPAALPAIGVDLGLKDAAVLSTGAVVRAPKHLAAQLARLRRYQRHFSRQRDEAARRQGLDPAKPLPKGTRLASSNRMKRTRAAIGRLQARVADCRRDHQHQLTAQVVRLASVIAIEDLAVKAMARGMGRRAFRRSVGDAGLGEIRRQLTYXAKWHGRALVVVDRFYPSSKTXSGXGAXXXDLQLRDRAWTCGACGAAHHRDHNAAVXIEREGLRLLASDTQYPEERGN

SEQ ID NO: 27406 - protein, 478 aa, unknown
  TnpB Polypeptide
MKKNKRKNYRVEFLNKFKPIVDKHKDELPFFKMDKEYRNQEYETHSWFNISREKSKKTKPIVTATDKLDKCKCKAIKIKMILSDTHKQILQNWFNAYTMIYNKTLDYIRENFQFTKKEVNRDILSNEINNNQNFYNKFYIRNQMLEEKKKIQKNFSLIIDKTKTKNKLEDIKCEIDIHTLNKSIFQLVENIKACKTNMMRGNIKRFRLKYWKYNRPSKTMELEKGKITDGILCKSVFNDLEDIKYYYNNKEYKLDDITHDFKINYNSILDEYSLYVPISISKTKIENKRKIIILDPGLRTFMTGLSDYEKFNICPDVNKIIKKDIKRLNKVKNNNLISNKIKKKTEKIINRKIINKINDMHWKVVNFLTNNYDTIFLGDMSAKGIVAKSNKVLSKEMKTACLRTRYYEFRLRLKYKCSVTNTKFKLINECYTSKTCSHCGNYDNNLGGNKIYNCLNCKLKIDRDVNGCRNIYMKQFIK

SEQ ID NO: 27407 - protein, 384 aa, Bacterium sp.
MLVYEFKLKGKPHQYQAIDEAIRIVQFIRNKAVRYWVDNRGAGKNDLYKLAASLPKEFEFSDKLNSTARQQATERAWSAISNFFENCKKKISGQKGYPKFQKDNRSVEYKRSGWKLVEGCKRILFSDKCGIGTLKLIGKQCLNGFQDQIKRVRLVRRADGYYAQFCLDIDRKECLASTGSIVGLDMGIRHLWTDSLGHILENPRVLKQSEKALKREHRKLSRKQEGSSNRRKQIKRLAKKHLKVQRQRKDFAIKAARALYQSYDFVVIENLQIKNMLKNHTLAKAISDASWHQLKRWLEYFSQVFSKALVLVPAHHTSQACSGCGKRVVKSLNERVHRCDSCGLELDRDHNAALNILSKGLALIGTVGHTETGHHRDVETPEKR

SEQ ID NO: 27408 - protein, 451 aa, Halobacteriales sp.
VSDRYRECLFDWLAAHPPLWDHFTYRRRQQYFNEDGDVWDAEYTDLYERYAPLLGKATCQQLARKNSEAWRSHFELLSQYRDESNQAVTDKPSPPGYWGTRDDGYDLHGLVRNDLYTFDWNENTSTVEFGVGDVLEDRYGFEHNERVTLEVRGNPQWRGDDSRLELIFDEHADQFRVQHPVRIQPDDLRQQREGAFTHTLDSENTTQSAAIDVGANNTLAIVTEDGDTAVYHARPEFERFQSQSDRIATLQSQLPDDQWTSDRICRIYDNRSRKRDHSRDAAVKQAAEWLLERNVDTVYVGNLTDVLETHWSAEVNEKTHAFWSHQQLVERIKLTFGDVGITVLETSEYKSSSQCPACKSDAVTRRGDSFRCDACDLEAHADVAGAWNILQREVGPMARPAALSAERDRDAPTDGAYWQWNDHDWTPTDFGEQSRSPDQTRFSEPVSSQPG

SEQ ID NO: 27409 - protein, 350 aa, unknown
  TnpB Polypeptide
MDKLLKKEGMDFDYRNMPTAQSAQQTLRLLDKNWKSFFNSIKDWSKHKEKYKGKPKLPNYLPKNGRFQLILTNCNCKLKDNQIHFPKCFNGFKLNTKVTNLQQVRILPRNNHIIIEVVYRLEIPETKKDNGRFISIDLGLDNFATISNNVGAKPIILNGKGLKSINQYYNKKISHYRQIAKRMNSLDYTKRMNKLTVKRNNKVNDFIHKASKYVVNYALSLNVNTIIIGNNKDWKRESKMSKKVNQSFVGIPHKEFINKIMYKAENAGIKVVLIEESYTSGTSFLDNELPVKEKYNKSRRIHRGLFRSNKGTLINADLNGAYQIMKKVFPNAFSEGIEGVGLHPIRVNIA

SEQ ID NO: 27410 - protein, 433 aa, unknown
  TnpB Polypeptide
MQLTQKIRIQPTADQQQLLWILSEKCRLIYNFALKERQEHWDRMKILPESDRTFLSYNDQQNNLPVTKEKYPEYTWVYSKVLQMTLKKLDADYKSFYALIKTDPSARPPKFKGKQYFTTLCYNQSGFVIEGTTISFSHKHPSKLPLCFDLPIKTQENVKQVEIFVDRQDRWFVGLTYEITPIPYVDNGEYQAIDLGISNLVSAVNTKGKFVQIPNNRADLYWRHQIEEVQSKRDHCKKYSRKWKRYHRKYCAMKRKCANQLKDFQHKISQKVVSNTKANTIVIGDLESKKMAQKTPKGSTLSPQQKKAKKTLHHSIQNTGSMGRFAQFVTYKAEKLGKKVIRIDEAYTTQVCAKCGEKVKRGLENRTIECDCGHELDRDLNSAINIMVKFLTTLSHKPAVNAESFLHQWNGFTTIHSPTRPRSGRRLVGSPTL

SEQ ID NO: 27411 - protein, 276 aa, Gammaproteobacteria sp.
MKLSSWAKSQGISYKTAWRWFDEGKLPVPAEQTATGTILVKTSESKEKNDHIKLDGIRIKLPKLGWVKMREALRFSGKVISATISRVANKWFVSLNIQLEHSPKTCESQASVGVDLGIKALATLSNGEAFEAPKPLKKFLKKLKRLQRSLSRREKVSNNGQKLRQKIALVHAKITNIRQDSLHKITHYLTENFGGIVIENLNVSGMLKNSQLSRAIADLGFYEFRRQLEYKSQYKGNYLLIADRWFPSSKLCSNCGNKKEQAFRTGLPLRSLWSIT

SEQ ID NO: 27412 - protein, 281 aa, unknown
  TnpB Polypeptide
LALLEQNWVFHFDSTQGAPREPSIPSVRQTQPFRSNPRFLVEEPESQEQHSSEEGEPVKAVGVDLGITRLATLSDGRFLENPKPLERSLDRVRLLQRTLSRKRFLSKNWIKTKIRLAKEHEHIKDFRRDLFFKLGALLAKEYDLLVLEDLNIKGLIQSGTRKRRLRLYDSSFSELRAVLEWQFAKLGKTVLAVSSYNTSRECFLCGGINKGLTLEDRVFHCPYCGFTLDRDLNAYLVLLKTSGWVPPAVACFAPPTTFSTLSWVEEAWWDNDSGSSRLQAG

SEQ ID NO: 27413 - protein, 475 aa, Variovorax sp.
MAQRLRQWVGHQRFIYNAKVDEDRYFAGMRLSMLARGRTAAEAATPLDRAYAQFRGETTPWLGEVPSQVLRIGAERWFEGKQRQLKGLARAPRRRNRLNFDSVRVSSELFEFRELDEPQGDLRHELVLGNDKFGFGSLPFTAHRPYEVPKSLTLRCTGGQWFVSFSYEHAAPKGFVARNEEELAYELDLLDGPALETRTLGLDRNVADNCLATSDGRFYALSAVQKARIARKAVGAKRHQRRLARQEKGSANSRKTRDRLARKLAYKREVLRDFSHQTSHDLLESKANDAGVPQLLVLEALKVGNMTARPKARQDETGRWLRNGAASKAGLNRAILSSAWGRIAEQLGYKAARRNVLVLQVPAAYSSQECSRCGHTHPGNRDAQRFACQRCGLEAHADTNAARIIAGRGIGMVRDQKVVVKARKRVAYRRRATNAGLESPDVPVEGGVSRDEAKADIAQCPRKQEGATTTAPSGV

SEQ ID NO: 27414 - protein, 485 aa, unknown
  TnpB Polypeptide
MDVEKQIFIYTVKLKTNNYHHEQFTKRFRMADDIYKTTLREILKRHRKMKKDPRYKKAYQLPKGANRNAILKELTTDYNMRGKFEFGKFANDYRNARRYDAYLPSDVAITLGARAWLAFEKILFAKGAHHVNLHGELLSFEGAHDNGLLIREGRFTIGTKKTKISCPVIYESDKYEEQVLQAKTKYNRLVRRFENGKWNYYVQMVLKGELPIKHTSDLTGVVGIDIGTSTVALSSHYQTELEELAKGIEIDEAEVRRLNRKLNRQRRANNPHKFNEDGTIKRGVHEPWNDAKSYLENKTRLHEIHRKYAARRKLAHKTLANKIVKMGSSFVVEQMSFKGLAARAKETKVNEETGRIRSKKRFGATIGHRAPSMLIEQIRYKANYQGKVFIKANTFEVKASQLDHTTGEYTKVSLDVRTKEIGGHLVQRDLYSAFLLQHVGLDGETVNLDACVEDFDIFLRNQKETMENLDTTLSSTGKLKFNQQS

SEQ ID NO: 27415 - protein, 208 aa, unknown
  TnpB Polypeptide
MQTVGQAAFETVVRTEERDFVYDQLHKVSRDMTRWVSQFNDPVIVFEDLKDMRDSIDYGTRMNRRLHSLPFAALRDMMTYKSAWNGIPSDDVDPEHTSQRCPRTECLHTERANRRKKRFKCKACGFQDHADRKAAVCVVQEWFEEQNENVPSLETLPHVKKVRRTASGLCEEADAHGAVFALGVTDTESARDASQVRAELNTVASIGD

SEQ ID NO: 27416 - protein, 150 aa, unknown
  TnpB Polypeptide
LHKLTTRLATEHGIVVVEQLNVAGMVRNRRLARVVSDTGMAELRRQLGYKVNWYGCRLVVADRFYPSSKTCSGCGWVKAKLTLAERTFCCERCGLVLDRDLNAARNLAKLVQNVAQSGWETLTARGADQKPQPAGQVAMKREAGTGVLPG

SEQ ID NO: 27417 - protein, 239 aa, unknown
  TnpB Polypeptide
MIATVLQAYRFALDVTPQQQRASASHCGAARYAYNWGLQLVQERLEQRTTDPSVRVPWTLAELRREWNRAKHQVAPWWPDNSKEAYNSGLDALARALKNWSDSRNGCRRGAPVGFPRRKTKHRTRAACRFSTGAIRLLANRKHVQLPRIGVIRTHESTRKLARRLEQGTARILGATISRTADRWFVSFTVEVQRAIPASNGKASVVGVDVGVRELAALSTGTVIPNPVRWRRRCASCGG

SEQ ID NO: 27418 - protein, 335 aa, unknown
  TnpB Polypeptide
MRYYRRYGKGLSYSKLSKHLTRLKKLEKYQHWHIPYSWALQNMLKRLAQSFREMKTLGRGHPQFKSCKKHKGMTFDGGQAPLEKVLEKQKHQRNHPTYKIRLNGRWYRFALHRAIEGKAEGFDFGIKDFLTGSDGERRASPMFYKQNSEKLLKAQQAHSRKVKGSNNRERERKNVARIHKKTENQRMDHHWKLAIDLCREFDILFFEDLNLEGMKRLWGKQVSDLAFGEFYQKLKHQAKKRIRAVLKIGRWTPTTKCCCVCGHKNENLTLADRHWQCPKCETHLDRDQNAALNILKEGVASFALGEVSPIVLFNKIVGISVEATSPLLKTTNASA

SEQ ID NO: 27419 - protein, 212 aa, unknown
  TnpB Polypeptide
VKTKQRRKDRRKNSWGWILPCMGCVYFLPVKEPDIPCFTGMQRKSLPGNRENFPDVKRAAVTIRNRRKKVALYHEKIKNQRKDFQHKLSHSLAEDYDAVCVEDLNLKGIAGGLHFGKGIQDNGYGQFLSMLGYKLEERGKYLIKVDRYFASSKICSVCGHKKKELALSERIYLCECGNRMDRDVNAAVNILKEGKRIYKKMCIIAQKRSVTG

SEQ ID NO: 27420 - protein, 400 aa, Synechocystis sp.
MKLRYQYRFYPTNQQRQGLAQLFGCVRVVWNDALAFCKDSEKLPSYNALSKRLTECKQTEEKIWLTDVSAVPLQQSIRNLSAAYKNFFDSVNGKRKGKKVNPPKFKSRRSKQSATFTSAGFVLKDNDRIYLAKIGFLDVVWSRPLPSIPSSVTVIKDRANRYFLSFVVEVDPQQLADNGQSVGIDLGIIDFATLSTGEKIKSPKPLKAKLKRLRKCQRNLARKQKGSKRREKARLRVAKVHAKVKDTRTDFLHKLSTRLIRENQTVILEDLNTAGMMKNRRLSRAISDLGWRSFRTILEAKAVMYGREFRTISRWEPTSQRCSCCGEIGGKKELSVREWTCLFCGANHDRDINAATNILVAGGHSETKNGRGGKRQTTSVAASGEASTHRKAIQLTLFAS

SEQ ID NO: 27421 - protein, 380 aa, unknown
  TnpB Polypeptide
VRRPPSDERPVSPLREHHRSVGVETSRRVLRHLEATSRERALRAPSQRNSTHCEPRSKGDSTRYRGYESGVARLKKGETTSQPHFDAWSVVYDKRSATFHRDHVSLSTVNGRVECEYVIPDDPTGTPIGEFLLNEDYEFRMSTLQYDRSTDSFYLHARMRRTTDEHEQSTGVSSDAKHRTVLGVDLNVDGSLAVTSTGEFIGNADEMNHRRREFEKTRGSMQQTGTRSAHLSIQSMDDREHRWIQDELHRASNQILDEARDHGCTHVAFENLTDIRDRIAGAKRFHVWAFRRLYEYVEYKAEMLDIGIEQVSPAYTSRRCSKCGFTHETNRRSKHQFVCQKCDYELNADYNASKNIARKLLKRLRSGQKSSREAHPVSVR

SEQ ID NO: 27422 - protein, 344 aa, unknown
  TnpB Polypeptide
MGVVRNIQIKLDVSEDGHEVLDETFEQFQQAAQHVADYGWDDNPYEITDAKNTLHDETYSDVRENLSLQSSLVQSARNLASTALGNCKDRIIEDGEKTSKPEFKGTVVVYNGRTITYNDDHVSLATTDKRVTAEYVTPINDAGTPFEDYWTDEWEKGEATLHKRDGTYYLHVAVKKDIEPDSSDDESGNGVVLGVDLNVDGYLAVTSTGAFLGNADYLNHKRDEYERRRGNLQQTGTRSAHLTIQSIGSRFARWSADYLHRVSKSLVREAVENDCTEIAFENLDHIRERISNDSKFQQWAFRELQRHVEYKAEEYGIEVDDVAPAYTSQRCSHGGVWIHARGQS

SEQ ID NO: 27423 - protein, 371 aa, unknown
  TnpB Polypeptide
VVQKTYKFKLYPTKKQVEKLELWLDLTRELYNGALQERRDAYRINGISLNYYSQNLQLKEIKTVRPEFADINSHVLQDCLDKLHKSFNNFFRRVKKGEKPGFPRFKGKNFFNSFSFPKTRYKIVEGNKYKKINLSRFGEIKFRVNGKIKLDGELRTATIKRVGQKWFVCIVAEFKPEKLEPTNRKVGIDVGLKSFAVLSDGQTIDNPRHLSKFKDKLRIAQRRLSRRKKGSNRRRKAIKMVGRIYEQVANSRSDFIHKTSRRIINENDLIAIEKLSIKGLASGMLAKSVLDVSWGNFFEKLSYKAENAGRTIVRVNPAGTSQTCICGNNVPKKLADRVHNCESCGIICDRDFMSAQVILKSALNQSVQSLT

SEQ ID NO: 27424 - protein, 395 aa, Bacillus sp.
MKKAFKTEIRLTDDQQTKIHQTIGVCRFLYNRFLAYNRDHYEQYKQGKLEYGYVSGMDFDKYVNNDLSKQEGFEWIKQVGSKARKKSIMNAHSAFQRFFKGQSKFPRFKKKKNQDVKAYFPKNNKGDWTVERHRIKIPTIGWVQLKEMGFIPTNRRIISGTVSHKAGRYYVSVLCEVEVSTKEEQLTQEGVGIDLGIKTFAVCSNDATFSNINKTVHVRKLEKKLRREQRSLSRKYEFFYKKTKTKGGEPAPKRTNLQKNLLRVQRLHQRLANIRQEYVKSVVNQVVKTKPSFITIEYLNIKGMMKNKHLSKAIAKQCFYEFTKWLEAKCRENEIELRQVGRFYPSSKTCSQCGQVKKDLRLKDRVYTCSCGHRTDRDKNAALNLVQAKEYTVLT

SEQ ID NO: 27425 - protein, 499 aa, unknown
  TnpB Polypeptide
VQLGYNYRLYPTPGQCAALARAFGCARVVLNDGLRAQQQAREAGLAYISDAELSARLTAAKATAERAWLAEVSSVVLQQALADLNIAYRNFFASVTGKRKGPKVAPPKFRSRKDRRQAIRFTANARFKVLANGKLRLPKIGDVPVRWSRALPSMPSSVTIVKDAAGRYFASFVVEPKPGRLPAAERVVGIDLGLTHFAVLSDGRKIASPRFLRRAEKELRRAQRALSRKQEGSRNRDKARVKLARAHARVADARREFHHQLSTALIRENQALAVEDLAVNGLARTRMAKSVHDAGWSAFVHMLEYKARLYGREFRRIGRFEPTSQVCSACGARDGPKPLHVRAWRCRGCGAWLDRDVNAAVNVARAAGLAVTACGAQVRPGVIPAQRGEAGTHPKPRRDAAWQAGISAPSGRRGSQLTAWTWVVCATRRSSESYRLVWAVTVVRPRCTGTATARTVPLLTGRNMWLVEVIVAVVLPSGSPRNVTSATRESRSADMTGDY

SEQ ID NO: 27426 - protein, 387 aa, Firmicutes sp.
MVKAIKVMLIPNNVQKTKLFQYAGASRFAYNWALAREKENYEKGGKFISDSELRKEFTRLRHSDEYAWLLNISNNVTKQAIKDACTAYQNFFKGLQKFPRFKSRKRSMPKFYQDNVKIQFSNTHVKFEGFSSSRKANKQKRNWVRLAEHGRIPTDVKYRNPRISFDGLNWWISVCVEFPDSKETLNEDGVGIDLGIKDLAVCSDAVKYKNINKSQKVKKLEKQKRRLQRSISRSYEKNRKGESYCKTNNVIKKEKLLLKRNHRLTNIRKNYLNQTISEIVNRKPRFICIEDLNVRGMMKNRHLSKAVQEQGFFLFRKQLEYKCSDKGVQLIVADRFYPSSKLCSCCGNIKKDLKLSDRVYRCECGNRIDRDFQASINLKAYGEQFAS

SEQ ID NO: 27427 - protein, 387 aa, Firmicutes sp.
MVKAIKVMLIPNNVQQTKLFQYAGASRFAYNWALAREKENYEKGGRFIPDTELRKEFTRLRNSDEYAWLLNISNNVTKQAIKDACSAYKNFFKGLQRYPRFKAKKKSMPKFYQDNIKIQFSNTHVKFEGFSSSRKANKQKLNWVKLAEHGRIPTDAKYRNPRVSFDGLNWWISVCVEFPDCRDRPNHDGIGIDLGIKDLAICSDGNTYKNINKNQTVKKLEKRKRRLQRSVSRKYEHNKKGGSYCKTNNIVKKEKLLLKVNHRLANIRKDYLNQTTSEIVNRKPRFICIEDLNVSGMMKNRHLSKAVQNQGFFEFRKQLEYKCNDSGIQLIVADRFYPSSKLCSCCGNIKKDLRLSDRTYKCECGNVIDRDFQASINLKAYGEQFAS

SEQ ID NO: 27428 - protein, 395 aa, unknown
  TnpB Polypeptide
MAGYSRQLLHHYHYLGKMHILCIMPKVNRYRIYPTKAQVTKLNSTLELCRWIYNETLALRKDAWESEQKRISYYDSKKMIPIWKKDKPELKNVHSHTLQDVTMRIDLAFQAFFRRVKAGEKAGYPRFKGKGWYDSITYLQSGFSLNNNMLSLSKIGDIKIKLHRQLEGNIKRLTIRRTSTGKWFVSILTDVETYQQHEYSDKSVGIDVGILSFATLSNGTYVPNPRFYIQEEKALARANRRLSKAEKGTPERKKCLITLRRIYERISNKREDFAQKLSKNLVDNYGIICFEDLNIKNMSKNHTLAKHILDAAWSKLVTYTSYKAENAGRKVILVDPKNTSKMCSNCGMLVEKDLSERTHNCHFCGLSIDRDLNASINILRLGLQSVRKTDRCPSF

SEQ ID NO: 27429 - protein, 357 aa, unknown
  TnpB Polypeptide
LGAFEFAFVKALNSQACQASVDRCWSAIARFFDNCKKKVPEKKGYPKFKNRSRSVEYKTSGWKLLDPKHIQFTDGKEIGKLKLIGTWDLAFYTSDQIKRVRLIKRADGYYVQLCIKVNVEIESQPTHRTVGLDLGLKYFIADSNGEVWLEPRFYRESEHQLNRANRKKSRKYRRGVKPQSNNYRKARERYARKHLRVSRQRKEYCKRAAYCVIQANDLVAYEDLNVKGLVRNRKLAKSISDAGWSTFREWLEHFGRKYGKVTVAVPPHYTSQNCSNCGETVKKSLSCRTHVCLSCGYVADRDVNAARNILIKGLTTVGHTGSHTLGETGSLAVLDSSCTAKSGRGTKNPPGGVSNDY

SEQ ID NO: 27430 - protein, 400 aa, unknown
  TnpB Polypeptide
MKMINKTYKFRLFPTNEQEVLLNQHFGHSRWVYNHFLNERKEQYQADKKSDNYYKQAATLTKLKKEEKTMWLKEVNSQTLQFALRSLDTAFLNFFRGNAQFPKFKSRKHKNTFTIPQFGSIEGDKINIPKFKEGIKVKLHREVKGKIGKMIITKTPTGKYYVSIFTEQQNKELPKTNKQVGIDLGLKDFVITSDNAKFKNNRYTKKYAKQLKKAQQHLSRKQKGSNGFEKQKLKVAKIHEKIASCRLDTLHKVSHKLVNQYDLISVEDLNVKGMIKNHKLSKHIADASWGNFVTLLQYKCDWYGKELVKVNRFYPSSKTCGDCGWINQNLKLSDREWTCNSCGVIHDRDVNASRNILKEGLKIISGGMLDNTDGDSNKTSIKKHKSVKSEAQPIASGVGG

SEQ ID NO: 27431 - protein, 600 aa, Trichodesmium sp.
VSLYKIKTIKEKEMAKNYVTPGEAARILGVWDRTLRYWEEQGKLQQSEQQGDREDMTLPHIQLGLPGIGLSSSMPESRQQSKKNICSVNVNISSPNILMENLSKKLEEDLITNGKKCLPYWSGSCQEMSNLLWSHTKIGSPDLVSICSNGSVPNTLAQSWFSIKLNFLPNRKWLKTSFPSSTVSQPDCTDSASIHLKSQKTRIYPEKSLHQIWKQWLAASRYCFNQAIAQMRKHGLISKYDLRKVILNVGVNDRSSLPDWIKKSPYHLKVNAIYDAHAAFKASRQRGTKQQEAGKFRSIRDRVQSIKFRVEDFKKGTWLPMLTKGLNFQTSELIPSYNVEYQQKQKDGTYKVCVREQSWKLQTQLVYDKKRWFAIFPVELKPEISNSQSLIALDPGVRSFLTGFDGEKFIDIGNRDITRVFRLGQHIDKLISTKTTLKGRENKHKRQGLQNKINSLFIRIRNLIDEVHKKVAKWLTTEYRVIFIPTFESSQMVAKSGKKKRKLNSKTVRQMLNWAHYRFKQTLKFHAFKRGAIVVDVTEEYTSKTCTKCGHVHQKLGGSKHFKCPCCGHSMPRDWNGALGIFFKALRDTANVDGSAVTLL

SEQ ID NO: 27432 - protein, 626 aa, Halorubrum sp.
MDEVTANISFDKYPDMPEFYGSGAAKYRLAMVKDRSDFLDLFEGARHVDAVTYAETPELMVKMLTEYDIGSLDVLIGNSDDYAERVNEVATAKSLVQLRQDDRLTIRLKNQKTVHSKIYRIVMPDETVKLVHGSANLSRNSWEYHTNQIAVLTTEVGTELDAELKRFIDEYREGYSDQTLMEGLVEALEEADSPEGRENRIEYWVGAGDLDVSDTAALNQDAVEDLKEIADQVTAVIDDPDEADETVAFVEEPEKADRSVVEPSDVDEPEVERADAVDEAPDVGLVESDNETGLTDGNHPVRFTNEGLRLDHKPENAIEWYVKIPHHEDYHLWIPAQPNPEQRGWLEALNAGDATMGESRLFERDGTWYLHVTATRNVEERSEASADERTAIGVDIGEASLVTVCHRDDHGSPTAPKLWADEGKTVRQLRKTYFTATRRLQTRGSEHIPESFGEDVWNQIDDLFHRVTREVVEYAESVENPVLVLEDLTYMRESMDYGEYMNRRLHGWGFAKLHAQIRYKAVEKGIPVETVNPRNTSRECHACGEVGYRPKQATFTCTNDACWMGEYQADVNGAINIADRYLSGESHSREDTDGDDSAEDGGRLTAPQDTHADAETQQETLGTYAS

SEQ ID NO: 27433 - protein, 439 aa, unknown
  TnpB Polypeptide
VRSGPSTLSCPPTTHTPPARTPPRGPTHSSGWKKGRARKAYPEVRGVSIWLDDHLWRAEGLTSVSLATHRGRLRISVELSKNFLRYVNRGWRLSSEAKVKLDHRERRLIFYITFRKEVSEYKPKGYVTVDVNENAEAVLIDGIVYLLETDLSRVTLGYYYRRKRVQERYDRVYGPGSRPERRIFKRLSSNEKALKRDIRWKLAALIVREAARRQAAIVLERLGKEPANHMIERIKDPQLRHRVFQAAFKGVQRAIEEKAMEYGVPVIYVNPKNTSRKCPIHGAEIVYGKDRHGTCSKGGETWHRDVVACYNLLLRALGGDGGSAPSRMRALTPIDGGPVPLGLTAAHEPAGVPRALWARWRSLRSIMNEQVIEVRAQGQTGWRGSSEPVGGRRAGLGLPSSRAVPLVCLQGAPKEDVEEAIKYAREAHLECFLTETTFS

SEQ ID NO: 27434 - protein, 295 aa, unknown
  TnpB Polypeptide
  misc_feature (287)..(290): Xaa can be any naturally occurring amino acid
MKLSVLKAYKFRIYPTEEQKQFFIQTFGCVRFTYNQLLKAKMEELTTNAEKEKLTPAKLKKEYPFLKETDSLALANAQRNLERAFRNYFQKRAGFPKLKTKKNIWQSYTTNNQQHTIYLVDDQLKLPKLKSFVAVKRHRPINGQIKSATISARNNTEFYISILCIEEIQPLPKNQRKIALVYHPEVLVEANAQLPFISTNAIKSQQRLARAERKLNVKAKAVKRKKMVLSHARNYQKQKGKVSQLYRAHRDQKKEYIDQVTFHLVKQYDTIFLERLIDETCRSTGNXXXXASVYS

SEQ ID NO: 27435 - protein, 470 aa, unknown
  TnpB Polypeptide
MSIYKTEEEFLKHYDSSAFEKLSMTSDILLISVSSEEKENYRKTDKKMMSILLVKRTDFPYKDKWCLPGGFLNPKTETLEECAKRVLKSETNLSDIYLEQLYTYDAINPYIGAFTGDLYTKYKDGFIDKKQVFMSANDFDKYINNEIKVLDEYSWINNCGSKARKKAIQNAEIAYKRFFKGQAKFPKFKKKNKCDVKLYFPKNNKGDWKVDRHKIMIPTLKNVRLKEYGYIPIGSKIISGTVSKKANRYYVSVIIDVENIPQKNTNQGIGIDLGIKDFAICSDKIIYKNINKTQRVRKLEKKLSRQQKRLSRKYESLKLRNKKEKGEATRQNIQKQIAKVQILYQRLNNIRTDYINKVVSNVVRNKPSYITIEDLNVKGMMRNKHLSKAVAQQKFNEFRNKLATKCNALGIELRIVDRFYPSSKLCHKCGSIKKDLKLKDRIFNCDCGYVEDRDYNASLNLRDAKIYKIA

SEQ ID NO: 27436 - protein, 394 aa, Symploca sp.
MKISYQYRLKPNKQQRQIIDNTLDMLRCQYNYQLTQRFDWYEHNRCSIDRCPLVCHLYELKEKPNRFNQQASLKQLKVDRPWYKTIHSQVLQEVPKKVELAFDRWLKGDSNGKKSGRPRFKGVGQYKTFTYPQFKQHHFVGDKIKLSKIGDVKVIVHRPIPDRFTIKTVSVTKKTNGYYLTLSLDDKTVPTIKPDFDADNIVGLDVGLIDFYVASDQTRIAAPKHLRKAERKLKSAQRKVSRRKKGSNRRLKAIKELGMRHKKVADTRKDFHFKTAKKLLNKYDVIAVEKLNVKGLARTRLAKFIHDAGWGQFLSILSNKAENAGKKVIPVKPHGTSQECSSCGHKVKKPLSQRRHNCPVCHTSLCRDLNAAINIKNRGAHGLKAQIMSSKKSL

SEQ ID NO: 27437 - protein, 423 aa, Planktothrix sp.
MKNDSGEFIPREYFSIYVNLETGRKQENFMIVLEYKVKGKLDQFKAIDQAIRTTQFIRNKAIRYWMDNSRELKIDKFALNKYSTALRKEFSFVNDLNSMAVQSAAERGWTAISRFYDNCQKKISGKKGYPKFQKDCRSVEYKTTGWKLHPTKRQVTFTDKNGIGNLKLLGKWDLHTYNLKDIKRVRLIRRADGYYCQFCLGITVTDVQPKTGNEIGIDVGIESFYTDSNGHQEPNPQFLRKAETSIKKSQRQIYKKVKGSSGRRRARKIYAKKHLKVSRQRNEHAKITARNVCKSNDLVVYEDLSVRNLVKNHCLAKSISDASWYLFRQWIEYFAAKFDKLAIPVAPHFTSQKCSNCGGIVKKSLSTRTHICNCGCELHRDTNAAINILNLAKQTRDGQSRSNATGVGVSTLLGATLVEQILT

SEQ ID NO: 27438 - protein, 285 aa, unknown
  TnpB Polypeptide
VVKEAYSKAVTQSVNNGQTAFTRFFNHESAFPKFKKKGRSDVKMYFVKNNPKDCRCERHRINIPSLGWVRIKEKGYIPTAKDGYVVKSGTVSMKADRYYVSVLVEISDNKIADNSNAGIGIDLGLKDFAIVSNGKTYKNINKSARLKKLEKQLIREQRCLSRKYENLKKGEVTQRANIQKQKLKVQKLHHKIDNIRTDYINKTIAEIVKTKPSYITIEDLNVNGMMKNRHLSKAVASQKFYEFRTKLQIKCNENGIELRIVDRWYPSSKTCHCCGAIKKRFKAFR

SEQ ID NO: 27439 - protein, 399 aa, Zetaproteobacteria sp.
  misc_feature (72)..(72): Xaa can be any naturally occurring amino acid
  misc_feature (88)..(88): Xaa can be any naturally occurring amino acid
  misc_feature (116)..(116): Xaa can be any naturally occurring amino acid
  misc_feature (141)..(141): Xaa can be any naturally occurring amino acid
  misc_feature (211)..(213): Xaa can be any naturally occurring amino acid
  misc_feature (215)..(216): Xaa can be any naturally occurring amino acid
  misc_feature (218)..(221): Xaa can be any naturally occurring amino acid
  misc_feature (240)..(241): Xaa can be any naturally occurring amino acid
MLIRKGYKFRLEPSTTQHADMGMFAGHNRAVWNKALALTKDRLERKKPMMWFHELNWNMVNFWKKSEEMSWXNDAPSQTLQQTLKQFXRAMRDCFDKNQPNKRLPRFKKKGVKDSXLFPQGISVEGNRIKLPKLGWVKFRXSRELLGKMKSATVSRNGKHWFVSILCEMKVPEPIHPSTSAVGIDRGITIMAACSDGQEYIGAKAFRKHEXXXAXXQXXXXARKVKFSNNWQKQKEKVQXXHSKIANIRKDALHKASTDISKNHAMIVMEKLGVSRMSKSAKGNSEQHGSNVKAKSGLNKSILDAGWSMFAAMLEYKQRWCGGMVEYIPAAYTSQRCSKCQHTEKANRVSQSKFLCQQCGHSANADHNAALNILAAGHAVFACGVDAIATTMKQEPLAA

SEQ ID NO: 27440 - protein, 298 aa, Halophilic sp.
VEAKRHQTRHQEQSSTALGRCESQGTPQAWEYILVEYETRPGVTVENLQQVRAVYDKAKGRWELHLVCKDEVETPDAPGNETAGIDLGICNFAVVSYSTEEADLYPGNRLKQDGYYFPKEIAKCDDSGGEEATRLHYKWSERRTHFFHSLAKHIVEKCLERGVGRINVGKLAGVRKDENGESKSWGRHGNLDLHGWAFDRFTSIVTYKAKVEGIEVVELSERDTSKTCCVCGREDDSQRVERGLYVCEECDAAFNADVNGAENIRLDLNQSNSESAPDLGGDRSTGWLAGGVQIRIER

SEQ ID NO: 27441 - protein, 370 aa, Halophilic sp.
LSAKPTNERCGTHSTPNSERRWSCRHNSSKPLSDAPSKPSKALSNGGRKDSTSRVRRSPLKRLTTTCEARHSTETRCRWQLLRGGSNPRSLFRQTVRHPTSGTYSPRTTSSARVTLRYDAVTDEFYLNISTQRINDDGEVPADTGHPDQTVLGIDLGVNSLAVSSTATFWQGDEYDHWCGEFEKRRGEMQQRGTQAAHNALLRLGKREEAWRKQYIHTVANELVSEAVEHDCDVIVFEDLTDIRERLPQAKWHHVWAFRRLFEYVSYKAPEQGVSVEQVEPNHTSQRCSRMDCGFTHDDNRHGEHFECQKCGYEVNADYNGAKNIGLRYARKRIHKLRSSPKSGSGNAEVDLRVNGGTLNGESHRPIAGD

SEQ ID NO: 27442 - protein, 412 aa, Halophilic sp.
MEYSHRYPAYPTRQVAAELETHIDVHRQAYNYTLYEYEHVDADDIGSAYKHHYRLPDWKNEFPVFSEVNSKALQRTVARFYQNLDGLSEQKSNGRKVGKLNWKSPREFQSMTYSQSGFELKNTSGRRATLWLSKIGDIKIRYHREIPDEASIKEVTIKKETTGDWFVSFGLEADDADLPEKPDVGSLNTSNSVGVDLGILNYIHTSDGGTVDWLKLEDEYDRLRREQRKLSRKQEGSRNYENQRKQVAKVKRHIRRKVLDYQHKLSTWLVREYDAVFVEDLDVKGMLEQSHNARNKQDAAWRQFITLLEYKAELYGTHVVQVEAAGTTKECASCGVETAKPIWVREHSCPSCGFECDRDANAAMNILQRGFSELGLGWPESTPVETSLPTDTTSVSAKRVHQTTSGGLSDAV

SEQ ID NO: 27443 - protein, 426 aa, Halophilic sp.
MKRTNTFDVIPQSDEDEELLRRLLDASAALWNEINYERREHYADPDRDVWEISEHRGRYGGTLGASTVQQIERKNREAWKSFFALQKKGEANGKPGFWGNSENGRDLRTYIRNTSYSVEWGEYSRLEILVGQDLKDEYGLGHRERLRLEVRGDPSWTEYEKQGRLELFWDENAQTFRAFQPVTIDTSRLAHPLADETAALDIGANNLVACTTTTGTQLLYEGRDLFEQFRETTREIARLQSKLREGRYSSNRIRRLYDRRTKHRDHAQDALARDLIERLYDEGVSTVYVGALTGILDIHWSVEANAKTHNFWAFRQFIDRLACTAEEYGMGVEVRSEAWTSQECPECGDHEETIRHEDTLTCSCGFEGHADLTASETFLRRQTDVSRPMARPVRFEWDDHDWSGKPHPHESPKEVRTNPQVASVGR

SEQ ID NO: 27444 - protein, 421 aa, Halophilic sp.
MEKSLTKTLIFQLQSDDERLLSEAYHEARWVYNQTIQLATNGMDWDDISPRLEDEANLVKNTTQRIVAKSLEALQQSYDRDNYNTPSHGKTGPYPLRMNFTEGYNLTLEDDEIHYRISAKPYNPVNGTLRGSPDNVELLEQALESDEWRVGTAEAIVRNGNHELHVNVTHLEATVPDKHDTQTVVGVDINEDCVALAALCEDYFVDSVVIDYPEIKQERHRYFTMRKRMQNVGQTAFDRVFENKEERYVHDQLHQVSRRIVEWVQQFESPLVVFEDLKHMRDSIDYGTRMNRRLHSLPFHKLRSFVAYKAAFEGIPSEEIDPAHTSQACSFTECEHTARLNRRKKRFKCNACGRQDHADRNAAVNIAKKGLESLNRNVPALKTLPNIRKLRRQASGCVNQPTVTHDTATGHQADGVVGVSD

SEQ ID NO: 27445 - protein, 232 aa, Halophilic sp.
MSETVTKTLQATLATPTTGKEQRLQRLLDTYRTALHDAFDNRADTMSAVNDVVTPYDLPYQAKDALKSYVPKLRDTYNAEELDDEHPLRLVNRAATFDYSDEREHGFVWQAPQPGRGTNFWIPLRINPEQESLWFDLLSEDAKAGELRLQRHRTSWELHVTVEYEVEEPTESDDETYIGFDVGESALITGCALKRDVPRKPMLVSGSRARHLAKRCSRRSDGFSRETPPSGA

SEQ ID NO: 27446 - protein, 441 aa, unknown
  TnpB Polypeptide
MKVKRTGKFKIKKNHPDYDLVKLHTIEAKEIYNYANYIIRQIYFKKSGKFNYSMDFINEYPVLSDDFNIYLNEDFQFTSTFYRIICNFAKLKKYSLNSKMVQNVVDILKRDWTSYWKLLKLKIHSEYDKNINIPRYKKKYSIIEYNPQVISKTKLKKGYVGIAKMKEGFKIPKFYKEYDCKSARALWKNGFLYFEVIYEKEANEINKNKKVASIDLGGKILMAIAYNFNRRGICISANMLRSLNHYYNKTIGIMNSLLPKGIKISKFIQNLWRKRDEQIRNLFGYYTNRLIKELVSLKVTKLIIGNNKNQKQEINLYSKLENRNFCMIPFDKLIGILKYKCEENGIECIEQEESYTSKASFLNNDYIPDYNGENNKYEFSGWRNRRIYKIKGKNQKIHADLNGAFNIMRKSGHELIEKIPNLNNKWIFPIGKFKANNLSYA

SEQ ID NO: 27447 - protein, 388 aa, Leptospirillum sp.
MSSKDWHTAEMKVAKSYKFRFYPTTDQESLLARTFGCVRFVWNAVIAAREEAWESFGIATSFPDASALLTDLKADPDLAFLGEVSSVPLQQALRHQQRAYDNFFSGRAGKPRFKRKDDVQSAVFMNNAFTLDKQNLVLAKMKESLNIRWSRVLPKAAKVSSVCVTKDPACRYFVSLNFEDEVSAKSVLDTKVGIDLGVASFATLSTGEKIDAPDFFRKDEKTLAFWQRRLARKKKGSQNRRKARRKVARIHARVADRRHDFLHKLSTRLVNENQVLAFESLSVKNMLKNRHLSKSIADASWSEFLRQIEYKAAWYGRQILSCGRFFPSSKTCSHCGFVLPELSLSVREWTCPDCGATHDRDVNAARNILTAGLAVCACGGSVRLPVPA

SEQ ID NO: 27448 - protein, 396 aa, unknown
  TnpB Polypeptide
MSNLYKTVRLDIEKTPLLDKLARASGELYSRILVSYWRVLRKKGIFLSNYSMQRWHISSDLHAHTCDAIADNFYASIRSANQRKKAGDTQAKYPRRRKYFYKITWKSAAIRLKDGKLVLANGRGNKPLIFDWQWDQPKQVEIGWKQSGGYQLRATYPVAATNAPVGNLIAAVDLGELRSATTHDGQETVIYNGRLIKSKVAYRNKITAQIQERISKTKRGSNRRKKLVRAKSRIVAKINHQIKDILHKQTQHIVSTLHKKGVQTLVIGDIRDIRKSMDYGKEMNQRLHSWSFGKFRELLSYKAKILGMQVVLQNEKDTTKTCPGCGKKHKPKGRLYKCRSCGFKFDRDGVGAINIRSKYLGCLGVPVVGVMATPVGVRYRPHLQCSSMSRRFPVGQ

SEQ ID NO: 27449 - protein, 390 aa, unknown
  TnpB Polypeptide
MKKTYKYRLYPTGKQERVLNEQLALCTELYNAALQERKEAYQLCGKSITFTQQCAQLPAIKAIRPEYEAIHSQVLQDVLHRVDKAFKAFFLRTKAGQVPGYPRYKSRFRYASLTYPQTGFGIDEQGKLSLSKIGHLKMVQHRPMRGIVKTCSIVRHPTGKWFVCFSCDEVEPQVLPPSEEHVGIDVGLKTFAFLSTDEQIATPRFFREEAKYLVKAHRRLSKAERGSPERRKRRKVVARVHERIRWRRENFVQQESRSLVNRFGLIAVESLAVRNLLKRPKPKLDGATGQYVPNGASSKTGLNTSIADAAWSAFFTALVAKAVEAERHVVKVPPAYTTQACNDCGHRQQMPLSVRVYTCEQCGVVRDRDYNASLNILRTALGRQSVALGA

SEQ ID NO: 27450 - protein, 407 aa, unknown
  TnpB Polypeptide
MQYHIGMTLRLRPDEHQQHIIAVNDGVRRFVYNKLVTLNREKYLLSKVTVYCKPVADRLSYVNDVLSSKTVFKQTAPWLASKEVDSCAFDNAFRAYRAAWNNFRRNPSFGVPVFKKKSYSQSYQTNAHYPKGANDLSDGNVRLIDRKHIQLPVLGSVRFQCSNKMRSILEDHTSGTRIGSIKVYRDNCGDYYCSLQLHSDVPFFDAMPKTGAVAAIDLNLTNLYSDSDGNVVDNPCFAAKAKSDVAKAQKKLSRRKCRAEAEGRSVYRSSNYQKQRLKTARLERKVARSREDYLNVQAKHLVENQDLIVSEDLKVTNLLGNHCLAFAIADVSWGRFMQLIAIKAEMYGKVYVKVPPQYTTQTCSACGHVMTGDEHIPLGVGEWECPVCGTMHSRDVNAAINILAKVI

SEQ ID NO: 27451 - protein, 363 aa, Brevibacillus sp.
LHRAYKFRLYPNKEQATLINKTIGCTRFVFNHFLAKRNDAYEHEKKTLNYNDCSALLTQLKKEIEWLKEVDSTALQSTLKDLDSSYKKFFKEKKGYPKFKSKKNPKQSYTCKMNIKIVGNRIKLPKLGWVSFAKSREVRGRILSATIRLNPSGKYFVSILCETENQPLPNVGSTVGIDLGIKDFAILSNGEKVENPKYYRKYEKQLAKWQRIQSRRQKGNKNRNKARIKVARLHEKIANTRNDFLHKLSTKLINENQVICLEDLQVENMVKNHKLAKSIADASWSMFRMMLEYKAEWYGRTISIVGKQFPSSQLCSTPHCGYRNKDVKNLNLRQWTCPKCGTKHDRDENAAINIEQEGLRLLA

SEQ ID NO: 27452 - protein, 375 aa, Brevibacillus sp.
MRKRGENQMLVNKAFKFRIYPTQEQVTLINKTIGCARFVFNHFLAKWNDIYKETSKGLSYKECSAQLPSLKEEYIWLKEVDSIAVQSSVKNLADAYSRFFKKQNDTPQFKGKKNRVQSYTTKHTKGNIAVFDKYIKLPKLGLVKYAKSREVDGRIINATVRRNPSGKYFVSILVEVEVQTLPRANKEVGIDVGLKDFAILSTGKVFENPKFLRKMETKLIREQRTMSRRTKGGSNWNKQRIKVARIYERITNARTDYLQKISTYVVKNHDIIAIEDLQVSNMLKNSKLAKAISEVSWYQFRTMLEYKANWYGRTVVTVGKTFASSQLCSNCGYQNKDVKNLNLREWNCSECGAHHDRDINASRNILAEGKRLLSA

SEQ ID NO: 27453 - protein, 369 aa, Brevibacillus sp.
MAIHNKAYKFRLYPTEEQAYLIRKTFGCVRFVYNKMLAERKETYEQFKNDKEALKKQKLPTPAKYKGEFTWLKEVDSLALANAQLHLQTAYKNFFGGKADFPTFKSKKARKSYTTNVVNGNIMLLDGYIKLPKLKLVKIKQHRMIPDEHTIKSCTISMTPTGKYYVSILTEYEANVIPKKLNTFVGLDFTMTELYVDSEGEKANYPRFYRQEFVRLAKAQRVLARRKKGSSRWHKQRIKVAKLHEKITNQRKDFLHKKSYNLAKTYDCVVIEDLNMKGMSQALNFGKSVADNAWGMFTAFLQYKLEEQGKRLIKIDKWFPSSKTCSCCGQIKESLSLSERTFHCDCGFVADRDWNASINIKNEGLRLLA

SEQ ID NO: 27454 - protein, 422 aa, unknown
  TnpB Polypeptide
MLMTKTISLNVLSLTDAKERSLAELEQKWLDGSNHCFETLRYWDVVAPDTLVTRYNLQKLEYKHIKDMTGLQSQIVIDLFKNVFAVWHESRADCIKASCISYNIPRSGNLKYTKRKNPIAIVRTLDKRIGLPITQDGAWHRFKQFLKEGWTFTAFQLKRYGLNWKILVSIKKKFIVKEGYDVVIGIDRGSRTLVALSIVNKNGEILKQLYLGRDIWNRQRDISVRRSVLQKLAKEGDSKAGKKLGKMKGDEANFVKTRCFEIAHEVVNLANKYNAYIAIEDLKGLCKSRLHRKANRKVKRMPYYKFEVALRQVAGQNSIAVVAVPSAYTSQICSRCGCRHKTASVVFKCPDCGYTANRDRNASVNIAFVAGSFFISIIKHPQISKRYAFVNRHAWKNDGVLGCLQHHTQTPDFKPTTLVVGN

SEQ ID NO: 27455 - protein, 421 aa, unknown
  TnpB Polypeptide
MKYLKLYHDNSLLAIKSGRQSYYPSQRVKELLEIFRCMVNDCMKTGLETDTSSLKRLSTLSYRQLKGYKCPSAYRLAAISRAAGILASRKKSLRRGYPTKTPYMSKLVLISCYGFKIEVGNLRIPLGERKFEFILLTPHLVRILSDPLLNVRSFTLNETIVSLCFSKEVVQVKCSGTVGVDRNLRNLTMGNQNQVTKFDLSDAVRIADTTRRIISSFKRDDDRIREELSSKYGRRRHNRIQHTLHNTTKAIVADALKHKEAIVLENIEGIRRLYRRGNGQGPKRRHRMNSWSYGEAQRQLVYKAQWVGLPIIRLSRSETRGTSIICPRCGERLQEDRRLRRKLWCQSCRCIMDRDAVAAINLSRRGRLRFDRSRAPVGLQGGAVEAVKGNPITTVIPGVDAPKPSLDSTNPRLDRTRIPFH

SEQ ID NO: 27456 - protein, 569 aa, unknown
  TnpB Polypeptide
MSKKNKISKQRSTCEEVPFSTYQTRLKNQPDAISGALDDCADLLSRVERQLFAQSQKVDTFKGKVFNQIKSFFLSFFGILSRHFNSINFSLQGKVDSYRFNLDRHIKENKERVDKARQTIEKLSKKTIEPNQRQKHLNNIHLKKRRLARLEKRLEHLKSDKATGRVRICFGSKKMFNAQFDLKANGYENIEQWKSYWQKARRNQFILVGSKDETAGNQLCVAKAQKDGSLTLRVRMPNALVPKHGKYVEIHGVKFEYGQDVIDATLNDNEARRVLKSLKSSETKRYGQAITYRFLRDKKGWRVFVSLARPQIPIKTLKNIGTIGIDLNANHVALVETDRFGNIIDTETISLNTYGKSKGQTESLIGEAVKAIVARSEKTLKPIVIEELYFSRSVLRENSSNRQKRMLSSFVYSKFRQFLESRAYRHGVRVYKVNPAFTSVIGRVKFASRYGLTVHHAAALVIARRLCRFSERAPSNCQDDVIIPNNKGGHVTFSLPARNRKKHVWSFWRRVSRKLKSVVHVAQVRATELPARSNQTQGPLVGTKGPPLSRTLSGAIPAHESLGNTARPT

SEQ ID NO: 27457 - protein, 429 aa, unknown
  TnpB Polypeptide
MVDRAQSLIVGPSATWQSMYKRFAMIRGGTQAFLASPEGAVYADQDLSWLRDLPSAPVRYVLKYLDAAYRRFHKAHAEAKAEGRLLPRRKSDGKPKHFPRRKGRQGHKADGFTIPDNVRMDGNRLYMPRMGWVRLERGRNCQYLGCTAKTVRMLKEGTDRRPKWYANVAYAVPVAQLQPPADDGELGVDRNVRQATDSDGEVYEQPDTSNLDANIKRKQRKAAKARARSRKSGKPLSNRARRVWSVAKTAPQETAPARECRPPHSQKMADAAHAVVVEGLNVQAMTQSAKGTAEKPGTNVKAKSGLNREILASGWGRLERNLEYKAGLVVKVDPAYTSQTCAQCGHADKENRKTQATFNCTACGHTANADRNAAINILARGLPLVRQARGEGASARRGAFGAKPTPMIREPDMPRSPPGPSVPAWYTSI

SEQ ID NO: 27458 - protein, 384 aa, Pseudanabaena sp.
MTTAYKFKLRPDKTQAHQIDEWLELLRRQYNYRLGQRFDWYESTRCPINFCSLVSCSIVPIVEQPDYYWQKRDLLNTKQLFPKYGEIHSQVLQNCIERVKRAFDRYIKADKSGKRSGKPRFKGRGRYHSFTYTQMKQDCIKANRITLPKIGDVKIILHRPIPDGFKIKTATIVKHADGYYVVLTLQDNSVPTISPDVNLDNAVGIDMGLKDFLITSDAETVPIPQFARKAERDKKLRNKAVSRKKKGSNRRHKAVIKLAKHHQKVARQRKDFHYKSAKQLLDKYDVIGFEDLNVKGLARTRMSKSILDAGWSEFLSILVCKAESAGKLAIAVNPNGTTQNCSNCGTHIPKTIADRWHSCHVCSLELDRDVNAAINIKNIAVGRT

SEQ ID NO: 27459 - protein, 185 aa, Azohydromonas sp.
MDKRSSRRRKAVQRLSRARAKTARRRLDWVHQQTAKLASGFALVATEQLRIANITRSAAGTLEVPGQRVAQKAGLNREVLDTAPALFTSLFRLKVMETGGEWVEAPTRKLKPSQRCPACWALAKKSLSDRIHVCADCGHNEPRDLASARVVLKWALGTHLGQELAGTGVRERPCETPSLAQQRLE

SEQ ID NO: 27460 - protein, 413 aa, unknown
  TnpB Polypeptide
VIRTYKYRLYPTNAQARQLDCLLWQGRTLYNAALEQRITTYQETGKSLKYVDQWPHFRDLRNANPDTLGQLNATSVQQMLRRLDKAFTAFFRRLKQGEKPGFPRFKGRHRFNSLEYRYGDGCKLRFDETGLSAKAGRALFYVQNVGEIKVKYHRPLPPNAAVKHVILKRSGRKWYVCLQVECEAPPPHRGLWPEPHTGAPHRGPRPVGVDVGLLRLLTLSDGTLIDNPRWLRGSLAALRVAQRRLSRRTKGSNRRRKAAQQVARLHEHIANQRCDFWHKLTRWLVDTYSLVAIENLTLDFMTHNPRLSLSAHDAGLGLFRELLMYKAESAGTEVVAVNPQHTSQACSDCGAVVAKSLAERIHDCPHCHLRIDRDENAARNILALALAFKSARTGLSGVNVAGCGVRSLRSSPL

SEQ ID NO: 27461 - protein, 185 aa, Okeania sp.
VLVIEAKLKGSQNQYKVLDEMILAGQFIRNSCLRYWMDNKNVKRNDLQKLCAVLAKDKNFPWAKKLNSQARQASADRTWQSIQRFYRNCRQNLPGKKGYPKFPSECCANKKFTRSVEYKNTGYKLSTDRKKIEFIDGFKAGVFELWTTRDLVWYSQQQISRVRVVRRESRLLLPILGQRREKRNS

SEQ ID NO: 27462 - protein, 405 aa, Okeania sp.
MIIYEFKVKAKPQQYKAIDEAIRTSQFIQNKCLRYWMDNKKVSKYDLNKHCKVLAKEFKFANELNSMARQSAAERAWSSISRFYDNCKKKVKGKKGYPKFKKHCRSVEYKTSGWKLSSNRKAITFSDKKNIGTLKLKGTYDLNYYQLNQIKRVRLVKRADGYYAQFAIQIDLKIESQPTGKAVGLDVGIKYFLADSNGKTIENPQFYRKSEKQLNRANRQKSKKYKKGAKPQSNNYHKARNRYARKHLRISRQRKEYAKRVAYCVIHSNDLVAYEDLNVKGMVRNRRLAKSISDVAWSTFRGWLEYFGFKYGKATVAVPPNYTSQNCSNCGEVVKKSLSVRTHVCPHCGYEADRDVNAARNILQKALCTVGHTGTYAWGDTPSGLVGEILLGDGESLSQESPSRD

SEQ ID NO: 27463 - protein, 99 aa, Okeania sp.
DHKLAKAISDANWAELVRQLEYKAEWYGRELVKIDRYFPSSKRCSNCGHVVGKLPLSVREWDCPECATHHDRDINASINILRMGTRGVRNIMSGSIGLV

SEQ ID NO: 27464 - protein, 467 aa, Bacteroidetes sp.
MLKQEEIKRVVEVGKEYKYKELCSLLNEPRYEATNKRTEQFENWERFFKYNKVSRLGYIIEEIYDKPLPGLDNGFFYKTIIIPVKCSKEDHKYLIQCREWAAQCWNDLVEADKQHYEETGKFMTRAELQSFVKDITPLHASGNQYVFAKYFSARDAMFRSILAKHKDSSKVELPYKDKRYFSVGWNVFCYTIDYQDKKIRLSRKRIQNGLNRPPVICSFKTLPKHVVEIELVYKKGLCLAIKYKEPKTNDNILSSNVAAIDLGEIHSISSIDNNGNAIIITGRKLRSVIRLRNKERGKIESKRSHVVKDSRQYNKYTDAIYKLSVESKNRIVDCIHKISKKYLEYCIENNISKVYYGDLDSCTRGTHGKMSKYVNKKLSDWCFGMLTQQLENKLSRYGIEMVKISEAYTSQTCPHCGEKHKPTNRNYKCKCGYTQHRDLVGAMNMLNFQEKKLHIERYKNLKYLRID

SEQ ID NO: 27465 - protein, 370 aa, unknown
  TnpB Polypeptide
MEYSYKFRLYPTATQREQMARNFGCCRYVFNHFLAQRQEQYRDNGKAPTRFQQDKSLTALKQELPWLKEVDSTSLQATLQDLDTAYQNFFRRIKHGEKPGFPRFKSKHDHRQSYKSKCVGTNIKVLDKAVQLPKLGLVKCRVSKAVKGRILSATVSQSPSGKYFVSICCTDVEISPMPSTGAVAGIDMGLKAFAITSDGVECPNHKYLAKSQKKLAKLQRQLSRKSKGSNRWEKARLQVARLHEHITNQRQDMLHKLSTDLVRDYDLIAIEDLAPKNMVRNHRLAKSIYDAGWGEFRRQLEYKAEWYGKKVVVIDRFFPSSQLCCNCHGLWSGTKDLSVRKWTCPVCGHTHDRDRNAAINILNEGLRLLA

SEQ ID NO: 27466 - protein, 335 aa, unknown
  TnpB Polypeptide
MLRGMKIALDLTDEQEKQMWKSAGVARWSYNYAITRDREHYLNYLEDNTLSKTLSGGVIQKELTVLKNTTHPWLKEVGCNVIKRAVSDWDEARNRFFKGLGKAPKYKSKATSKPSFYVNYETLRKVNGGFRGERLGFIRTSQPLPKIPKGSYYKNPRISFDGKYWYLSFAYEVPIVSVELTDLVIGVDLGLKTLATLSTGEFVENINKSCRVKQLEKQLRREQRHLARQLQANIKDYLITAKGGRKPIYKKPLELCSNIQVTKRKIKLLYRKLSSIRLNHIHQTTSYLVKQLPKGIVIEDLNVRGMMKNRHLAKHIQNAMFYEFRRQLEYKCLRY

SEQ ID NO: 27467 - protein, 461 aa, Actinomadura sp.
MVTDCEWQCIGQAAVRAPRPAGVVARPGRGAGRPSACGAGPVEPAARLVDDDAAVPPFPQGRRLGDPAGPDRHRLARHPARAGRPSGVENLCAGVDQLLGGPRRRAELQPVPHGDERGHPPGLRPARKRVHRRWGMVNIPKLGRVRFRWTKGLPVGRRATTGNRITGARLVKDALGWPIAFRVQRIEPAPEPHTGPEVGIDVGVSIPLALSDGNHADHGRPARLPDGRADRDKWLGTGGKATLLRLEHRAAHRKSRRRPGEKTSNRLKRTYEQIASLRARAKRRATDWQHQTTTALARTYGVIVVEELNIANMVKSARGTAAEPGSNVATKAGLNRSISQEAWGRTITMLAYKTAQRRGHLHTVPAPGTSLACHMCGHITPGSREDQATFVCKNTGCGWEGNADLNILHLYRTGHALVPAAGRAVVRRPRGVKPTTRLTPSNSPSHPYPPHLVERPSRTSA

SEQ ID NO: 27468 - protein, 402 aa, Bacillus sp.
MDAFLLCEYGRKRVQRYDPLVCRSTEEARVNEVHKAYSFRLYPTKEQEQQIRRTIGCCRFVFNHFLARRKEAYERDGTTLNQYACMSELPALKQQCPWLQEVDSTALQRTVEELDDAFQRFFREKKGYPRFKSKKHPKQSYTSKRNGREDTKATIRIEDNQIRLPKVGWVKFAKSREVQGRILSATVRLAPSGKFFVSVLVDTEIQPLEPRTNAVGLDLGLLDFAVLSIGEKIPNPRHLRKLEGKLKRWQRILSRRKPGGKNREKARLKAARLHEKVRNARMDFLHKLSTRLIRENQVICLEGLQVQNMQQNHRLAGSIADASWSEFRRQLEYKAKWYGRQVVIVSPVFPSSQLCSCCGHRNTGTKDLSVRQWTCPVCGEIHDRDVNAARNILQEGLRCLSA

SEQ ID NO: 27469 - protein, 373 aa, Bacillus sp.
MILAKKIRIKPTKEQEIQLWKSTGVARWVYNWTLARQQENYQRGLKFLSDNVLRKEITQIKKQEDFQWLSEVSNNVAKQAVKDACDAYKRFFKGLAKRPRFKSKKKSKPSFYNDNVKLKVKKNTVLIEKVGWVATSEQVPMGVKYTNPRVSFDGKYWYISVGVEQEQVKQELTNEVIGVDLGVKELAICSNEMVFKNINKTKEVRKIEKRLRRLQRSVSRKYEMNKEGNRFVKTCNIIKIEKQIRNLHRRLANIRNNHIHQATNTIVKTKPCKVVMEDLNVVGMMKNRHLAKAVAKQKMYEFLRQMKYKCEKYGIEFIQVGRFFPSSKTCSCCGQIKSDLKLSDRVYKCDCGLEIDRDMNAALNLAKYGELVA

SEQ ID NO: 27470 - protein, 396 aa, Richelia sp.
MRTSYQYRLKPNKEQREKIDGTLEKLRYQYNYQLAQRFDWYEQNRCSIDRCLLVFHLPELLDKPNRFSQQASLKQLKIDRPWYKEIHSQVLQEVPKKVEIAFDRWLKGDSNGKKSGRPRFQGAGRYRTFTYPQFKQHHFVGNKITLSKIGDVKVIVHRPIPDGFVIKTVSVTKKANGYYVTLSLDNKEVPTIKPDFNADNIVGIDVGLIDFYVASDNTRIAAPKHLRKSERKLKSAQRKVSRRKKGSNRRKKAIKKLGIKHLKVANTRKDFQFKTAKVLLSKYDVIAVEKLNIKGLARTRLAKSIHDAGWGQFLSILKNKAENAGLKVVEINPNGTSQECSSCGHKVKKPLSQRMHNCPVCHTSLCRDLNAAINIRKRGTHALYNQAQPMSSKKSR

SEQ ID NO: 27471 - protein, 390 aa, Ktedonobacter sp.
MKQKRAFKYRVYPTPEQQQMLAQTFGCCRFVYNWALRKKTDAYYKDHQRLYYKDLSILLTDLKQQEDMHWLNAVSSVPLQQALRHLDKAFLNFFEGRAKYPTFHKKRNQQSATYTSNAFTWRTGTLTLAKMREPLDIRWSRPLPKDAIPSSVTISKDCANRYFISILVEDDIAHLPVIEQAIGADLGLKSFVALSTGEIVGNPKFFHKDEKKLAKAQRRHAKKKKGSKNRDKARLKVARIHARIADRRRDFLQKLSTRLIRENQVVCVESLAVKNMVKNGSLAKAISDVGWSEFVAQLEYKADWYGRALVKIDKWYPSSKRCFDCGHILDSLTLDVRQWDCPECGVHHDRDINAANNILAVGLTVNACGEAVRPGAVKTKPGTSRRSRKA

SEQ ID NO: 27472 - protein, 231 aa, Ktedonobacter sp.
VVCERVKILGASVSCEAGHWYVSIQVEIKRERPPTPAAVVGVDVGIKQTAIVSDGRRLENQRPFALHLKRLGKLQRKLSKKQKTKDPETRQTVFSKNYEKQRLKVACKHAQIATIRADIQHKFTTELARTCGVICIEDLNILGMMANRKLARSVADSAMGQLLQFLKTKVANAGGDLFIVSRWFPSRHPLFVLWACQKAHAAETSDLSVSAVWPGHGPRSQCRLECVVVCN

SEQ ID NO: 27473 - protein, 323 aa, Ktedonobacter sp.
MDAYREDPSAFTGRPKLPGYQDKTKGRFLLIYEKKALGKRAFKRTGKLVPSGLPIEIANQITWEAIRQVRIVPRADGYMLEVVYEQEIQPAAVNPQLRAAVDVGVNVLAAITSDKPGFVPRLVSGKPLKSLNQFYNKERAQQQQRLAHENRYTSRQLDRVTTKRNRRVDAYLHTASRRIIDLLVGEGIGTLVIGKNPLWKQEVSMGRRNNQQFVQLPHARFVEQLTYKAHLVGIRIILQEESYTSKASFLDDDPIPPYEANAAEKLVFSGKRVARSWYRARDGRLIHADINGSYNILRKSSSDPLQVGRGVAGAAVLPRRLAV

SEQ ID NO: 27474 - protein, 511 aa, Ktedonobacter sp.
MVKATKTIRQALQYPPQSAHSFAENQALYNRVVAFYFEVIQAHEGILSLKNKEALTSLEKLTHATEKSPHPILPLSDIAPDIPAMFRRAAINAALGSARAFFSSLKKWRARKEKHEAKPCKKGKKKQPFRERPPVPPRTWNKSASFYAGLWKERSQHSIMLRVWTGSCWSWLKIGALSRDIPEGYAIGSPQLVRKGKSWWLHTPIEKTLEAPANVVEQIASKETRICAVDLNLDQHVAVCTVQAVEGTILATSFIGNGTAVSGFRKRLLGRIAHNRSQTGIIAQGEQDNADLWRKIRHVDEHIAHQVSARIVQFAIKQQASILVFEHLGTLRPQKGTYSRRSNRKRAYWMKGRIFKYVKYKAWNARGIITCRVNPRNTSRECHRCHAPVIRYNEGEPVEGYTPGAALCLCPQCQMRDHADRNASLRIGQRLIERYQEPLKEKPHARSRCAMRGSKDPGVGISQDAEREGQPSLAQARQGDHANGPGTAQGGLRRMGARLSDMATTLRLHFE

SEQ ID NO: 27475 - protein, 274 aa, Ktedonobacter sp.
VFKPVRCPRSQHCAVRYNVHTSTLDWQTQTVRLSTTQGKMSLAFTVPHFSERYRGCRITTADLLCCNGTWWLHVVVDVPEPVVQPHPEVIGVDLGLNRPAVTSTRHFLGTRRWKEIDRRIFRLKRKLQSNGSKSTKRHLKKLARKQMRFHRDCDHVLSKRLVQQAPPGSTIVLENLTNLREGVRHRKGEGQRRLHTWSFAQLYGFIAYKAQERGIVVERVDPRHTSQTCSRCGHQARNNRRSQSVFHCRACGYQLHADLNAAIVRRFGAYQISL

SEQ ID NO: 27476 - protein, 419 aa, Ktedonobacter sp.
MKKRKKPPKKGEPRTITRAITHIGLERANPGKLAALDELAEVYLALMQQYVTLFCDEELPNGFRAPCFPTTLSERWQRVAIQQAAGIAKSWRTNRANAYQAYLDALAEYQKQREEGMLKAEAKEPQWREWNIPTLRQPCIQANVNVVQLEAATDSTVDYWLKVSTLTFRKQLLIPVVLANYHNIQLTDPHTGKRRKINSSVALNKRAGAWWLTLTYDEEILPETTNEAPVIGIDVGIANFITTSDGKQYGSFNGRMKERNRQDREKRRRKAKLRACLKKNGVPKEKLPSTTSRTGQRLIRHIKQSINRTVNLCFEEHEGCQFAYEQLSVPSMRFKARAMNAYLRASNLAHIPAQLEWNATKRGVTATKVKSGYSSQECHVCHYVDRKNRPNQQTFCCRVCGHTAHADTNAAQVRRFGVH

SEQ ID NO: 27477 - protein, 482 aa, Ktedonobacter sp.
MEQTPGRSARSTSLGKLEIGRAAFAPLSKVNNMRQIITAKLKLITSPEQFEALGHTQLAYRDALNAVSQYAFEQSKTSSVTRLHKGMYAELRARYHLPSQLACSVERQVAATYKGLWTKLKKNAEHRRAKITKKRFKGLDQPPHYSSPTVQYTYERDYTFQRESRVSVSTLNGRISLPYQGYDKHIALIRQGARIGDAKLWYDQARKTFYLLVSLSIEVPEPRADHLQEVVGVDVGIRYLAVTSTSTGKASFHPGKRVRHQANHYARLRKRLQQKGTRGAKRRLRRIEQRERRLKLHANHTLAKQIVEQHPHTLLGLEDLTHIRERTRRRKRKRKKNGKGYEPVSVKARKANRVYSQWSFAQLHTLISYKAALAGSLAIKVDANDTSKACPMCGHTAKENRPRKGLLFVCQQCHYCLHADLVGARNITMRALLVRQDWNRTGCLSIIPDASDREAKAARLRRYAELRWSPEVTNKPPVRDLR

SEQ ID NO: 27478 - protein, 339 aa, Ktedonobacter sp.
VTRKRYKGLDQAPQYLSPTLTYNYQHDYGFKHEQQVSILTLSGRVIVPYSGYGKHVALIAQGARIAAAKLWYDQARKRFYLLVFLQIELLEPTFEQYKQLVGVDVGIRYLAVTSTATGDTCFFSGKQSKQRVNHYARMRKRLQHKGTRGSKRSIRRIERRERRLKRQANHHIARQIVTTYQEALIGLEDLTGIRERTKVHKRKRKKGSKGTEPATPKMRRANRVRSQCSFAELHALIAYKAALAGSLAIKVEAQYTSQAWPKCGYTHEDNRPNKGLVFHCGKCHYELHADLVGARNQVMRTLYLRQDWGKMGQLSVAPDTSDREAKAERLRRYSESRWS

SEQ ID NO: 27479 - protein, 390 aa, Ktedonobacter sp.
MKQKRAFKYRVYPTPEQQQILAQTFGCCRFVYNWALRKKTDAYYNDHQRLYYKELSILLTDLKKQEETHWLNEVSSVPLQQALRHLDKAFLNFFEGRAKYPTFHKKRNTQSATYTANAFTWRNGSLTLAKMSEPLQIVWSRPLPNEAIPSSVTITKDCADRYFISLLVEEEIAHLPCNEKAIGADLGLKSFVVLSTGEVVGNPRFFHKDEKKLAKAQRRHAKKKKGSKNRDKARLKVARIHACIADRRRDFLHKLSTRLIRENQTMCVESLQVKNMVKHPTLSKAISDVGWSEFVSQLEYKADWYGRNLVKIDKWYPSSKRCFECGHILTSLPLDIRQWDCPECGIHHDRDINAAKNIVTVGLTVLACGESIRPGRVSSRSGKTQRSRKP

SEQ ID NO: 27480 - protein, 387 aa, Ktedonobacter sp.
MIKTHKIRLYPTPEQAHYFARAAGTSRFAWNWALAEWNRQYEAGEKPTALKLKKQFNEIRRVQFPWTWEVTKNASDQPFLDLGKAFTAFFEGRARRPKFKSKKTSKPSFYLANDQFELGDHRMWIPKLGWVNLAEKLRFQGNVTGARLTRQADWWFVSIQVEIPDTIAVKKPAAVGIDVGLNRLTTLSTGEEVENQAFLKTTLKKLRQANKRLHRRKLGSKNREKARRLVARLHYRITCLRQDVLQKLTTRLTDSYGIIGVEDLHLKGLLKNRRLARSFADASLGTLRRLLEAKAAQRGGQIIKVGRFFPSSKTCHCCGWTWEAMTLKDRIFVCQNSACPYDQFPQDRDHNAGQNVLREALRLIGLLDQAVSGTGSDEDANLPADAG

SEQ ID NO: 27481 - protein, 387 aa, Ktedonobacter sp.
VQGQLARRVRWGGCGNVHAERDVTRRVLTQSLQERREMYKYTGKGTTYNAQAMQLPEIKQIRQEYKDIHSQVLQDVLRRVDKAFKDFFRRVKAGVTPGYPRFQGRNHYDSFTYPQTGYSIENGRLALSKIGHVKIKLHRKVLGAIQTCTIKREGGCWYVCFSCEVGRVPRTPYTDETVGIDLGVSKLATLSTGDVIENPRYYRKAERKLEKAQQALSRKKRGSNRRKKAVERVAKLHRKVRNQRNGSLHQWSCRLVNTYETIVFEDIAPANLSRRAKPKQDEETGHYLPNGASAKSGLNKSIMDAGWSQFIAFCEYKAANAGTVQVVRVDPRYTSQGCSSCGTVRKKELSERWHSCECGCELDRDHNAARNIKALWLGRSHQEAQAS

SEQ ID NO: 27482 - protein, 263 aa, Ktedonobacter sp.
MIRAHKIRLHPTKEQHVYLAKAAGVARFVWNWALAEWNRQYEAGEKSTALKLKKHFNEIRREQFPWTWEVTKNASDQPFLDLGKAFTAFFEGKACHPKFKSKKRSKPSFYLANDQFELGDHRIWVPKLGWVNMAENLRFAGKVTGARITKTADWWFVSIQVEMPDEIPVKKPAAVGIDVGLNRLATLSTGEEVENQAFLKTALGKLRRANKRLHRRKPGSNNREQARRQVARLHYRIGCLREDALQKLTPDWRTVMGSWEWKP

SEQ ID NO: 27483 - protein, 459 aa, Mycobacterium sp.
MARLKVPEGWCVQAFRFTLNPTQTQAASLARHFGARRKAFNWTVTALKADIKAWRADGTESAKPSLRVLRKRWNTVKDQVCVNAQTGQVWWPECSKEAYADGIAGAVDAYWNWQSCRAGKRAGKTVGVPRFKKKGRDADRVCFTTGAMRVEPDRRHLTLPVIGTIRTYENTRRVERLIAKGRARVLAITVRRNGTRLDASVRVLVQRPQQRRVALPDSRVGVDVGVRRLATVADAEGTVLEQVPNPRPLDAALRGLRRVSRARSRCTKGSRRYCERTTELSRLHRRVNDVRTHHLHVLTTRLAKTHGRIVVEGLDAAGMLRQKGLPGARARRRALSDAALATPRRHLSYKTGWYGSSLGVADRWFPSSKTCHACRHVQDIGWDEQWQCDGCSITHQRDDNAAINLARYEEPPSVVGPVGAAVKRGADRKTGPGPAGGREARKATGHPAGEQPRDGVQVK

SEQ ID NO: 27484 - protein, 298 aa, unknown
  TnpB Polypeptide
VADRLDKSYKAFFRRVKSGETAGFPRFKGYNQYNSFCFAQSGFSLATGCVKLSKIGVVRLKLHREMQGKVKTCTIKKTTSGSWLITFACEIEASSFPVLETSVGIDVGLTNFAIFSDGKSIENPRFFKKEAAALAKAQKKLAKEKKGTVKRKQKRIVVAKIHRRIANKRKNFCHQESKKIIDNYQYICIEDLNIKKMVENGFLAKSIADASWGLFRQHLTYKAEYAGRKLGVVNPAYTSQTCSNCKNVEAKKLSQRKHSCILCGYQDSRDGNASKNILALGLDGQQETARSSRLQARE

SEQ ID NO: 27485 - protein, 440 aa, unknown
  TnpB Polypeptide
MSRQAYRYALDLSDRQRGLLASHAGSARYAWNWGLRLVVDAVAAHKAGDTSASIPSAISLHRAWNAWKKGEDGIAWWTQVSKCAPQEAFRDLESGLHAFWESRAGRRPGPRVRFPRFKKKGRCRDSFRQTGAIHVEARHVRLPRLGRLRLCEEAAPVLARIQAGQAHISAATVSRVAQRWYVSFAVEVERAQPASNGHLDTVGVDLGVLALATLSTGEVVQGPRALGSGLRRLRRLNRRHSRCQRGSANRRRASRRLARHHARVAALRRDHLHKLTTMLAKSHGRIVIEDLNVRGMLGNRRLARRLSDAGFGELRRMLEYKCRWYGAELVVASRWYPSSKTCSQCGAIRADLSLRDRIFRCPDCGLELDRDLNAAINLAGWAHPVVAGSALETENACLSGGKTAPGAARHVEAGTEQQRASDSEPTGLTGGRWSRTPICP

SEQ ID NO: 27486 - protein, 399 aa, unknown
  TnpB Polypeptide
MLKAIKIRLYPSDNQINYINKLLGTSRFIYNQCLNYKITEYQSNKKSTSFAETGKFLTSLKSEYEWIKESHSKVLQQSLINLDRAYKNFFKQGNGYPKFKSKHEKQSCRFPIDAISGVSGNRINIINALKDMNYKCSIDDERYLNQNKNKIKSGTLSKTKSGDYYFSILIDRPNKTLKKATNSLIGLDLGIKDFIITSEGQTYENLKSKRNNHNKLSRQHRDLSRKVKGSNHQKEARIRLAKTYEKLNNIKEYYLHHVTNQLLSENQTIVIEDLNVAGMLKNHCLARSIQELSLSRFKTMLMYKAEWYGREVIQVSRWFPSSKLCNCCGYKNVELTLKDREWTCPECGVIHDRDINAAINIRNEGERIKIGLSSPELTHQEIKPVGHRRMMKEIVDHII

SEQ ID NO: 27487 - protein, 447 aa, unknown
  TnpB Polypeptide
MHPAVRTYRVPVSLTPEQLRLIDSYRVAQRHSYNWVVSRIKSGEDNVTEYELHRELTVMRRSQEWMRAVPAWIQRAGIKDAFKAHKLSARFGRGRLAYRTRRNHSDISVICALPPRVASDGRSIILPCFGTVRVAGAAPNQLVENDPRSYAFVRTRSGRYVLYVACRVMAPDHAMVPSAMQAVKGIDRGVTEPTVVVTLDGDGNTTAKDSYDTATPFKTGQRQHQKAQSKMSKMNHRSGRCRRLQAILRRRLQKTLRRREYTECIAAKHICVDHDPAVIVLEDLKLGRMTRRGRGRRHMNREMRFVRHRMIEQRIRNRVEMVGIRVESVNPAYTSQTCARCGHMDKNSRATRDMFRCAKCSYVQQADVNAALIIGGHGLPQAPDDENTLDTWQASEGGTPFVRRELDARLGCFVAAGGFHHGGHESQVPAHSHAPTRTRRNNVKAPS

SEQ ID NO: 27488 - protein, 603 aa, unknown
  TnpB Polypeptide
MPWCRLAGSTAGGSLTSKRLREIAAPFVVAGPTGARVRTRLRPDRRDVEVLAALGRYLGSLAGADLTQRCRQGRLDARERARSRRLRKQALTVGSSSRWAGAITRSSEDAFQLAVRNLASERTSLRARITTITVRLAVPVGEKQGRTRGYATQAERFDKQRRLQGLRRRLAEAERRAQTGQVSVCRGGRRLARGRHQLEAAALTLSEWRDRWQATRMFLCADGEADKAWGNETIRWHPAQHWLEIKLPAALVHLANRPHGRYRLSCPVTFTYRGQDVAAQAATGAIRYDISFDPARGRWYLDASWKLPQPPAPRLGRLRQRWVLAADLNAGHLAAQVVDPSGNPAGKPHTIEFELAGLPAITRDARVREAVSRLLGLARDNGCAAIAIENLNFTDARQHGREHVGRRPSRGAAGRRFRRLVAGIPTARFRDRLAQMVANTDIAVVAVDPAYTSIWGAQHWLAALKQASPNATGHHAAALVIGRRALGQRARRRERCAWTRPEDRRRRAADSAVRPTPAPAGLAQPRARKPRTRTAHGQPPLRRKTPTANRAPPGHQVTEDRSPPPTMQGSLAPAWCLGTVDVEAESHRRRHGVAPRLPGVSSR

SEQ ID NO: 27489 - protein, 426 aa, Nitrospirae sp.
MPNRKVTYRLYPNAEQEARLQETRGLHQRLYNTALEERIRVYQETGKGLSFADQCKALTHWRKTIPAWAKLNAQSQQVTLKRLDFAFQQFFRRLKHGKRPGFPRFKSLRRYPGWGYKTHGDGWKLHPGAAGKHGKLYVQGIGMVPFRGKARTPGTPVTCDILHKVGKWYASVTLKIEAIQRERGTEMGAFDWSLMDFLTIATPKGLQTVTNPRHLKNQMAEVKRLGQAVSRKIRMAQRISGKQKGFPVSASLRKAIQQLARLHAKIARSRKDVLHQTSAWLVKRFGALATEALDVKNMVHHGGVRTKGLNREIHDAAPGAFLQMIKTKVEEAGSWYEEAPTREIRPTQRCHACWRVPEEKKTLSDRQHQCPHCGVTCDRDENAARVLLRWLETRLAGLRGSGREPSEVWSGRSFAAMKHETHAIAV

SEQ ID NO: 27490 - protein, 472 aa, unknown
  TnpB Polypeptide
MYEIVNKCGDVCEVFDTSDGVVTSCSVTDLCNLFLNGVFVQGFNYDINQGVFHIDFDDSNYKQSVKNRVERHQVDKSHPYYKMLDNYCFLAKNLYNHANYIHRQDFINGEDYWSYQDLYKHLKSDEDYPDYSNMPTHHTALNVLRRLDKNWKSFFVSIKDYSKNPSKYLGRPKPPKYLSKDGRFVLEIPLENIGSRIINNKLSFNKHFNGFELETHCHEKEGFSGVALVRVVPHKGYLSIEVCYKITRYLKIEKKQSSRIIGIDLGIDNFAAITSNTGMKPVLINGKGLKSINQFYNKMLGKLQTGINMRMTSKISRLTRKRNNKVDDFMHKSSRYIINLCIKNNIDTIVLGYNQGWKQEVNLGKRVNQKFVAIPYYKFIKMLEYKAHDSGIKVIITEESYTSGTSFLDNESPSKGNYNKSRRIHRGLFRSNTGILINADVNASYQIIRKVFGEKFHPIEGIVVCPVRLNVA

SEQ ID NO: 27491 - protein, 383 aa, unknown
  TnpB Polypeptide
MELRSVKILLVPTKKQRQAFYDSAYYSDKIYNEALQWNKDYYATDGKFYSRYDLIRMLPDFKEQNPEYRSVDAYILKAAVTDLRVAFNNRKKSSGFPKFKKIGRSLSFGVRADRLKVFKNTVQIPSMGLVKCKHCHYLTEDKDDEYLSSIQYHNPHIKFDGKYWFLSFGVEVSLIPDEVSDEVIGIDIGIKSTICTSNGISKENINHSRKVKFLERRKKIMQRKVSRKRRLNDNHRGRAKTKNTKKLERKIRIIDRRLHYIREDYNQTITNEIIHMYPKRIMIEDLNVRGMMRNKYLAKSIQEQQFYRIRQLLIEKARNTLAVQIGVVSRWFPSSKKCSRCGSIKKALKLSDRIYVCDNCGLVIDRDYNASLNIRDCKDYKLV

SEQ ID NO: 27492 - protein, 320 aa, unknown
  TnpB Polypeptide
MVARKVRLVPDKAQEQWLKENAGVARFIYNWALSYKIQQYRDYDISVHQSEIMREITDMKYTNDYSWLQGYSSETIKQSVKDMLSAYNNFFRNGNKGFPKFKKRGNCEESFYVRYDCIYSVDNRHIKFPKLDKSIKISEDCFIVKGTIQNPRVSFDGKYWYLAYSFDAEPLTKELTDEILGIDLGIEKLATCSSGVEYRNINKDKNVRRLESRKRRLQRSISRAYIKNKQGNKYIKTNNIEKLEKKVRLIDRKLSNIRKTYIHQVTMEIVKTKPLKIVIEDLNIKGLMKNKFMAKSIQDCLWYFLGSVLVIRQNFMVVYM

SEQ ID NO: 27493 - protein, 512 aa, Escherichia sp.
  misc_feature (98)..(208): Xaa can be any naturally occurring amino acid
VKRLQAFKFQLRPGGQQEYEMRRFAGACRFVFNRALARQNENHEAGNKYIPYGKMASWLVEWKNATETQWLKDSPSQPLQQSLKDLERAYKNFFRKRXXXXXXXXXXXXXXXXXXXXXXXXXXXXXXXXXXXXXXXXXXXXXXXXXXXXXXXXXXXXXXXXXXXXXXXXXXXXXXXXXXXXXXXXXXXXXXXXXXXXXXXXXXXXXXXAFPRFKKRGQNDAFRYPQGVKLDQENSRIFLPKLGWMRYRNSRQVTGVVKNVTVSQSCGTWYISIQTESEVSTPVHPSASMVGLDAGVAKLATLSDGTVFEPVNSFQKNQKKLARLQRQLSRKVKFSNNWQKQKRKIQRLHSRIANIRRDYLHKVTTTVSKNHAMIVIEDLKVSNMSKSAAGTVSQPGRNVRAKSGLNRSILDQGWYEMRRQLEYKQLWRGGQVLAVPPAYTSQRCACCGHTAKENRLSQSKFRCQVCGYTANADVNGARNILAAGHAVLACGEMVQSGRPLKQEPTEMIQATA

SEQ ID NO: 27494 - protein, 462 aa, Hyella sp.
MNHKYYGIISPMVQPNIRSEKWSIVATSHQRKLLEKTVCEFRCKVRGLVGVIYTHWSSVGLLDAKSQIPAVEKLIHQTAKNPNPKYQYFNSRFHKFPSYYRRGAIQFAIGQVSSFVTRYRMWQSGMRNRFDALPPRLNADCGAYPPLYKGQCIKFAEDLKSTAIKVFTGTDWVWITVGLTGHRQRHLDLANKRKSPYLVINQKGCHLSVPFQCKRTKLPEAQSVLAVDLGINTTATVSVVNYDGTVSHREFIHHGRDIDRRDKRLKRISKKASLTGKLHKGFCRSLYRKANNINREIGQKVSSRLVKIARQYGVKYIVFEYLKGWRPKGGKKRSTLKQRFHGWLHRRIVNLTEMKWSELGGKVVFVNPRGTSSHAYDGSGKLRRNQENYEIAVFASGKQYNCDLSASYNIGARFIYQLMSRNGSQDKKGQNSCLSPRSRVTLSMLWRLLPSSIVEQDTTSSR

SEQ ID NO: 27495 - protein, 358 aa, unknown
  TnpB Polypeptide
MFKSCGIARFAYNYGLAKWEEMYKQGLKHSINIIKKEFNNKIKKQEEYKWLYEVSGQVTSRAFDDLNMAYQKFFKGISKKPKFKTKKNSRKSFYVRYDAIKFKDNKVNLEKIGKVGYKSNYNIPQLNKYMNPRCHFDGRYWYLTLGFEQGENKTELNKDLSIGIDLGVKDLAIVNCLDKPIKNINKSKEVKRLKKKLKRLQKQVSRKYEMNKNEKKFVKTKNIVKLEKQIKLIYRKLVNIRDNHIHQTTNKIIKLNPYRVVMEDLNIKGMMKNKHLSKAIQEQCFYEFIRQMKYKCKFNCIEFVQVDRFYPSSKLCSDCGFKKKDLKLSDRIYICDNCGLIIDRDKNASINLSNYKLA

SEQ ID NO: 27496 - protein, 388 aa, unknown
  TnpB Polypeptide
MSKVVAKRAYKYRFYPTEAQASELLRTFGSVRSVDNRALEARTTAWYSQQRRLSYVQTSAMLTEWKHDQDTAWLSEVSSVPLQQALRHLQGAFVAFWSKQAKYPRFKSRRRSRQSAEYTRSAFRWRAGQLTLAKIAGPLPIVWSRPLPDGAEPSTVTVSQDAAGRWFVSILVETSIRQLPTISGSVGIDAGISSLVTLSTGEKILNPRYERQDRARLARAHRNLARKAIGSNNSAKARRTVARVYARIADRRRDMLHKLSTRLVRENQVVVIEDLQVRNLLGNHNLARAISDASWAELRSMLAYKCQWYGRDLVVIDRWYPSSRTCSACGAIAEVMALSVRQWTCRCGARHDRDVNAAKTIRAAGLAVLACGDGVRPARAQAREGDCR

SEQ ID NO: 27497 - protein, 360 aa, unknown
  TnpB Polypeptide
MEEYAETGKSSNAIGLHRQLNALKRTDFPWMYEVSKCAPQEALRDLDRAFKNFFEGRARYPKFRSRKRGICGFRLTGSIAVFHDSIQLPRIGRVRLKEKDYLPTEGVHILSATVSEKAGRWFVSIQVEEEIEVPTNTDRPAIGVDMGISKLATVSDGTIIENPQALARFERKKKRLQRSLSRKMKGSVNRLDAKMRLAKCEFRIASIRRDARHKATTMLARTKSVIGVESLNVVRLLKNHRTAKQLADAGIGEFLRQLEYKTKWNGGAVVAADPFFPSTKRCSDCGTVKDEMPLSERTYKCESCGFEADRDLNAAINLASVAASWAETLNACENGEVHATRQVLPCEAGTERHLGGVLDR

SEQ ID NO: 27498 - protein, 373 aa, unknown
  TnpB Polypeptide
MRLIRSTKVSLKETNPRKLKILEEVFQEYGRIVNLFIELFWENPVKKSKLLKPIVDSVLPTWLSARLRKVAAREALDVIKAAKESAKSLGRTPKKPTHRGSRMCLSSTIASLDLAGKATSYDRWLHLHSIGHHPEFGRVILDLPIKLHKHYNELASIGRRQESYILTSRYVQLSFEIVTEEKLPSDRCIGIDSGIKALASTSTRHQFGKDIEKGIERIKRCKHGSKGQKRARRALRQRMNEVVKELFGTLNPTLIVVEKLRSLNKRTRVKRRLTRNMRRSIGSWTYRYWLERLERECEMRRSRFRSVNPYKTSQRCSVCGHIDRRNRRGEVFKCQSCGHTDNADTNAALNILDRFLTGPYGAGCKPLTLVGAT

SEQ ID NO: 27499 - protein, 329 aa, unknown
  TnpB Polypeptide
LHHEAYPKIRERFPALGAQLACNVIRSVLSAYKTELANHPQQLKQPELKAISFKNPSVHLDKNTITYRDNGTVSLYTLKRRVEATLAPGDRQRLLLASGKRKESNLVLHRGYGKRPDFWELHITIENEVQPVSPSELQTKEVMMGVDVGENNMAAASTGKLWKAGKLKHNRDKKQSLRTRLQRNGSRSAKQHLRKASRRERRHVAHVNHVVSREIVNEAKGKNKKLIILENLTHIRERIKANLRVRARLHRWPFRELQQMIVYKAVQEGMEVMFVDPRYTSQTCAHCGKIGVRKKHHFQCSCGYRAHADLNASRNLLGLGYQLMSQWLQ

SEQ ID NO: 27500 - protein, 372 aa, unknown
  TnpB Polypeptide
MNKAYKFRLYPNKEQETFFAKTFGCVRFVYNKMLAERKEVYEKHKDNKEELKKYKLPTPAKYKTEFEWLKEVDSLALANAQMNLQTAYNNFFRDKNIGFPKFKSKKHDKISYTTNNVNNNIKIENKKIKLPKVGWVKIKQHRPIPDNQIIKSCTISKSPTGKYYISILVKFEQYIKPITPKKENVLGLDMDMKNLYTDSQGIRADYPRFYRETLKKLQREQRKLSKMQKGSNNRNKQRIKVAKLHEKVANCRKDFLHKKARELADKYDVIAIEDLNMKAISQTLHLGKSVADNAWGMFSTFLQYKLEDLGKQLIKIDKWFPSSKTCNECGYINQELQLSDREWICKSCGNIIDRDYNAAKNIRDEGIRIIFA

SEQ ID NO: 27501 - protein, 387 aa, Escherichia sp.
VKRLQAFKFQLRPGDQQECEMRRFAGACRFVFNRALARQNENHEAGNKYIPYGKMASWLVEWKNATETQWLKDSPSQPLQQSLKDLERAYKNFFQKRAAFPRFKKRGQNDAFRYPQGVKLDQENSRIFLPKLGWMRYRNSRQVTGVVKNVTVSQSSGKWYISIQTESEVSTPVHPSASMVGLDAGVAKLATLSDGTVFEPVNSLQKNQKKLARLQRQLSRKVKFSNNWQKQKCKIQRLHSRIANIRRDYLHKVTTTVSKNHAMIVIEDLKVSNMSKSAAGTVSQPGRNVRAKSGLNRPILDQGWYEMRRQLEYKQLWSGGQVLAVPPAYTSQRCACCGHTAKENRLSQSKFRCQVCGYTANADVNGARNILAAGHAVLACGGCQQTG

SEQ ID NO: 27502 - protein, 399 aa, unknown
  TnpB Polypeptide
MGDVRAYKFRLYPNKQQRGQMQTHLYLSKNLWNDGLELAKQLYQDYQKFPTRSTYQEISKNSGLSSQVAQDVFIRLDLALKAKIRRKKTGLKGGFPRFKSINRVKSLHYLQFGFSLNTGKKKLKVSPFGEINIKLHRSVEGTIKTLTLKRESSGKWYAIFTVEAETNPIQNNSGSQVGLDLGLINFAVLSDGTTVKNPRHLRKYEDILKKKQQDLSFKKKGGKNRIKAKRKLAILHERVRNTRKDFLHKLSRQLVHSHSLIALEDLASQEMAEKRFGKSINDVGWSIFTNILSYKAEEAGCEVLFVNPKNTSKDCSRCGVEVSKELHERQHNCPSCGLSIDRDLNAAINILNRCLKAKLSDRQETKFPGATAGIAGSNACEDGIKVSSVKQEAHAFMRG

SEQ ID NO: 27503 - protein, 516 aa, unknown
  TnpB Polypeptide
MLQRTYGTRLPVGVVQDAVLDGYARLFGRAERTLFARLQAGEPLAALKRAFLVRFGLTARQFNALTATLQGKIAGIRAARPRVMRQLERRLRRARAVLRQTPDGTNAYHQKPRRMAILEHRLAQLRADEAGGRVRLCFGSRKLFRRQYALAENGYRSHADWLREWRAARAHQFLVLGSKDETSGCQGCVATVDPQGAVSLRLRLPNALAAEHEQYLRIPDLRFPYGHEAVVAAVGRTRAPNAATREALSWRFLRDAKGWRVLATVSVPPGAQRSVDGIGVVAVDLNATHVAVTDVDRFGNPVGAFSVPCATRGKTRPQAQALIGDAVRQVMTFACAQQKPLVAERLDFERKKAALEGRGRRYARRLSAFAYATFYAVLHARCYDAGIALHPVNPAYTSVIGTSKFMERYGLSRHHAAALCIGRRVMHLSERPNRRLGAHGTVPLPARTRGAHVWAFWRQVARQAAAPRVRGRAGALSRSSPAPAPRSRRGTARRGTRCSSAAGGLPARESVYSAVR

SEQ ID NO: 27504 - protein, 405 aa, unknown
  TnpB Polypeptide
MTQVLTVSCKLKVSQSQAAKLDATMDAFVQALNWVNQNTPEKVVNAVKLQSLCYYQIRARFGLSSNLAQQVCRRLAGARKVAQQKNRPVKAFKGGFATYDARIFSFREKDWTVSLTTVEGRERFELAIGRYQREQLAGSNPKSATLVKRKDGSYSIQICVETEPCPPQGTDRVLGVDLGRTDIAHTSEGDNWNGQQLNKVRDHHSRLRAVLQRKASKGTRSSRRRCRQLLQRLSGKERRFQAWVNQRPPVRLRERISKAIVSRAKATNSAIALEDLTGIRERVNQQPRSKTERRRANSWAFYQLRQFLEYKALRAGVALILVPPAYTSQTCHRCLHIHPDPAQSYRSGKKFKCGHCGWEGDADLNGANVIALLGAAVNQPRGSWLACQLQGYRKPALYCEAVRVG

SEQ ID NO: 27505 - protein, 283 aa, Streptomyces sp.
VAAVVAAHRRVTRPEVAVGIDLGVKTLAVLADSTGEIRTIANPRHLDTALRHLRRASHVVSRRRGPDRRTGQKPSKRWEKATTRRNKVHHWVANLRTDALHKLTTAVTAEFGTVVVEDLNVAGMLRNRCLARRIADAGFGEIRRQLTYKTRRNGCRVVAAGRWFPSSKTCSGCGAVKAKLPLHVRTYECDACGLVIDRDDNAARNLAALAATTAPTAPTAPTGTGVARPGHRQGVEASWSRPQDPHHPPPPHDGAGRRRNPAALAADRNERPYSSPSPQASVT

SEQ ID NO: 27506 - protein, 406 aa, unknown
  TnpB Polypeptide
VLHKAIKVRLYPTPEQEILLAQHFGCARWWWNYGLNKSIETYKETGKGLGRSALNALLPKLKKAEDTVWLSECYSQVLQAVTLNLTTAYKNFFDSRARFPRLKSKHGRQSIQYPQNVKVENGAVKLPGKIGTVKAKIHRTIEGTIKTVTVSKDPSGKYYASVLTEIEGHNPQVSTNGNVVGVDLGLKHFAVVSDGSKVSKFDNPKHLAKHERNLKRQQQKLAKKQKGSKSRHKYRKVVARVYERVSNSRQDFLHKLTRSLVNENQVVVVENLHIKGMVRNHNLAKAISDAGWGTFTNFLAYKLEKKGGKLVEIDRWFPSSKLCSNCYHQVDEILLEVREWTCPHCGTHHDRDGNAATNIRAEGIRMLKADGTAVSADGGEVRPHSGRKSVLRHSPLMLEACILASS

SEQ ID NO: 27507 - protein, 411 aa, Streptomyces sp.
MGMQLRYSFRVYPTASQCSSLARAFGCARVVFNDALRVREEARAAGLPFVTAADLSKRLTAAKKTPDRAWLGEVSSVVLQQSLRDLETSYRNFFDGLKGKRPKMGAPRFKSRRDNRQSIRFTANAGWKITMGGKLRLPKVGDVSVKWSRALPSTPSTVTVVKDASGRYFASFVVETDPAADLLPQRTGAVGIDLGLTHFAILSDGTKIDSPKFLRRAEKKLKRAQQSLSRKAKGSSNRDKARLKVARQHARVADARREFHHQLSTKVIRENQAVAVEDLAVKGLARTRMAKSVHDAGWSAFVTMLEYKAIKMGRTFKRIGRFEPTSQVCSQCGVKDGPKPLNVREWTCGACGAVLDRDVNAAVNVAKAAGLAVSACGARVRPGLVPAQRGEAGTHPKGRRTTADQAGTSTL

SEQ ID NO: 27508 - protein, 246 aa, Streptomyces sp.
MTVGPASATPTRSAPAGTPCWRCCGSTFFLTATIDLAEPPVSEPTGWVGVDLGIVNIATTSDGRIMSGRRVDRYRKRMRATVATLQAKKTKSAKRRLKALRRRESRFATDINHRISKTIATTAERTSRGIALEDLKGIRRRVTAKKDQRYRLHSWAFAQLGSFVEYKARRAGVAVVRVDPRNTSRQCSQCWHTHRTNRVSQSWFACRSCGSVMNADLNGSRNIAHRADAVWQRGAVTSPSTVRRHA

SEQ ID NO: 27509 - protein, 398 aa, unknown
  TnpB Polypeptide
MKLVEKHKIYKTHPAYSKLDHMSRKANNLYNQCVYFAKHSEDLSEDLKTLDKVMKSFPDEHDNYRSLGYAACSQQIIRLFHQNLRSYFASIKDYKKNPTKYSGMPRFPKFRKSGERFQVIFTNQAAKLDGQTIIIASKTFENKLSIRLRTNSVKKLCQVTFVPRNDYFLVYVIYESDDPVISQDSTKVAAIDIGLTNLATVTFSEKYEPILYRSDLMKINKVFNRLNAEYISILMKTQNKYTSKRRNRLSEKYAGLIEDRLHKISRAIVNDLSQRGVSTLVVGKNTGQKIGNKLKNFVQVPLFRLIEMIKYKAELAGITFIQVEESYTSGTSFLDNELPTKTFYNKERRKFRGLFISNGLKRINADVNASFQIMKKVYEKFTYDTFVKYANPIVKTIC

SEQ ID NO: 27510 - protein, 534 aa, Thermodesulfobacterium sp.
METNSLILSYELTLPQRIYPKLDRLFSVFKWEVRDLISELWNEEGFKLLKEKNSACSILKSIIERPPGIPSRVYRNILELSGQIIRSHLERKRIFDYIIEKPCRVLCDEKDIAKDLNTSSLFVLNVQNQIKNFLQKEKEKKDYFSVIEPNFSGNVIITSADDNLEKGQFRRLKIEGNKITFEIKVPTFEGWEWIKVKKFIPDRLKKVLSRAKDIKAPLIKRVFLKSGFTIYRLVIPVEIEVKVEERIERVFAIDLSPSEKRLGVGVVVSESGYSKPVFFSAYKKIKKLERLYREISNLERKIDNIGDQIHGTLKREHRERLYQRLEHLFEEQKLRWRKFKELREQILEIFVNFVIEHARGYCCDAIVIEKLEFKGLPAWNNKRFRRLFSLWFYSRFSKRLEHKALRNGLRVIKVDSCGNSKICHVCGSEGKVNKLEFYCLRCQRRFDRDYNGAVNIGIKALRVCRTKPKPYKGKGIPGRVPFPQVPTHSILPFKFKALLFTISFLKLLSYLRVVETSYLKFGRLTGLVGSDKYG

SEQ ID NO: 27511 - protein, 402 aa, unknown
  TnpB Polypeptide
VKRLQAFKFQLRPGGQQEREMRRFAGACRFVFNRALARQNENHEAGNKYIPYGKMASWLVEWKNATETQWLKDAPSQPLQQSLKDLERAYKNFFQNRAAFPRFKKRGQNDVFRYPQGVKLDQENSRIFLPKLGWMRYRNSRQVTGVVKNVTVSQSCGKWYISIQTESEVSTPVHPSASMVGLDAGVAKLATLSDGTVFEPVNSFQKNQKKLARLQRQLSRKVKFSNNWQKQKRKIQRLHSCIANIRRDYLHKVTTTVSKNHAMIVIEDLKVSNMSKSAAGTVSQPGRNVRAKSGLNRSILDQGWYEMRRQLAYKQLWRGGQVLAVPPAYTSQRCACCGHTAKENRLSQSKFRCQVCGYTANADVNGARNILAAGHAVLACGEMVQSGRPLKQEPTEMIQATA

SEQ ID NO: 27512 - protein, 359 aa, unknown
  TnpB Polypeptide
MKIIAQLQLQPTDAQADALKRTLAAANSACDYVSEIAWSQKVFKKFDLQKLCYTAIRDTYKLSAQLAIRVIAKTADAYKLDKRTKRVFKPLGSIAYDDRILSYALPGRKISIWTLDGRLSIPFVAGERQLAMLATRMGETDLVFHRGEWYLLATCEVSEPDPSDVDGVLGIDLGMVMLATDSDGESHTGESVEKHRQRHARVRAELQSKDTKSAKRKLKQISGKQQRFQKDVNHCISKRIVAKAERTKRAIALEDLKGIRQRARVSGPEQRARHSNWAFAQLRQYISYKAHLAGIPVILVDPAYTSRTCAVCGCNEKSNRKSQAQFLCVRCGHADNADRNAAINISRAAVIQPIVSKAA

SEQ ID NO: 27513 - protein, 287 aa, Streptomyces sp.
VSGSASPAASILEDRHAAAVADRQAGRVRVVRGGKRLLNTRHHLTQAQLTEDQWRERWFLAADGESGKRFGNETIRVTPDGEVSIKLPAPLAHLANTQHGRYTLTSHIAFVHRGQEWADRIEANRAVAYRIHLDTQRGRWYLTASWQRPLVQTIPLETARARGMIGVDANADHFAAYRHGNPAGEPHRFGYDLSGTAGHRDAQIRHALTRLINWAQRVGVAAIGIEDLDFTPEKTREKHGSRKRFRQLISGMPTGKLKARLVSMAAEQGLAIAAVDPAYTSMWGSQH

SEQ ID NO: 27514 - protein, 353 aa, unknown
  TnpB Polypeptide
MKARKTTKAKILEMRKGKEELLKREYGNWQRYLRGDKNVPLYSATKQQAERFLKRLKGKVKPNKEYPLILRRDVYKADTKLTPYWLKIPIHGVRGGINVPIKTHEPLTEDMVCREAKILRKGDEWFVYITVEKEVEERNPKSILAIDLGIKWIATTVNSNNPKPKFYGKELRRAKGRYFYLRRTLALKKAYKTIKKIGHKERRVVNDILHKISRAIVNEALENDSMIVFGDLKGIRRKGKVRKFNRKLNNGFPYYKLSKFIEYKARWLGIKVIKVSERNTSKLCHKCGAKGIRVGSSFKCPYCGYSCNADYNGAINILKRGMSYMLMLGGALTHPELGMMKPQAEEPRISLLK

SEQ ID NO: 27515 - protein, 383 aa, unknown
  TnpB Polypeptide
MLVKRGYKAEIDLNNEQRTLCMKHAGAARWAYNYALTRRRENYKAGLHTPYAAQLHREINILKQSTPWMYEVSKCAFQEGLRDADDGFKHFFCKCRLKKEGKWKGKCGYPKYKSRKKQIGSARFTGTIHVYPEAIQLPRLGPLRLKEHGYLPRNIKIGSATISEHGGRWFVSICIHEEMGEPTQATGEAIGVDLGIKMLATLSDGRTFDNPKALRKKITALKRASRQHSRKKKGSNNRKKAKQKLARVHVRIANVRKDALHKATSAIVARTKHDRERPSCIVLEDLNVSGMLKNHKLARACAEVGLYEFKRQVLYKAAFAGVEVKLASRWYPSSKTCHACGWVKEDLTLADRVFVCEDCGNVTDRDYNAAKNLAALAIRIELP

SEQ ID NO: 27516 - protein, 409 aa, unknown
  TnpB Polypeptide
MYLTVTQQIRHLSDSDCQTIRELCHYAKNLTNEAIYNVRQVFQNEGKILKYADNYALLKNSTNYKALNSNMAQQIIKEVDSSFKSFFGLLKLAKKNQYPFQACRLPCYLPKNGYSTLIIGFVRLNGNKLILPFSNEFKKTHDSVEITIPPILADKKVKEIKIIPKSHGKFFEIQYTYEVECIERNLDKSHVLALDLGINNLVAAVSSDGKSFIIDGKKLKSVNQWFNRENARLKAINDKQHFGKHTTNRQKAIARKRNNQVNDYLNKAARLVIDYCIENNIGTLVVGCHEITPKSGDKSDNAKQNFVVIPLGKLRTKLEYLCKLNHIDFVKQEESYTSQASFWDKDDISSQAYFSGQRLHRGLYRTADGQQFNADINGALNILRKSNVVSLETLYSRGAVDTPARIRVT

SEQ ID NO: 27517 - protein, 393 aa, unknown
  TnpB Polypeptide
MLKAVKSIKQKISYNQDLESMMETFRNMTNHCIRIGIKNNCSTLKRLSMLSYHELDYNILSSYKLNAISQACGVLSKYRKEIKKNPDAKIPYISRPFIVNCYGFKINGSLISIPFKPHNPINILLNNHTQDILSDPALKVCSFTITAFNISICISKDIEQMKCTKIVGIDRNLRNVTVGNNELVTVYKTNKLLSIKQNTIHARAGFKRNDNRLKQKFWQEKNQRLQNRTKQFIHKISKQIVSNAVETKSMIAFEDLKGIRKLYRKGNGQGNKFRKKLNGWQFYELQRQVEYKALWSGIPVVFVDPKRTSKLCPICGERIQEDTGRKLLCINCGKSMDRDVIASMNIAHKAWSRFNHARVDTVEAKCSAFEEPMTESYNNVVIRIVDVSKSGSR

SEQ ID NO: 27518 - protein, 256 aa, Anaerolineae sp.
VTWCRYICQTTNTYDAQKRFWVRLVFETTTPETQVENGIQGLDRGLYHLVSTSDGQFLSGNKVRAVQRRYLHNRKKLQQKGTLCAKRRLKAMSGREKRFMRDKNHCLSKQLARQHPKGASCGAPQFTTFVLEDLSGIRAKRRGKKLNKWLSSWTFHQFEMFLGYKAETLGKRVVFVDPRYTSQKCNRCSHTAKANRCKSRFHCKACNFKTHADTNASMNIRDNYIISSAFGSGEQGTVNCPHVSEIASRDKPLALC

SEQ ID NO: 27519 - protein, 404 aa, Mycobacterium sp.
MQMRYRYRIEPTPAQQAMLARVFGCTRVVFNDALRVRDEAYRAGMKLSDSEIQRRVITTAKTTEERAWLCEVPSVALVQSVNDSRRAWRNFFDSATGKRKGRRVGRPRFKSRKHHRQSFRLTRNGFSIRDNGRLFVAKVGEVAVRWSRELPSTPSSVTIIREPDGHFYASFVVEVTATPLPVVDREVGVDVGIARLATTAATDGQRVDVANPKQLGRKLRKLARLEREKSRRQKGSANRDKSRRKVAIAHNQVARARRDYHHKQALALVRDNQVIHVEDLNIAGMVRNRRLARAISDAGWGQFVKVISEKAEHYGRTVHTVSRWLASSKTCSMPDCGHVLDELPLQIRTWRCPACQATHDRDYNAAKNILAAGRAERLNACGAHVRPQPVAAVGDEAGSTPTAA

SEQ ID NO: 27520 - protein, 245 aa, unknown
  TnpB Polypeptide
VSILVDNGADLPSKPVIDPDKTVGIDVGIKDFAVLSNGDVYRNPKHLENSTVRLKVLQRRLARKQKGSARRNKARLAVASIHERIHNQRQDYLHKVSSKIVRENQTIVIEDLNISGMMKNHRLANSIASVSWSEFFRMLQYKSDWYGRNLIRIGRFDPSSRMCECGYIHRDLRLSDREWVCPECGAVNDRDLLAARNIKKFGLEKTNLIGQTKDISPVVNRVGDVEPSTLVGATKRQVISVQTGI

SEQ ID NO: 27521 - protein, 545 aa, Streptomyces sp.
LGGGDRVRRKVQLGEGETGRVACASASAFRGLDTVTGEVLGADALSERVGWLTALVESMCAEVTGARWNRPDLARLASGRDLSGQRLPSHAWMAMRMLGWAASAPEGVYVPDRVRRIAEEQAGRALRSAWWRTQITDAVLATWPTGPDADPIRRTGAEWEALRAACPDGQAVAASILRARTRQAAAFHAARGRLPADICELEAAPGGGRQVVLAAADKQLATLARCEDDPARYAVLTVRLPVRPDPRTRGDWHPVVIRFRLPPTIPLTAALHAPTLRLRGGRLCLDVAHTTAVPQARRDGHVRAVAFDYGLNTLLTGGTLTLTGGVQPHVLTDARPVFLRVDGVLAKVDRLRIQAEQVWARAAHLQTLTDGHAARGRRPDPLTAAKLAVLRTEHARLGRKRGRLNEQLAQTAARFMVGHARAVRASVIYLEDLRDMEARGKGRTLNTRLSQSVRGQIVTHTRHQAAKYGIAVVIVPARGTSRYCPACLTAFRHRAAPDRTTPGWKWAICPNAACGYSADRDVAAWQRIGARGLRHQHLTVLDRAS

SEQ ID NO: 27522 - protein, 680 aa, Streptomyces sp.
VACASASAFRGLDTVTGEVLGADALSERVGWLTALVESMCAEVTGARWNRPDLARLASGRDLSGQRLPSHAWMAMRMLGWAASAPEGVYVPDRVRRIAEEQAGRALRSAWWRTQITDAVLATWPTGPDADPIRRTGAEWEALRAACPDGQAVAASILRARTRQAAAFHAARGRLPADICELEAAPGGGRQVVLAAADKQLATLARCEDDPARYAVLTVRLPVRPDPRTRGDWHPVVIRFRLPPTIPLTAALHAPTLRLRGGRLCLDVAHTTAVPQARRDGHVRAVAFDYGLNTLLTGGTLTLTGGVQPHVLTDARPVFLRVDGVLAKVDRLRIQAEQVWARAAHLQTLTDGHAARGRRPDPLTAAKLAVLRTEHARLGRKRGRLNEQLAQTAARFMVGHARAVRASVIYLEDLRDMEARGKGRTLNTRLSQSVRGQIVTHTRHQAAKYGIAVVIVPARGTSRYCPACLTAFRHRAAPDRTTPGWKWAICPNAACGYSADRDVAAWQRIGARGLRHQHLTVLDRASDTYVIRRTVEELDQPVRHTTQPGPATPAEPQQQPASAADRTKAGPTRNRPVPRKRRRVPAPPGTSAAAGPGGKRPAGRMPQPPTRRTQRRRRRQAPHTMSTPTRHQPRGARLGAGFHLHTHATPHHTDGMGDSRSLFSTGTGPKTQPHAGKPKLI

SEQ ID NO: 27523 - protein, 425 aa, unknown
  TnpB Polypeptide
MTSITLVAESKLYLKDNIPLYDYFDDYSKLFNFLVRRCVHHLKNKLNGELESWYRTNLMLNFDITNRMANAVMRTAKNQLKLLKESARYQYNNLYKRRRSLYKKIAKLKAILSSSSATLKQRKLAKLRLFWNQMRLNKVNQLIDNGLKLHLTFGTKHLLKINKEKFLAKRDNQVVYIGSKYETCGNLQFQVSFNSKYNRFEYKLRLDNQWLSTTGKYIYGSFVLKNKEAKDHILKTLSEKKSNPLTYRIVKHDDNLYLQIMYRRETTDVTRSNYGVLGVDFNKGFISVSEIDSDGKLQSLTRYNYLHQGKATKTKNSMLDLVSQLVTQAVSLGKDIVIEDLVSLDSNKKQEKTTSKDYNRMINSLKFGLFKRCLLSKATKEGVSIHVVTPYNTSKIAKVNYTDSMKLNVHDAASYVIARRFYQYD

SEQ ID NO: 27524 - protein, 391 aa, unknown
  TnpB Polypeptide
MRHSSFQLLEFWGILISMKLTAQIKLAPSDQQRALLKATLERANAACQAISDYAWANQVFNQLALHKALYAGLREQFGLAAQMVVRCLGKVADSYKADKKTRRTFKEHGAIPYDSRILNYRQQTETVSIWTVAGRQEIPYQCGERQRELLKHQQGESDLWYTGGAFYLLATCELEEPTPEQVERFLGIDGGIVNLATDSDGEVHRASHVNHVRYRHRRLRRKLQRKGTKSARRLLRKLSGQEQRFAKDTNHCISKRIVTKAQDTQRGIALEDLSGLRDRVTVRRRQRVTLHSWSFDDLQQKIRYKARRAGIPVVWVDPRHTSRTCPLCGCADKHNRPSQSRFRCVACGFAGLADHIAAVNISRRASVNRPYASDAQPIVQRQGQAPRFIRE

SEQ ID NO: 27525 - protein, 356 aa, unknown
  TnpB Polypeptide
MYRTLKIKLDKSNELLQTARIWNAACQDVIDYGFAVHDYNKTRLNKATYQDLREKYPTLPSALIQTARDQASDMLKRFKFETRPFKHQLGAVRFDARTMKVFLESGYCKLTTVFGRLRYDFQLAAYYQKYATWRISNAQLKIAKNACYLHVQVEQPEPELTTGDNRLGVDLGINNIAVCSDNTFWKSGPVKATKGKYQYLRSKLQSRGTRSAKRKLQMLSGRERRFQRDVNHQIANWIVSKPYDVIALEDLTNIRNGKKNKKLGKWSFSELRGFVEYKAAAIGKKVVAINPRYTSLTCSKCGFKKKENRDGKTFNCKSCGFQIDADLNASRNIAAFSRSDRSRLQCQPAKRDTIST

SEQ ID NO: 27526 - protein, 247 aa, unknown
  TnpB Polypeptide
LKGTVSRSIVQINCINTWFSFHKHREIVGDIKTITIKRDRCGDYWICFSCDNVNTPKPFAKTGKSAGFDFGMKTFLTSSDGEKLVSPQFLKKSLNKLRTLNKSLRRKIKGSGNWYRAKRALSRQYRKIARQREDWHWKLATDLCSRFDTLCFETLNIDGMKRLWGRKVSDLAFYQFIQCLDFKCAKHDKSFILIGQWTSTTKPCSHCGHKNNNLTLSDRHWICPTCKTEYDRDINAAINIKQAGLAA

SEQ ID NO: 27527 - protein, 392 aa, Lachnospiraceae sp.
MKKLLKSYKTEIHPTPEQIKKINQTIGTCRYIYNFYLAYNQKIYEKEKRFVSGREFSKWLNQVYLKENPEYAWIKEVSSKAVKQSIMNAEAAFKRFFHHQSGFPNFKKKNKSDVKMYFVKTDAKTIILCERHRIKIPTLGWVRIKEKGYLPTNPDTHRIRSGCVSCRAGRYYVSILVEEEEKKKPVLQPFGLGIDLGIKDFMVISDGTVKENINKTQKMKDLERKLKREQRCLSRKYEAYKQRIKKEGEATRQNIEKQRLKVQKLYQKLENIRTDYVNQCVNEMVKTKPSYITIEDLNLSGMMKNKHLSKAIASQKFYECRTKLKRKCNENGIELRMVDRWYPSSKRCHACGFIKTDLKLTEREYRCLCGYHADRDYHASLNLRDADIYKTA

SEQ ID NO: 27528 - protein, 520 aa, Mycobacterium sp.
  misc_feature (85)..(151): Xaa can be any naturally occurring amino acid
  misc_feature (278)..(285): Xaa can be any naturally occurring amino acid
  misc_feature (365)..(433): Xaa can be any naturally occurring amino acid
MARFEVPEGWCVQAFRFTLDPTEDQARALARHFGARRKAYNWAVATLKADIEAWRVTGIGTVKPSLRVLRKRWNTVKDEVCVNAXXXXXXXXXXXXXXXXXXXXXXXXXXXXXXXXXXXXXXXXXXXXXXXXXXXXXXXXXXXXXXXXXXXPDRRHLTLPVVGTVRTHENTRRIERLIATGRARVLAISVRRNGTRLDASVRVLVQRPQQPNVAQPGSRVGVDVGVRRLATVANEAGAVLEEVPNPRPLDAALKELRYASRARSRCTKGSRRYRERTXXXXXXXXRVNDVRTHHLHVLTTRLAQTHGHIVVEGLDAAGMLRQKGLPGARARRRGLSDSALGTPRRHLSYKTGWYGSALVVADRWXXXXXXXXXXXXXXXXXXXXXXXXXXXXXXXXXXXXXXXXXXXXXXXXXXXXXXXXXXXXXXXXXXXXXRLTLPLVVIGIEPGATRTRSDTLNPCEVDIAEVTSRVTKLSLSVSKLPRLLSSTMATSFSTPLLGTAIAAQRPRVISWIVASMSSGE

SEQ ID NO: 27529 - protein, 224 aa, unknown
  TnpB Polypeptide
MKNQACWKDLNAQSSQKVIEELSDAFQSWFDLRQKDDTANPPGYRKHGRRTTAQYGLIQRRRVQTRPRQQPRPTLERFQSQGYWSDFLLCEYQTRPDVDLSEVNSVQNVRAVWNGDEWELHFVCKVKLKTNDSTGNEVAGIDLGITNIATVAFPDEYVLYPGNSIKQDKHYFKRSEYDTEGKTAHLTSRRGHVENLLTARHTFSTFSQTPSSQSVSNVVLERWQ

SEQ ID NO: 27530 - protein, 240 aa, unknown
  TnpB Polypeptide
LIDLPKNRLEKIDREIRRRQKAQARRVRQSGLSAKEYMRGGHRSNRYMQEQKQISRLYRQAHRIIDDFQQQVSHRLVSEYDLIVLEDLNLQGMSRKAKPVPDPLHPGRFLSNGQAAKRGLNHALRSASMGGIRQKLEYKTQRAYASSLLLVNPAYTSQQCNQCGHTCKENRESQAEFHCTKCGLKLNADTNAAINILQRGHQQLISGTDEAGRGNTASDIQDKNIAKDAAALKREPTASH

SEQ ID NO: 27531 - protein, 413 aa, unknown
  TnpB Polypeptide
MMRSQKLRLKLTKEQENKAWWFSKVSRNFWNLLVDIDKRNNKGEFDEILSRNGNRTYYSKFYGREVYHLSQSDYLNLAKIVVAQNYEEDSETWSWYYQRNQSFIYAFLVRELVKIKRQNKGRLNFRSVDKIQPSFNVRCDIFPNKKRPSRIYLKDNGKLQIPTIGDVKFGSTREDFDLSCKKQVATISFDGKYWYLSYMVEIEVQVTDLPDYTEGIGIDLGIKTLATVSDGTIVPNIKTFRRVRILEKRLKRLQRKVSRKYLINKCNKHNKTKNIIRLEREIKLIHRSLRNIRINHIRKFVSELVKKQPQYIAIEDLNVNGMMKNKYLAKDIANCSFYTIREHLIRKAKERHIAVRLVDRFYPSSKTCSNCGSYKKDLKLSQRVYRCANCQEKIDRDFNASLNIARTDRYVLA

SEQ ID NO: 27532 - protein, 399 aa, unknown
  TnpB Polypeptide
MKTIFRTYHFELMPTQEQKTLLDKHFGCIRFVYNHFLNERKEQYQVDKKYDNYYAQAATLTKLKKKEETVWLKEVNSQSLQFSLRCLDTAYVHFFRGTAKFPRFKSRKRKNTFTVPQFAKMDEAKLYIPKFKEGIKVIVHREVKGEIGKCTFSKTLTGKYFVSILSEEQYQPKEKTGAVCGIDLGLKDFAITSDGIKFKNNKYTKQYERKLAKAQKHLSRKTKASNSFEKQRRKTAMIHEKITNSRMDNLHKVSYQLVSDYDIICLEDLNVKGMVKNHKLAKHISDASWGTFVRLLEYKADWNDKQIVKINRWYPSSKTCCECGWINQDLNLSMREWTCKNGHKLDRDLNAAKNILKEGLKIISSGTGDYTGGDLNKTSVKKHKSVKPEAHPIASGVGG

SEQ ID NO: 27533 - protein, 423 aa, Oceanospirillaceae sp.
MDTLKTQKAFRYKLEPNEAQTELLYRMAGCGRVVYNDSLDYLLNILAKKTGIKATDRKALYQHLNDLQPRERIALAKGLPSAYDLNKLLTQWKKKEDRTWLKEAYTDNLQQRNLDLMKGVDAWCKGIRGFPVFRTKRLAHHSTMRFVNFTKYCSVEHKHIKLPNKLGLVRYHNSRPIEGKPRNATVSLNACGEWHISIMCDVKIKLPKHVEGQQTGIDMGIAKNITCSTEICGDGGVFVGVHAYKAYKDKLAREQRKLSRKVKGSANWLKQKAKINRIHRRITHIRNDYLHKATTDISKNHAMVICEALKVNNMSASAKGTADEPGRMVKQKAGLNRSILDQGWGVIRQQLAYKMAWKGGIYGEVAPHYTSQQCSECGHTEKANRTSQSNFTCVACGHTDNADKNAARNILKRYLEPPTKSAA

SEQ ID NO: 27534 - protein, 506 aa, Acidimicrobiaceae sp.
VAFDHCPVAHELRVRTRRQRLVEIPSVIDVLVGYEDPRFGKLGWWWRAVNVTPRADTESVTTAVQERTSTSRTSTTTQAYAFAIDPTPEQANLLRSHIGGSRFAYNTLLCLVKANWDENRQKKVADGEVSKEEYLGTSHFDLLHLWAERRDELAPWWTENGSSTYNDATQRLSRAFVNWRKGKAKFPTFKSRGQGGSVRFTNQAVSLTDSHHVRVSRIGELKTYESTRKLYRHLERGTGKIMAATITERSGRWTISFTVEVQRVMPPTRAPEKIIGVDLGITTLYTGATPMGEHVLDVANPRHLVGAEKKLAHAQRVASRRQGPRKGVAPSKRWKRANARVQMVQASVANSRKNLIHETTTHLAKNYDLIVVEDLNVAGMLKNHSLAKHIADASWGEFVRQLEYKTAWYGSTLVKAGRFYASSKTCSQCQTVKAKLSLDERVFHCKVCGLDIDRDVNAAINLARQGLAGTSSVTGRGGEVRPSQQNLAGEAHPDEASTDTPPDVGA

SEQ ID NO: 27535 - protein, 391 aa, Aphanothece sp.
MKQVLTLVVKLQPTSEHRQLLDDTAKAFADACNYINQNVKANLTNRNSIQAVCYQDVKERFGLTANHVVRSCARVGANRLTAKHKGKTVKGFKPTSFDCDTRTFRFIEDGYLVGISTIGKRIKIPMRVSNYHIGKLSGQNPTSAQVCQHKNGDWYIHIQIKNDVPKPINTNNVIGVDFGRRDIAVTSTGKSWSGKEIQDKRDKFNRVRASLQKKATQGTRSTRRRCRQILQRLSGRERRYQAWLNHNISKAIISEAKQSQSIVAIEDLTGIRERTNQKPRNKTERRRANSWAFYQLRTCLEYKGIKEGIEVIAVNPAYTSQTCHCCLHIGLRNNKSFKCSTKACGWIGDADENGSLMIALVGQSVRLPRGSNLLACPVDLGLQKAHDLAIA

SEQ ID NO: 27536 - protein, 379 aa, unknown
  TnpB Polypeptide
LLLAYKYRIYPNKEQQIFIEKTFGCCRFAYNQTLAYKKDLYEKEKKTISKFDCVNYCNQTLKPLYPWLREVDSRALINSIFHMNTAYQNFFKYNAGYPKFKSKHNNYQSYQTNFNGYKNIYPDFPSNRIKLPKLGWVKAKLHRTFSGKIKSATVSRVPSGKYFVSILVEQPDYEPLPQNEKQLGIDLGIKEFLITSNGGTIANPRFLQKSEQRLRKFHKDLSRCKKGSKNREKARIRLAKQYEKITNQRNDFLHKLSHKLINENQVIYMETLKVKDMMKNHRLAKSIADVSWYEFSRQLQYKAEWYGRKLVKIDTWFPSSQICSNCGYQDGKKPLSIRQWTCPQCGTRHDRDINAAKNILIEGIKTAENAGLAHENLSH

SEQ ID NO: 27537 - protein, 373 aa, unknown
  TnpB Polypeptide
LFIAYKYRLYPNKNQQQFFQKCFGCVRFIYNRMLADKIQYYGEHKKMLYNYPSQYKEEFPWLREADSYALSYAQMNLQKAYQNFFKRPEVGFPKFKSKKDNHKSYTTYNNKSIIRLTEKYVRLPKIGLVHMKKHRELEGLIKSATISQTPSGKYYVSILVKQEDKEKLPFTEKQIGIDLGIKEFAITSNGEMIANPKYLRKTEKKIQKLQKNLSRCQKGSKNREKARVKLAKAYEKITNQRKDFLHKLSIKLIRENQTIVLEDLQVKDMMKNHQLAKSIADVSWSEFTRQLEYKANWYGREIIKVDRWFPSSQICSHCGYQDGKKDLSIREWTCPICGTKLERDVNAAKNILHEGLRIKTAGHVGLAYDNLSH

SEQ ID NO: 27538 - protein, 409 aa, unknown
  TnpB Polypeptide
MQLRYSFRVYPSAGQCVALAKAFGCARVVFNDALRAREEARCAGLPFVTSTELSKRLTAVKKTPERAWLGEVSAVILQQSLRDLDAAYRNFFDGLKGKRPKIGAPRFKSRRDPRQSIRFTANAAWRITPGGKLRLPKIGDVALRWSRTLPSTPSTVTVVKDSAGRYFASFVVETDASEVLPETTPEVGIDLGLGHFAVLSDGRKIDSPRFLRRAEKRLKKAQRDLSRKEKGSKNRDKARVKVARAHARVADARREFHHKLSTRLIRENQAVAVENLAVNGLARTRLAKSVHDAGWSAFVNMLEYKAARYGRIFVKIGRFEPTSQVCSQCGVKDGPKPLSVRVWTCGECGAVLDRDINAAVNVAKAAGLAVTACGAQVRPGLIPAPRSEAGTHSKRLAQSVREQTGVPGF

SEQ ID NO: 27539 - protein, 259 aa, Geobacillus sp.
VKVEKKGSFYTVSFPTLEKRIGVPVVTRPYQEAWLNRLLDGTVKQGAAKLYKKRTKWYLAIAITFEVKPRHETKVMGVDLGLRYIAVASVGTKSLFFKGSQCAFVRRRYAALRRTLGQAKKLQMIRKIGRKESRWMKDQNHKISRQIVNVALANGVGVIRMEALTGIRKRATSAKEAGRSLHAWAFHQLQTMIAYKAEMAGIRVEWVDPTYTSQTCKCGHREKANRNGIRFRCQRCGYTLHADLNGAINIAKAISGFAA

SEQ ID NO: 27540 - protein, 177 aa, Geobacillus sp.
MERRTLPASKAKKHPNQSYTAWCNAPKKGRPSIEVDGHRWKLPKLGWVAFAKGREVEGRILSAAICRNRTGKYFVSILVETEIPPWPTTDKQVGVDLGLKHMVVLSTGEKIEHPQHWRRYEEKLAYWQRVMSRRKLGGSNWQKARLKVAKLHEKIANCRNDFLHKRSTRLIRENQVV

SEQ ID NO: 27541 - protein, 227 aa, Geobacillus sp.
LNDPEKASVGTKSLFFKGSQCAFIRRRYAALRRTLGKAKKLHMIRKIGRKESRWMKDQNHKISRQIVNVALANGVGVIRMEALTGIRKRAKSAKEAGRSLHSWAFHQLQTMIAYKAEMAGIRVEWVKPTYTSQTCKCGHREKGNRNGIHFQCKQCGYTLHADLNGAINIAKAISGFVAEPSALVTGAPPMGIHRNPMGRGDDTPLKLLRCLNQKWRRTQTTQESHAL

SEQ ID NO: 27542 - protein, 94 aa, Geobacillus sp.
MQKNHKLAKSISDSAWERFLNMIEYKAKWYGRTVVRVGSTFPSSQLCSCCGHRQVEVKSPDIREWVCPTCGAEHDRDHNAARNILQEGLRLLSL

SEQ ID NO: 27543 - protein, 391 aa, unknown
  TnpB Polypeptide
MLNYKFRLYPTKEQEERLVDVLEINRIVYNYFVLNNFRNRNDMNYALTELKEQQPILRNYHSKMLQMISTKVAAAWSGLEELKKRGLEAGKGKLKLLKEDQCQSFTYNQFGFRIKQDAVDAKCLLWIAKIGHIEIRIHSHRRPINIKQITIARQARKWYAVVTCDIIRKIHCTLKYRRPIGIDVGITNYAYDSDGNHTDNPLFLSEELKLLRRVHRKVSRRKRGSNNYKKAVSWLQRLHQRIANKRKNFLHNLSASYCKNHDLIFVERLKINNMNKNHRVARHIMDSSWGMFKQMLRYKANRLVEVEPFNTSVECSRCGNHVPKALAIRIHECDRCGAVVDRDHNAAINILQKGIKLLQPLPMQHGEVTPAETLSVVVEAGTSPRALAVGS

SEQ ID NO: 27544 - protein, 461 aa, Bacillus sp.
MNSLRKVVKTMARNKAVKVLRKQKKRENIQRFTQKQNIGRACLTAKEFRLLQRMSHSSKALRNVGLYTIKQSYLNHNKIATVKEVDTAMQADMNYWGMQSNSVQAIRRALYAEVKSFFKALEQWKKKTENFTGRPKFPNYSRSTDKRIIEIYQVPKVDENGYWMIPMSVAFRQKFGSIQIRMPKNIRNKKISYIEIVPKQKGRFFEVHYTYEVHVSQMKKQSTTTSNALSCDLGVDRLVSCVTNTGDTFLIDGKKLKSINQYFNKMIRNLGLKNVENGLSKRVVTNRMAALWHKREKQINGYLSQTVGLLFKKAKEFDIDTIVVGYNAGWKQKSDMGKKNNQKFVQIPFHKLIAAIENKCIKEGIRFFKQEESYTSKASFLDKDPVPVWSKEDRTHYHFSGKRMTRGLYQSKAGTCIHADINGALNILQKSKVVQLDDNLKVKTPILLEVQKRKAVALCIP

SEQ ID NO: 27545 - protein, 298 aa, Acidaminobacter sp.
MLVHKAYRFRIYPNEAQKVLIVKTIGCSRFVFNHFLSAWNKAYEETGRGLTYNTCATQMTLLKREKAFEWLREVDSIALQSSLKCLEDAFKRFFKKQNDRPRFKSKKNKVQSYTTKFTNENIGIVGNKIKLPKLGLIKFAKSREVEGRILSATIRRHPSGKYFVSILAEVEIHEIENTGSVCGIDVGIKHFAKVSDHTERENLKCFRKYEAELAKAQRVLSRRVKHSKNWEKQRVKVAKIHEKITNARKDNLHKFSYEIIKNHDVIGIEDLQVSNLLRNHKLAKSIADASWSSFISML

SEQ ID NO: 27546 - protein, 605 aa, unknown
  TnpB Polypeptide
LDQAHDRDPQAPPGLRPRRVRGAELLQPQRAGVRPGVHRSNPAAGRCRSRRPRPLRQQPVQVPPAGGARPAPVQGDNSGGVHGRGDLPAYRGPQLPAHAPRPRFLLVPASRAAAGTPLTRFHLSTALPRGARPLPTRPTVGSSGRCFDRDCGQLRAGARVKVTQAYRFALAPSPVQEQLLRSHAGAARFAWNWGLAKCGERHRVEGKWYSGPELHRLWNTEKKADPALAWWRENSKCAYQEAFRDLDRALRGFVKSKRGERKGRRLGFPQFKKRGKCRDSFRFSTGAIRCAGRTVTLPRLGTVKTHESTRKLARRLGAGTARILSATVSRTAQRWFVSFTAEVERSIPDHHAQPGSAIGIDLGVKTLLTGADDRGNVVIIPGPRPLSTALRKLRRASRTHSRKQPGSANRRKAAARLARIHAKVRNVRADALHKATSMLAARYQTVVAEDLNVAGMARNRRLARVISDQGFGQARRMLGYKTAWNGGTLVLANRFYPSSKICSVCGTVKTKLSLSERTYLCWACGLVIGRDVNAARNLLNLAASGTERLNACGGVVRPGTAGHALVKQEPGTAPAGETGTAAWQRTATGEGTLMRTHPVTVGGQL

SEQ ID NO: 27547 - protein, 419 aa, unknown
  TnpB Polypeptide
MFRTYKYRLYPTKSQQWLINKHINACRCVYNLALETKIYAYKSHGKNLSYFDLINQLPELKKECEWLKEVYGHSLQQKIFDLDKAYKNFFNGDADFPKFKKKTSVQKFRNPDGEDVKIKGHKICFPRFQEGIRFVEDRKHEGEIRSSTISRTSTVKYFISILCETKTEFLNKKKITSKTAVGIDLGLKHFLITSDGIKIDNPRYLRESLERLKVLKHRNRNKKRGSNNSKKAFKKIAIIHEKVANQRYDFLQKLSNELVNNHDTICLEDLNIHGMSARCKPKKDEQGNYIPNGQSAKSGLNKSITDAGWGMFVEMINYKAEWKGKNVLQMPRFQASTKICSKCEHKQNLTLAQREWVCEHCGTLHDRDENAAKVIKGFCIKNSGKVIPAVSVEMLAQAKSMKQKVKKVSKLKYPKYDIT

SEQ ID NO: 27548 - protein, 445 aa, unknown
  TnpB Polypeptide
MKSVVKIGLEVTEAQAAILDSQSKIANWLYNKLLETANDLRHQYRAAPDQERRDQIGLVLYTERGLRNLIPGLKREHPFLKVVYSSVLKNAALRLSQAIRDYQDGKHGRRANQVNWPTFRAWKRSWFSLQYDEPHKGYRLAGRTLTLVLGQDVTGKQLTIELQLAEALPHWVNSDHIRQCRIVKEGHRYSIVFTVQRVLPNGKPLRPDNIVALDPNHKNCAYAVGSDGKATEIHNPYFLKILDKRIDQLKSKRDTCKKKSRRITRPDGSQFWLPSHRWMMLNARLQDLYRIRREQTKQFLYTVANRLYHDYDAVGIGDYVPHGGGLTRKMRRAMNNQSLNRRFKRVLAWVALRSGKSYLEWEETGSTRTCHDCGHVVAGGIPPEIREWDCPRPDCTSHHLRDENAARNGLNRTLKALGLPCSGRREVSSRRAWRFNGLGLTSGVR

SEQ ID NO: 27549 - protein, 451 aa, unknown
  TnpB Polypeptide
MKTPNASAYSSPAVDVICFAIHLDYLTFVKMTLRRLIASWSNIFFLYLIEDQLDMKFKNTVSAVSNIAGKGHRRMIQGLAMSRLTFKYRLYPNRQQQEKLQATLDVCRELYNAALQERRDAWASHRKGIGYVAQANQLGSIKEVRPDVAAVYSQVLQDALRRIDKTFQSFFLRVKHGQVPGFPRFRSKNRYDSFTYPQAGFSLNGRLALSKIGNIKIKLHRPIQGEIKTLTIKRENGHWYACFSVVVEPHPLPQNGKVIGIDVGLSSFAVLSDGTEIENPRLLKKQQKRLRRAQRRVARREKFSKRWKEAVRIVAKIHRKVFNQRNDFQHKLSREIVNNYGLIAVEDLNVKSLSRGMLAKAVHDAGWAAFFSKLSYKAENAGRLLVAVDARGTSQRCPCGEANIKVLANREHVCTTCGLATTRDHASAIEILRLGLSLQAQTKSEVETCAA

SEQ ID NO: 27550 - protein, 181 aa, Acidimicrobiaceae sp.
VTTLKQALGKLKAANQALVRTTPGSKGRQRARARLANTHREVVNTRRHFVHQASGALVDRCQILVIEDLNVAGMVRNRHLARSISDAAMGDLSRQLLYKARWHGVEVRVADRFFPSSKTCSGCGEVRNDLALSTRIYSCEICDLVIDRDLNAAVNLARWQPREHAVVTPLAPTRAALLSTA

SEQ ID NO: 27551 - protein, 482 aa, Mycobacterium sp.
  misc_feature (362)..(395): Xaa can be any naturally occurring amino acid
  misc_feature (436)..(469): Xaa can be any naturally occurring amino acid
MARFEVPEGWCVQAFRFTLDPTEDQARALARHFGARRKAYNWAVATLKADIEAWRVTGIGTVKPSLRVLRKRWNTVKDEVCVNAETGAVWWPECSKEAYADGIGGAVDAYWNWQNSRSGKREGKTMGFPRFKKKGRDQDRVTFTTGAMRVEPDRRHLTLPVVGTVRTHENTRRIERLIATGRARVLAISVRRNGTRLDASVRVLVQRPQQPNVAQPGSRVGVDVGVRRLATVANEAGAVLEEVPNPRPLDAALKELRYASRARSRCTKGSRRYRERTTEISRLHRRVNDVRTHHLHVLTTRLAQTHGHIVVEGLDAAGMLRQKGLPGARARRRGLSDSALGTPRRHLSYKTGWYGSALVVAXXXXXXXXXXXXXXXXXXXXXXXXXXXXXXXXXXPLVPVVKRGADRKTGPCPAGGCEARKGGSRMAAEQPRDGVXXXXXXXXXXXXXXXXXXXXXXXXXXXXXXXXXXSRVTTKDRSLATA

SEQ ID NO: 27552 - protein, 263 aa, Synechococcus sp.
MLAGSNPKAATLIKRKDGSYYIQICVEKKPPKQQDTDKVIGVDLGRTDIAHTSEGDHWNGQQLNKVRDHYSRLRAALQRKASKGTRSSRRRCRELLQRLSGKERRFQAWVNHRISKAIVSRAKATNSAIALEDLTGIRERVNQQPRNKAERRRTNSWAFYQLRQFLEYKARVAGVSLILVPPAYTSQTCHKCLHIHPDPAQSYRSGKSFKCGHCGWEGDADLNGANVIALLGAVVNQPRSSGLFCSLVEQSRLRATESPLRTA

SEQ ID NO: 27553 - protein, 395 aa, unknown
  TnpB Polypeptide
VEKSPYYAITVRRYNILFRHIAWLQETQELYNEILLFYYRLYLDFFSEKQPGALETLRILEKMTIPGRDKQPVPYPLPWQKVPLYFRRAAINAAIAAARSYLARTDQASPTEHFTESVTFYKGMYRDYQESEISLKLWTGAGWKWCRLRLRSNTAPTDGQMMSPSLVRKDNSYELHVPWKTPVQDGRNLKARLESGEKICAAVFTGQDACIVCCILNRKGEWENCLFVKGGSKYAHACRQLWEKIDKSRSSGSQGNDPRANHRYWVKLKNLHEHYAHQFSRQVIDYCQKHNVSILVLPEYDKEYARIIYGTAGPASPLRLSNSIREKLKYKGWQQGIVTTEVQQHDISSVCAVCGGKIKQKGAEFVCENGHRGNAYLNMAQNLGKKVKPIDEKTD

SEQ ID NO: 27554 - protein, 367 aa, Chloroflexi sp.
MRRKPKGLQNTLQVRLYPTREQGCMLIAHCQEYIRTVNVLASALDADLIPHDDTFSTKDFVTALPSCVKNQALRDARSVFKRSLELDVLPVLKKPICQWNNQNWSLGQGILTVPVSLNGKTQHIPIRCAEVKLSGLPGLLRIKKKRGKWIADITMTLPKPKPIEQDGVMGIDLGIKVPAVTYIGSTGTRFFGNGRKLRVRRRQFYARRKKLQKAKKTRALKKSQGKEARWMKNINHQLSRQIVNHAHAQGVGTIKIEDLHGIRKNTTRTSGGAKARKNNRMKNTWSFYQLTAFLTYKAQRQGIKVEQVDPAYTSQECPACSARNKAQDRTYVCAECGWKGHRDTVGAINISRRAGLSDQRTSATGSQ

SEQ ID NO: 27555 - protein, 309 aa, Bacillus sp.
  misc_feature (256)..(289): Xaa can be any naturally occurring amino acid
MEVNQMMINKAYKFRIYPNQAQAILINKTIGCSRFVFNHFLSLWDHAYKETGKGLTYGTCSAKLPAMKKELIWLKEVDSIAIQSSVRNLADAYTRFFKKQNSAPRFKSKKNNVQSYTTKQTNENIAVVGNRIKLPKLGLIRFAKSREVKGRILNATVRRNPSGRYFVSLLVETKVQELPKTHSDIGIDLGLKDFAILSDGTPYENPKFFRLLENKLAKAQRILSRRIKGSSRWNKQRVKVARIHEYISNARKDYLXXXXXXXXXXXXXXXXXXXXXXXXXXXXXXXXXXSFCFVNKLETNIYRYYMKLV

SEQ ID NO: 27556 - protein, 308 aa, Bacillus sp.
  misc_feature (263)..(296): Xaa can be any naturally occurring amino acid
MCWSYTGMEVNQMMINKAYQFRIYPNQAQAILIHKTIGCSRFVFNYFLSLWDHEYKEKGKGLTYGICSAKLPAMKKEFVWLKEADSIAIQSSVRNLADAYTRFFKKQNGAPRFKSKKNNVQSYTTKQTNENISVVGNKIKLPKLGLVRFAKSREVKGRILNATVRMNPSGRYFVSLLVEAEVQKLSKTQSYIGMDVGLKDFAILSDGTIYKNPKFFRSLEEKLAKAQRVLSRRMKGSSGWNKQRVKVARIHEYISNARKDYLXXXXXXXXXXXXXXXXXXXXXXXXXXXXXXXXXXLSHLLQIHLIFY

SEQ ID NO: 27557 - protein, 282 aa, unknown
  TnpB Polypeptide
LEVVFASIKDWSKNKDKYLGKPKLPRYANKNGRKSLIITNQNCKLKDGMIHFPKSFNGFVCKFYCCNRPDFVKLNQVRFLPHYNCIVIEIVYEVEITDTVKQNQNYISIDIGVDNLATVANSFGKQPFIVNGKPLKSVNQYYNKHVSKYRSIANQMNGVAYTKRMDKLTEKRNRKMEDYLHKTSREIIEYCKKYNVSKIIIGNNKEWKQNSKLSKKVNQHFVQIPYNRLIQMLEYKAQEIGVTVIITEESYTSGTSFVDNEMPVKENYNKSRKNQKRFVQDI

SEQ ID NO: 27558 - protein, 206 aa, unknown
  TnpB Polypeptide
LGITSLIATSNGDKIANPKHFKKHRKRLKKAQKNLSRKQKGSKNREKARIKVAKIHLKISDNRIFFLHKLTTQLVRENQTIAVESLAVKNLVKNPKLAWAISDSGWSELIRQLDYKCRWYGRKLVAIDRWFPSSKRCSHCGQIVDKMPLNIREWICPSCGCNHDRDVNASKNILAAGLAVSVWGASVRPEQSKSVKASAMKQKLKS

SEQ ID NO: 27559 - protein, 179 aa, unknown
  TnpB Polypeptide
MEKAHRYRFYPTPEQESLLRRTLGCVRLVYNKALHERTQAWYERQKRVGYNQTSSMLTQWKQEEDLDFLNEVSCVPLQQGLRHLQTAFTNFFAGRTKYPNFKKKHQGGSAEFTKSAFKFKNQEIYIAKNSEPLPIKWSRQIPKGCEPSSLTVNLHPSVGTSRLGLMLQRFNLCPLATIL

SEQ ID NO: 27560 - protein, 192 aa, Okeania sp.
LSTGEVFDGALSYKKLESKLSRLQYLNRHKTKFSNNWKKAQLKIARLHKKVADIRKDTLHKLTTYLAKNHNPPPSPPGRGARGVGEDLNVSGMMANHKLAKAVADMGFYEFRRQLEYKCQLLGSELIIVDRWFPSSKTCSNCGTVKESLLLSERIFNCEHCNFSCDCSATLARTRLECSVKFSYGGQFAPQR

SEQ ID NO: 27561 - protein, 291 aa, Calothrix sp.
MLRVVKVRLYPDVQQQQSLAQAFGSCRWLWNYCLNLMNQTYKETGKGLSGYAVKKIIPQLKKQYEWLTLTYSQCLQQVCLNLGVAFNNFFEKRAKYPRFKSKHGKQSIQYPQNVKVADNYLSLPKIGEVSAIIHRPIDGKVKTVTISKNCSNQYFAAILFDDGKDKPLANTEGKAIGIDLGLTHFAVTSDGSKFDNPRILNKHQKNLKLKQQQLSRKQKGSNNCIKSRKKVARVHSKITNCREDFLHKLSRRIVNENQVIVVENLNVKGMMQNHCLAKSSRALDGECFAQC

SEQ ID NO: 27562 - protein, 306 aa, unknown
  TnpB Polypeptide
MRVRTAYRCRAYPDPAQQQVLNRTFGCVRVVWNRTLAARNGRWHADCKGTSYAESDRALTAMKKDPELAFLSEVSCVPLQQALRHQHQAFTAFFGKRARYPRFKSRHSRQCAHYQRRLARCQNGSANRAKAAAKIARAHRKVRHTRQDFLHRASTRLVRENDLIVIEDLAVANMVRNRHLARAISDCGWGEFRRQLEYKCQRYGRRLVVIDRWYPSSKTCSACGHRLADLSLSTRQWTCPSCGTRHDRDINAAKNILAAGRAVAPGSPGDACGAEVRHSGSSRVRSAAKQEPRPARAGIPVLQSGE

SEQ ID NO: 27563 - protein, 474 aa, Moorea sp.
MGKKSQRKTKKSQPQPLIRTDVWRLVTTPEQKEMMLMTVTCYRKYLLPLVLIVNAQWSNLAPLSSLELVLAVEKMIHVTTANPNPKHSYYQKIVNKYPDHRKFPSYLRRAAIAEAIGIVSSFQTRYRSWQSGNRKKRTAKAPRLTAMCKTYPALYKGQQILYGKDYQTVALKVWSGKDWIWLTNIGVKNHGNNRHLVEGNKLKSPSLVVNKTKCQLSMPVQIKPVKREETDYVCSVDLGINNAATAAIVGRDGTVKARTFINPARDIDYRNKRRMMIAKKAKQTSNLTGQTLPKGFCGGLNRKSANQNLEISRKVARQIVQFAKVHGVKVMVLENLWGWKAKAGKKRSLMKQKFHLWCHRKIVEIITDKWTELGGKVQTVNPKYTSAVAFDGSGKVRRSQTNYSLAKFKSGKQYHADLNASYNIGARYWYCLIVGDKNFSRVYDSKSSDGTLRTPIVLGTLRNLAVQERMNPHP

SEQ ID NO: 27564 - protein, 414 aa, Moorea sp.
MRAAYQYRLRLTKTQVIQLEKWLEMLRCQYNYLLADRFAWYEQNRCSINACSLVCHLPELRDNPDYYSQKRTLPQLKQNRPWYGEIHAHVLQDCVKRVDLAFKRYLKGDCNGRISGRPRFKGKARYRSLTFPSLGKNPIDGHRLKLPKFGWVKMVYHRPIPDGFKIKTATITRKADGYYITLSIQDDTVPELIPVDSAKPTLREQVSNPVGIDMGLKSFLIKSDGTEVEIPQYYRKAQKRLKKIQKAVSRTRIGSNNRKKAVTKLGKAHKKVADTRKDFHFKTACGLLDDHDLVAHEKLNIKGLARTKMAKSVLDAGWGQFLSILSVKAENAGLLTVAVNPKNTSQNCSNCGKKVPKKLKDRTHSCHHCGYIADRDVNAAKNILKLAVGHPVRSKAYRVTQAMAGVGKKPALSR

SEQ ID NO: 27565 - protein, 379 aa, Kamptonema sp.
FGNSRKCLVDRCSLEKEYILSPELKFKSEIQQLNNLPKAKKEFPRLSEVPSQVLQQTIKQLHKGWEYFQKRGFGAPRFKKFGQFKSLLFPQFQENPVTNLHVKLPKIGAIPINLHRPIPTGFMVKQVRILRKADKWYASISLQCDVSVPDPMPHGHPIGVDVGLEKFLATSDGVLVKPPKFFKQLQSKLKLLQRRLSRKKKRSKNYEKQRLQVARLHHKIDNTRKDFHYKQAHALCDAGDMVFMEDLDYRITAKGMFGKQMLDAAFGQFRSIVKYVCWKRGKFFSTVDAKGTSQQCPECGEEVKKDLSVRIHDCPHCKYKTDRDVAAGQNIRNRGIKLISTVGQMGKETACADELPGAGVIQSRQVSQPRQGKTRKPKK

SEQ ID NO: 27566 - protein, 364 aa, unknown
  TnpB Polypeptide
MPSYFRRAAVQHALGSVSSYRTRLEQWKTEGQKTGKPYLKSEQYAMPVFYHDVMYRENTEEKDAAFLKLYDGHDWKWFAVRLKHTDMEYLRKHWSGKKASAPTLEKKHHKYFLRFTYAEEVSLNQTPVKEQTICSVDLGINTDAVCTIMRPDGTILGRKFINFPSDKDRMYRVLGRIRRFQREHGSRQVQGKWAYAKRLNTELGRKIAREIVLYASENKADVIVFEYLEMKGKLSGKKKQKLQMWRKRDIQKRCGQQAHRKGIRISRICAWNTSRLAFDGSGEIARDIRDHRLCTFQTGKRYNCDLSASYNIGARYFIREILKPLPETERSLLEAKVPAVKRRTSCVYADLRELISEMELRKAA

SEQ ID NO: 27567 - protein, 367 aa, unknown
  TnpB Polypeptide
MLKAYKYRIYPNKEQKIQIVKTFGCCRFVYNQTLSHRKKTYENKKRTISKTDCNNYCNRELKKEHEWLKEVDKFALTNTVYNMDAAYQKFFREHAGYPKFKSKRDNHKSYMTNYTNENIVVDFEKGRVKLPKLKTVKAKLHREFQGQIKSATVSQVPSGKYYVSILVETEHKELTHTKQNIGLDLGIKDLCTTSDGEKYENPKFIKKYERKLAKLQRQLAHKEKGSNNYCKQKKQIALCHEKITNTRKDYLHKISHKIISENQVIVSENLQIKNTVKNHKLTKSITDASWYELTRQLGYKAGWNGRRYIKTDTFYASSQICSVCGYQNANTKDLSVREWVCPICGAKHNRDINAAKNILEEGLRQIA

SEQ ID NO: 27568 - protein, 386 aa, unknown
  TnpB Polypeptide
MCKHKAYKFRIHPSDEQKTFFAKSFGCVRLVHNLMLHDRIVAYETKKKTPGLRMKLPTPAQYKTDYPFLKEVDSLALANAQLHLDKAYKNFFQDKSFGFPKFKSKKNPVQSYTTNNQKGTVRIMDGKYLKVPKLKSLIRIKLHRQIKGLIKSITLTKKPSGKYYVSILCEEEITEMPKTNATIGIDLGITDFAILSNGDKSDNNRFTAKMANKLTREQRKLSRRTRLAKEKGIQLLDAKNVQKQKVTVARLYEKVVNQRTDYLNKLSTDLIKKHDVICIEDLHTKGMMRNRKLARSIADVSWSAFVAKLQYKADWYDKQLVKISRWYPSSQICSTCGHLDGKKALSIRTWTCSVCHTHHDRDVNAAKNILAEGIRLLSTQPQGLRG

SEQ ID NO: 27569 - protein, 375 aa, unknown
  TnpB Polypeptide
MQLSETVKLFPTSYQKALIATTMAEYISTVNGLVSYAVNGHSIAKTTSADVSANLPSALKNQCIRDAKSIVKKHYKQCYAAVAKNRSLAKRGSAIRVKASRLPVLHKLCCYVNNQNYRVRDNRIDFPVMVNGKSKRISVPVKLTDRQKSLFSNAKLGTMRIVVKNRVLVAQIVYEAVEPELKPDGNIMGVDLGIKCPAVSYCSDGSIKFYGNGRRNRYMRRHYAYLRRKLQASKKMKAVMRINDKEQRIMRDIDHKLSHDIIKTAIAHNVKIIKLEQLQNIRSTTRRSRKNNHSLHTWSFYRLAKFIEYKARLSGITVEYVNPAYTSQRCPVCGSIHHADDRNYTCECGFHIHRDILGAMNICNSTEFVGNRQTA

SEQ ID NO: 27570 - protein, 446 aa, Natrialba sp.
MALEVVDRTLVASIRNQREVQPDLDALGFAASKLWNVGRWTCDRVWSDTGLIPEESDLKAHLKTHERYADLHSQSSQRVLEELAEAFDSWKGKRRNGDSKANPPSYRKHNDDHPRSTVTFKAAGFKVDTKFGRVRLSKGKNLKEHWSDFILCDIETRADVDLDDVKSVQQVRAVWNASSSKWEAHLVCKVEVEIPETPGENTVGVDLGVNNFAALAYEGGHAELYPLNCLKQDDYYHSKHIAHCDDSTSDRATRLNAKKANRRTHYFHALSKHIVERCVEGNVGTIAIGDLGGIRENEDGDVKDWGKHGNLDLHSWAFDRFTRMLEYKAESEGIAVERVSERDTSKSCSCCGRKRKANRVERGLYVCDECGMVANADVNGAENIRQKVTPNLATDGVDETQSVSSAHQNAKRSEDGDRSNGWLAQPSTFVFDSESGCFAPRERVGS

SEQ ID NO: 27571 - protein, 180 aa, Clostridium sp.
MKRGDKMLKAYKFRLYPNEEQKTYLAKTFGCTRFIYNKMLAERIKSYEENKDLDIKSVKYPTPAKYKGEFEWLKEVDSLALANAQMNLDKAYKNFFRDKSVGFPRFKKKSNTNNYTTNNQNGTVSIENNHIKVPKLKSMIKIEQHRRFNGLIKSCTISQVPSGKYFISILVDTEIAQLPK

SEQ ID NO: 27572 - protein, 413 aa, unknown
  TnpB Polypeptide
MKLSFKFKPNISKKQLEIIEELSYHTTKLYNIINYDLRENGAKTYYDIEKEYKSNWHCDFLHSHTRQQMFKVLEQNWKSYFASVEDFRVNPSKYKAKPRPPKFKNIDKNKNEIIFTNLAIRYDNGLLKLSLSKTIKSLFNVESLNFVVSKKLQSIINWNSLQQARFNYDKVQKCWYLIVIYNKKELENNKTNICSIDLGLDNIATLTFKYGLNQYIFCGKKLKSINSYTNKQIAHLQSIEMFKYGSDKFKNTKRINKIRRYRNNYINDYMHKVSKSIIDKAIENNVGKIVIGNLKGIKQNMDFNKSFTQIPIQRLAELISYKAKLQGIKVKFQDESYTSGCSALDLEVITKKNYDKSRRIVRGLFLSSYGLINSDINGSLNILRKSEKCIPDLIKLKRDNGKLDSPKRIRVAC

SEQ ID NO: 27573 - protein, 454 aa, unknown
  TnpB Polypeptide
MLFFLLKDGIQGNKGAFMHLPGKSECPLFHMSMLHVSRKKRRVSSSPLGSQVHRNRRRKPRPFKAGEECGVPYLGQGLGVLLLIDNSSQWMYICSMKQTMLLKLAPTTEQHQALLSTMRAFNEAANSVASVAFAEKTANKFELQKLVYGELRTTYKLPAQLALRAISKACEAYKREKSIQPTFRSEGCVVYDERVMSFKGLTHVSLLTLAGRVHVPFRIGTYQAARLDAIKGQADLLYRDGVFYLAVTLDVPTPEPTDTSGTLGVDLGIVNLATDSTGESFSGQAVEANRKRHHALRQRLQKRGTKSAKRHLKKLSGKEARFKHNTNHVISKRIVQKAKANGQDIAIEELRHIRKRTDSTVRRSQRNRHSSWAFGQLHSFLSYKAALAGVPLYAVDPRNTSRTCSACGYSAKENRKSQASFVCQSCGLSMNADINAAINISRASVMEPIAAGRA

SEQ ID NO: 27574 - protein, 443 aa, Ktedonobacterales sp.
LPSDIPRLIKGRSSPHLRKAFPALLKLPSLWTRSYFLSTAGTVSSAIIAHSIERQSKVSPMPTVSKTFKYKLEPTAEQMRLLQRTVGLCNWLYNTALEQRITAWKYHRVSLTCYQQHAELPEIKEAFPEFKNVHSQVLQDVLTCLDKTYQAFFARRKTGGKGGFPRFQGSHRYHSFTYKQYQNGAYADNGFLVLSKIGRVKVLWSRPLEGTPKTVTISHEADGWYVCFSCAGVEMPALPKTGQEVGVDVGIKSFLTTSDGVHVGNPQWLRKMEKQLKWHQRRVSRRKQGSKRRKKAVAGLAKVYQTVRRQREDFHHKQSVALVKQYDVIYVEDLQVANMVKNHHLAKSISDARWAQFRAILTFKAACAGKSVVAVPPAYTSQDCSRCGMRVQKSLSVRTHICPQCGLVMDRDENGATHVKWAGQALRGVPGLPGPLSRASPRL

SEQ ID NO: 27575 - protein, 378 aa, Bacteroidales sp.
MISYKYKLYNSKRNKHLSALLRDASFVWNHCLALQKRYYRMFGKFINANRLKTYFAKRYKMCRLHSQTVQEVIERLDTAYKRFFDHIAKRPPKFKRAKDFASIVFKQGGYKIEDNRLTVNKIEKTFKFFLSRPYDGAIKRLVIKRDTIGDFYIVLVLDRPVNTIGKTHEGASVGVDFGLKTYMTLSDGSCVDNPRFLRNDLRRLRKASRRLSLAKKGSHNRERRRKEFDRIHRAIRNRRSDYQWKLAHELCKRYDTICLEDLNLSGMTRMWGQKMNDLAHAEFVTKLEYVATKYGVIIHKIGRYFPSSKLCSCGHVNKLLKLSDRSWVCPCCGEVHDRDLWASQNILRQGIAELESGSKTSKAKRGSSRVRIQESHCL

SEQ ID NO: 27576 - protein, 218 aa, unknown
  TnpB Polypeptide
LVDVPDLPVKQKNDQTEGIGIDLGVKEFAILSNGKIYKNINKTGRIKKLEKQLRRAQRCLSRKYENLKKMRKGEPTQRANIQKQKLKVQKLHQRINQIRTDYINQTIATIVKTKPSYIMIEDLNVKGMMKNRHLSKAVASQKFYEFREKLMMKCHMEGIELRIVSRWYPSSKKCHCCGCIKKDLKLSDRIYRCSCGYIEDRDINAALNLKDAGTYEIA

SEQ ID NO: 27577 - protein, 350 aa, unknown
  TnpB Polypeptide
MIVRTLKLRLTKNQETQLETWICNLTGVYNWGLKKIEHNAKDKIFFSKFDFVNLLADHGKKLDIPSHTIQGTLQQVHNAWSRCFKKIAKKPKLKGFRNKLNSIPFPDAIKPPMENKIGIPGIGKVRFHKQELPDAKIKCGRILKKASGWYLCLWLDCVNKFEVKNTNKVVGIDPGFSTLLTLSDGNKIENPRELRKGAKRLAQSQRGKRKQLTAKLLEKQANRRNDRNHKISRKLVENYATICYSDDNFKSLAKHFGESVTEAGLNNLIGMLTYKSKNCGRKIIPVNSAYTTMTCSNCGALTGPTGLSGLKVRNWECKECGSILDRDINAAQVVLNFGLGTSHSTGIPRL

SEQ ID NO: 27578 - protein, 302 aa, unknown
  TnpB Polypeptide
VYLDLSARYFKLPSEVSSSALGEPIITLEKVHLPVHYEDTQSGKPGVAWYFNLLSLDGYSPETGWVRIDTSKLASVHISSFEKRRSVQRKASKSKKAKKILAKYSRRERNRARKHQLEIARVIQSVAGVVGLEELSKHCMYTRSRLWNRMISRSDWRSISRILEERLGEAKVKELDPYGSSSFCSRCGWHNKDLNGAVFECKECGLRIDRQLNAAINLYMRLRFGYTTNWEDGRKRVELRMEGASQREWWDRVVLPSLLGGCVLTGGKRSDPDELVRFLNDAVKPKLYAYERYNDMYLSIPT

SEQ ID NO: 27579 - protein, 401 aa, unknown
  TnpB Polypeptide
MPSNTGYSITTRRLRLCCGHPEWLRKTQDFYNEIESFYYDLLLAHEELGELGSQKTLRALEVLTIMGRDKQVPQNPLPWEKVPLYFRRAAINSAIAAAKSHISRQKSIPGRKAEKLHSAVTYYKGMYRDFSHKEITLKVWTGEQWKWMRCRLYGREFPAEAELMSPSVTFEKKYLMLHVPVKEFTADTATVKQRIQEGRKICAIQFTNGDVFAVGTVCDGTGKETDVKFWGGGKEYTHRCDQIRKKIEKARKSLGGEKQPGENRKYWMHLKHLSEHYAHEISSQIIGFCLEKQVSLIVLPKYKKEYTDYVMIGSGNWSTMHLSSGIRSNLPYKAWKNGILVIETYAKGISETCSVCGAPVETANRKTDEYTCENGHRGSRSLNSARNLSHKCILQFGKQVV

SEQ ID NO: 27580 - protein, 462 aa, Blastococcus sp.
LSDPPGTIGLVTHGAVRVRLDVTDVQASVLLRAAGARRKAWNWALAKIKANADQWAAEATYGIERTDRVRPLNYFALGKLWTAERPEVAPWAGEHSTWTFRYALRDAANAHQAFLAGKRRFPRFKARRRDRARFTVRDGLALEVGRVRLAKYGWVRISSACPQQAKLRRLLRRGQAVLQHITVSRSSDGHWYATVSYTREARVPTEQCTASAGPVVGVDRGVKTTAVVATTEGRVVSQLPASRALRDRLRQVKHLQRTVSRTKKGSVNRRRAVARLGRAHARAAAVRAEALHTFTAELAREHGVVVVEDLATKNLMANRALAAAIGDQGWAELARQLTYKTARHGGQLIVADRWFASSKTCSACGAVRPKLTLAERTYHCGNDSCGHVADRDVNAAANLAAWGEHTLGLCPCVTQDGDRHPGGPTAGSSRHACGGRVSAATGQVAAVLPGEAGTSGPRLGVA

SEQ ID NO: 27581 - protein, 611 aa, Blastococcus sp.
MSSSRPRLPTHVVAPPSGVSVGSRLRVTDWEQQLLAAVGTHLSRARATDLAAAQRRERANDRQKALSARFGIHSRYAGSICVDNDAAARAVKEQLWAHQQRLQAAFRHVEARTALPSRAACCGCGKRRCHRCGGGYVTENERVMKRRRLDVLRAELAEVQRRRSEGRYGACLGGKRLATTRHHLNQAGLTERQWQQLWLRRRAWFGCVGNAGVLGGNPCLSLRQDAPDRPGEWFLTVSAPGPVRARFGCGSQVRLTHPVPLHHRREELEERLSARRAVRLDVDFTIDRRGRGRVMLRVAWVRRAQPALTLQQARLGGLVGVDLNANHLATARLDQDGNPIGRPIRIPLDLDDLPTTTRDARLREAITALLDFAATTGAQAVAVEELGFTDETTREKHGRNRRFRRLLSGFPTLAFRRRLAAMAATAGLAVISVDPRYTSKVGGRDWQRVLTGGPTAPLTSQTSVTRHHGAAVAIGRRALAHGLTAGPRGPERRSAPHQRRRPDTRPAGRGDGSTSSRSAPVRAPGAPARPTPRDRAGARAARRTPAAVSAPAPPPFGGRGPGETGRRAGRTPRIGSAAPQPHRADGTTPAGRDGCATSAHPSHPAAEPSSR

SEQ ID NO: 27582 - protein, 436 aa, Cyanothece sp.
  misc_feature (380)..(432): Xaa can be any naturally occurring amino acid
LYRAVKVRIYPTPEQSQKLSQVMGCARWWWNYALNLCNETYKETGKGLSRVALNKVLPKLKKSEETAWLSECYSQVLQSTTLNLTKAFKNFFDKKAKYPRFKSYHGKQSCQYPQNCEVVDKGVKVPQVGIIKASIHRLFEGQLKTVTITKTPTGKYYASLLFDTEQETPEVVASGKVIGIDLGLKDFCITHDGEKTSKYTNPKHLKKHEKNLARKQAKLARKNKGSKSREKAKKLVARVHERISNARQDFIHKLSRKIVDDNQVVVVENLNIKGMVRNHNLAKAISDVGWGIFVNFLAYKLEQKGGLLVEIDRWFSSSKTCSNCLYQMSEMPLDIREWTCPSCGTHHDRDENASKNIRAEGIRQISVLGTRTAAEGGEVXXXXXXXXXXXXXXXXXXXXXXXXXXXXXXXXXXXXXXXXXXXXXXXXXXXXXKEGK

SEQ ID NO: 27583 - protein, 387 aa, Mycolicibacterium sp.
VFRLRPTSRQHVALTACLDGHRELYNAALQERRDAWSHSKTRINYGDQSAQLTEIRSARPDQAVWSFSSQQATLRRLNTAFSGFFRRVKAGQTPGYPRFKGSARFDSVEWPKDGDGARWHPEQNRVYLQGVGTVKVSVHRRVEGRVKTIQIKRQGRRWMLVLSCDDVPANPLPATGSQAGVDVGIVTYATVSDGTSVPNPRWAHAAADRLETAQQRLARAKRGSNNRRRKRETVGARHRKISNRRKDFHHKQARALVARYDLLVVEDLKITNMLRRPKPKPDPDNPGQFLPNGARAKTGLNRSISDAGWGQFVSILRAKAEDAGRTWIEVDPRHTSDRCEACGHAARENRVTQAVFVCQRCGHTAPADQHAARNILRAGLAHHAHAA

SEQ ID NO: 27584 - protein, 388 aa, Mycolicibacterium sp.
LPTTEQTVLLAEHCRHARYVWNLAVEQHQHWQPGRRAPGYNEQCAQLTAARAEYDWLAGGSQTVQQQALRDFAQAMQNYFAGTHRRPTWRKAGVHEGFRQVAVKPHHIEQLNRRFGRVWVPKVGWVRFRLSRPVPEGAKSYRVTCDRAGRWHIAFAHVPEPIPSPGDGSAVGIDRGVTVSAALSSGELLHAPGLSGGESKRLDMLQQRLARAKRGSNRRARTKRAIAKLKARETDRRKDWVEKTTTDIARRFDTIRIETLDVRAMTRSGRGTPEQPGVQVAQKRGLNRGISRSGWGLLAARLQHKASGRVEQVPAAYTSQRCSECGHVAPGNRKSQAVFQCEACTAGPCNADVNAARNIAAGRAVTARGDLGVGRSTNREPQLCSPAA

SEQ ID NO: 27585 - protein, 418 aa, Halorubrum sp.
VADDYVRRTAITRLEVIDEQRDLLEDTISEWKRGCQLATDMAWGKYNAKSDVQPLAYDDVREHTDLGSQHAILATHQAAQAITGCIERKAKDKKVSKPAFTAPTVTYDTRTMTVFDDDTVSLSTTESRVRCDLALPDADDGYQRQYLNSDNWSVTESTLTVRDGDYFLHIGFRRLKTDTERNTAEDGTVLGVDLGIENLAVTSTASFFSGRELTHDLREFEKARAGLQQTGTRSAHRTLERSSGHELRYVRDVLHRASNAIISEALRYECDVIAFEDLTNIRDPTGASWGHKWAFRTLYEQVEYKAEAEGITVKQVGSAYTSQRCAECGFTADENRRTRNDFRCVKCESEANADYNAAKNIGMRYVRRGQQSSRRTGDSQLALKSGTVTPSGGFTAYPDGFEAEFMDKPHHQKSQTSG

SEQ ID NO: 27586 - protein, 372 aa, Erysipelothrix sp.
MKRNIAYRYRIYPDKTQEQLLQKTFGCARFIWNCMLADIKAYYETEKKMLYPTPSKYKKEYEWLKEVDSLALANAQLQLKKAFQRFFKDEKIGYPRFKSKHHSKKSYTTNLVNGNIVLSKMSIRMPKLGQIKIRKHREAPKDWKMKSVTVTQEPSGKYYASVLYEYENQVIKQNDTEKTIGLDFAMDGLYVNSEGYCAKMPRFLRQSEKRLKKLQRKLSKMHVKGKEKQSNRYYRQNHKVAVLHEKVRHQRADWLHKESRKLVDQYDYIGIEDLDMKAMSRILHFGKSVSDNGWGMFVNMLMYKAEMVGKQVIKVDRMFPSSQKCHVCGMLNPMTKDLRIREWDCTVCGSHHNRDHNAAINLKTEAQRIALL

SEQ ID NO: 27587 - protein, 315 aa, Herbidospora sp.
MANFFGGTHRRPAWRKRGQGDGFRIVAVKTGDVRRMSRNVGEVRIPKVGWVRFRWSRAVPGGVKSYRVTRDRAGRWFVAFAAVPEPIPAPGTGQIVGVDRGVAVTVALSTGETGRVPALGDRERARLSRLLRKLARAGRGSVRRGKVRAAITRLRARETDRRRDWIEKTTSELARRFDVIGIEDLNIGGMTRSAKGTPKAPARNVRQKAGLNRGILTAGWGRLAGRLEDKAPGRVVKVGPAFTSQTCNACRHVARRSRDQALFRCVACGHQDNADVNAAKNIRDIAAGLAVNARGGDRDAGPVKREPQRDLLLMR

SEQ ID NO: 27588 - protein, 433 aa, Gordonia sp.
VILGCEIGLLSVMRVNMSGMSIVQRVYPVEGAPLDVLVMHCDHARFVYNLGLGQRSWWTASRRHFRQKINYVSQAADLTEARREFDWLRAGSTVVQQGALRDLDRAYANFFARRAGYPKFKKRSNDRQGFVIRDLSVRRINRRWGEILVPKAGWVRFRVTRAWTDITAATSARMSVSHGRWTVSLTTPAAPRCTATTSAVVGIDRGVANSIATSDDRMFHAPGFTAGEQARFVALQRRLSRQVKGSTNRDRTKAKLGKMRLRLADRRGDWIEKTTTDIACTYSAAAIENLPIRNMTRRVTPKPDPDNPGAFLPNGGRAKSGLNRAILASCWGKFAQRLEHKMAVIRVPAAYTSQECSNCGHTCPENRDSQAVFRCQACGFEHHADTNAAINVRDRGFNIEHQPEDIGGLGASDTGHRAAPTGRHRKVPESSVA

SEQ ID NO: 27589 - protein, 404 aa, unknown
  TnpB Polypeptide
MTLPVRARATARVEAVAPEGGERLLVEFLRVYRDAVQLVVNEIWKQDKIPSIKKLHVMFYSKLRALGFRAHHVSEIYKRAREVVEATKKNKGSKPVLKKLTARISTYDYRIDFNTKTLRVAVLNEQWVELELKWYSYLDKYLDGSWRLGEIQVSYRDGRIYVYLTFSKEVQLREPKTIMGVDINFNNITYTIVDLNGNLVSMGVILFRGLSKALHLKKLAEKLQKKYPRSWRFLRWVREIRARWLRRARNILLDSSHYIAKKIVEIAKEYSATVVLEDLEKLRERANGDMFSWELQLWCYRRVQSFVEYKALVEDIKVVYVDPRRTSKTSPNGKPLVFINYRFVKLGDVPTTRDVIASWNLALRGLKQMRGSRVTLTPDSSVNAGMKNPTQHGEPRGIFTSIRK

SEQ ID NO: 27590 - protein, 433 aa, Thermococcus sp.
VKIILTYRMNHEWNVRELLNEYQKLLQHATDEIWENTIWKEKKVKHRYPPGNGNWNYYETTRLIPYFPKSNEFKRELRNELLKNWPFAKHYVDSAIKTAYSILESWRQNYLKGRRRRKKPIVNRKFVRVKTTLMKVDGSKIRITVKPREEYLELDYSNEWFYERIKGWKTGELIIRENDILLTFSREVEFSGRVKIGIDSNLMSLDIYHPEKGWIKVDLSELHRIAETYDRIIDRLKSIQKKAPKRIGRLLEKYWARRRNRIEDYLNKLAVQLSREFLDAVFVFEELDKSNMLKNGSRKFNRKLSRSTWSKIVQKISYRVPVEFVNPAHTSSTCPKCGSRLESRNGLVECPNCSFVGDRQFVGAFNIWMRGLGVALSGVKANDLLPNEPRGELRLVKPKSVVRVNLNGKVFTHKPPKNSRRTDPQILKGASAN

SEQ ID NO: 27591 - protein, 456 aa, unknown
  TnpB Polypeptide
MFDGPGHPNRHRRVDGSFPEGVRPVRLAYRAELRPTPRQRAAFMQHAGNARDAYNWGLRQNQKAYEQWVDEGKPAKWKGWPNAISLHREINLLKKLPKDEGGKPYLYEASKCAPQEALRDLDRAFRNFLAGRAKYPRRKSRNRGIGGFRLTGTIRADNRTIQLPVIGRVRFQPGERGYLPWGQHSQVSVTEQAGRWFVSVVGPEVEEAKPNGKEAVGLDLGVARLATLSDGTVIANPKALASGQRKLKRLQQEVSRKKKGSANRRKARAKLAVAHARVRNVRRDALHKATTSIATRFGRVIIEDLRVKNMTKGGGSRKRGLNRVVLDAAFGAFRSMLEYKGKLYGCSIEAVPPHYTSQRCSSCGHVEKGNRVSQSDFLCLSCGHEANADLNAAINILVAASSSDLTKNACGEDVRPSVSLAMRRQTSVKQEPGISLRGELDRGPSSQEAAAIPGFT

SEQ ID NO: 27592 - protein, 429 aa, unknown
  TnpB Polypeptide
VRLSYRSEIRPTPRQRQALLQHAGNARWAYNWGLRQHREAYEQWVELGKPKRWKGWPNAISLHRALNVLKKADPEDGGVPWMYSASKASPQEALRDLDRAFKNFLTGRARYPRFKSRNRGIGGFRLTGTIKADHRTIQLPMIGRVKFQPGERGYLPWGKHSQVSVTEKAGRWFVSVVGPEVGEVKVDGPAVGLDLGVARLATLSDGTVIENPKALATGQRKLKRLQQEVSRKKKGSANRGKARAKLARAHARVRNIRRDALHKATTSIATRFGRVIIEDLKVKNMTRSGRGKRGLNRVVLDAAFGEFRRLLEYKGKLYGCEVVAVPPHYTSQRCSACGHVEKGNRRSQSDFLCLSCGHEANADLNAAINILVAASSSETENACGEDVRPSKPPGARRQTSVKQEPGTNLRVGSVRGPSSQEAAAVPGFT

SEQ ID NO: 27593 - protein, 214 aa, Klebsiella sp.
VKLDQTNNRISLPKLGWIRYRNSREVIGEVKNVTVIQSCGKWYVSIQTEYEVPEQVHKAASMVGLDAGVTKLATLSDGTVYQPVNSFKASQRKLAMLQRQLSRKVKFSASWQKQKKKIQRLHSHIANIRRDYLHKVTSEISKNHAMIVIEDLKVSNMSKSAKGTAERPGRNIRAKSGLNRSILDQGWYEMRRQLEYTYRKLKNQSIPLSTPYAT

SEQ ID NO: 27594 - protein, 199 aa, Burkholderia sp.
RSGVDRQLLPRVRITFATLSTGEKLPNDPFGRRAAEKLAKAQRAHKHKRHSAKLHAKMANARVDFQHKLALDLVRRFDYIAVGNVSAVKLARTRMAKSVYDASWSSFRNKLRYKAIAHGALFEEVDESGSTQFCSACGSKDSTTRPKGIAGLRIREWVCSDCGVEHDRDTNAALNILRCGRASPGVGILCLLGGGGRQR

SEQ ID NO: 27595 - protein, 195 aa, Clostridium sp.
MIPTLKNVRLKEYGYIKVGAKVISGTVSKKADRYYVSVVIDVHMPIVSKNTNEGIGIDLGLKDFAICSNGEKYKNINKTEKIRKIEKKLKREKKKLSKKYENLKKKGVTATKSNIKKQIVKVQKLHHKLDNIRTDYVNKTISNIINQKPKFITIEDLNVKGMMKNKHLSKYVPMASGEFTTVKYYTKWKYYTKCK

SEQ ID NO: 27596 - protein, 245 aa, unknown
  TnpB Polypeptide
MVCFVIDVETALSMHSMPNCASIDLGVDNLAALVTNEGHTYLYKGGIIKSINQYYNKQKAHYTSVLQSQTQEEAVSSKQLTTLNRKRYFQLKDYFHKVSKDIINKCVRHHVGTLVIGENKQWKQNVNIGKVNNQTFVSIPFDMLKKQLKYKAEQIGIQVIFQEESYTSKADFLSNDNIPSLGDKKTSFSGKRKGRGLYQSGTGIILNADINGACNILRKYDIHAFDGVSDFQYLQRPIVLSNLYT

SEQ ID NO: 27597 - protein, 332 aa, unknown
  TnpB Polypeptide
VKESLDNGELTDLSHYALLRWWNANKDVLAVNRTTGEVWWSQNSKEAYNMALHGLARGFSNWAKSRKGRRKGRRVGFPRFKSKNGVMRFAYSTGFTAPTANDPYGVKLPRIGRVHCMENVYKLVNGARLIRISVSRRAGHWYASLTVEREPAASTTALKLGAVGVDLGVKNLATLSDGTVIPNPRALGKKLKALRKAQQALSRKVMGSARREKARERVARLYARVTDARMDAINKATFMISQNYGTVCIEDLNVAGMVKNHRLARSVSDASLGEFRRQLEYKTARNGAVLRVVDRWFPSSKTCSNCGTVKAKLSLSERVFHCDACGARVLLW

SEQ ID NO: 27598 - protein, 453 aa, unknown
  TnpB Polypeptide
MQQIITAKLKLIATPDQFAALRTVQLAYRDALNAVSRYAFSQGKTSNVTRLHKGMYAELRARYHLPSQLACSVERQVAATYKGLWTKLKKNVEHRRKKITKKRFKGLDKPPKYSSPTVQYTYERDYTFQCDSRVSIGTLNGRTSIPYQGYDKHVALIRQGATIGDARLWYDKPKKTFYFLVSLSIDVSEPTCEQFTEVVGVDVGIRYLAVTSTSTGKAGFHPGKRVRHKANHYARLRKRLQKKGTRGAKRRLRRIEQRERRLKMQANHTIAKQIIQQHPHTLIGLEQLTDIQERTKRKKRRSKKNGKRSLSVSPKARKANRVSSQWAFAELQALISYKAALSGSLVIKVDADYTSKRCPMCGHTEDSNRPQKGLRFVCQNPKCGYTLHADLIGARNVTLRTLLIRQDWIRTGCVSTIPDASDNEAKAARLKRYAELRWSPEVTTSLRSLSRGR

SEQ ID NO: 27599 - protein, 349 aa, unknown
  TnpB Polypeptide
MKVMRCLKFSLELARFPKRQKLEELWIVYQKAVTDFLDRLFNRQDLSEDYIKNYQSLLSYAYKQCAKRQAFKIFKCWCRNKKKGKKPKLKNSMTLDYRFVELQKSKSKTFDYWVKIATLEKRKPILIPIKSYDYANQYFKDWELIKGGRLWKRNDKLFIIFTFQKEILLKNINKTIGIDIGYRKLLVTSEGKIVGERIKSLTEKAIKKEQGSKASKRVRNEIENYIGSCVKQVVDGNANIVLENLKNLKKNKCGKWSREVNRKFNFWLYGLVLKRLLNRAETLGVRSYLVEPQYTSQICPVCGYISELNRKGELFKCQLCQFSADADYVGSLNILQRFTHQPTVGVVSS

SEQ ID NO: 27600 - protein, 482 aa, unknown
  TnpB Polypeptide
LAVAITVEVQQREDTKAMGVDLGLRYIAVASIGTKSLFFKDSQCAFIRRRYAALRRTLGKAKKLHMIRTIGRKESCWMKDINHKISRQIVRFALANGVGMIRMEKLTRSLNHRRERRKRIFPLDGGYCAPMMNVSIPPIHREMVEQARAYIDQLTKPPGSLGLLEEVAATLAGMTGELLPRVTPPGVLVFAADHGVTEEGVSAYPAEVTAQMVYNFANGGAAINAFSRQIGALLQVIDVGVAVPIADERVIQKKVRPGTNNFAETEAMTPSEAEQALHVGYEQAASIIEQGVRTLIVGEMGIGNTTAASALLATLTDEPLERIVGKGSGIKEEMLAHKQDVIRRALLLHRPDPAKPLEWLSKIGGLEIAAMAGAMLAAAERRIPILLDGFICTVAALVARQFAVNVTDYMIAGHRSQEPGHSIALRLLEKDPLLDLGMRLGEGSGAAVAFPLLISAMAMVNEMATFASAGISTANAKGEKGR
